United States Patent Application Publication US 2005/0228172 A9 - sequence listing, part 184

SEQ ID NO: 827784 - DNA, 578 bp, Homo sapiens
tatataacatatagggccaatttatttaataggacatrtagcttaatcagatctaaacacaacaccttttaaagacaatcacttctgtgaaaaactgatggaaagaaaaaaagcaatcttcaattcttaattccacaattcgagaccattaatttttaaaaaaatattttaaagagttttaactcagtcttctaactaggatacatttttaaacactaaaatcaccattccctacattaaccgtttagggagattttcactgctgttgtattcaggaagcaatagaataaacttgaaagattgtgccctctaacagaagcagatggcctgtctgagattttgcagatcagaagtaagtctcatttaaaagcagccagaaagcaatggatggtattcaaaccctgaatgcaggagaaaaaacactgtttctagggtttatttgataaaatctgtgacatttgggcatatggatatgatagaaagaaagaattttaaagccatcattgaaacctgtccagttgaattagatgatccatttcctgtaattaagactaaatagttggtatgtgtcatgagcc

SEQ ID NO: 827785 - DNA, 578 bp, Homo sapiens
tatataacatatagggccaatttatttaataggacatatagcttaatcagatctaaacacaacaccttttaaagacaatcacttctgtgaaaaactgatggaaagaaaawaagcaatcttcaattcttaattccacaattcgagaccattaatttttaaaaaaatattttaaagagttttaactcagtcttctaactaggatacatttttaaacactaaaatcaccattccctacattaaccgtttagggagattttcactgctgttgtattcaggaagcaatagaataaacttgaaagattgtgccctctaacagaagcagatggcctgtctgagattttgcagatcagaagtaagtctcatttaaaagcagccagaaagcaatggatggtattcaaaccctgaatgcaggagaaaaaacactgtttctagggtttatttgataaaatctgtgacatttgggcatatggatatgatagaaagaaagaattttaaagccatcattgaaacctgtccagttgaattagatgatccatttcctgtaattaagactaaatagttggtatgtgtcatgagcc

SEQ ID NO: 827786 - DNA, 610 bp, Homo sapiens
aaagagtctttttgaagtatctgcaaatggatatttggaatgctttgaggcatatagtggaaaaggaaatatcttcacataaaaamtagacagaagcattctgagaaactactttgtgatgtgtgcattcatctcacagagttgaaactttcttttgattgaacagttctgaaaccctctttttgtagtatctacaaaagtatatttttagctctttgaggcttacagtgtaaaatgaaatatcttcccatgaaaactagacagaagtattctgagaaacttcgttgtgatgtgtgcattcatctcacagagttgaacctttcttttgattgattagttttgaaacattctttttatagaattttcaagtgagtattttgaccactttgatgcatatagtgcaaaagcaaatacgttcacataaaaactagacagaaccattctgagagagttctttgtgatgtgtgtattcagctcacacagttgaacctgctttatgattgaatagttttgaagctctccttctttaaatctgcaagtggatatttgtagcactttgtggtgtacagtggaaaagaaaatatcgtcacataatcgctagacagaagca

SEQ ID NO: 827787 - DNA, 617 bp, Homo sapiens
agaaagttctttgtgatgtattcattcaactgacagagttgaacccatcttttgattgagcagttttgaatctctctttttgcagaatctgcaggtggatatttggagctctttgaggcctactgtggaaaagcaaatatcttcacatgaaaactacactgaagcattctgaataacttctttgtgatgggtgcattcacctcacgaggttgaacatatgttatgattgagcagttttgaatctctctttttgccgaatctgcaagtggatatttggagcgctttgaggcctatggtggaaaaggaatatcttcatataaaaactagacagaagcattcacagaaacttctttgcaatgcgggcattcaacacacagagttgaacgtttcttttgatatggcagttttgaaccactctttttgtagaatctgccagtggatatttggagcactttgaggtctatggtggaaaaggaaatatcttcayataaaaactagacagaagcattctgagaaacttttttctgatgtgtgcattcatctcacagagttgaagctttcttttgattgagcagttttgaaacacactttttatagaatctgcaagtgggtatttg

SEQ ID NO: 827788 - DNA, 599 bp, Homo sapiens
agcaatttgaaacactctttttgtagaatctgcaaacagatatttagagcactttcaggcgaatgttgcaaaaggaaatagctgcatataaaaactagacagaagcattctctgaaactacttagtgatgtgtgcattctactcacagagttgaacctttcttttgatagagcagatttcaaaccctaattttgtaatatctgccagtgaatatatggaccactttgaggtctgtggtggagaaggaaataagttcatgcaacaaattaacaggagcactctcagaaacttctttgtgatatgtgtattcaactcagagagatgtacacttctttttatagagcagatttgaaacactctttttgaagaatctgtaggtggatatgcggttccctttgaggcatatgttggaacacgcaatatctttgcataagaaataaacggaagcactctcagaaacttcttcgtgataygtgcattcaactcacagagatgtacacttctttttatagagcagatttgaaacactctttttgaagaatctgtagggggatatgcggttccctttgaggcatatgttggaacacgaaatatctttg

SEQ ID NO: 827789 - DNA, 612 bp, Homo sapiens
ctaggtggaatctatttctctacccccaacaatctgggctggccttgtgatttctctggacaataaaatacagtgacagagatgtgtaacaagcttaggaacctaagtctcaagataccctgcagcttgggtcattaccctattggaaggcggctttgagatgccatcagggaagatgacccttgtgagaaagacctgttgagaaggagagaggcccagctatttgtgctgtctcggctgagcccaaaccccagatctctgaattagctgaatgtgtcatgtgaaagaagcaaggattgactagcaggaaaactgcaagtcaaccctacgtatcctgacagtaacagattgttgttgttttaaggtctagggtggtttataaagcagcaacacatagcggaaacagaggccaataaatgtaactgaccctttttccctgacattttcaaaaatctaaggtcagaattggaagtgacccgaggaggtcatttcatgtctgtctgtttcaacaatttatatgaggttaactggaaattcaccaaacataattattcattytcaaccttgaagttcatttgcttttaattgaaaaaaactttacccatttatatg

SEQ ID NO: 827790 - DNA, 543 bp, Homo sapiens
atttcaaaagggaaaagatagcaccttctcagaactttcagtcccaatttctcacttgtattacattattgtagttgattatccttggtcaatattagggatgagtcagattttttactatgtctttattagtatatacagcaattaagagtgccgattttggaaaagacagatctgggtttgaatcttgggtcatcatatatggtttacgtgatattggacaggttatctaagctctctacacttaagctttctcatttgtaaaataggaatgttaatgcttactgcatattgtcattttgaggattaaatgaggtaagatatacgaaacaaacagtacagttactgtcaaatggaaagtcttaatgaatctgacatgattattaatcatttggtacattttcagcaacataattactcaaattgttaataaattattgaaataayataaaggaagggattatataaactattgggttataaaaggtaacatattgtctgcaatatctgcatatccactaaatcattctctgttaccacttg

SEQ ID NO: 827791 - DNA, 528 bp, Homo sapiens
  misc_feature 519, 520, 521, 522, 523, 524, 525, 526, 527, 528: n = A,T,C or G
ttaaattgtaaaatatactcacttcccaaatgaagatacaaatattctgattgaatatgaaatcagaaataaagtacttagcaagcacccgagaagtttgtcttaaactaactgtactgaagtactttttttttcaatcatggactgatacttgtataaaacacaataaaaatgaattaccaggtcaggtgcagtggctcacacatgtaatagcactttgggaggccaaggcgggcaaatcacctaaggtcaggagtttgagaccagcctggccaacatggtgaaaccttgtctctacgtaaaatacaaaaattagccgggcatggtggcgggcacctgtaatcccagctactcaggaggctgagactagagaatcacttaaacacaggaggtggaggttgcagtgagctgagatcgcgccactgcactccagcctcggtgacaagagtgaaactcagtctcaaaaaaaaaaaaaaaaaaaagaattaccagaaaaatgaaaaaaamaaacaaacaaannnnnnnnnn

SEQ ID NO: 827792 - DNA, 626 bp, Homo sapiens
ttcttccctttgtgtatgtctctgtgttcaaatttccctgtttataagaacaccaggctgagtacagtagctcatgcctgtagtcccagcactttaagagcctgaggtgggtggatcacttgagtccaggagttcaagaccagcctgggtgacatggcaaaaccccatctctacaaaaaaattaaccaggcatggtggtgcccacctgtagtctcagctactcaggaggttgaggtgggaggattgcttgagccagggagtcgaaggctgcagtgagctgagattgtgccactgtactccagcctgggcaacagagcaagaccctgttcccccacccaaaaaagaaagaataccagtcccactgcattagagcctgttctaatgacttcataataacttgattaactctgtaaagactttgtctccagataagatcacattctgaggtactaggtgttagacttcaacacaaaattgaagggcatagccagggaccacacgaactaatggagaaggcatctcacttcaaatttgaagggcacacagttcaacccacaacatcyttctaggacaaaaggatcccaatgtagataatgtgatatcagctggaatgttgggtcctgagt

SEQ ID NO: 827793 - DNA, 591 bp, Homo sapiens
cgtcaataatggtcttttaaaatcctaaacttcaaaattaggctgatgtatttatttacttggtcccaggaagagaacaacttcaggcyatactatgtgatggccatatctataaaaacttatgtcatgaacaggtccccagaaacaaagtaggagcaaaaagctgagccatgcatgccaattcctctcccgaactcatcaatttggtaatttatttcaactccttgaaaggaataggatgcagcctatgaccaggaactattaaggaatagcatttcttgtggatactataggagtatggaaaacagtgtaccacaaatatgtatgtagaaaatcctaaatgttagtgtaattacttttatctggaaaccccagtacatccacatcagcctttaaacatcaccagatataagcatggtgccactatagcttaattgattgatcttctagatttcagcacgaaagcagttctctttgctcagctactatcaaatctgcactatcaaatgtttcaaacactcttggtagccttccactgccatcatttataagtaaaaatgagaaaaaacatgttttctactccttgagtaa

SEQ ID NO: 827794 - DNA, 312 bp, Homo sapiens
aagacccacaggtgtggaggggcaggccaccaccccttcatcttcattttacatttcttttagcatgctttgtaattggcctttagtgtaagattttaggctaatctggctaggggttgggctgtgtttaatgttttctgtacttgtacataccagaggtcacaaacccctctatatatattgcttgtctcccctgtgtkttttttttttttttttttttttggtttccctaagaactcctcctcagagagagtctgtgtcttgtgcctctttcagctataattctttgttatactgtgttctgttggtgtg

SEQ ID NO: 827795 - DNA, 575 bp, Homo sapiens
aaggctctagtaatatcttttaccttggagggtgagcctttgtatggtgattgctttgggtaagtcacttttttccccttgtgccaaagctacaaggggatctttcttgactctaccrtaagagtctagtggagttcctgaaggtaaagcccaagaaagtggttggggggtggtggagctaacactgtattctttaggagtttctcatccatatgcttatccacactcagcatgtacaattcatcaagtttgccatataagtgttgctataaatttattgctgggacttctgctccaggcaagcagatcttggtagtaactctgaatttacctggtttgcaggtgacaattcaacatgtgacctcaggcctctactgggcctgagaaaggtcatggggttcagtatgtttaatttttatcttataatgacaggagtgaaaacttccaatttcttgacatgttggagctgaaacattatatgacatttcacaggtaaaaataaatttgataagggggttgaagcatcactacaaacaattggactacagtttatttaaaaatgtcttgaaaaccaa

SEQ ID NO: 827796 - DNA, 641 bp, Homo sapiens
aaaactacagcaaaattcaacatgaaggtcagactgagtcttgccaactgttagaaagtttygtagcatgtgcctgagtaatgtttttatccttccacatcgcctcctctactcatgtattgtgccaagccatagggaaaagttagtcagtgtgttcatagacacaggggaaagtaataagaggaaggggaattaactatcttatctatctgggataaaatccttctgttttgagacatgctttataagttacttcattccaattagtgtcatttataaactgtcatacttaataagcagcaaatgccacagtcagcactgtagtgtagccatccttacgggatacaataattagctcaccttcaaatgaattcttggttttttttccctgccaagctccaagaacaaggagcctgtttccgaagggctgtgtcacattgataaaaggggcaatggctctcaaggaagaagaagaggtacctagaaaagagcaaagcaggggctgaagagccctgcccctccaaatgttgtcctttcttacatgctctttgatgctgggaagtaggaagtgagtgaggaggatggggagaggcagaaactagtgagagattcacatctttacctctttgagacttacattc

SEQ ID NO: 827797 - DNA, 546 bp, Homo sapiens
taaaaggaaggggtttcttttggagcctccagccgtgcagtttrtgttagggaggtttgatgccagcactctcttggctaccttagctggtatctcagtagattgtgtgcccccatccccccaagtccactgtctctgttcctagttcagcactaggattcacctaagattcgcagtccttatggcctagactgtctttcaagtttccttggaaacacagaacactcaagccatcagtggcgaggtttgccaaaactcaagcagggactgctggggttggcaattcccctctggctagggctggtttaaatgttccctctgtgttggggatgtcagttgagtttggtcccgattttcctttctgctctaataccactgaggacaccactgtgttcaatgcctcacaattgctgtcctctccctcccccagtgcctggagatgctgtccacatcatgcagctgctcggggtaagggatggagagctggaggggtggcatctgtgtttactatctcttcaatgcctctttcagaaataaatagttaaa

SEQ ID NO: 827798 - DNA, 546 bp, Homo sapiens
taaaaggaaggggtttcttttggagcctccagccgtgcagtttgtgttagggaggtttgatgccagcactctcttggctaccttagctggtatctcagtagattgtgtgcccccatccccccaagtccactgtctctgttcctagttcagcactaggattcacctaagattcgcagtccttatggcctagactgtctttcaagtttccttggaaacacagaacactcaagccatcagtggcgaggtttgccaaaactcaagcagggactgctggggttggcaattcccctctggctagggctggtttaaatgttccctctgtgttggggatgtcagttgagtttggtcccgattttcctttctgctctaataccactgaggacaccactgtgttcaatgcctcacaattgctgtcctctccctcccccagtgcctggagatgcygtccacatcatgcagctgctcggggtaagggatggagagctggaggggtggcatctgtgtttactatctcttcaatgcctctttcagaaataaatagttaaa

SEQ ID NO: 827799 - DNA, 546 bp, Homo sapiens
taaaaggaaggggtttcttttggagcctccagccgtgcagtttgtgttagggaggtttgatgccagcactctcttggctaccttagctggtatctcagtagattgtgtgcccccatccccccaagtccactgtctctgttcctagttcagcactaggattcacctaagattcgcagtccttatggcctagactgtctttcaagtttccttggaaacacagaacactcaagccatcagtggcgaggtttgccaaaactcaagcagggactgctggggttggcaattcccctctggctagggctggtttaaatgttccctctgtgttggggatgtcagttgagtttggtcccgattttcctttctgctctaataccactgaggacaccactgtgttcaatgcctcacaattgctgtcctctccctcccccagtgcctggagatgctgtccacatcatrcagctgctcggggtaagggatggagagctggaggggtggcatctgtgtttactatctcttcaatgcctctttcagaaataaatagttaaa

SEQ ID NO: 827800 - DNA, 636 bp, Homo sapiens
gataccatgacagccactttccatggtgtaccgtgtactttgataaaatggccacatttcagatgtagctgaaaaactaattttgcagtatygattatgataatacagaaaagaaaatcacaggtaaatatgtttcaacttttatagatcaatatatgaagtaatagtagaattaggaaagaagctgtatttctgagatatggatgacatgaatcaactcattttcaaattatattggaaatattttgaatatctgtgtcttcctcatagtttataaagtaaaccatagagttagatgttttgatgaaataaatatacaaatttaatttaatgaatatttctatcctctcacatgtttagaaatgttctctaaccctatcatagtcaaccaaatagttttaagtttcttttaacctaatttttaaattatcttttcttattatttctcccacacatgctatcccattgtcttctagaatttcagttgttatttcatcattataactttttcccttatcctttaataatgtttcctttttaacaagttttataatctaccatacttgattttttgacaatgattcctaattacataatgccctcctttattctagatgatatatatatgcattccct

SEQ ID NO: 827801 - DNA, 547 bp, Homo sapiens
ttctaacatacaaaattgtaagacaatacatccacactattttaaatcatgaagtgtgtggtaatttgatacaacatcaaaagaaaattagtacaaattttggtactaatagtgggatgctactgtaacaaayacgtaaaaatgtgaacatggctttataattgggtagtggccagagactggaagaattttgaagagcatgagagaaaaggcctggagtgccttaacagaccctacgagaattatggatgataatcactctgctattaaggattcacaaggaagtgaggaacatggttggtaaagagacatatcacttcagagaatactaaactgtcagcagactgctggtggaaatgcagacactgaaggaactgcgggtgaggactcagaggaaatgagcacctagatcggaaatcctcagctctttcatcattctctttattacgttttctttgttttctatagatagaacacaatgtattcctgaatttttgtagacagttaaacatgttgggggttgggggaggttggctgtcggtttaat

SEQ ID NO: 827802 - DNA, 479 bp, Homo sapiens
ttatagccaacatttattcatttccagtactgtataatattttattgcattaaccttcaaaacttaatgctgtgtgatatggaggttgcttccagttttgcactattgtaaacaatattgcaattaacatttttgtacaagactctgaatataaaatcaaattttctttagtgttatactagttagtgggagtgtattcatattttcaactttattaattaatgacaaattgctttgcaacatggtagaaacaacatatcttcatccacctcagcattgaatgagcattcctatttttcaacaagctcatcaacagtcattactgtcagatttggttttctttctattttttctacttactyctaaccaacaggtttgaaatgatatttcatggttttataaatcttgatcattattaatcttggggctctcttctacactggaaattgtaattgataatataattaattgatatttaa

SEQ ID NO: 827803 - DNA, 525 bp, Homo sapiens
atatacaaagaactcttaaaaattaataataaaaacacaaacaacccaatttaaaaatgggccaaaaactttaatagacatgtcaccaaaaaaaatatacaaatggcaaataagaagataagaatgttccacactgtatgtcttcagggaaattaaaacaacaataagaccctactacacacctattagaatggccaacatccaaaacacagacaacaccaaatgctggcaaggatgtggagcaacagaaagtctcattcattgctggtgggaatacaaaatggtacagccattgtggcaaacagtttggtgatttcttgcaaaattaaatatgttcttactatatgattcggcaattgcacttcttggtatttaccaaaaggagttgaaaacatgcctgcacaaaaacctgcacrtgaatgtttatgaaacatttataattgctaaaatttggaggcttaaaacaacaaccattataatttctcatgctgtcatatctctatgggtccgctgggcactcctgca

SEQ ID NO: 827804 - DNA, 636 bp, Homo sapiens
agctgaagttgtgtcctgcccctaggatcctcaggccacccrtacaccagagtagttgtgcacctcatactacagtcaagacagtgccctccttcttggggttcccaggcttccagcataccagagtagtaaaacctcttctcccagcaccatggatgaggcagcatcttgtcctctggcggcttcaagcccctggcacactagagtagctgtaccccttagtgccacagctgatgaggtgtaccatattccaagggtctggaggatatgctgacccatgtagccacactctgtggggctgatcagacatagtgccttgcatcccagggaatcagagtcttggttgtgctgtgccaccagatcctccaggctgaatagccacagtatcctgcttatttacaattgggctagccccttgcagtctgagctgctgagatgccttacttccgtggagaaggtagtcattggtgtgctgcttccctcccaccagggatcaagccacagtagtgccttgacattcctgggtccttgctgctactgcacctggccacatagaccctgggccactgccatatcctaccaccccaagatccatagttaccattgtgcaatatgtcatcacctggagcactggct

SEQ ID NO: 827805 - DNA, 508 bp, Homo sapiens
cctaggatcctcaggccacccatacaccagagtagttgtgcacctcatactacagtcaagacagtgccctccttcttggggttcccaggcttccagcataccagagtagtaaaacctcttctcccagcaccatggatgaggcagcatcttgtcctctggcggcttcaagcccctggcacactagagtagctgtaccccttagtgccacagctgatgaggtgtaccatattccaagggtctggaggatatgctgacccatgtagccacactctgtggggctgatcagacatagtgccttgcatcccagggaatcagagtcttggttgtgctgtgccaccagatcctccaggctgaatagccacagtatcctgcttatttacaattgggctagccccttgcagtctgagctgctgagatgccttacttccgtggagaaggtagtyattggtgtgctgcttccctcccaccagggatcaagccacagtagtgccttgacattcctgggtcc

SEQ ID NO: 827806 - DNA, 644 bp, Homo sapiens
aaatactgggactgctttaagaacaatcgaaccatttcattattkggatagccatgggtaccttatcaagcagattaaaaggatatgttgcctttcctttagaagagaaaagctaaaacctggttgtggattatggatttagcataaagaaaaacaatcgggcatacattaagagtaaaagagaagattaatggaaatttcacttcacataagttaaaacatggctgtttcaataaacgaaactgaagtttctcctggatctcagaattcaacttgtattaataaatgtataatgtatttagctactatttggtttaaatgaacttgttgggctagcttggtaaacgttacaatttttactattttctacggagaaaatattttctaatttgagttggagttatctgtgcagcagtttctctacagttgtacatagatgtttttactataaaatgagctaatgtgtaaaatactactctatagtgtaataaacatagtactttgaggggaaaaaagagaaactgtagggcttgaaaaaagggccaatttgaaatacaggagtcatcactataatcctacataacagggctttacaaaagtccttttacataggattatggtgatgacacatgtagagtttttgt

SEQ ID NO: 827807 - DNA, 644 bp, Homo sapiens
aaatactgggactgctttaagaacaatcgaaccatttcattattgggatagccatgggtaccttatcaagcagattaawaggatatgttgcctttcctttagaagagaaaagctaaaacctggttgtggattatggatttagcataaagaaaaacaatcgggcatacattaagagtaaaagagaagattaatggaaatttcacttcacataagttaaaacatggctgtttcaataaacgaaactgaagtttctcctggatctcagaattcaacttgtattaataaatgtataatgtatttagctactatttggtttaaatgaacttgttgggctagcttggtaaacgttacaatttttactattttctacggagaaaatattttctaatttgagttggagttatctgtgcagcagtttctctacagttgtacatagatgtttttactataaaatgagctaatgtgtaaaatactactctatagtgtaataaacatagtactttgaggggaaaaaagagaaactgtagggcttgaaaaaagggccaatttgaaatacaggagtcatcactataatcctacataacagggctttacaaaagtccttttacataggattatggtgatgacacatgtagagtttttgt

SEQ ID NO: 827808 - DNA, 619 bp, Homo sapiens
agggggataaatattaggagtgtttttttttctttaatctaggcaaacaatgatgttggcttggacttattggtaacagtaaagttagaaatattggaaatatttgggatatattttagaggtagaactgacagaattcatggatatgtcagatatgaaatttgagagaaagtggatccacagtgataaatagattttgacttcaacaacttggaacaaattgtattgaaatacactgagatggaggaaattaaacaaagattagatgtagggaatggagagagaaacctatggtttttttgaccttgtcgagttcagtgtaccttggatattcttgtggagttttaaaatcagcacctggttacaagtatctggagtttggaggttgcaatcagatatggattcactgacatgattaaaggcttggaactgggtaaggtcctagggaaaacctgtggatagagaaagagttcaaacatagggccccaggacagtccagcgtttagaatttaaagagagcaaggggcctgagcaagtagaagaagagcagctttattgggyaaatggtaaaggtcttatatttatcaacttttagaatgtcttctagaaattttcgatt

SEQ ID NO: 827809 - DNA, 622 bp, Homo sapiens
cagggcaatatttgaactgagttactttccccctggtcaaaggctgcttcctgccccaagcagtctcctgatttcaaagtaataggccagccttgtasagggatctagaaccattagccaatggtgtttttttgaagagatattgcgtatccacatgacatgttgaaataacacatgtatttagagaatcttcaatctccttccttttaatcctttgtaactatgaagtaccaggccatctgcactttaaaatttgtctcagagcatccagtaatctgttccaaaattactatatttttggaaaacatatcaccattgcatattgttagagaccagggaattttatgttaaaatctgcaaatcattaacatatttcttgttaagtagccaatatactgtttaggatctataaaaactgggattgatgaaattaataaggttgtatatttctgaatctttgtctttaagcacattaaatatgtagcaaaaaaccataacagtacattaaaaaaaaaccactagtctgctattatattagcagaaattcatgctagaaaaggttttacttgttttcagatcaagaaaataaaatcaaagaagataaaatctctgtgtgtctatt

SEQ ID NO: 827810 - DNA, 635 bp, Homo sapiens
acctgttctcaggaccattttctttataaatctgcacatgcttgcattttcttacactctcttttatgtgctgttttatgtcttcttggcacctcaattaaaattgagactgggaggataacatgcccgtttagattttgtgtataaacagattttttgttttttaatttttttttttgtgacggcggtagctgggaatgttttacaagatggcttcatgagcctcagttctgaggagcaacttggaaagctgtatccattctacatagccatttgacccttctctaggttgttgcttacctattgcttttggaaagggcagagtatttagtggaacataatggtatattgaaccagatgccctggatattagctctctggtgttaacattggcttcattttacttttcataaaattgtgtggtctagctgaactatgaagttccttccaagtttgttttgtaacttcagattaagctaagctataatttatttggctcagaaygtgtttctgagctaaattatccccttaaactagttgagtgatgtttatgtcatagtgtatatagaacactaagttgaaatctatatggtagctaatggagaaaaattagttgtagaaaagagaataacttc

SEQ ID NO: 827811 - DNA, 578 bp, Homo sapiens
ttaacattggcttcattttacttttcataaaattgtgtggtctagctgaactatgaagttccttccaagtttgttttgtaacttcagattaagctaagctataatttatttggctcagaacgtgtttctgagctaaattatccccttaaactagttgagtgatgtttatgtcatagtgtatatagaacactaagttgaaatctatatggtagctaatggagaaaaattagttgtagaaaagagaataacttcagtctgtcaaatttcttttaatgaagattttttgaaaaatttttcccgtttcctcattatataaataaatgtaaccttttataccgaacttagagtttaattgaaaatgtcatagaagataatgcaaccatattcctttgtatagcaattatgtaagccatattagtagtgatagggatatttcaaaaaatgtaagggtataggtttttaagaaaaggttttttaaaacatttgcaaacttatgaagccrtgaaaaaaagtcattttgtggcatgaatagtatgtagattaaagcaccttatgctttattttgctttggattagag

SEQ ID NO: 827812 - DNA, 607 bp, Homo sapiens
tggagaaaataatattcaagatagtgttccaggacttattattatcatttcttactggtccattggctgagttggaataccagctaatttattagatataccctatgcttccattgtgcaaacctcagcctatacttggctacattctcttgtaaacattttcaagctttttaaaaaaattccaaggttaaatttgagttgtagaaaagaaatatgaataatggccatcataattattccattataaaaacacatacacacactcaataaaatgtgttgttttaaaattattaccctaaggcaagtggtgaatagatccaataaaaataaaagaaatagaatgaataagaagataataagacgaatggaagactacattctttctactgactggtcatcggtttttctaaatcttggtcctttatctccaatgggtctttgaggacaagcacatcttatgtactttgtaaatatttgctgtttatgcacattttgagtatcattgtttagctttgcttttcagatgcatgaaacaagtamatttgaggcagcaaatgagtaatttgtaaatctagacacaatgagaaggcaattaagaatgctgctt

SEQ ID NO: 827813 - DNA, 633 bp, Homo sapiens
caaaatgacacataaagaggaagcaagtgattactgacttactggaaatcccaggccgggcacggaggytcattcctgtaatcccaacactttgggaggctgagatgaggggcttacctgagctcaggagtctaagaccagcctgagtaacaagtgagaccctcttctctaccaaaaaataatttaaaaaaaattagccaggtatggtagcccatgcccatgcctgtggcctcagctactcaggaggctgaagcaagaaaattgcttgagctggagaggtcttccagcacctgaaagacagagaaagaccctgtcttcaaagaaaagaaaagaaaagaaaacccatacatttagctcaattgactaaaagcctaaatgaaaaatatatatctttcagcttaaagggttggttggattgatttgttgagtaaggtattactatttggacaattgtaaaaaggacctgtgaaagccatattttggcttggacaagctcacccaccccatgccccatctctactaagggggggtgggattcactgtcaaaagagttcttctctttaaattctatacaataggtacagtaattatatctaattgcatttgaaacacaatagttattaaggcaaacgt

SEQ ID NO: 827814 - DNA, 666 bp, Homo sapiens
cagcatgctcttcctgttgccagatgtaaaataacaaagaactctgtgtgtgtgtgtgtgtstgtgtatgtgtgtgtatgtgtgtaaatagattgtgaaagcaactgctatcccttgagggttttaccacattgcttgtgtgtgattacgaaaaagaacctccttggcatcctacaggctgtagcgcttcatgaactggctccaatcactgagacagtgcagttgagaacacagtggcccatccacatcacccaggctgacagacattataagctagacaaatttgattggttatctgttatagtgtggcgactttcaggaaataccgagattttcacttaaattaggtatgtctccaaatatttaaaattgatgcatttcacatatgatagaaaagaaatattcagtaatgggtacctcagtaggaaggtattgcatattgtaattttgtaccagaaaattccacacagtttgatttcttagtaactatctaaaaattaacctgtaaatttagtaggaccagcatgtcatctgcttttactatgtataaaagcatagatagtacaatagaagcttttgaaatattatgaaaataatgttttcaggtataggtttttatatctatctatctatctatctatctatctatctatctatctacctatc

SEQ ID NO: 827815 - DNA, 666 bp, Homo sapiens
cagcatgctcttcctgttgccagatgtaaaataacaaagaactctgtgtgtgtgtgtgtgtgtgtgtatgtgtgtgtatgtgtgtaaatagattgtgaaagcaactgctatcccttgagggttttaccacattgcttgtgtgtgattacgaaaaagaacctccttggcatcctacaggctgtagcgcttcatgaactggctccaatcactgagacagtgcagttgagaacacagtggcccatccacatcacccaggctgacagacattataagctagacaaatttgattggttatctgttatagtgtggcgactttcaggaaataccgagattttcacttaaattaggtatgtctccaaatatttaaaattgatgcatttcacatatgatagaaaagaaatattcagtaatgggtacctcagtaggaaggtattgcatattgtaattttgtaccagaaaattccacacagtttgatttcttagtaactatctaaaaattaacctgtaaatttagtaggaccagcatgtcatctgcttttactatgtataaaagcatagatagtacaatagaagcttttgaaatattrtgaaaataatgttttcaggtataggtttttatatctatctatctatctatctatctatctatctatctatctacctatc

SEQ ID NO: 827816 - DNA, 573 bp, Homo sapiens
gcagttttttatccgagtctaactccctacaactaggccggttgagtaaccaaaatatgctactactttagataaaaactaacattttccttgtccaaaaggatagtttataaatcttgaaataataatgtgaaagcagctaccatttaatgagtgttcactatgggcaaggaagggattttatatttttacttgttaatcatcactcccaattctgtaaggagagttttattatccttattttttagatgtggaaaatgagtctcagagagtttagataacatgcccaagttcactcagctggaaaataggatgggctcccatcccaagtttccagtctgcaaacttcttgctctgccttttcatgagattgcataaagctctagattcaacaacagagagtgagttgcagccctaagtttattatttactgatgcaacaacrgatgaatcatttaatctctctcagccccattgtagtcttctgtttaaaaaaaaaaaaggtgatgagaagtataaggagaaaatcagtgaaacctgaaatgtagacattctataggacaagtgagatggt

SEQ ID NO: 827817 - DNA, 577 bp, Homo sapiens
tatcagtttcaaactaaggaagcagaactgtttatgtaaagttaacttagatttattaaacttttaaagagtttgcttgggaagaagctgtgcctacctttcccaaagacttacacatgttcaaacaaygttaacttgttcaagaaacatccacagctacatgttaggaattatagtaagtattgtaaagtcagaaaggaaagaaagaataaaaggaagaaatgaagaaaggacagaggaaggaaggaaggaaggaaggaaaggaaggaagggaaggaagaaagggaatggaaggaagatgaaaggacaagcagtgtagcaaattagttaaataactagggttatggagtcagatggcctcagtttgaatgccatctcttctaataacaagaaacaaaactttcaggaaattacttaacttgcctctccttcagtttcctcatctgtaacacggggataataatagtctaaccttctaggactgttgtgagaatcaaatggatttatgtatgtaaattgcttaggatcctgcctgtcgcttagtaagccttcaaaaaatgttagctattagctgaat

SEQ ID NO: 827818 - DNA, 521 bp, Homo sapiens
caggaggccaggcaagagatgatggcagcttggcctctggctcattcgttacaggtgggaatacaaaatggtayagcaagaaagtttagcagtttttgcaaaactaaacacttatgataccatccagccattgtgttccttggcatttactcaaatgagttgaaaaaagctgtacctgtttataggagctttattcataattgtcaaaccttggagcaatcaagatgtccttcaatagtagaatgcatagactatctatgcacacaatagaattatttagcaatataaagaaattagctatcaagccatgaaaagacatggagaaaaatgcatattaccaagtggaataagccaatattaaaaagtctagccttttactatatgatactaagtatctgatggtctggaaaaggccaaactaaggagacagcaaaaagatagtggttgtcagggaccagaggtgagggaaggaaggaaggttgaatagatgaagtatagggattttttttagggcagtggaa

SEQ ID NO: 827819 - DNA, 632 bp, Homo sapiens
gattattggtgctggcaagtctgaaatttgcaaagcaaactggcaggctggaaaccctggcaggagycattgttgcagtcttgatttcaaaggcgttctggaagctgaattcctttctctttgggggaccttaatcttttttcttaaggttttcaactgattagatgaggcttacccataatttagagggtaatctgctttattcaaagtctactgatttaaatgttaatcacatctaaaaaatactttcacagcgacatttaaattggtgtttgaccaaacgactggccaccataacctacctatggtgacacataaaattaaacctcacggaggtagttgttgccttttcaagattcccttttcaagttacacaatagcatattccatgctcttcccttaacacactgttgtcctttatttgtgtgtccctaattaatccgtatcattatttctccctaaaattatatgcactttcttctcagtagatgacctcatgcatcacgactaaggatttccagcctcctaagtaccactctactatgtggaatatcacttccatatgctggttttgtcatgtttggtgagctctcttggatcatttatgagtataggacatatagccttaaagc

SEQ ID NO: 827820 - DNA, 632 bp, Homo sapiens
gattattggtgctggcaagtctgaaatttgcaaagcaaactggcaggctggaaaccctggcaggagccattgttgcagtcttgatttcaaaggcgttctggaagctgaattcctttctctttgggggaccttaatcttttttcttaaggttttcaactgattagatgaggcttacccataatttagagggtaatctgctttattcaaagtctactgatttaaatgttaatcacatctaaaaaatactttcacagcgacatttaaattggtgtttgaccaaacgactggccaccataacctacctatggtgacacataaaattaaacctcacggaggtagttgttgccttttcaagattcccttttcaagttacacaatagcatattccatgctcttcccttaacacactgttgtcctttatttgtgtgtccctaattaatccgtatcattatttctccctaaaattatatgcactttcttctcagtagatgacctcatgcatcacgactaaggatttccagcctcctaagtaccactctactatgtggaatatcmcttccatatgctggttttgtcatgtttggtgagctctcttggatcatttatgagtataggacatatagccttaaagc

SEQ ID NO: 827821 - DNA, 611 bp, Homo sapiens
atggttttttaaaaaatgggaatttgtctgcacaagttcttctcttgtctgtcagcgtgtgagatatgtctttaaayttccatcatgattgtgaggcctccccagccacatggaactgtaaattcaataaacctctttcttctgtaaattgcccagtctcgggtatgtctttattggcagcatgaaaacagactaatacagtaaattggtaccagtagagtggggcattgctgaaaagatacccaaaaatgtggaagcagctttggaactgggtaacaggcaaaggttggaacagtttggaggactcagaacacaggaaaatgtgggaaagtttgtaacttcctagagacttgttgaatggctttgaccaaaagcctgatagtgatataaacaataaggtctaggctgaagtggtctcaaatgtagatgagaaacttgttgggaactagagcaaaggtggctcttgttatgttttagcaaagagacaggtggcattttgcccctgccctagagatctgtggaactttgaacttgagagggatgatttaggttatctggcagcaaagcattcaagaggtaacttgggtggtgttaaaggcattcagtttcca

SEQ ID NO: 827822 - DNA, 638 bp, Homo sapiens
  misc_feature 245: n = A,T,C or G
cactgattctttgctttgtccatttgggaagatcatggttccctgtttgctgttgtttcttgtgggtatacatttgtgtctttgcattgaaagattagtcatctattccaatattctctgtttggcttatttaggtttttaaaatatgtccactaggtccctccttcctttttggtatgagatgacaccctaagcccaggtttgccttggttctaggaaacagagtgccaccgtcttgcattagnaagaggtcccaaaggggatttccctgtatcacctttgggacctccctaattcaagggaaggtggctaggagttcatgttcagtgtacccgtggaacaaatctcctacaggacagttctgctgaacagccagtctgatttggcaccttttttggctgagttacaaatcagaatttccagggctggcaacggtagtcccacctcccctctttggttctcctcagagatatttttcccttccagcactcctgatgcttcccacgatttgagccagggacaggtctcctacatggagtcccaaatggtggggaagctaattgttcacctcaatctcactttttccagtatagaaaccrtaagttggggggtaattttccatacacttggtgctggac

SEQ ID NO: 827823 - DNA, 479 bp, Homo sapiens
ccactgtgggcaccggttaggcctcaggctatctagcccaatggctactgtacactttttttttttttttgagacagagtctctctctgtcacccaggctggagtgcaatggtgccatcttggctcactgcaacttccacctcccaggctcaagcgattcttgtgcctcagcctcccaagtagctaggattataggcatgcaccaccatacctggctaatttttgtgtttttaatagagatggggtttcactgtgttggctgggctggtctcaaactcctggcctcaagtgatctgccctcctcagcctcccaaagtgctgggattaccggtgtgagttgccatgcccagcctggctattgtagactttaataggactcttaatttgactttaatgtgactacttctcttcctatctgtgcttcttcatatagactctgcacckcacctggagatattttatcccacataatcaatgtc

SEQ ID NO: 827824 - DNA, 479 bp, Homo sapiens
ccactgtgggcaccggttaggcctcaggctatctagcccaatggctactgtacactttttttttttttttgagacagagtctctctctgtcacccaggctggagtgcaatggtgccatcttggctcactgcaacttccacctcccaggctcaagcgattcttgtgcctcagcctcccaagtagctaggattataggcatgcaccaccatacctggctaatttttgtgtttttaatagagatggggtttcactgtgttggctgggctggtctcaaactcctggcctcaagtgatctgccctcctcagcctcccaaagtgctgggattaccggtgtgagttgccatgcccagcctggctattgtagactttaataggactcttaatttgactttaatgtgactacttctcttcctatctgtgcttcttcatatagactctgcaccgcacytggagatattttatcccacataatcaatgtc

SEQ ID NO: 827825 - DNA, 639 bp, Homo sapiens
atatatactgtatgatttacataaagctcaaaaataggcataagtataaaattagacatcaagatagtgtttacctatggggaagaggatgattggctatgaaggaggcttctagggctttggtaatgttctggttcatacttgggcaattgtgataatctatcaagttgtacatttacagttggtgcactgtgtattttgcttcaatttcagaagtttagacaaaagataatcaatgagaatgttcaggaattaaagaattacgtgaatcttcattttaaaatgacacaagtagtatccaacagaatagaaacagatttacattttatgaaactttaggacataaaagacaaaaataagaccctaagagctactagagataaaagattgttacaaaaaaaaataactacagcaatagcaaagttaccatcagcaaaaatgaataacatcatacaaatgattaatcattataatggtgaagagaaatatattagaattttatcaccaawgaaactatctttcaagagaaaacatgaaataaggatgttttcaaatatacacacattaagaaaattttatgaaacttaaaaaacatctgtgaaataactgttaaagtttgctatttttacaggaataaaa

SEQ ID NO: 827826 - DNA, 624 bp, Homo sapiens
atgaaggaaagggtggattaatgtctaagttcctgtggtaaagatacaaacaccacattgaagctatcattagcaaaactccaactcaatcggtagaaacttacaatttgcccatatgatgtcaartaattgactcaaattgttatacacttaaatctaccaatgaaaaccattgttcttgtatcaaaaataactctgcggactgggtggggtggcccacacctgtaatcccagctctttgggaggctgaggtgggaagagcatctgagcccaggagttcaagaccaacctgggagacaaagcaagaccccccccatctctacaaataaaaagttagctggcatgatggcatgtacctgtgtcctagctacttgggaagctgaggcaggagagtttccggaacccaggaattcaaggatgcagtgagctatgatggtaccactgcactccaggttgggcaaaagagtgagaccttgtctacaaacaaacaaacaaatgaaatctccatgattcagaagtgatattgtttggatctgtgttcccacccaactctcatgtaattgtaattctcagcattgaagatgggacctggtgggaggtgactaaatcatgggggagatttct

SEQ ID NO: 827827 - DNA, 624 bp, Homo sapiens
atgaaggaaagggtggattaatgtctaagttcctgtggtaaagatacaaacaccacattgaagctatcattagcaaaactccaactcaatcggtagaaacttacaatttgcccatatgatgtcaagtaattgactcaaattgttatacacttaaatctaccaatgaaaaccattgttcttgtatcaaaaataactctgcggactgggtggggtggcccacacctgtaatcccagctctttgggaggctgaggtgggaagagcatctgagcccaggagttcaagaccaacctgggagacaaagcaagaccccccccatctctacaaataaaaagttagctggcatgatggcatgtacctgtgtcctagctacttgggaagctgaggcaggagagtttccggaacccaggaattcaaggatgcagtgagctatgatggtaccactgcactccaggttgggcaaaagagtgagaccttgtctacaaacaaacaaacaaatgaaatctccatgattcagaagtgatatkgtttggatctgtgttcccacccaactctcatgtaattgtaattctcagcattgaagatgggacctggtgggaggtgactaaatcatgggggagatttct

SEQ ID NO: 827828 - DNA, 649 bp, Homo sapiens
agtacatagttggatcctttttaaaaaacaaattcattcaaccaacctatgtcttttgattgggaaatttcatccatttacatttaaagtacccataaggattatttattgccattttgtttattgttttatcttgtagctttcttgtccatctttttctcttccttccttccttcatgttttgttgatttttttagtgatatcctttgattccctttctatttctatttatgtatactctatggatattttctttgtgactaccattgaaaatatataaaatatcttaaagttacagcattctatttaaaactaataacttcaatcacatattaaaactctacttctttacagttctaatctcccattttatgtcactgatgtcacaaattacatctctaaatataatagacccatcaacatggatttatagggttttttgtattttgttaagttctgtgtaccaaaaattacaatagtacaggtttctatatttttccatgtatttacctttgccagagaaccttgtatttttgtatggcttcatgtagatatctactatyctttcatttgaacttgaaggattctatttagcattttctgtagagcaggtctagtagtaaagaactctcacattttacctgagaaa

SEQ ID NO: 827829 - DNA, 613 bp, Homo sapiens
cctcaggtgcccagcgacctcatagtaaaccgtcacggatcccacggcccgggccacagccacacctgtcttggggtcgatgtggaggatgctgttggctgaggagctccaggttcctgagaggcctggagagraagcacaggtgtcagccccctttccatagctggacactccagtcaaagcccagctcacctggatgacaggccagcttcctcgctggctgccgctacccccatgggggctcactcagcagcctcaggagacagccacgctgcctgccccagtgccggtcatgctcctgactccagccacctggagccatcagctctcctaccctgctgcacccgccctctacagggctgtggcccctagcacctgctctccctgacccacaactccctgcctggaatctcctgaccatcctggcatgaagctttagctgactcctgcccaggaatggtgctggtgctgctgccaggccctgccctctgtagctccttccccaaagcacagcccctccccatcccttcgttgccttatcaattcctttttagcaaacagacagcaggtgtgaggctcagagctttcaccacatacacatctgagttaaaag

SEQ ID NO: 827830 - DNA, 591 bp, Homo sapiens
gaggctgcagcagaggcatatatgtggcattggtggcctcacccatccccagttaaggggcacccagcttgcttccaatgtgtcagtgtcatcaacaatgctgaaatgaacgccctggtgcasacagctctgcccttgtctggttatttcccttggacaactacctagacgtggcatgcgctttcttctgggtgggtcttgagaggcgttgagccaaaattcctacatggattttgttcctgcaagcccctccaggaaccagccaccctaattctctgtctctgctccggtccacgccagaggagtcaactctggttggtcagggacaggctgggacacggaccaaagttattctgagaacacaaaagatgacagaagctgaggtttcctgctgatgggaggatggaccttgcaattccgcattcatctctgtggtgctgggactctgggaggccttcagcccacccctatgcttctgagttcatagtgtggtgaagcgcaggctcagaccagggccagagcggggccagtgctgaggaagctcctctcctcactccagtggtgaggataaggatgatcaggatgggttcc

SEQ ID NO: 827831 - DNA, 645 bp, Homo sapiens
ttttgtgcatgtaccatgctgttttagttactgtagccttattgtatagtttgaggtcaggtaatgtgaggcctctggctttgttctttttgcttagcaytgctttgactatttgagcctttttttgtttctatatgaattttaaaatagttttttcaaattctgtgaaaaatgacattggtagcttgagaggactcgcaatgtgtctgtaaattgctttggacagtatggccattttaacaatattaattcttccaatccatgagcatgaaatttttttcagtttatttgtgtcatctataatttctttcagcagtatttgattgttgtccttgtagagctctttcacctctttggttacatgtattcctaggtattttatgtatatttatttaagctattttaaatgggattgtgttcttgatttggctcgcagcttaaacattattgatatatagaaatgctactaatttttatacattgattttgtatcctgaaacttcattgaaatcatttgtcagtaccagcagctttttgacagagtctttagggtttttttagctctagaatcatatcatgagcaaagagagataatttgactccttctcctatttggatatcttatttctttctcttgcctgattt

SEQ ID NO: 827832 - DNA, 586 bp, Homo sapiens
gtaatttacagataagagctaatgtagtgacccaaatcactagggtagtaagtggtagaacctaagtattttcaatctggacctttaaaataattttcctgacagcaatttagacagtattttggtataatttgtataatacttagtagtgagaaattctgtgtggggaatttggacttggtacttgcagcttttcagtgtgaggtgatgagatcttaaaagcaattagaagaaaaggagttagtttgagagaaattgctaaagaaacagcagtaggacttgaatgatgtcatatggaggaaagttataagacatgtataaaatagctctctagcctgatttgggagaatcagcacatcatgaacagaaatagcgaagtcaggagggcaagccaaataggtgaacattcagtttggtttaggtatattaaggatgaagagagagtaagacaagttattctcratagagaacagagccgttcaggttatagtttaagggaacttttcttttaacctatatttattgagggtttactatttgcagggtatcatgctaaaacacagatatgtgtaaaggcataatgatt

SEQ ID NO: 827833 - DNA, 644 bp, Homo sapiens
gataggatacagttgcatggctcacagccagctgcaaagagggccaggaaatgtaatctggctgtaagcccaggsagaagagacaaatggattttgatgaacagatggaagtctcaacctccaaaaagatcatgccactcctttgcttaaaacactttaattgcttcccattgcacttaaaactgcactcattactttggcctttaaggcccacgtcatctgcgctgcccaccatcctcaagtttgccattctcagtgtcctcacgaggccccaacctcaggggattttgttcaattttctttttctttttctatttccaaggtccttataacatcaggtctttgcaatgccattcattctgcttaaagagccacaccacacttccctaagctggctggtttttattctccaggcttcaacttaaatgttatctccttaaaatgattttcttactccctcacctcacaaaaatgaggtgcccccgtctaaattagatcctctcttagccaattattctaactgaaaataatgtgttcttttctctcctggtccttaacacaaatttcaagggtgtattcagctgaatgtgaaatttatggttctctgtctcccctgtggaactgttagctactaaggcacatat

SEQ ID NO: 827834 - DNA, 598 bp, Homo sapiens
aattatataagatttcattcttcctggggacccttataaccttctcaatttttttttttagtttcctggacagttttaaaatcaaatcagggacccattagtctgaagcagccacaactctgcttaraagctgtgtcagcatcaaatggcctttagagatctcaagcagcctcttgattctgttatttgaatcaatttgtactccatttatgacctgatggtgtttgctggcagggaatttcataggttgggagttttaaacacatcatctgcagccaggtcatggactgaaagataggctcagaggcccctgcagctctgcctacacagttgtccctgggagccagtttccacagaaatgcaacaatattattctccatatgtaagcatgtggaccgaccttcatagcctcaggcatagccattaaatgaggtcatgtgtgctgacgtgatatgttgaaagacataaacatagaattaatcaggagaaaggagaccttattacttaatgtgaacatgatttacttggcttacatcatgcatacgatcgaactctatgttttgactgtaggaaaataaaagacatattttgactttcg

SEQ ID NO: 827835 - DNA, 574 bp, Homo sapiens
ttatgagcctctttaaaagttagtgtgcttggatctgactccatgtttttaatgaaagcccagcattccatacaatagataaataatwaacaaatttttagaccatttccctttttttttttttttttttttttttttttttgagatggagtttcgctgtgtcacccaggctggagtgcagtggtgcaatctcggctcactgcaagctccgcctcccgggttcatgccattctcctgcctcagcctcccgagtagctgggactataggcgcctgccaccatgcctggctaattttttgtatttttagtagagacagggtttcaccatgttagccgggatggtctcgatctcctgacctcgtgatacgcctgcctcggcctcccaaagtgctgggattacaggcatgagacaccgcgcctggcctaaacaaattctttattgatgcaaatgtagactgtttcatttttctttcagtaacatgcaatatagtgatgaacacctctgtacatatctttctatgaatatgctctattgtttcttctggtaaatttctaaaaatggcgaattgccaatt

SEQ ID NO: 827836 - DNA, 643 bp, Homo sapiens
cccattcacagagcagacacttttagtttttacttcacacgagaactgtcagcacacaacatgggttgagttactgatttctgctataaacaagattaactgctatactgattttcgatctctttagtctattctattgtaaagggccttgactccccaacaaaaatttcgagctgttctgactaagcacatgcctgagaggtaaatatttccagtctgtaaaaactggcgaaattgacatgtgctagaattttagtatcccagcctgaccaagtatctttctggatactatttggttccctcagaggtctgtggccatcttgaaaagtggtcagccttcacattttccatgttgacgttcactctgcactcaaaagaaaatataaaatctctgaattccatgcataagtcattataacgtgggaggctacggaaagtggaaagaacacatagatgcaagccagaaaatttctgctttcatgggcacatttgggaggtaatagggttttagatacttttctctctttatttttatccagtgtagaaagagccggctcacttaagaaatrccaagtggtattacgatgtcactcctaagccacatttatattttaagttgagcctgaattctggtttcatttct

SEQ ID NO: 827837 - DNA, 620 bp, Homo sapiens
aatagacacacagagattttatcttctttgattttattttcttgatctgaaaacaagtaaaaccttttctagcatgaatttctgctaatataatagcagactagtggtttttttttaatgtactgttatggttttttgctacatatttaatgtgcttaaagacaaagattcagaaatatacaaccttattaatttcatcaatcccagtttttatagatcctaaacagtatattggctacttaacaagaaatatgttaatgatttgcagattttaacataaaattccctggtctctaacaatatgcaatggtgatatgttttccaaaaatatagtaattttggaacagattactggatgctctgagacaaattttaaagtgcagatggcctggtacttcatagttacaaaggattaaaaggaaggagattgaagattctctaaatacatgtgttatttcaacatgtcatgtggatacgcaatatctcttcaaaaaaacaccattggctaatggttctagatccctstacaaggctggcctattactttgaaatcaggagactgcttggggcaggaagcagcctttgaccagggggaaagtaactcagttcaaatattgccc

SEQ ID NO: 827838 - DNA, 580 bp, Homo sapiens
agaggaaccttgattaaccatacacttcaaggatgaagtgcgtggtgcacatgagacatacacatgaaacataattttgttacatcccttgtttattaaattactcattcatgtacttatttcatattataaatacttattgaatgaccattatatatggtatattgctatgaagaattcaaagatgaatcagattagggtttgctgttgattctctttcaaaaatagtttatttccttgctttttatattgaatatcacagacaacgtaagtaaaaagccctggaccgggggtcatatggccaagaatctagttctggttttatgtaaaaatcagcaggtctcttcaactctgaatctcagattttccatcaataaaaattggaaaggatggaaaaaaatatccacttgcctatagtaaaaatgtaaataagatcatggtaatgtataaattactatytatctatctatctatctatctatctatctatctatctacctatctatttatttatttaagacggtctcgctctatcacccagactgcagggaagtggtgtgatcatagttcactgcagcct

SEQ ID NO: 827839 - DNA, 527 bp, Homo sapiens
acactgctttaaatgtgtcccagagattctggcatgttgtgtctttgttctcgttggtttcaaagaacatctttatttctgccttcatttcgttatgtacccagtagtcattcaggagcaagttgttcagtttccaagtagttgtgtggttttgagtgagtttcttaatcctgagttcttgtttgattgcactgtggtctgagatacagtttgttataatttcgcttcttttacatttgctgaggagagctttacttccaactatgtggtcaattttgaaataagtgtggtgtgatgctgagaagaatgtatattctgttgatttggggtggagagttaggtagatgtctattaggtctgcttggtgcagagctcagttcaattcctggatatccttgttaacttgctgtcttgttgatctgtctgatgttgacagtggggtgytaaagactcccattattattgtgtgggagtctaagtctctctgtaggtctctaaggacttgctttatgaatctgggtgctcct

SEQ ID NO: 827840 - DNA, 630 bp, Homo sapiens
aaatgccacttgctctgtaaattcttacagattgctgcaatcagaattgaattccaatgtgttcccagagcatctgggtttcagtagagtacacagtgcctgaggtgttatcatatggcggttgtttggatgtcygtcatctccccgggatgcaaaacacaagtttttcaaagatgccgtcagcctgctttccaccatgatatctccatgctgcctaatgtgtgctttgttgcctggctcataggacagagagacggttaaataaataaatagaaagatgctgaatacatgaattggtattaatctttcattcccctccttagtggacagaacgtcatgtcttcctgcttttctctgttaatcttcagttgggaacctgtttcaaattctcactatctttgttgaactgtggacaacctagctggagaccagtgaaaaaatcagtttgactaatgctaagtgcaaaggaataacttcacgatttctgctctcaaattttggtgaaaggatttctatttactattctaatgagtacaatatggatgacacagtgtccgtttttaagccatgactgtgctgccccgtcattctcaagggatacattccaagactaccagtggatgcctgaaa

SEQ ID NO: 827841 - DNA, 591 bp, Homo sapiens
ccttctgagggctgcaagggaaagattgttctgggtccttctccttggcttgtagatgtctgtcttctccctgtgtctctccatgtcattttttcctctatgcatgtctgtctctgtgtccaaatttttccattttaaaaggacattagtcattgctgggcacaatggctcacacctgcaatcccagcactttgggaggctgagagaggcagatcacttgaggccaggagttcgagacgagcctggccaacatggtgaaacgtgtctctgcaaaataatacaaaaattagctaggtatggtggtgcatgcctatagttccagctatttctactcaggaggctgaggcatgagaattgcttgaacccaggaggcagacgttgcagtgagctgagatcatgccactgcactccaacctgggtgacagagtaagactctgtctcaaaagaaaaaaaaaaaaaaagggcattagtcattggattasggcccaccctatggaactcattttaacttgatgagctctgtaaagaccctatctctaaattatatcacattctgaggtgctgggaggtaacactccaacttatctttat

SEQ ID NO: 827842 - DNA, 595 bp, Homo sapiens
taaaaagaatcctattgttttaattatctcttttattctccaaggaacccctattcctgccaattcttacagaygttattaaggcattcagttagtttttcattcatttatttaaaaaatatttatcatgccaagtactatttaaatggtggagataccaaagtgaatgagatacatacaaggggccctagttctcaaggagctcacattcatgagaaattaagttcacacatgcaagatataccagatattaataagtattactcagatcattaaactagaatgaggccaggcacagtggctcatggctgtaatcctagtgccttttagaggctaaggtgggaggatagcttgagcccaggagttccaggatacagtgagctatgatcactccactgcactccagcctgggtgatagagtgagaccctgtctctaaagaaacaaacaaacaaaaagtagaaagatttgacctgagaataactagatagctattttagatcaggtattcatgaataaaataacacttaaagtgagatctgaatgacagaaagaaaagccatgcaaaaatcaaggagtagggtgtgcagatttcac

SEQ ID NO: 827843 - DNA, 594 bp, Homo sapiens
attcttgaaatctttacctaggatatgtcagccagtattctagacatctggtatacatcatagaacaaaacagtcctgcccccatgaagtttcattctagcttacccctagtatatgccaggctctgaactaagtctaaaacagatgatccctgcccttccagctccctgcaaagccagcattaataataggagggctttttacagaaaatgaaactgtgacttgtttaagttacaacctgtgagtgttgaagtcagagtaccagtctttcctgtataccttaccacctatttgaaaaatgatggatagttatcttaaacggtgaagaattagtgtaagttcttaaacaaaatagtggcgatattaagatcatgcttgagaaacctaattcttgctgtctccttacatattttaagtttggcctaactctgtctctgtgcatagtgagctgtaatgtaactggatgtgtaaayagattgtagcctactcttgtgccaatctccaagttttggccaatcaaaggtggccaaccattcaaaccatgttcaagtaaggcaaacatcaagctgtaaccaacccaactatttttgtacc

SEQ ID NO: 827844 - DNA, 631 bp, Homo sapiens
catttttgctgtcctgcagcccttgctcctattgccctcaggctcaggagggagtggagtggttggagacctatggagatgcccagcacagtgcagccaccttacagaaaagcagccagactgttttccacatgcgtccccacctcccctacccttcactcggcagtgcctgttgacctgggcccccaatatgattaacctgcccccacctgaacactttagtcagtggtggctctgcatttctctgaggaggaaaccccagagacaacccagagcatgtatgacattgcagttgcagcagtactgccctgactgtcctcgggctggggaaggaacaaagggcctggttgctatgctgaaacctccagcaagctgcagctatcatatggagaggagcccagtctctttccagcgagctcccacaccccactcttcaccaggcaggggtcttgcctcaagatcactgaagagctcctccacccgcaactgagaattcccattgctaatggctttgtgtttccctggggaggtgatcccagaggcaaccaacascctctctgtacctgatgccctcagtctggggaagaaataaagaacctgagggttttactcatacttctagcacaccaca

SEQ ID NO: 827845 - DNA, 612 bp, Homo sapiens
ttcatatttaatatccaggcaaatggaacaggcagaatctcaatgtggggaatgaaaatagaaactactgctaagaactaaaattttgagtttctcatcctccatggcagtcagattttcttgattctcagtcaggccattccgcaatgagtcaaggtcctgcatggcctctagaggaattaactaggaaatagcttttacgtgagtagcaaaaggcttcctgttggaaaggggctttgagtattcctgactcctaactggtctcttattaggagttaatgcccatcagataacctttcttgcttaagtgctactctgatattctccctgcccttaatgagtcaattgtctagtatgtagcatatatttcaaattgctttcccagtgatggttattgagttgtaatgaactcatgtggtcccatttcaacccagtagcacacattacagaaccaatgattgaccaattgttctgcaaagtaytgtcatcagaccatctgcatcagacactaggtatacatattagaaatgcagaatcctgagccctgctacagataaaccaaactggattctcagagatgagtctgggaattcacatcatttacaagctttt

SEQ ID NO: 827846 - DNA, 514 bp, Homo sapiens
tgcagcttcactcctgaagccagcgagaccacaaacccactgggaggaatgaacaactctggatgcactgcctttatgaactgtaatgctcactgcgaaggtctgcagcttcactcctgaagctagtgagacaacaaatccaccgggaggaatgagcaactctggacacaccacctttatgaactgtaacactcgctgcaagggtctgcggcttcattcttgaagtcagcgagaccagcgagaccaagaatgcaccagaaggaactaattctggacacacaatgacatccataggctcaaagtaaagggatagagaaaaatctaccaagcagcggttgctatcctaattttagtaaaacagactttaaaccaaaaaagattttttaaaaagacaaagaagggactgacataatagtaaagtattcaattcaayaatacctgactatcctaaatatatgtatgcacttgacacaggagcaccaagactcatagagaaagttcttagatacctaca

SEQ ID NO: 827847 - DNA, 551 bp, Homo sapiens
ggaggttgctcggaatgctctggtggcaggcagtgtagtcatagttggtacctatcagacactctaagagccttgaatgtgtcctctcttaatctcatcttttacagggaagggcattgaggctgagagacattaagagacacttgctcaagttcatacaacttccagtaaactgtacagccccaaattgaatctaagtcttccaactccatgattctaaacataacacccatggcaagaggaaaaattttgtaaaaggactcatccatttccaacgaaagaccagagcagagactattctttcagccttacagctcctcaccacacaagcatcagaatcactaaggaacatcttggaaatattgatgcttggggcccatcctgcaatttctgattcaggggcctgagcatgggcctgggtctctggattttgaagaagttcctcagcctatgctggtgattttcctacagacttaytaaaaactttgacaaacccagttctatctggctgagcttccacttatttcttagtgaaagggattacaagtctg

SEQ ID NO: 827848 - DNA, 502 bp, Homo sapiens
ctaggctgcagtgagccatgattgagccactgcactcctgcctgggcaacagagcaagaccttgtctctctctctmtatatatgtctacaaattctttgatacctcttccttcaagaaatacagtttaaattcccctgcccttgagtgtgggctaggtttagtgactcacttatccccttctccctaaaatagcatagggcagaaatgcagaagtgtaattttcaagaccaggtcctaaaaggtattgcatctttttctttgctttgttcttttggatcactggctctgagggaagttagctaccatgtcatgaagagactcaagcagccctatgggaggcccatgtagtgaggaaatgggattcctttcaacagccaatgaggaactgaggcctcctgtcaatagctttgtgagtgagccatctgagaaatagatcctccagcccagtcaagcattcagatgactgcagccccagctgacatattgactgcaattttatga

SEQ ID NO: 827849 - DNA, 603 bp, Homo sapiens
cggcggcgcagctgcggatccagaaggacataaacgagctgaacctgcccaagacgtgtgatatcagcttctcagatccagacgacctcctcaacttcaagttggtcatctgtcctgatgagggcttctacaagagtgggaagtttgtgttcagttttaaggtgggccagggttacccgcatgatccccccaaggtgaagtgtgagacaatggtctatcaccccaacattgaaatcgagggcaacgtctgcctcaacatcctcagagagaactggaagccagtccttacgataaactccataatttatggcctgcagtatctctacttggagcccaaccccgaggacccactgaacaagaaggccgcagaggtcctgcagaacaaccggcagctgttggagcagaacgtgcagccatccatgcgggatggctacataggctccacctacttcgagcgctgcctgaaatagggttggcgcatacccacccccgccacggccgcaagccctggcatcccctgcaaatatttattgggggccatcrgtaggggtttggggggcggccggtgggggaatcccctgccttggccttgcctccccttcc

SEQ ID NO: 827850 - DNA, 590 bp, Homo sapiens
catgttttgatgtttgggattcttgaattttgcacttaaaaaagcaacacatttactttcttaaaaataacttttatgtctaaacaaatacatttttctctagataatgagctaagtgaggtttcagactcctatttataagcccttctatacatttatcatgtatataactatattaccaataaagaaaaagaagatattttcatagtaattcctttaagtgtttttttttaatactaggcccatcttaaaatattatatagtatttaaaaaccagatttgagcaatttataaatctggtaaaaaaatttcttcaaaagaatttgctgaattattataatacttaatattagcatggtattttaacatcattgtactttaagctacctggtttaaggattcattatggaatgaatgacatgatgtcaaaatgtaattttttcaattacacatacayaaataattgtatgtaaaaacactaagagtagctgataaatgccgcaatcatcaaacagccaaagcaaagagctagtagtgctcgcctaaaactgactacgttagtccatttatatctttctgtaaacttgatg

SEQ ID NO: 827851 - DNA, 590 bp, Homo sapiens
catgttttgatgtttgggattcttgaattttgcacttaaaaaagcaacacatttactttcttaaaaataacttttatgtctaaacaaatacatttttctctagataatgagctaagtgaggtttcagactcctatttataagcccttctatacatttatcatgtatataactatattaccaataaagaaaaagaagatattttcatagtaattcctttaagtgtttttttttaatactaggcccatcttaaaatattatatagtatttaaaaaccagatttgagcaatttataaatctggtaaaaaaatttcttcaaaagaatttgctgaattattataatacttaatattagcatggtattttaacatcattgtactttaagctacctggtttaaggattcattatggaatgaatgacatgatgtcaaaatgtaattttttcaattacacatacacaaataattgtatgtaaaaacactaagagtagctgataaatgccgcaatsatcaaacagccaaagcaaagagctagtagtgctcgcctaaaactgactacgttagtccatttatatctttctgtaaacttgatg

SEQ ID NO: 827852 - DNA, 615 bp, Homo sapiens
tgaaaagtggctatttttctggtggtatatgaaaacacaatttcagtggagacggaaacttccactcaaaacttgctttgcttctttgcaattaataagttcctggtggactattcagaaagtgttcagctacaattgctgaaaaggatgtcgttgggtgaagaggttaacgatagcctcctagaagcagattcctgctagaagaaaaggaggtttaggaaatgcccagtgaccatggtctctctggtattgcataaaacaaccacaatttggggatgggttcttgcatcctcaccctgggcccttgtaatgagacaccatgcttgaactcaatactatttgtataggggctgggaatgaggagaagacagggaatcaataaactcaatgttcaagacatcatttgcaaataaattcaatatttgaaggggaacatgccaaagagaaaaatcaaaccataaataaaagaaaaaaagtttgttaattacaaatatctccagaagccacaatgtctccttcctccctcattccctaacactcyttcaggtaggactgtacttcagtcatgtaggaaaaaacatttttctatttcatattaaagattaatgaggcctg

SEQ ID NO: 827853 - DNA, 605 bp, Homo sapiens
acttactttctgtcaggaaaatcagccttcatctttcaatttatacttttctgtttaatacacagccccttcacaacccttttccttcttaaattgaattctaggataygccagtagataagatacaaagctctgtcctgcatttgttgcctaaatgaaattcatgccgtgatcttcaacatttttttaccgattctctcattcactcttaaggcactcaccttcaggagcaatgcattttgttgttaataggtgacagaaaaagtgaggttgttagatataaattatcaagtcccattcctctcaacatgatatatttgaatatagactttcccgtcctatttttaataccatacttaaccttacgatctgatgtgatatatgatacaatgtgatatgatggcagagaaagacatgaagtcctacctcaggcttgcggtgcctcatttaattattgctttttttgatacccctgagaatttttcaccctcagagcaaggcactacagtaatatataggatagaggaaagttttgcctttattctgaaaagtattaggggtgtgattgtgaaggatgagggtaggatcgtagaagtagagtaaca

SEQ ID NO: 827854 - DNA, 597 bp, Homo sapiens
ctttcactggaccacttggccactttgacctcttagtacccttttttttttttttttgagacaatatctggctctcttgcccaggctagagtgcaatgatgcggtcttgyctcactgcaggctcaacctccctggtagctgggactacaggcacgcgccactgtgcccagctaaattgctttgattgtgctttgtcttcgggattgtactggtaaagccatgtttcagttcctattgcagttcttcgaataagtgcttcaggatcttgatcgtacttgtctagactttctatccaaagctctgctcttgtctacagctgatctgggtgcaaagggttttaacagccattgagtggaaagcttgctcaactttaatttttcagtcagaattttgtaagctgaaccagttgaaatgaccacagtgttggctattgtttctgctcttgtcagtcctcttgaatcggcagaaacaagatgaatttttttccccgtaaattgatgtggagggcatgatgttcaacatcatctcaacccttcctgaaacaatttatccagctggtcatcatggttcatgcctataatcctaccactttgggag

SEQ ID NO: 827855 - DNA, 668 bp, Homo sapiens
atcatgctacagtttaaataattcaaacatatgagtaygtttgcattcatgtttgtcatcatctagtcatatataaaacatggatttcaacatttttaacactgaagaaacaatgaaacctcgggaaagtggtgaatttatgctttccaatcacagaattcaagaatgtgctatttctgcagtagcaaaagatgataaattttccttcagtccattccgggaaacaaggaagcaaatttctctgtcccaatataaatgttgtcttttatttaatagggttaaattcacaactgatagctctataaaatgtacttcattctagaaatgttacctataacttacattttacttatagcagatgagcagaaatgcttcaatcatggcattgtgacctaaataacatacaggtgagcatgcttgtctgaaaaggattccagcagggttgcctttgcatagtgctcctttgaaaaaaaatatgtgaagccctttgtttaaacaatatcaataatcatatttacttttaagatggcacaatctgaataggattaaaagaaatactagcttctgcagataatttatatgtatgtcttttccctctgttcttaaaatatgaacatatttacacataatatcaccaccatctccttccttccccaaaaaataataaa

SEQ ID NO: 827856 - DNA, 604 bp, Homo sapiens
ctatttgggcaccctttagcctaatcaagttgacacataaaattaaccattacagatgtgttgtaggaatatgcatatttcttacaaaaaagtgyatagggagtttctgaacacatctctgaaccattgcatatctagcagggcttatgccacccaacagacatgggtgggattattttctagaaataaaacaagtgtttgtttcagggtgacagcttaaaaaggaactagaacaattcatcattttaaaaaaaagacaaccaaggagtactttgctaacagcaaataaatatgtgaaaatgattatataatagttatcagctgctttgaatttccacttaggtcagaagaagaaataaatgactgaagctagggcaagaggcatttagtttattttggacatagcatttaaggacttcctgagagtaaagtttctcaaagtttttgtgtggcatcctttgatttaaaaaaaaaaaaaaaaaagcactatctggcttcagtcaattcctttgacaagtcaggactggtttcagctgtaggccaaaggcactgtgtcaaggatatgaaatgagaaaagagtgatttggatcccacagatgtcaaa

SEQ ID NO: 827857 - DNA, 485 bp, Homo sapiens
agagacaatatttttggtggaaagaacagctcacgaaaagctgagaaagaaaaggatgtattttgccaacagaaaattatctagatgtgcctagtgtttaggttgtgataagggaaggagcgatgacagaagaaaacttaaaaatctgcttgcaaaatggaaatagaggaaggtcacagtgagccctaaatgtcattattttaaaatttgaatgtttaaaaattgagagccatgaacatatttgaaaagtggaacaacttttctaatctgtaatttaaaaataatttaggaagcaatgtaagggatatattaaagtgttgtgagactgtaagaagggtacccacttttattacatatatctgactaatttytaaagaggatttgatacagtttatagaattgaaaaataaaggtgaaaaaataggagccgagtaaataaagacaagaaaataagatgaagctgtagtaaggatgctgcaaaacga

SEQ ID NO: 827858 - DNA, 663 bp, Homo sapiens
tttatttgtcttgctttatttgtactagtcagaacttagaatacaatgttcaatataagtaatgagagcagatacccttgacctgttcctgatcttaggggaagagtcaatgttttaccagtaagtatgatgtgtagatacccgttattaggttgaggtagttcctttctattcctagatgagagtttgcttgtttgtttgtttgtttgtttttggagacggggcctaactctgttgcccagggtggagtgcagtggtgctatcttggctcactgcaacctcctgggctcaagtcatcctcttgaatagctgggactacaggtatatgtcaccacgtctgactaatttttgtattttttgtagagatgaggtttcaccgtgtttcgcaggctggtcacgaactcctgaactcaagcagtctcttctgcctcagcctcccaaagtgctgggattacaggtgtgagctgccaagcccggcgttgagttgagagctttttaagattgaaatggatattagatgttaccaaatgyttttctgcatctattaaaaagataatatagttttcttttttagtcattactatggtcaattatattgattgatttgtgaaagttcaactaatcttgcattcctaggatccatttgatcatgaggtgctatca

SEQ ID NO: 827859 - DNA, 600 bp, Homo sapiens
attatcttgtattttctctcatttatttgatcttcatttttaaagttttttttggctttaagaaagattttctcaactttatcttatgagctttctattgaattttatttatatactatacttttaagtttcaaaaggtatgtcatggttggaatgtttttgtcgcctccaaaactcatgttgaaaattaattctcaatgtaacagtgttgggagatggggccaaatgggcagagcactcatgaatggattaattactctacaaaaagagtaaaaagagcttctgagagtgagtcacctctcttctgctcttctgctatttgagaaatggcattcttcccctctggaggatgaagactccaaggtaccatcttggaattggagaccaggccctcccaagacaccaaacctgttagcaccttgagcttggacttcccagccaccagaactatgagagaatttatttccattctttagtaaattattcagtctcattattctattatagcagcacaamcaaccaaaacaagtgttccttgttctttatttttttttcacaaaacttcttatttcatgaatccttttatatttcagaggctat

SEQ ID NO: 827860 - DNA, 570 bp, Homo sapiens
ctcatttcctcacgcaacaaatttctattttccaccttcattctaccccaactttaaaacagaaacacagaaaaaccagctatgattgagaggaaacatgcacattatcaactatttttgcwaaaaaaaaaaaaaaaaaaaccaaacaaacaaaaaatcagactcttttcctaagcaaatgacaagatctaagagtgttttgccagagttcggcggtgcaatcaccaatcccatatattacagccagagactgctggcaaaccccatgagcgggttaggggcagtgacactcagaggctgactctggacttctcagcctctaactgcaattcctaaagtggaagactcctctctaacaagctcagtcactaaaagtagccaatgctcacagttccttccactcctagtgactagaacatctccactgtcccccaaacttaccagcctgtatttagacatcagtctcctgattcacttatgtcatgtaatcttcgaaacaatctgcttttcctccgctagacaccaccatccccacagtcccccacttcaccccatgctagctctggacac

SEQ ID NO: 827861 - DNA, 477 bp, Homo sapiens
tatattacagccagagactgctggcaaaccccatgagcgggttaggggcagtgacactcagaggctgactctggacttctcagcctctaactgcaattcmtaaagtggaagactcctctctaacaagctcagtcactaaaagtagccaatgctcacagttccttccactcctagtgactagaacatctccactgtcccccaaacttaccagcctgtatttagacatcagtctcctgattcacttatgtcatgtaatcttcgaaacaatctgcttttcctccgctagacaccaccatccccacagtcccccacttcaccccatgctagctctggacaccaggcccttgcacatgtcaaattactgatgtgcatttaccttagaagtgggagtgacagaacaacagcaccaagtgtcaatttgttaacggagacatgcttggttggctcattttccaaatgaaatttggttccacttta

SEQ ID NO: 827862 - DNA, 575 bp, Homo sapiens
cttataggcctttctcatttgtcctctttccactttcccctgcacyaccttcctcctcactgctaatcctcactaaatttacttagccctttgagccagcgtcgtaatacttacagccattaagtgttagtggcaaagaaagaattgtaacccagtctcctgcagtcaaggttaactttatgtgtcaacttgaccaggttaatggatgctagatagttggtaacattatttctggatgtgtctgtgtgggtgtttctggaagagatcagcacttgaatcagtggactgtgtaaagaagatcaccctcaccagtgtgggtaggcaccatccaatctgttgagggcccagatggaacaaaaaggctgagggagggtgaattccctttctctcttctagagctggagcatccctcttctcctgccctccagggctcaaggttctcaggccttcagactccagaaattagactggcagccccccaaattgtgaggccttagaactcagactgaattgcctcactaccttccctggttctccagcttgcagatagcatgttgtgggacttctcagccttc

SEQ ID NO: 827863 - DNA, 575 bp, Homo sapiens
cttataggcctttctcatttgtcctctttccactttcccctgcactaccttcctcctcactgctaatcctcactaaatttacttagccctttgagccagygtcgtaatacttacagccattaagtgttagtggcaaagaaagaattgtaacccagtctcctgcagtcaaggttaactttatgtgtcaacttgaccaggttaatggatgctagatagttggtaacattatttctggatgtgtctgtgtgggtgtttctggaagagatcagcacttgaatcagtggactgtgtaaagaagatcaccctcaccagtgtgggtaggcaccatccaatctgttgagggcccagatggaacaaaaaggctgagggagggtgaattccctttctctcttctagagctggagcatccctcttctcctgccctccagggctcaaggttctcaggccttcagactccagaaattagactggcagccccccaaattgtgaggccttagaactcagactgaattgcctcactaccttccctggttctccagcttgcagatagcatgttgtgggacttctcagccttc

SEQ ID NO: 827864 - DNA, 617 bp, Homo sapiens
tccagagcccacagatttgagccctctgctttctgttatttgtttgtttttttttgagacggagtcccgctttgttgcccaggcctgagtgcagtagtgcgatctggcctcactgcaagctctgcctcccggggtcacgccattctcctgcctcagcctccggagtagctgggagtacaggctcccaccaccacgcccggctaatttttttttgtatttttagtagacacggggtttcactgtgttagccaggatggtctcggtctcctgacctcgtgatccacccgcctcggtctcccaaagtgctgggattacaggtgtgagccaccgcgcccggccgccctctgctttctgactcctgtaagccagctttctctcatgtaggtgactagttcttgcatcaaagttacgcctgaagaccagttacctgatcgtgagctccagtaggttgggtcatgttgtccaaggactcccaagttgtgcaagcgctgcatttgtacttgggacattttgtcatgactagcacacacttctkcgggaagggatggctggagctgcttatgctacagaaagaacccagcatgaaccagcttcttctcactcaagccctgcaagtc

SEQ ID NO: 827865 - DNA, 572 bp, Homo sapiens
aacataacaaaggccatatatgacaaaacccacagcaaatatcatactaagtgaggaaaagcagaaagcctttcctctatgaactgcaatgagacaaggaagcccaatttcatcactcctattcaacataatactgttaagtcctacccagaggagccaggccaaagaaagaattaaaggcatccgaattagaaaagatgaaatgaagttagccttgtatgcagataatgtgatcttatatttacaaaacctaaagactccaccaaaaaaatgcttagatctgataaacaaattcagtgaagttgaagagtacaaaaatcggtagtatttccatacaacaatgaaaaagaaatcaagaaggtaatcccatttacaataagaacaacaacaaaaaatacttaggaataaagttaatcgagtaggtgaaagacttctataargaaaactataaagcattgatggaaaaaattgaagattacacagaaagattgacagacatcccatacgcatggattggaagaattaatactgttaaaatgatcatactacacaaagcaatctacagattcaat

SEQ ID NO: 827866 - DNA, 572 bp, Homo sapiens
aacataacaaaggccatatatgacaaaacccacagcaaatatcatactaagtgaggaaaagcagaaagcctttcctctatgaactgcaatgagacaaggaagcccaatttcatcactcctattcaacataatactgttaagtcctacccagaggagccaggccaaagaaagaattaaaggcatccgaattagaaaagatgaaatgaagttagccttgtatgcagataatgtgatcttatatttacaaaacctaaagactccaccaaaaaaatgcttagatctgataaacaaattcagtgaagttgaagagtacaaaaatcggtagtatttccatacaacaatgaaaaagaaatcaagaaggtaatcccatttacaataagaacaacaacaaaaaatacttaggaataaagttaatcgagtaggtgaaagacttctataaggaaaactataaagcattgatgraaaaaattgaagattacacagaaagattgacagacatcccatacgcatggattggaagaattaatactgttaaaatgatcatactacacaaagcaatctacagattcaat

SEQ ID NO: 827867 - DNA, 628 bp, Homo sapiens
gatatagcaataatggtttccagagcstagtaattccaagtatgagtattatgtatgtctcttcttttttcccattatgctagaaacataaaatttatttccatcccaaatagccagcatgtactgccaatttattattattagaatgacataaagggagggggtgggttgtggctcaagaggaagggactttacaaatatagaacaacctctttgaacagatgtcaataccaagaaaattctgaggctgactaaggattccagatgtaattgatgagatttcaacacagatgcattgttgagcactcaactggatcttctcactcttcagtgagagcccatggttgaaatgtacccagctctgatgtgcctagtctgtggcaaaagcaatagtgaactgcaaaatccccatgctgaaagaaaacagcagtcttgcagaaagatgctgaatttattaacttttgatgaaactatttctttacaaaacaaatgactccatccccagacagattcatactatctgcaacagtctgaaaattattaacagcaataatgttatctctggaaccaagaaaaggcagctagaattcattaatagcttttgaccacccaaaatgcctccacacag

SEQ ID NO: 827868 - DNA, 632 bp, Homo sapiens; identical to SEQ ID NO: 821178

SEQ ID NO: 827869 - DNA, 644 bp, Homo sapiens
atttttctcttcacattatttgaatactttctctaagagtgttttcaaggtagatctttgcgtagaaaatctgaggcctgatgtgtcactgagtatttgtattacacattcatattttaataacattttagcttgttatcaaattctggaataaagttatttttctttaatacgtacaaatattagtgtattgtgtatctagcattgctgttggtaagtctgatcgcaactttatttttattcttttgtagatgatctgttatttccttctgcatgcttttagaatctctcttggtatttgatattcttaagcctcacttcgtttgatatttttaagtctctattgttaaatccccccacttcttatctgtactgtttaacacattcaaatagaagtctttatcttttattaattttaaaaaaattatgttttttcaaagattttttcttctcttcatatgctttctttctggtactcttatcacgcatatgttggcacttctacatctgtcctttayatctattacttctctttgtctatattttctctttttacatatttaaaattttcttcttggagaattactgaatcaggctttctatctctttaaaattcttcaactgcacccaacctattgttcgtc

SEQ ID NO: 827870 - DNA, 587 bp, Homo sapiens
tgcagtgagctgaaattgcgccattgcactgcagcctgggagacagagcgagactcagtctcaaaataaaagaaaagaaaagaaaagaaaaaaatgtgttcagtaagccttggtccccaccatcaaaactaccttgctcagaagcaagatgcaacagctgattatatatttaaactgaaggctgataaacgaagacttcggaattgaagcagtcaggccaccttgggtctggtcctgctgacaattcttctctctcaaaaagatcatcaatatttgctaggaccagagtatccgcatccataaatacacattttgaatactgtgtaagcaaccagcagtggagctttgtcagcgtgatacccaactctggcctcttcattaaggttagatgagcagaattgtgccgtctgagacatctaccatgatgacttcatcaaagactgtctctaaaacttttctcatggagtctcaracctgaggggtggtgagtatgaccagtctcttggtggtcctgtgctgtttcagagatgaccccagggccaggacacctttggtgtaggcatcattcgtggtcagtgtcacaaagg

SEQ ID NO: 827871 - DNA, 517 bp, Homo sapiens
tctccacttaagcgattttccaragccattcggggccacagcatcattcgctgaactggacaatctgttggattgagaatccattcttctccaccaaattcctttacctctgctagaacataacattttgttttgtcaagatgaagtttgtttataagagactcaatcacctcagcagctgtggagttttttctggcaggaatcggacagtagattgtcccttctgaaatagccccaggatatatccgtaatgtatgttcattatcttcaaagcgtcgtcttcctccatcatttatattcatattggatcctgtcccatcagcatggatagtatatgttcaaagtcgtgcaaaccattttcttggtaaaataactgtaacataaaagatgcaaaatatttagaagtaaatacacattgctttctgatgctcaagaaagaaaagcttaacaagcatgttgattacatcttctaaaacacaaaatactaactcttgtcttagcacagcaacagtttcat

SEQ ID NO: 827872 - DNA, 539 bp, Homo sapiens
tatctcttcactgcctgttgtaaagcagcggcaagtgtgataaggcattaccttgcatttgcttcctgtccttcctgcctcactccccctactatcattcttgctgccctgggattgcacctcccagtaaaggattcgcatttaatgtttgcctcaagctctgttatctaaggaacatggaccaagtcacaggtatatgatggattctgataaaataatatgaaaatttttaattgaggtttgcaaaacttatcattttaattatatttttaattattcgaggtttacaaaaaacttaattttttaatttaacttattttaagttaattacttgaggcatacaaaaattttaattgaggtttacaaaaattattctcaatttgagagttataaaaattttcatgtaaaaaacatgagaatactattaactctaggggggaaaagtcctgtatggtaaacattgyaatcatagtaagtatgtcacctagctctgcagaaagaaacatatatgagaataatgtaaacactgatataaatac

SEQ ID NO: 827873 - DNA, 256 bp, Homo sapiens
tatccacttatgagcgatgtaacaagttagttgttttggttctgtgtccccacccaaatctcttgttgaattatgatcattgctgaaggaggggcctgktgggaggtggttggatcataggagtgaatttcccccttgctgttcttgtgatggtgagtgagttctcacgagatctggttctttaaaagtgtgtagcacttctgccttcgctctctcctcctgctctgccaagtgaagaaggtgcttgcttcccctt

SEQ ID NO: 827874 - DNA, 602 bp, Homo sapiens
aactgaaaatatttcacccacagttctgcaaccaccaataaatcaggctgctgtcatttttccatgtttccttccaaaaaaatagaagtgtcagggaactaaacagtaaaggcaacacatgttagaatggggcagattgaggcagttcacccaaaggagatgggatgttggaatgctttggagagggattggccagctttggatgtgctggcaaagaaatgtcacaaaagcaagccttggctgccctgcccagcacgatcccagggagacacagagctttagtcaatgggttttgagtgtttccacttctgctggcaagacaatccctatgataaaatcaggctgtcttcgctgcatactattagatacacaatttctctaattgttttgttctggttccgtgtttgccaagcaaccttacgcttccgagtagatcttcctgcacaaagataatgtgtcgtctcactgactttgagtatttctgtccccatcataatgctctctcaagagaaaccaagaatgtcacttttcaaaaattttcctaggattatgtaakattcactatttgttcagcattgctgtaaaactaaagtactttacct

SEQ ID NO: 827875 - DNA, 641 bp, Homo sapiens
atagtaaaggttgaattttgtatattaatgtagttattttgataaatttggtagtaattattataactttacataataaatttatggaaaatatagacatacaattgcataaagctaggtgggctaattaartaccatcatattgctggtgagggtggctgttattattattacacaaaatatatttattctttgaacaaatatttattaaatgctacatatgcaaaaactacttatgaaatgaccatcaagtgccaggtactgtttttggtgctgggaaaaaataaatcagtgacaaattctctgcccttatgaagctttcaatgtaacaaaggaaataaatacatatatattattgccatatacatacacacatatatggcaagtgattataactgctatgaaaaaagaataaaagattataaaaaagaaaaaagaaaactattaaaaaaagaatgatggaggctgttatttttaattgggtgctcaagtactaattgtgctacagactcaatgttaattcaaaatcatacatgattcctacctccccaggactctactgtcagtgagagaaagaaccactactcaaataatgacactataatataattctctattgctattggtgccatgaagaagta

SEQ ID NO: 827876 - DNA, 633 bp, Homo sapiens
gatgcctgaatcttcctcctcctcctcagccccagttcagagtcctgcctcttcacaaagccctttccatgcaccccaggtggacccctcctcacggctcttccagccctttgcytgtatcacacatttgagtgtttagggtggtagctgatgccggagcaggaagttccctttagtaatgtggatattactaaacccctcattttataaatgagaacactaaggcccgaggaaatcacgtgatgtgcccaaggtcatgccgttgtctgaaatgcttggcagctgcctgcacacagctgttgtgaatcccctcctgccccttcataccgtgccactgtcttggattgacccactgtgactgtgtgcactgtcttagataaggaaaccccagaaaacacccgtcatgaaagttcacaatggagagaggtcaccggtggggtctttgccttcttcactgtgactcttgcttccaaggtccaccttctcgttggccagcgctcatcaattaccattgcccctgcctgcctgttctcaggagtcccattctcacttgaaaagtggatggagcgccaagctggatctaggatgcttggggtggaattaacccagaacggaatatgcaatggctgttct

SEQ ID NO: 827877 - DNA, 633 bp, Homo sapiens
gatgcctgaatcttcctcctcctcctcagccccagttcagagtcctgcctcttcacaaagccctttccatgcaccccaggtggacccctcctcacggctcttccagccctttgcctgtatcacacatttgagtgtttagggtggtagctgatgccggagcaggaagttccctttagtaatgtggatattactaaacccctcattttataaatgagaacactaaggcccgaggaaatcacgtgatgtgcccaaggtcatgccgttgtctgaaatgcttggcagctgcctgcacacagctgttgtgaatcccctcctgccccttcataccgtgccactgtcttggattgacccactgtgactgtgtgcactgtcttagataaggaaaccccagaaaacacccgtcatgaaagttcacaatggagagaggtcaccggtggggtctttgccttcttcactgtgactcttgcttccaaggtccaccttctcgttggccagcgctcatcaattaccattgcccctgcctgcctgttctcaggagtcccattctcacttgaaaagtggayggagcgccaagctggatctaggatgcttggggtggaattaacccagaacggaatatgcaatggctgttct

SEQ ID NO: 827878 - DNA, 631 bp, Homo sapiens
tgtataccacccgacacctaatttcaatctttgtttccactaaaattttgaaaagttatatttagatctttaagtaaaatgagcaccctactgaaagtaaccataaggtattttaagtgctttcaatctccaaacaaaacattgacaattataaattatgagagtcaaatagaatcaaattatgatctaggtgacctaaattcacaatgatatacttatcccatttccaatattagacttcataacctaatggccaaagagagggaaagcatttaagttaatgatattaccagccaaaaaggatggacagtgagtggaacaaaatttccttggctaaaatgaagaaggttacataaagatagcattttagattttagtgggaattactcatttctggctctaaaatgttgctttattaattaacataaattagaatcaattctgtaagagctatttttttgttttactttttaaacatcttcatctctaacatgctaagtcagactgaaatacttaggtgtataacatttgtgcatctcttcagaaactagagtatgwaagtaaagtttaaagaataagaaaaatagagaataaattgtcagtgtctaatttaaatgctaccactgaaatt

SEQ ID NO: 827879 - DNA, 579 bp, Homo sapiens
gctctaatccaaagcaaaataaagcataaggtgctttaatctacatactattcatgccacaaaatgactttttttcayggcttcataagtttgcaaatgttttaaaaaaccttttcttaaaaacctatacccttacattttttgaaatatccctatcactactaatatggcttacataattgctatacaaaggaatatggttgcattatcttctatgacattttcaattaaactctaagttcggtataaaaggttacatttatttatataatgaggaaacgggaaaaatttttcaaaaaatcttcattaaaagaaatttgacagactgaagttattctcttttctacaactaatttttctccattagctaccatatagatttcaacttagtgttctatatacactatgacataaacatcactcaactagtttaaggggataatttagctcagaaacacgttctgagccaaataaattatagcttagcttaatctgaagttacaaaacaaacttggaaggaacttcatagttcagctagaccacacaattttatgaaaagtaaaatgaagccaatgttaa

SEQ ID NO: 827880 - DNA, 588 bp, Homo sapiens
tttttaaaatttatgccttaattttaattttgatgttaacctaagagttattcagaacaaaattgtttaatcgtcattttttttattttgagggatgtccttgatattaatttctatttttattgcattgtggtgtgaaagtgtgcttggtatgattttgatttttctaatttgtagagacttgctttattactgaacatatggtcaatgagaagaatgtctattctgtggttgttgggcagagtgttctgtagatgtctattagatttagttggtcaagtgtcaagtttaagcccagagtttctttgttaggtttctgcctcaaagatctgtctaatgccatcagtgggaagttgaagtctcccactattatcttgtggctaaatattttcatagatcaagtacaacttgttctatgaatctcagttctccaaagttgactgcatatttgtttaggatagttaagtcttcttattggattgtatacttcatcattatgtaatatctgtctctgtccttgttattgttttagtctattttatctgatacaagaayagtgactccttctctttttttttttttttttca

SEQ ID NO: 827881 - DNA, 541 bp, Homo sapiens
gatctaaaggattgcttttttttaccattcctttagctgcccaaaattatgaaaaatttgcttttattgttcccaccataaataatgaagaaccagtggacagctaccattgggaaagtattaccacaaggcacgctaaatagcccgactatttgtcaaacttatgtgggaaagctattaagccagttagaagacagtttaaaaaatgttatatcatccattacatggatgatattctgtgtacagctgagactagggaagaattgatgttgtgctacaaacagttataaaagactgtaaatgcggcagggttaattatagcccccaataaaatcaaaacttctactccctttcattatcttggaatgaaggtaaagcaaagtgctattaagcttcaaaaggttcaaattcaaaaagataatttagaaaccttaaatgatttccaaaagttattaggagacattaattggatttgtccaactttagrcattcctgcctatgctatgtctcacctctttttttactttacaaggtgattcta

SEQ ID NO: 827882 - DNA, 551 bp, Homo sapiens
caatggcatgcctcccagctacagccacaaatgcttttgcttgtgtttcagtgcatttactaacgtgggggtgaggatatgcttgtgtttttgcaggagatgaacaaaccatgtagatgccctcaagatgtgtttgaccatggaacaggagaatggaaggacccatggatcccaaccatggcctgggttcccccagtacgagccatgctgagaaactgctggagcaccagggttttacctatagatgcttaatggaccagtgctttctgactgaactcctctctaccctgaatacaagagaccctaataggtaggcaggagtatgatcacccctattcaacatgaagaagttacagaagacagaccttcatccttctgcaacccctaggattaagggtcctcttgtaaaagggaaaggggagatatgtaggaagcattcaaatcagagcaactccattttgaataagggctaagaaaaatgaagctggatcaccaagtggcaattaagggctgcacagcctgcaattgycttgctcaatttaaagaggcca

SEQ ID NO: 827883 - DNA, 617 bp, Homo sapiens
gtaccctctattctaaccctttcaaaaaaatgaataaataacctgaagtccctgttcccatcttacaaaacctactgttttgctatttcccagtggctttcaagcccaaataagtacatttatamtggtgaaactgacatcaattactaaactttttgtccacctttaaaaattgagatgaccaaagagagaaattattaaatcgagtttaacctgaagctgcctcattacgtattttaactttggccaaaaggtttctttgtacatcacaaactagaacaagtggaggtgtaaacagactgaagcctacatctgtgccaatcaccaagttttggccaatcaaatggagccaactgtttgaaccatgttcaaacatggcaaacaccaacctataaccaattcagctatttctatacctcacttttgttttctgtatgtcattttctttttctatccataaatcttccaccatgtggctgcactggaatctcagagcctactctggcttcagtgactgcccaatttgctaatcattctttgcttaacaaaattcctttaaatttaatttggctgaagtttttcttttatcatgtgtcctcctcaatttctttcattta

SEQ ID NO: 827884 - DNA, 575 bp, Homo sapiens
cactaggcttgttaatgttttctttttagcattcatagtattcttttgtaagcaataaactcactatcatgtatgttcaaatacacattcaaaattatttgtaaaatttagttcagaaaactaaatttctgggaaggaaaagcaatcaggtagcattgtcactctatctgaattttgacctctgaaattaaaaggcattgtatggaaaccgctgaattgtgcagttttaagagtatggttttatgacatctgttgaaagttaagtcatgatggacggtcctaaatggttttttagtacccacatgaggtaattaatctctctgcatcccttttcagatcctgtgttaggtccagcatgtatgaacacaaggctgatcatgtcataattctgtatagaattacaataacaaaatatttgtttgcagtggatctccattttgttctgtcaaagaactagatgcccatgacaaaggtcaaatggagatctggcatccatttcaatacttgtaagacatagtcttgagaatatgtaatacaaatarctccttgccagaaaaactgaaaggaaatgattg

SEQ ID NO: 827885 - DNA, 641 bp, Homo sapiens
aaaactaacttgagtttcagtttcaccttttttcacaatttaggtaatccatttgaaaatcctaaatgcattgggaaatatttggaggttgcagcttttggttagaatctaaatagttataagaataaacaagcaattttactctgttcatctcacagacatcatcaagtagaagcaattgctgaaatggactgaccaatagctacacaaggaatcatattactttagttctagctttgtaacagccaaaataatgagacctcaggctataaaacatcaatctatcctgtccttaggacaatgatcttgaataggcaatatattagtcattttagactgccatgacaaaaaccatagactaggaagctcaaacatttattttttcacattctggaggctggaagtccaagatcaaggtgccggcaaagctggtttctggtgcagcctcttttctttgcagatagctgccttcttactgtgtgttcacatgggcttgtcctctgtgcacttgtggagagagaaagagggagagagctccatggkttcttcctcttcttctatcaggacaccactcctatcgaattagtgccccacccttataacctgatttaacctaattacctccttaaaggccctatctc

SEQ ID NO: 827886 - DNA, 529 bp, Homo sapiens
tcattaaccattcctccagttcatcatattgtatgaccagcatgtctcccagggcagcgctactcaggtttgccggcttctattccatcttgtcaggttccagaagcaagatgaatgtgacaaatacatarcttcacccgtgtgggtatctagtataattgtgctaagagataatattattctcttcctctgagcctctcttaaggcaccaatgtaaaattggattttcctcgttgcaataacccatttattcattcctttatccccaactgctagttcttgttctctccatttgtggtttattcttactcaaactttcctcctctggaagggatgtccggggacaagaaatgtaaccactttacataatatccattcaaacatttccattttaatccaatcttcaccttaatcccatcaaacactgcatccccatatcctctcatttgactgtagattccattacgacttcaccaacaggttttggaatcctagagcattgggatcccatgtcaagaagccctagaaa

SEQ ID NO: 827887 - DNA, 622 bp, Homo sapiens
ttaaataatcctctgaccatgctcgaagaacatctctttccatgccagcatctcacaagcacattctgatggcgcctaaactcaatatcaycatagaatctaagaagcattatctcaagttcagcttcatactgaaaagatggaggctgacctcagctggatgaggcaggagaagtacctgtcctggtgcatcagtcattattgtaccaacgcatcttcattattagcccaaagccctttcatccaccaaattgttggcattcacccggccatccttctggtggcccagactcaaaagctggtggtcatctttgacctctccctcttcttcattcaagttttgttagttctgtatccacaatgttactgacaagtgttttctcctttctgttttcacagagcacatcttgtaaatttaggctcccatcatttgcatcatgttctattgctgcggcatcccaaaattgtttgtatgacctgcttcttgtcccccaagtccactatgcaatcagagtagctacctaaagcaagggtaaggccaagcatgtctggctcaaccataattgcttgattcgaaaatgttcaaagtcccctttgtgcaacatatatttgcatggtatta

SEQ ID NO: 827888 - DNA, 552 bp, Homo sapiens
ccaaccaatgatcacactgttgttgagagtttaagtggacaaatgtcctggccatctcgtggtgcttcttttttagagtttggtgtcctgatgaaacaaaygtctggactgtttttgaggcttccaatgtgcaaaaatagttcccaaggcattgaatcaacctggggctccattaaggtgttttggttaattcttgtagctgctgaaaaccctgtcgtgtatagtgcaccaggtccaccaaactgctgttgagggccaaggtgcacacatttgtgctgagccgagcaaagaattctgcaaaaaaaacaaaacaaaacaaaaacaagtaaatacacaagcacacacaaaaattaaaatggaaacaaaaattcaaggttccagaaggtaggtccccacaatattctgcacttaatcacatcaaaaaaatcacaatctactgtaattgcttgctaattctccactagactaccaaccaggtttgctttagagctgaatccataatgcttagcacaatggctggcacttggaaaacaccaaatttatacctttgcc

SEQ ID NO: 827889 - DNA, 633 bp, Homo sapiens
tctattctaaaattaggtgctgcagacataaaggtatacatctgccaaaagatatgtacaagaatgttcacagcaaaattattcacaagagtcaaaaaactagaagcaacccaaatatccatcaataagagaatgagtaatattcatataatgaaatactacattgcaatgaaaaagaattactgctaaatgcaatgaatgaatttcatagacacaatattaagcaagagagctcagacacataagaatttatactgtatgattccattaaatggagttcaagatcagacaacactactctatggtaatagatgtcataataatgataacctttgtgcgagttgaggtgaaggcagtaggaggaattatgaggtatacatttatctcgctgaacatttaacatctgtgcattttcctttatgtaagttatgacataattttaaaaaagaaatagagaaaagaaagtaaaagaggaatagagagggagaaggacagagtaaaaactrgaacaagaatcagaagttttgtcacataatgttgggcaaatcacttaatctcgaaaattgttttctcgttagcaaaggaaaagaaaaataatatctctaccactgggaaaaataaaaaaaaactgtc

SEQ ID NO: 827890 - DNA, 533 bp, Homo sapiens
agcacccaaattatggtctctaataccatttctcttgaaagaaactaggaatcatcagattaatgactaatttccagggcaggaaatataaaagatgaacttgtataataatacytgtcatactagaaaggcagtgaaactactgaagagacaactggggacgtatcaaaactcaggagccaacttaaaaagttcccctgagcgaagactgacaatttgaacaccaatgcagtagcgattgcattgcattaaagcacatcatatatgtttaaacccaccagttcataataccattttttaaaaagaaggggtggtcattgatcacctttggagtgtgctaggaaacattcactgttttgaaaacacataaagggaaataggcatttatctagtttttcttatatgaactgcacctcatggtaataaaaaaattgataagtggaagtttctctttatagatatattcctgcttggaataaggaatgatagattaccccttgtgtaaccttgaatgaaaagtgattatcagtggc

SEQ ID NO: 827891 - DNA, 464 bp, Homo sapiens
agggacataagtttcaaaattatggaagaaaaagactgaatagtcagaataagtggatgacagatatgatttcatsgaaaacagatcccattgtggtatctcaattaggtctttaaagtttcctgctcttgcttaactatggaatacaatccaaagagaatggcaggcatgctttgcatgctgaagacatgaaaggctgacagctgatatacaatctcagattttacagccaagcccaacaggcactacctttaaaaccacttttctgtattcattaactatcctgttaaatgttttttcccaaattaaaattttatatctaatacatagaaattaaatgcatgatttagcaatataaaaaaactgttgatatgtgagtatgcaaagaacaatgttacacatttgtgaaaaaagagaatacgatgaatgaattaagagtcccaaatcctggcttaagccccaga

SEQ ID NO: 827892 - DNA, 590 bp, Homo sapiens
ttcagaatcagtctggcctcacttcagattcattaggtctgagcttaatgcttacataaagcattaagataattgggagtctattggctatttcaataagtccctaaaataatatttaaacagtatttattgcatgattaatcatcaatgtggaatgagagataccagggaaacacatgcacacatacacacagcacatcgtggtttttgttttgcctcgccattctaacctcaggatctgctggtccagatatgtttttaagccacttcaccatcattactcattagtcaaatagagcaagggatacctgcatgagttctttagaagaaaacacaaattaattgaactgataatctgagggattaagaaaaggatgaatgaaggatgaagctgaagttttcaagctgagcttaaacactgtgacatgtatttataagtgtgacctaaaaagctagggaagaatatagttcatgagwattatgaatctgtaacatattctctcacaatagttacacaaaatgtataagttgggcagctggaaatataaataggagggtcaacacatttgaagaatatgaacttcatctta

SEQ ID NO: 827893 - DNA, 611 bp, Homo sapiens
ttctgattcttttccaattaacatggtttacatatacgatagtatcgcacttttaaatattaagaaatttaattgtgaaaaatgtattattccatctttgatgatgtcagtcacagagtaactattttttctggaaatgccttctccaccacgcctgtaaaatattgagaacatcacaagaaaagaccaattcataatttccttcatttgtgtggcttctaaggtaaaaaggaaaatctttgcacaaagcctaacatggctacatttagtccttgaacttttgtgcttggaaacatgccaaacaatctgccttggcaaatggcccccagggcctaccaaaaggtgcattgtcatcagcctctggtatatgagatcctctggaattatccgagtgagagggaaagaataatctccttatggtcacagtggctgccggtcttctttgacacataacttcttggtaatctttccattagaccagaacctaaacaaaatttctagattggtttatcwtaactcagaataaaacataatgaatgcaccaaaatgtaaaaacaacttatctcaaggaaaacaaatattataaaaattttcatctccttaaatagttt

SEQ ID NO: 827894 - DNA, 598 bp, Homo sapiens
gtgaaaaatgctgtcatcagagtcatgcagagaagacaggactccaggtaattaatatagcaggaatgytgaacatttaaactcatcttttctttcattcctgttgggtattttcttagtctctctataaaaacaattgaatcttttaatttgtttgcatttctgttgtgctaccctttgcttcactaaacatgattttaaacatttcaaggcatatgtttttagaaatccaaatggtaattagaaatcataatatgtgtgtcatgttttcagtctacatatatgtgtttgaagcaactgatgtggaaaataagaaaatatggttgtcatttttaattatattattcaaattcttatgtatacttcaattgtagataaatttattatggaaagaactatttgggacacaatgataatagttttagatgttattccatttattatatggggaagaattatagcagagtgggtaggagtacctattttggaataaaacttcccaagaattagattctaaatatgctacatttttagctgtatagccagtaatacgttacctaaagcttaagcctcccttccctaagtgcacaagataaat

SEQ ID NO: 827895 - DNA, 608 bp, Homo sapiens
atctgtctactactatcagtggtttttcaaaatccttcactataattgtgtggttacctaagttcgtcataggtatcaagtaacttgttttatgaatctgggtcctctgctgttgtgagcatatatatttaggatagttaaatcttcttgttgaattgaactcttcaccattatttaatgcccttcttttcctttttgatcattgctggtttaaagtctgttttgtttgtaataaaaatagcaactcgtactctttttcattttatgttttcttgatagagctttccctatccctttactttgagtctgtaggtgtcatcagttttgagatgtgtctcttgaagacaacatacagttgggtcttgcttatctatccaacttgtccctctgtgcctttcacatggggcatttaaccaatttacattaaaagttaatatggtgatgtaaagatttgatcctgtcatcatgttgttaactgattgtgtagacttaattttatagttgctttatagtgtcaatgggctatgtacttaacmtatatttttgtggggccaagtaacagtcttgtttccatatgcagcactccattaaggatccttgtaagacat

SEQ ID NO: 827896 - DNA, 520 bp, Homo sapiens
ttggatgcatagcgtaacaccaaattattattcttccctatcaaaatgcaaaattacacaaatgattttaaatatagaatcggtgtttatttgcaactctagaattgggtaacatcrcttctataaaataggataagagatccattgagctgagcagaggagcttggctttacaggcagaaaaggattggagaaagcagaaatagggggaaaaaaagtagcttggggctgggcgcggtggctcgtgcatgtaatcctagcactttgggaggcagaggtgggaggatcacaaggtccggagtttgagaccagcctgaccaacatagtgaaaacccatgtctactaaaaaacaaaaaattagcttggcgtggtgacgggcgcctgtaatcccagctgcttgggcgactgaagcaggagaatcacttgaacccgagaggccaagtttgcagcgagccgagatcgtgccactgcactccagcctgggagacagagcaagactctgtctcaaaaaaaaaaaaaaa

SEQ ID NO: 827897 - DNA, 547 bp, Homo sapiens
gcaacctttaaaaactatttaaggctgtgcacgttggcgcacacctgtaatcccagcactttgggaggccaagggaggtggatcacgaggtcaagagatcaagaccatcctggccaacatggtgaaaccccgtctctactaaaattacaaaaattagctgggcatggtggcacacgcctgtagttccagctactcgggagtctgaggcaggaaaatcacttgaacccaggaagcagatgttgcagtgagccaagatcatgccactgcactccagcctagggacagagcaagactccatctcaaaaaacaaaaaacaaaaacaaaaacaaaaaaccacactcacacgcacacacaactatttaaaagtagaaggaggaggaggaagaggaagaggaagaagaagagctgtacactatgcraagaagaagatggatggaacagataaagtcaatccaaggctcatggtatgctcagcagagcagatactgcttgaagcccctccctaaaggcttcatgcaacctaaaaggagaattcaacctagaagga

SEQ ID NO: 827898 - DNA, 455 bp, Homo sapiens
aaataccatctatctgtaagtaaatagaatggaaagggcttttgggcacccacargtctttttcaccatatcttcaagcacagctagcaatatttatcagtattatcatctccaaaggagatatacatctgtttatatatgtaaatgcatgtatttatatgcatgcgtatgttacaccatagcattaaggtgtttctatgagaatttttcacttctttacatatttaagcatcttcagcactatacggaggaacagctccacctggttcgtggccgaagtggagttcccatagccctgcccactaagtcttctccttctctcagcagtggcccccacaaggcacatctaaagagcccctaggctcctgaaaaccacagaaggaagtgattctcactatggagattaagaaagacttttgggagggtgggggtaatgggtagtttttaaactggga

SEQ ID NO: 827899 - DNA, 607 bp, Homo sapiens
tgactgatgaactatttaacagcagaaagacagaagcactatgaagcaatgtgaggagggcggggaatcattagtgtaaatggtacaactaygaaacctgcataagcagctaataagcatatttaatagagtgccgtttaaatgttccatttaaaacgtgattaacattcttaggttggatcctgccacctccatactaaaatttggcccattatttgttctacttttccacaaagataggacttttttgttttggttcagttcaggtatgttatacgtatggcattctttcaactctctatctagcagggttttttaaaacaatttttctcttaaacaaaatggtttcaacatttctgacaactgtcttaacccatccagttaaggccaaccatgaccctaggttcaaagcctgtcacttacctgccacatagcaggaggctcgtcaacctcactgacccttaggtttgtcaccagtaaaaacagagtttatttgaagatggtactgccaggcagtggctctaccagccctatgtgaaaatgactgtgaaatggtacaatattatgtagacactggggacattgttccatcaatggcagttttgtt

SEQ ID NO: 827900 - DNA, 634 bp, Homo sapiens
attagtcataaatgctatcactgaaggtaatgattagattttctttttccacattctacagaatcatcacagtaattttgtgtagatggaagtggctcctaatgtatcactttacatgttagagtgccarttaaataacactattttgtaatgaagataatggcaatgtcaaattagtctgtaattcactatacttctaaagccctggaaacaagtttcactgtttttaagaagtatttaaatatttgacactgacttatgataaaaatgctcatcaaaataagaatgggaaggaacttcctcaatctgataaaatatacctccaacaatgtatggctaatatcattcttaatggtgacagactgaatgctttccccttaagatcatgaataaggtaaggatgtttattttcaccacttctattcaacattgtgttgaaggtcctagtcaatgcaatcaggcaagaaaaacaaataaaaatataaaagaaataaaaagcaaagactgaaaagaagtaaaactgtccccatttacaaatgacatgattgtttttgctgagaatcttaaggaatcaacacacacacacacattctctctctctccaacagaatttctaaatagtagcagcaaataa

SEQ ID NO: 827901 - DNA, 531 bp, Homo sapiens
ctggctgctggagcctgctgtaaccacaggcatggcagcctagaagtgcctagagtactaatgccatatccccaactgcagccctcgaccagcccaacctcagataagatgtcatggaggacgtcaggatatcattgtgtcctccactggctccacgtactcacgggggtaggttgtatgttaacaattcctttcttgcctccttgcattctgtctcggttcacactcccctacagtactgattggcatgaaataaactacttgcactcaaatccgtgactgaaggtctgcttcttggggagcccaggataagatgccccacgtctctcctccttccttcgaggaagcctagtgtcttgcttctgactgttttccttctttttcaagcacagaaaaatgggccatttcgacagacataacagtttgctcactgaattgctgcccattgtacttggaatgagtaataacaacaaaagcctccctaacwcagtctaccagaacctgcagtatctgagcccagcctgcctccag

SEQ ID NO: 827902 - DNA, 543 bp, Homo sapiens
ctctggactgagcagctgaccccttcttccacccctcttctcactatctcttttgcctaataaatatggagggctgtgtaaagctcagggyccttgtccactagaggcaaggtgccccctgaccccttcttccaaatatactcttttgtctcttgtcttttattcccaggttcgcccccttggttcagtccccctaggtccatgcaggctacaagtggcacttgaacaggcaacagtccgaacacagggactatgaggacatgaacgaagaaggtctgccggagcagaggaactgaaattgaaaggtgaacagggatgccgggccgggtctgccagcagcggatataaggtcagtgccctaatgaggtactgggagtagtgctttaaggaagtgctgggaaccggaagttttctgaatcaggctaacaaggggaagaatttgtctgttgaagacaaacattatgtgcagctgcttaaagttctgttgagacagtctggagctcaggttaattcgcaggcactaactaacctcctgcagaagcc

SEQ ID NO: 827903 - DNA, 552 bp, Homo sapiens
ggcttggtcacatgacccgctttagccaatgggrcagcagcaaatgcaatgtaagcagcggcttgggaagcggttgcacatgtggcttgctctgggaaggctgcatccaatggaggagcccaggctagcctgctggagatgtacggctcagccaacggcagctaccccaggccaggcaaggccaacttagaccatgctgcaccaaggtgtcttcagctgcctgggtgagcctaaatgaaaccagcagaattgcccagcctaacctggaccagatgacaaagctaatttagtgtggtttgagtgcattaatagatcattgagacaaactttcaagtgtccagtatctgaagagaacaagatgaccaatgctgtgcagatgtgacagagcagataactgtacctgcagtgtcctgtccttggaagcactgtgggaagacaaggcttaaaggaaaacttctggtgctctgggttcctgacatcggcagccccaagagaggggttctcagttcacactcccctctgcattctgaatcccaaagaggatccttaact

SEQ ID NO: 827904 - DNA, 632 bp, Homo sapiens
agataaaggaaggctaagagagagacgaagaggagggcagagagcccaagagtgacagacgaaggaagagactgagagaggtagacacagagagagctagggaaagagacagagagaggccgattgccatgtgtggccccagcgaggcagctgttttgcattttactcagtttgttttcagccctgacttccatatcctataaggccacctgggttccaagcctgtccctgaatctccacgaccctgagctgtacttgcttccaatgaagacccgattaccttgtgcggacttgagggaggccctctttctcgtgcagcctgaaatgtgtccccggtgctgggtggtcattcctttcttgtgtgtcagcctcacctcaagaactaggagtgtctggagggtaggaagacgctgccacccacttgcatcctctaatcttccacagctgaccccagtgggtgaaggtcagatagctgagttgagcagttacttcatcatctctaccaggaagcattcaagggcgttacaaggtgctcayacccttcagatgtgcttgggacaatggccccagcccctgggcctccctgctaggtcctggttgtgggactggggagaaactggtgggggcaacag

SEQ ID NO: 827905 - DNA, 619 bp, Homo sapiens
tcactgagttctttttctcagcaagaaacatccctgagaaagaaaatgagtccctgagggtacgcctctgaaagggccgcttcagaggcagccgtcttttatggttgcagctgtagggatgaaataagccccagtctcccgtagcactcccaggcttattaggacgaggaaattcccgcctaataaattttggtcagaccggttgtctactctcaaaccctatttcctgttaagatgttatcaatgacaatgcctgcctgaaacttcattagcattttaatttcaccctggtcctgtggtcctgtgatctcaccctgcctccatttgccttgtgatatattattaccttggaagcatgtgatctctgtgacccacaccctattcgtacactccctccccttttgaaaatcgctaataaaaacttgctggttttgcggctcagggggcatcacggaacctgccgacatgtgatatctcccctggacacccagctttaaaatttctctcttttgtactctttccctttatttctcagactggccgacacttagggaaaatagaaaagaacstatgtgaaatatcgagggtgaatttcacccaatattcactgaatttcccc

SEQ ID NO: 827906 - DNA, 607 bp, Homo sapiens
agcagattctacttgagactcattctcttgtttaatcaggaatctcaacagtctcttgtaaatcaattgaagacccttacttgtagggactaaactgaaagagataaacataaagtgataacacattctgggagctcaataaatggtagctattcatattattctggggctaggatcagccccaacacatagttggttcagaatattgtatattatcacattctcatttcactagaacatatttcacttcttcctttttctacaaaaaaaataaaactcatcatttctgttgtctagcttacattaaccaattaaccatgccctatagaatcagatgagacttgaccagtaaccagaacaacattctctacaggatgttacaacacctgtagaggatgtttaaaagcagatgaactgtgtgctcccattccaggaacagacaaatggcaattcactgagtccagcctggggtgcagccagtatagtctctaccatcatattttccagccttcaaaccttttgcaaaataaattctaagcagctcagtaatgcaaattatttatgaaggatccrtgctccaaaaacacatatgcacatgaggaaagag

SEQ ID NO: 827907 - DNA, 686 bp, Homo sapiens
ataaaaattaaaaaacatgtctcagaatatgtaggatccagttaaagcagtgctgagaagaaaatttatagcagtaaatgtttccattagaaaaaaagktctcaaatcaataaagtttctatcttaagaaactagaaaaagaggagcaatgtaagcacagaccagacaaaaggaaaaacataataaggataatgaacagaaactaatgaaatccaaaacaggaaaaaagtaggtaacatcaatgatcagaaaattaatttctctatgccttatttgttgagagtttttattatgaaaacacattgaattttgtcaactacttttccttgatctattgagatggtcatgttatttttatcttcattctactaatgcagtgtatcagattcattgatttgtgtaggttgagccatcgttgcttcccagaaataaatctcatttgatcatggtgtataacgcttttaatgtgtggttgagaattcagtttgctagtattttgttgaggatttttatgtctgtttatcagggatagtggcctgtaattttttttcttgttgtgtccctatatggcattagaattaaggtaactctagcctcataaaatgagtttgaaagtggtaccttctcttcaatcttttggaagagtttgagaaggattgttattagttcatttttaatgtttgata

SEQ ID NO: 827908 - DNA, 618 bp, Homo sapiens
tttttttttttttttttttttaaataaaaaacactctactaraaagccaggctcggtggcctccctctgtagtttcagctacccaggagactgaggcagaaagatcacttgagcccaggagtttgattccaactgggcaacatagtgagatccatctcttaagaagaaagaaagtctactagtaattacaaggaacactgtaaatgtttgaatttacagatggtaaacagtggcatttagctcaagttctgtttacttcccagatcatttggatcctaccccactccccctacacaaacatgttaaaattggagagtaataaaaaagaattactattaataacttcatattgtagcacacgtgttattaacaaaaatttagaattgttttcaactcagtaaatcaaaatatgtaatttgatgttctttacattttcttaattctcagtatttccttttttaatataatggtaaggtacagtgctaaccatctaagaatatgcctaggaaaatagtgtcattagaatataataggtaaaatggaatatcagataaaatattgaattaaatggaagtgacaggcattattttattatttacattataatcttttattaca

SEQ ID NO: 827909 - DNA, 633 bp, Homo sapiens
gttgctaggatatttgtgcaattcattgggaatacgtctaaatgtcagattaaatgtaagaaataaggtatatgtaatcattaaatttattttcataaaataagcatccttagatctagataatggactgatgatcttcttagaaatcttgtttctcatattttgtgattcactagatagtttctgttaacacttcagggccagaagaaacacacagaagcacacatatatatatgtgtacaaacatgcacacacacttagatgtgtatgtatgttatatatttacatatactttttcaggcatgtgttttttttttaaattgggctattaaaaattagaaaaatatgtttgaatgcttatctgattttatgtatggaaagacattctaaacataagaagctatttaaatcataaaggagactgggcatggtggctcatacctgtaatcccagccctttgggagccaaggcaagaggattgcttgagcccaggagaccagcctgggcaacatggcaaaaccttgtctctatgaartataaaaaaaatagctgggcttggtggtgtgcacctatattcctagctacttgggaggctgaggtgggaggatcacttgagcccaggaggtcaaagct

SEQ ID NO: 827910 - DNA, 632 bp, Homo sapiens
tttctcccttacctccatttctcccctcctctgttttcttgtatatctacctggatggatgaattataacaaaatagaagtaaaggtttgagttttgtaagtttctttttcttgacaaaaagttgagaatagaatgataatttcctctaacagatcttgagagtgtaagaatctgtggtaaatacataataactcaagtttgctaaactaggctacttaactggttgcctattttattgttgaatcaaatatcctaaaagccacaatttcaagagattttaaaagttgatttagttctctgagtgacatccatgtttgttctaagcaaagtacaatgggaaagacattgacagtcaaaatattagagttaaaggacccagctgcctcactaactttatttaaggtacagttacttcagtttctttttctgtgaaatcgagttgaaaatatctttgttttgaagatgttagaaatatgtaaaatgtgttttacagatgttaatgtgtgtattatactttattaaatccccctaatttaatgagctttatacttagcaccagtagtaactacatggctcattcacagtatgatatagayaaccttcccatatattctttgtcactgaacattga

SEQ ID NO: 827911 - DNA, 540 bp, Homo sapiens
ctgatttgcttataagcttgctgtaaagaaaaaaacttgtattcctcttagaactataaaatttttttgttgggggtccattccaagaggaccaaataggaacagctccagtctgcatctaccagcataactgacgcggaagacaggtgattttggcattttcaactgaggtagctggttcatctcattgggactgactggacagtgggtacagctcatggagagtgagctgaagaagggcgggacgttgcctcacttgggaagtgcaaggggtcagaagatttccctttccccagccaagggaagtcgtggcagactgtacctgggaaaacgggacactgccgtccaaatactgcacttttcctgtggtcccagcaaccagcagaccaggagattctctctcgtgcctggctcagcrggtcccatgcccacagagccttgttcactgctagtgcagcagtctgagattgacctggaggctgaagcctggccgggggaggggtgttcaccattgctgaggcttgagtaggtaagctaagc

SEQ ID NO: 827912 - DNA, 540 bp, Homo sapiens
ctgatttgcttataagcttgctgtaaagaaaaaaacttgtattcctcttagaactataaaatttttttgttgggggtccattccaagaggaccaaataggaacagctccagtctgcatctaccagcataactgacgcggaagacaggtgattttggcattttcaactgaggtagctggttcatctcattgggactgactggacagtgggtacagctcatggagagtgagctgaagaagggcgggacgttgcctcacttgggaagtgcaaggggtcagaagatttccctttccccagccaagggaagtcgtggcagactgtacctgggaaaacgggacactgccgtccaaatactgcacttttcctgtggtcccagcaaccagcagaccaggagattctctctcgtgcctggctcagcaggtcccatgcccacagagccttgttcactgctagtgcagcagtctgagattgacctggaggctgaagcctggccgggggaggkgtgttcaccattgctgaggcttgagtaggtaagctaagc

SEQ ID NO: 827913 - DNA, 576 bp, Homo sapiens
gctccagtttcttggtattyaggttactttttttctttttggaaactttagtgattatctctgtcactggtgttttgaaatcgcatgatatgttcacccatccttttttcattcattgtattaggcatctgacaaacctttggagtttggagatttctgtttgggagaagttttcttgtttcatttctgtggtaaatgctcacttttattttctgtgttctcctttttttaagaaactcctattgttctgacattgttctgacactgagcctcctgcatcaactccttttttttttttagctcatttaattgtatgttattttctttctggcctttcatctttttgtttttttgtttcaatctttttaaataattttctaaacttaattacttattttagttgccatatttgtaattttgaagagctctgtaactttttatttgttctttaattctcttttttacagtttttgttactgtttaatggatataataacatatacctctttggagatattaaatattgtatatatacttttttcttttgttcccagcaatgtatctgatgtctccaag

SEQ ID NO: 827914 - DNA, 539 bp, Homo sapiens
ccttccctcccctccatggccaattcccttcctccacccgcaggcaaaccacagagaagmtttaggcaaagttttcctagattcatttgcattttctattggagtatttttaataaatggaatcgtataagactcctaacttgtttcagcatatttatttttaaatatattcatgttatgtattaatagttccttcctttttgttgttaaatagtattcaattttatagatacactacaggttatttacacattcatccactgattaacatttgggttgcattcagaatccagctattacaaataaagttgtcaggatcatttaggtacaagtcctaatatagacatatgcttccacttatcttgggtaaatatctactagtggaatggctagattatatacaagtgtatgcttaatttattaagaaactgtcacacttttcctgatatagccataccattttatgtccccactatcaatgtataggaattccagttcctccctatccttgacaatatttagagtcgttaatttcctta

SEQ ID NO: 827915 - DNA, 626 bp, Homo sapiens
acagaatctcttacaattaatttttataaaccttccacaacttgcttaaattttagatttttttcttacgtaaagcaatcatttaacactttaggcagaaaggaaaaaaaaaaatccacatttccatggcttcttataatctttcaccaaaaacacattttactttctttacacacctttgcatgtaaaatcgtttctttagtagttttaatttcatgttataatattaactctcagcaacttttatttttggtgaaaaccttggtaagtaagagattttaattaggtactaagtgtggagcctagcctagcacacaccaggaagaaatgcagacaagagctgactctccaggatagctaggggcttggctaactccacatgtccccaggtcttaccttacttaagcaggcaagttgtacgacaagagttatagtggcattttatgaagcatttaggaggtctaacaacctttgaattgtacaacatttcttccataaattccctttcacaaatcttttcatgactcacatggaccgtatgaracatccttgtactttctgacttgccctaaaatccctccttttaaacaactggtcattttactttaggacaataatttaccata

SEQ ID NO: 827916 - DNA, 626 bp, Homo sapiens
acagaatctcttacaattaatttttataaaccttccacaacttgcttaaattttagatttttttcttacgtaaagcaatcatttaacactttaggcagaaaggaaaaaaaaaaatccacatttccatggcttcttataatctttcaccaaaaacacattttactttctttacacacctttgcatgtaaaatcgtttctttagtagttttaatttcatgttataatattaactctcagcaacttttatttttggtgaaaaccttggtaagtaagagattttaattaggtactaagtgtggagcctagcctagcacacaccaggaagaaatgcagacaagagctgactctccaggatagctaggggcttggctaactccacatgtccccaggtcttaccttacttaagcaggcaagttgtacgacaagagttatagtggcattttatgaagcatttaggaggtctaacaacctttgaattgtacaacatttcttccataaattccctttcacaaatcttttcatgactcacatggaccgtatgagacatccttgkactttctgacttgccctaaaatccctccttttaaacaactggtcattttactttaggacaataatttaccata

SEQ ID NO: 827917 - DNA, 469 bp, Homo sapiens
aattgttttacagacttaatactagtagtgtttattgttactragaatatacttattttagactatattttagagtaaatatatatcaatattttattttcagtgtaattttatcatttagtattttcacttactccatttgattttatagttgcatctttttcatattgaataaacttattcctaatgtaactaacatggttgcttaatttgctttaccttataaaaagttccacaataaaaatgctgatattacaataaacaaaaacactactgaatgaagtattgatttttttctattatttaaattcttagaataaatcctgctcaatgaaattccatggaaagtatggtaaaagtggtgtgatctgggtgtagggggtaaaggaatacattttctgtacaaaaattgtaagcaataattacatttactaactcatggtctacattttattctcaccatgtgctc

SEQ ID NO: 827918 - DNA, 469 bp, Homo sapiens
aattgttttacagacttaatactagtagtgtttattgttactgagaatatacttattttasactatattttagagtaaatatatatcaatattttattttcagtgtaattttatcatttagtattttcacttactccatttgattttatagttgcatctttttcatattgaataaacttattcctaatgtaactaacatggttgcttaatttgctttaccttataaaaagttccacaataaaaatgctgatattacaataaacaaaaacactactgaatgaagtattgatttttttctattatttaaattcttagaataaatcctgctcaatgaaattccatggaaagtatggtaaaagtggtgtgatctgggtgtagggggtaaaggaatacattttctgtacaaaaattgtaagcaataattacatttactaactcatggtctacattttattctcaccatgtgctc

SEQ ID NO: 827919 - DNA, 630 bp, Homo sapiens
ctgtgattctacaattactcttggaagcttgtacctgctttttctgaacttcagcgccgtgtatcttttccctttatggctatttatttgtgtccttttactgtaacaaatcttacttgagtgtatgactttatgttgagtcctgtgagtccacctaccaaatcaccaaacttggtagtggtcttagggaaccccaacacaattataaacctaaatataacagttacaagaaaacataggagcagcaaatcttcataatcttaagttaggcaaagatttctcacatgtgacaccaaatcacatggaatttttaaaaattgatatttgaacttcatcagaattactactttttcatttaaagtcacatttaaaaaatacacaaacaagctacaaaatgggctgagaaaatacttgcatcagatatctgataaaacattctatcatgaatatatatgtacatatttctgtgtatatataactatatatatatatccatatatgtaatataacctaataagacaaacccaataattttcacaaagtacttgaayaaatatataatgaaataaaatttatgaatgacttgtaggcacaaaaaatggtcaattcaacatcattaattattaaaaa

SEQ ID NO: 827920 - DNA, 615 bp, Homo sapiens
ttttttaaattacaaagtccaggctcttaagaactgcttgcagttcatgaccatcagaattagatgaastagaggtattaagctgatttctcagggaatctatgccatactggggtctaagacctggtttttagctttttaggattaggaaaaatgttgagcaagtcagttccctggggcccaatttgataaagtaaaactcataagagagttgtttatagataagaatgccaattcattattttatcctgagaattgttacaataaagctggcttcaatattcatgcttggttgttttatgtattttatgacatattccatgttaggctataaagtctgaatcctctgagagctgtgcctgttaactaggggtgactaggagaaactggcatactgatagttgttttataatgctatttttgggtgatgctgataattgatatttcctaagaaatattcctctgagctagcatttttatttttttaaaaaatacactaaatatagagtatattatctttgtattactcttttccttctaacattgaaatttaagaagagtttttctctctataataaagtgattgttcctcactcttacaggtttgataatgta

SEQ ID NO: 827921 - DNA, 615 bp, Homo sapiens
ttttttaaattacaaagtccaggctcttaagaactgcttgcagttcatgaccatcagaattagatgaactagaggtattaagctgatttctcagggaatctatgccatactggggtctaagacctggtttttagctttttaggattaggaaaaatgttgagcaagtcagttccctggggcccaatttgataaagtaaaactcataagagagttgtttatagataagaatgccaattcattattttatcctgagaattgttacaataaagctggcttcaatattcatgcttggttgttttatgtattttatgacatattccatgttaggctataaagtctgaatcctctgagagctgtgcctgttaactaggggtgactaggagaaactggcatactgatagttgttttataatgctatttttgggtgatgctgataattgatatttcctaagaaatattcctctgagctagcatttttatttttttwaaaaatacactaaatatagagtatattatctttgtattactcttttccttctaacattgaaatttaagaagagtttttctctctataataaagtgattgttcctcactcttacaggtttgataatgta

SEQ ID NO: 827922 - DNA, 607 bp, Homo sapiens
actcctagaaacacacaaactaccaaaactgatttgaatagaaatagacaatatgaatatatttataatagaatattaaatcagtaataatctctcaacaaagamaaactcaggggtggatgcaatcactggttaatgctaccatacatttaaagaagaattaatactaatccttctcagcaagcacagaaaaagatgctcaacattattagtcattaagcaaatgcaaatgagattcataattagataccacttcatatccactaggatgggtatgaaaattaatgataataacaatcattagcaaggttgtagagaaattggaacggtcttagattgctggtaggaatataaaatgttgcagcactgtagtaaacaatttggcattttctcaaaatttaaatcagatgacccaggaatttcactcccatatgtctaaccgggagtattgaaaaaatatgttcacttgaaaagttataggccaaagtgtataaacctggagttacgtaggataaaaataagtctatagagctaatgtacagcatgagtatagtagttgataatgctgtattttatactgaaaattagttaagtgactagatattag

SEQ ID NO: 827923 - DNA, 579 bp, Homo sapiens
tatgttatactgtgctatttccaggtgttaggtatacagtaaaaagcaagaaagatgtggtttctaaatatatggagatacatatagtcctcctttgtcttgttttgcctatttcttgtctgtttctttgtcattttatttttttctctgagaaacttctttcctaagaaagctaaggcatcattattccaataactactctttatttttttaaaacatttcaaggaaaattcaactagaacacatttagagaagcagaaaccaactgcatgttctttcttcaagaactgttcattaaagatttgccaatctttctttctcaaccacatttcccaaaagcttggactttggccataatagttcacttcagtctaaaatttggcatgtctgaaagagaagacttcaaatttgccaatttggctgatatccctttgaataacaagtagagaaataggaaaaatttggagcraaaaatctataactcatggcattattcagagagataattcatttcataggataatgaatctataggaaatcaaccctaaaacatggtagatttattttcagataggtttt

SEQ ID NO: 827924 - DNA, 547 bp, Homo sapiens
catgggacacaaattcattgggggtggggttgttagggtttattgcctaaaaaaagatttttaaaaacatgctctattccatccttctaattagaaggtgaagaaactgataaacagagcatcagggacttgtcaaaagtcatagagaatctaggaccagaatccaggtagatcaattaggattgtttttggctgcaaaagtaacagtaaactcactaacagaggcttaagcaagtaaaatttgtttcacgcaacaggcagccaggcatatactgatgagtattggtaccttagcagctcaagggtgcatctggggctcagagtcttcctgggtttcctttctgccacccttaacctggggcttttatcctcgtggcataagatggctgctactgctccatgtcttacatccatgttccacacatggagaagaagaaaggatgaatgggcagagatcattcttccagttagtttasttttttttttaattgaaggaaggatgccctccttagaggcttcttcctattgcttgtagttctgaatgaat

SEQ ID NO: 827925 - DNA, 541 bp, Homo sapiens
aaaaaattcatgacagttcccttaaaaataaaaaatactttatcctaagattgtttcataaatctcccagctacagttaaaatatcatgagccaagaatcgatatccccctgtctgccattctcctgactgcttgtttctaacctatctttttttacagtcctttctgtaacaataactatttctttgcgatcactttattggtgccatcactattgctttatgttttgatcctgtctcatagtcatacattactaccctcccagcctcccacaataccactgccatcccagggttttggctcttgaacgtaattcagtttaatatctctaggtattaaggccttgtaacaatccattcactcttcctttacagctgcctatataattgtcaaagagatctaggggaacaaggatataatcattaaggacatccccagwgactctgtaaatagtcttgctttccttattctattctagattgaagtctttaatgagggaatcaagtgccccagaattagatttaatcttcaatcatacttt

SEQ ID NO: 827926 - DNA, 626 bp, Homo sapiens
tatgtttttatttatggagattcacatttaaaattaagtactcatatatctrttaattaatttccttaagcaaagtttacacaaacggctataagtgaaaatatttttgcgtggataaaaattctaggttacagatattaaaacatggcactatttttagctggattatacttaactctgtgaaaaagaaaaaatctggctgcaccatattttttgaactcttagaataaagaaagagattctgttgaatggcagtatgcctaggagtccctctttttttttagctcctagtagctgacagttctaactccgagagatgactacgagactgtgctccagtgtttaccaacagaactaaatcaacaaaataagtgtctgacaaatttctattcacagaaggcaagccactgaaatctggtgtgtgcgacagaaaacatggcttagagaagaagtaaaaacaatagtaactctccctccgttcaatcctatgtaaaccctttccaagggaggttagaggtgcatatgtctcatggatgctcaggatcacaggatgctgatctccagtaagggctcttcagcagaagcctcgactcaggaagggaatggaggaggattagaaggagagg

SEQ ID NO: 827927 - DNA, 615 bp, Homo sapiens
gttattctacatttattacagttagaggtgtattcaaatctggtaactctttatgattactcttcctgcttccaatgtttcttcygtttctttagggttctctgtgaaagatatatatagcttcatgtaggttcattctagtcctgctgctcattgaagttccctttaatattttcttagccttttttctaggtttctttcagaattctatttcaaattacaatgatggttctacttcctgtaactctttttagataaataaatgtttgaaaacaaaaaaaaaactcataaattttttgcactgtttaagtataaactagctgatgtgctatagaaatttgagcttgattttttaaaagattaaacaaataaatgctcataaattcatgtattttctacatacagtcaccaactgcctgtaacctggcagaatccagatttataaacaagcaaaaataacctttatttatcaatgtatttccgagagcgtgttgtccagcataattagaaactacctctgagtgttacagagaaagttttgccctaatcccttgtcagagagaaagtcgcagaatcgcttgtatgaattcctcaaagtactacccagtttagatg

SEQ ID NO: 827928 - DNA, 462 bp, Homo sapiens
agcttttatgaggcactatattagaactttctgmagttttaacaaaatagcttatagtcccatccagagtttgacctttggtgtggtcctttcttaatttgaaaatcatttccaacctggaaacactggaaatgaaaaatagtcttattttcaagcccaacacgtccttagtccttgatatttattaacagtttttttcttattcctcaacttattcctttcatattttatcaaaggcttagaaaggaagccaggtgacaattgtaatattatgctagaaatctccttagctatatcattatattcaagaagcacatgaggtacatattctattttttttttcacattacagagggcaatggtgttgataaactctccatcattatgtaacaagggacacattcctgtatttgcagtagtttttttgttgtttctgtttttgtttttgtttttttttccatt

SEQ ID NO: 827929 - DNA, 618 bp, Homo sapiens
tagttgaaacagcctagaggtaatttcaggattcacatctgagatttgggggaaattctaaagcccaygtgactttgccaaaacagaaaactctcattcctgacagtttgtgttttgtctgaatatacagtttctcatggcattttccaatcccttttcttgcaaatactctactgcctctcctttaaccatcccaccccacacagtaggcatgagagtagcatcaattatctcctcaatgcagatgccaaaaattgcagcaacagaattttattgagatacctactctggataatcattgtgatcagaggtaactatcatttgtagagaggtgtttgcaactctgcctgggagaaagattctcttccttccaaagaattcaccaaggacctctatgtttcatacctctcaattcttctacagtgaacaagcacaaagatggtggctcacttaatatttactaaagggccccactgtcccggggcctacacctgggcaccacagtagaagtagccctcatgcttggaaaccacagtaaagggtacaaaccttgctgaggcattctcttggctgccattagaaaataatatgtaattagaaaaatatgctatatgcata

SEQ ID NO: 827930 - DNA, 618 bp, Homo sapiens
tagttgaaacagcctagaggtaatttcaggattcacatctgagatttgggggaaattctaaagcccatgtgactttgccaaaacagaaaactctcattcctsacagtttgtgttttgtctgaatatacagtttctcatggcattttccaatcccttttcttgcaaatactctactgcctctcctttaaccatcccaccccacacagtaggcatgagagtagcatcaattatctcctcaatgcagatgccaaaaattgcagcaacagaattttattgagatacctactctggataatcattgtgatcagaggtaactatcatttgtagagaggtgtttgcaactctgcctgggagaaagattctcttccttccaaagaattcaccaaggacctctatgtttcatacctctcaattcttctacagtgaacaagcacaaagatggtggctcacttaatatttactaaagggccccactgtcccggggcctacacctgggcaccacagtagaagtagccctcatgcttggaaaccacagtaaagggtacaaaccttgctgaggcattctcttggctgccattagaaaataatatgtaattagaaaaatatgctatatgcata

SEQ ID NO: 827931 - DNA, 432 bp, Homo sapiens
tcttcactatccgttttttaaaaatttattttagtcttttttcttgttttcttagactagctaaaggtttgccaattttgtttgttcaaaaaagcaacttagttttgttatttatttctttcatttttctattctctgatttgtttctgttctgatttttattacttcttcccttctgcaaattttgggtttagtttgttctttttctagtttcttgcgatataatgttagattatttatttggcatcttttatcttcttaaatataggtttttatcactataaacttcacttttagaayggtctttgctgtattccataggttttagtatattgtgtttccattggcatttttctcaatatatcatttaatttacctttggatttttctttgatacattggttgttcagtagcatgttgcttaagttccac

SEQ ID NO: 827932 - DNA, 432 bp, Homo sapiens
tcttcactatccgttttttaaaaatttattttagtcttttttcttgttttcttagactagctaaaggtttgccaattttgtttgttcaaaaaagcaacttagttttgttatttatttctttcatttttctattctctgatttgtttctgttctgatttttattacttcttcccttctgcaaattttgggtttagtttgttctttttctagtttcttgcgatataatgttagattatttatttggcatcttttatcttcttaaatataggtttttatcactataaacttcacttttagaatkgtctttgctgtattccataggttttagtatattgtgtttccattggcatttttctcaatatatcatttaatttacctttggatttttctttgatacattggttgttcagtagcatgttgcttaagttccac

SEQ ID NO: 827933 - DNA, 509 bp, Homo sapiens
gccactgtaccccagcctggggacccagtgagactctgtctcaaaaaaaaaaaaaaaattgtaacgaagtaaaattgttacagtaagttaaggttaatttattattgaagaaagaaaarcattaataaatttatagtggcccaaggatacagtgtttctaaggtctacaggagtgtacagtcatgtcctaggccctcacattcactcaccacttactgactcacacagagcaacttccaccctgccagctccattcatagggagtaccctatatgaatgagacatcttccgtctttcataccatatcttttctgctccttttctatgtttaggtatacttagatatacgaacacttaccattgtgttcaattgcctacagtactcagtacagtaacatgccgtatgggttcatagcctgggaggactaggctgtaccatgaagcccagctgtgtatcaggctacaccatctgggtgggtgtaagggccctctgtgatgttcgcacaacc

SEQ ID NO: 827934 - DNA, 509 bp, Homo sapiens
gccactgtaccccagcctggggacccagtgagactctgtctcaaaaaaaaaaaaaaaattgtaacgaagtaaaattgttacagtaagttaaggttaatttattattgaagaaagaaaagcattaataaatttatagtggcccaaggatacagtgtttctaaggtctacaggagtgtacagtcatgtcctaggccctcacattcactcaccacttactgactcacacagagcaacttccaccctgccagctccattcatagggagtaccctatatgaatgagacatcttccgtctttcataccatatcttttctgctccttttctatgtttaggtatacttagatatacgaacacttaccattgtgttcaattgcctacagtactcagtacagtaacatgccgtatgggttcatagcctgggaggactaggctgtaccatgaagcccmgctgtgtatcaggctacaccatctgggtgggtgtaagggccctctgtgatgttcgcacaacc

SEQ ID NO: 827935 - DNA, 602 bp, Homo sapiens
ctacaggaagaagtgaagttactgcgtgttcaagttcgtctcctcgtggatccccctaaagcgcagccttcctaaacggtagcccattcatttgacttcaaaagacgcgaaagaaggggatggaaagaaattccacctgtgagtggtatactgagtcggtgtccctgcaggcatttggctccatcctgctagggatggctgcagagctgtgagaattcacctcagagttttctgcccgacccattacaggggcgcattcgagcactccttctccacccaggaagggcggtgggagccccctctcagtccaagtggggctgtgtcaaaaggaggagaagactcctgcaggctttgcaaactctgagggcagagcctggggcagaaagcaggagcttcagggagcagttgagggagggctgaggctctgccactgtgaagcgggctaagagcagggaggtgggcaggagaggggcttggagcaacctcatcacaggcagcagacgcaggragcttcctggagagcccctgattgctgtgtttctcctgcccagcgtttctaattttatgtaatctccactttcacacacttttaaaatttgtga

SEQ ID NO: 827936 - DNA, 570 bp, Homo sapiens
ttctcatttttagtatttgtcgtacttaaatacaatagtaatgatatgagtaacaacaaagcaaaaccttttatattcagcaattgtttaaattacacrcttttagataactgggaaggagtgtgagaaaagtcactaaaatcccggtttgtgcggagatgtcactttagaaggaagacattagaaaacaaacaaaaaacccaactaaataaaacgtagtcacacagtgccaaatacattaggacaatgaaatagggggaagaaataaattcttgaaaatatttataaaatgaagaaaaattacaaccctgtataattcctcccacccagatcatgaccaagcaaagaatggcattgcattctaaatgcttctactttctctttgacttcatattatcttgtgaagagttttgggctaatagaatgcaattaaaaataattactaaatggatggtttggttttttttttaacttttaagttcatgggtacatgtgcaggtttgttaaaaggtaaacttgtgtcatgggggtttgttgtacagattatttcatcacccggtaaataagcct

SEQ ID NO: 827937 - DNA, 570 bp, Homo sapiens
ttctcatttttagtatttgtcgtacttaaatacaatagtaatgatatgagtaacaacaaagcaaaaccttttatattcagcaattgtttaaattacacacttttagataactgggaaggagtgtgagaaaagtcactaaaatcccggtttgtgcggagatgtcactttagaaggaagacattagaaaacaaacaaaaaacccaactaaataaaacgtagtcacacagtgccaaatacattaggacaatgaaatagggggaagaaataaattcttgaaaatatttataaaatgaagaaaaattacaaccctgtataattcctcccacccagatcatgaccaagcaaagaatggcattgcattctaaatgcttctactttctctttgacttcatattatcttgtgaagagttttgggctaatagaatgcaattaaaaataattactaaatggatggtttsgttttttttttaacttttaagttcatgggtacatgtgcaggtttgttaaaaggtaaacttgtgtcatgggggtttgttgtacagattatttcatcacccggtaaataagcct

SEQ ID NO: 827938 - DNA, 556 bp, Homo sapiens
tacacagaaaagatatggaaagaaaaatggggatttgtagggggctggaaggcccagatccactgaattattctcttaattaaggagaggcagtacagctgtgtttctcaaccttggttgaacactcaaatcatctggggagctttaaacattacttatgccttggtcccatcctccagatattctcacttaattgatctagagtgtggcttgggtattggagtttttaaaaaatctccatgtgtgattctaacatagaactagggctgagaaccactgcaagagaagttaaaaataatggaaaaaataattgaatcccaaggttcatcttataaaagtgtggccctagaacttgacatttgaaacaatcaccatggagatgtgcctcaaagaattttggaaagaagctccattccataactttctttttctacttctcccatgtacatagcagtgatrtcttaacttgaggtcagtgaacctcatgcttttgcatgcaaaatagtctatgcatatgtgaatatgcactgttctgagcagagggtacatagttcat

SEQ ID NO: 827939 - DNA, 570 bp, Homo sapiens
gaggattttattttggctctggattctagagcccagaataaataaaatgacaaagacatattctccctggaggggatgctcataggttctcagcgccagagggatgcaggcctgaattgctttcagggaggttgtctgtctacttaaaagcatgtaaaaatattgttttcttagaattctatgtgctttgctatcttactaaaagtatttggaataaggctcattttttgtttttgcgggcaggggatttgtctgttttatttttatttttttacaggtggatcttgctctgttgcccaggctggagtgcagcggtgcaatcatagctcactgcagcctcaaactcctgggcttgaaggattctcccatctcagcttctcaagtagctggccccgcttaaccttattttaattttatttatttatttatttatttatttattttctttcactctgtcacccagcccggagtgcagtggtgtgatcacaattcactgcagccttaacctcctgggctcaagcagtcctcccacttcaacctctygagtagctgggactacagacgtgtgcc

SEQ ID NO: 827940 - DNA, 634 bp, Homo sapiens
catcctttgagtattttgtatctgcagtttgagatactctgtgtagtttacaaacacttaaaaaggaggaayaaattaacatttattgagcacttgcactcatgatgtatgtgaagttatttaatattcataataatactataataaaaaattgctatctctagtttgctgctgaggaaaattcaattcagtgttagtaacctgcccaagattacgagactgagaaatgacagaaatattacctgacctaaatccaatggtatagcagcccattcttttcactacaaattggaggtgtagtaaacaaaaaattgctatcagagaatctttcagagaatctaaaaactgcaagtgacagtaaaaaagtagagtttacattctgtatagaaaaacaaaagtcctttttacaagtatctctgttaaatgattcctctcctaggctacaggatatgtgcaacaggtacacacagtgggcacatggaaagaaaatatgtatacttaccattggtagacaataaaaactgagcagcatttttctggggtaaccacctaattttgttgatcttttcttctatttctaaacttttcaagtagtcaaactctggttcatggctctggaaggtgctgtaaacat

SEQ ID NO: 827941 - DNA, 478 bp, Homo sapiens
tctcacattgctggcctcaagccatctccccacctcagcttcatgacttgtgcatgttcttccagatggtttactgtctccaacttgcaaaaccttggccatagatactgtctggtttaaatctctcaacaagccatgatgttttgccctcatgacgatgagcctgcttcatctcagaggtgaggaaacagactcagaaaggccctagcagttggggagtggggcgtcgccacctgctctgatttgaaggaaaggtcatctcagtgtatagaacttcctatagaaatatctgtctgcttagtacaccaaacagagcacgcttgccagatcctataaaggaccctttaatcagaacaaggaaggccagaggaaagcaagcmtgttcccacctattgttgctgagtttatggctctttacacacatctgctactgagaggtgcagtggagaaacacgtagtcgggaagtaccaggaaagc

SEQ ID NO: 827942 - DNA, 600 bp, Homo sapiens
gcctaaggagacacacagaggattggtgttcttgggtaattgtatggcagagagggttttttttttwaattttcattttaggggtacatgtgcaggtttgttatgtaggtaaactcatgtcacaggagttcgttgtacagattattttgtcactcagatacaaagcctagcactcaatagttgatttttctgctcctctcccttctcccacccttcagtggaccccagtgtctgctgttcccctctttatgtccatgtgttctcctcatttggctcccacttataagagaacatacagtacttggttttctgttagaagaggacctctaggttagaaataaatggaaagtaaatactggggagggtagatgagtactgattgagctggataccaatatctacaatttctttttattttaggagtaaggggtgagagagggatcccctaaagagatgaaatttgcctgtgttaacatctcttttgcatcatttgactaaaacaatcacatctccccacaaatgacacccccttccctgtgcacatatgtaaccacagtgcactgcagctggtagccaggctggggaggccccttaaggcca

SEQ ID NO: 827943 - DNA, 612 bp, Homo sapiens
ctatgggctttagaatatagttggggaaaaggctactggatacctggtattgctgcagaaaacttctttcagttgagcatcacagcaccaaatagcagctaatcaaataataaactctacttttctatagttcattattttgaactataggagtagttggtttttgtactcgctgcctacataagttatgctcccatgattattttccttgtattgaaaaacaaattaatgtccttaaagtctgcatagaggtctgcctaaatttcacttaagggcacatttctatgaacttgcagggctcatcaaaagggaaagaaatttagaataagggaatgccatttacacatttgttcattggatttctctgctctcatttgggacttagcttaatgcatgtgatgagatgatacagaggactaaaaaagaaccaaaaacccaaacaataaaccccactcaaaatcagctccattaatatgaagaaatatgcaagtactggacatcagacaaggtgaaaaggctgccaaagatctggcaagttatattagggatttctgctgttagcactgagcccagtggtatgagatgracattggaaataaaataaaaaactag

SEQ ID NO: 827944 - DNA, 498 bp, Homo sapiens
catgcttcttcccctattctaatccccagcaaccactgatctgctttctatcatcagatccatcagacacacaccattctgtctcttccagaatatcacacgaatcatacagtatgttctcttctgagtctacgttctctcactcatgatgtttttgagattcatctatattgttgtgtgtatcacagggtagtttctttttattgctaagtagtatttaattgtgtggatataccacaatttgtttatgcattcaccagttcatgggcattttgttgtttccaagttttgactactgtgaaattaaagcgctattaacattgttatacaagtctttgtgtgggtatgtttattctctctctctgttgaaatacctggccatgtgcagtggttcacgcctgtaattccagcaatttaggagggcaggattkcttgagctcaggagtttgagactagcctggacaacatggtgaaaccccgtctctgaatctaaaaaaa

SEQ ID NO: 827945 - DNA, 612 bp, Homo sapiens
agtcaatttagagagccaagcaaaatacaggggtagagcaagcagcgggaaaggccctgggagcttcccgggtccccaagtaggccactcttgcctggcaccacagggatccttcaagagggyagccagaggtgtggggggaaatgccacaaacagaaggaaatctttagctaaactttgtaacaatttgaaccaggcaagaagcctcctggccagaactcggggcagaacaagaatccggcatgcagactccacaagcaggggaagaaccaaagtccttttctttccaagctgggaggcaggtagcctggggcaagttctcaagccctgcttgcccactgcctggacacagactcggggctgtttgtgggggttcatggtggaagtgagaccgcccttcagattgcgtgggagctgggtgaggcctgtgattgccagctttccccacttccctgacaacctgcatgactcaacagaggtagtgataatcctcttaggtacgcaactccagtgacctgggaagctcacccccattcccgacagcagctgaagcaagatatgcccaaggagagtctgagctcagacatgcctggccctgccccaacctgatgg

SEQ ID NO: 827946 - DNA, 649 bp, Homo sapiens
ctcccaaaatgctgggattacaggcaggagccactgtgtctggcctatttttatcttaacagtgcctttgatgacaggagtttttaatttgactaaagctaattatcaatttttttctrttattcttagtgcttttgtgtcctttaaaaaacaatctttagcccaaagttgcaaatgtattctcctatgttttctttgagaagcattttagttttagctttctgatttgaggactacagtccacctcagactgagttttgagggtgatttttttattcagttagtctagcaccatttgttgaaaaaactttcccttctcaattaaattgccttggtacgtctttaaaatgataatgggccatatatgttttatctatttctaaccttttgttctacttcattgatgtatttgtctacctttatgctgattccatcctgtcttgattgctatggctttattgtaagtcataccctcagtaatgtgagccttctaaatctgttcttttttccaatttttaaaaaaaattttattttactttaagttgcaggatacaagtgcagaccttgtaggtttgttacataggtatacgtgtgcgctggtggtttgctgcacctatcaacttatcatgtaggttttaagccccacatg

SEQ ID NO: 827947 - DNA, 633 bp, Homo sapiens
acaatttaaagttaggagtcagctgggygaggtgcctcacacctgtaatcccagcactttgggaggccaaggggagtggatcaccaggtcaggagaccaagaccatcctggctaacagggtgaaatcccatctctactaaaaacacaatacaattagccagacatggtggcagacgcctgtagtcccagcttcttgggaggctgaggcaggagaatggggtaaacccgggaggtggagtttgcagtgagccgggatcgcaccattgccctccagcctgggcaacagagtgacattccatctcaaaaaaaaaaacaaaaacaaaccgcaaaaattagccagacgcagtggtaggtgcctgtaatcccagctagcagggaggctgaggcagaagaatcgcttgagcccaggagacggaggttgcagtgagccgagatcacactactgctctccagcctgggcaacagagtgagactccatctcaaaaaaattaataataatcaaaataaaaaatttaaatatcttacaagttttcatgtaaaatatttttattattaaccaaatgaagtgaaaaagttttctgtaagtagcctttaagttttcacatatgatattttcaggattattttcagtct

SEQ ID NO: 827948 - DNA, 657 bp, Homo sapiens
tattatatttcctgatcagaatgattttgctccctgagcctatatatgtatatatgctttttttgttcaaaacaaataaaacatcaaaaaaccatgtccttaatttaccttttttgaaatgaaactccataacatttattttaccttctcactctatgatccatgtctcttaacttcaccttcatattttatgtctttgtcacattgtactgaattctgcataatttcttcagaaacaacattcagttaaccccttttctattcagctgtatatcaccttccatttaataagtattagacattaattataattttgattttctctccttaaatgtttcgcaagttcacaaaaaagagcccacatcgccaagtcaatcctaagccaaaagaacaaagctggaggcatcacgctacctgacttcaaactatactataaggctacagtaaccaaaacagcatggtaccggtaccaaaacagagatatagaccaatggaacaaaacagagccctcagaaataatatcacacatctataaccatctgatctttgacaaacctgacaaaaacaagacttggggaaaggattccctatttaacaaatggtgctgggagaacttgctagccataggtagaaagcygaaactggatcccttcctta

SEQ ID NO: 827949 - DNA, 458 bp, Homo sapiens
atgtctcaggtatggcaatttcctgatgataggaagagagagaatgggtgggagtacacagcaggcagtgtgcagttgtaaacagcaggccacagattctgctaactgggtcacagacaccaagaggtgtcacctacagtggacagttttccacatattcctatatataacttatatgaagttccacagatagcatataaatatcaggagcagagaggagaagattcacaaccttaaacatttcagggcactgattcaggaaaaataaatggaagactgacagcactgggcctaattttgtgtgttctagagagccgcacaatcctaaaactttcccctagaagaaaacaagaagagtagaatgggtgyaaccatagaaaagatctaagagatgtcaagaatctcttgctggtctcactagtgaagacctttctctctcaaagccagtcagtaaaaac

SEQ ID NO: 827950 - DNA, 636 bp, Homo sapiens
atctgttttagtagaggctagactggtgaattaaatggggatgaactatgacccctgtatcttttaagactttgtggtactaatatctgccattagcctgggatgyaaagatgatcatcttagcggggtggagggaagtgtttcaggggctttttatggcctttattattaaaatagctcttattccacaggtcaagcttttgttccacatgaggatgtgtccatctgttaattatattatttaaaattatacatctgtgaatataaccaatggattagcagccacactgtgaggtagactgggacaatactctatttgttaacagaacttcatacactcctactccatgtacaagcgatgttggtactttacgtacccaggaatcaatgtcaattcagatcatccaggaaacaaaccaaaggacttaggtatttcctcttgccttatgtatggtcagatgaatggctctaattctcttcagagagagaatgaaggaatcgcagctgtaacatctgccaaagagttgcagagtctttcccattagaactagactctcgtataatccaaagattgtggctctgaaaaacagctcagatgttgaatctgggcaaaggattatgaccatctattgggta

SEQ ID NO: 827951 - DNA, 474 bp, Homo sapiens
tgcagtgagccagtatcacaccattgcactacatcctgggtgacagagcgagactccatctcaaaaacaaacaaaaaaacaaagttaatccaaaataaaaacttcattaaaaataaaaaccaaacattattttactctcttcttttacagggttacagtgtaatttgtcaagactgtgaagccgcaacgtgatcttatttttgtaagatataaaaatatactgttaataattgcgatatgtatcctaagtatctatcatatctgacaggacgcgtgtgtccgtcaggaagtgcttggaggcacagtggccctcaagcctggagtcatccttggcccgcagtgaggctcaggtctgtgcrcaggtactcaccaaatgaaccgaaaactgctctgggggcgttggtttgggggcagctgaactgggagatccttgtggaatagaagttgcttcccaaagatcccagaaaaatagta

SEQ ID NO: 827952 - DNA, 543 bp, Homo sapiens
ttgttgaaaagatcctggcccctcctgcccctctctcttgcttccactctctcaccatgtaatctgcacattctggctccccttcatcttccaccrtgtgtggaagcttcctgaggcccttaccagaagcttgtacagcctgcagaaacataagccaaataaacctcattgctttataaattacctgggctcaggtattttgttgagcaacacaaacagactaaaacagtagaaatccttgtcttgttgcagatcttacacgaagggccttgagtgtaatgttagctgtgggcttctcataaatgacttttattgtgctgagttacatttctttttaaaaaatttgcactcagggttatcctcaaagagatatatgctttctacatctaatttggtgaactttttttttgtcatctttctctctctctcttgctctctcttgctctgactctctgcctagggaatggaagataagagagagtttttatcataaaaggatattaaattttattgaatgatttttggcatctaataaatgattat

SEQ ID NO: 827953 - DNA, 589 bp, Homo sapiens
cttactaaggcaacacaatttcaaaagagagacaaaagacttgaagacatttcaccaaagaagatatatgaatggcaaataagcacatgtagagatgttcagtcattagggaaatgcaaattaaaactgcagtagggtatcactacatgcctactagaatggctaaaattaaaagactgacaataccatgtgctgacacgatgggatgcaactcgaactctatacactgctggcaaggaacacaaattggaagagctgatttggaaaacaactggggagtttctcaaagttaaatatacccttaacatatgttcccagtaaccctattcctagaaaataaccccactcgtttccccaagaaatgagaaaattatctacataaaaatgtatatgtttataatgacttttgtcataatcaccaaaaaatggaaacaaccaatgccaatttaaagcttaagaaaacctacatccatccaatgaaatacttactcagcaattaaaaggaacaaactactgatgcatgcaataacrttaagctaaatgaaagaagctagacacaaaagactaaatactgtattatcctatttat

SEQ ID NO: 827954 - DNA, 659 bp, Homo sapiens
caaaagaagcacatttaatttgagtgcatttttattataaaccacgtttaaagatggcccacaggataaacaygaatcaatcaaaaaaaacaaaaaaaaaaaacacttaaacactcatacattcaaacatcttatgaaaattaaatagaattttaagaagatctatttcttgctaggctataaaaagacataaaaaccttcacttcagctgaaacaaaaagtgaccacataaaaacaaaaacaaaaaaattttcttcaaagctacccaaaaaatataaatgtatagaaatctaaaagaactaaacgccaaggggacttcctaggtaagcaagggatagcgtacactttcatacttggggccacttgctgaagtggacacagggcaggtggtaaagcaagcctgccaaacaggacagtctgtgctcgggcctaaagatcctcacatccctgggaaagttttgagaagagtttgtggcatgaaattggaagcaaccattggtccagttagaccaatcctggaatccatatgataaatacccaatcatccagttttgatgagaaagaaaacagagcaaaaatgtaaaactgaataaatagtccatctgtggctaaccataatcataatctaaagatcataataaattccaattcttaaacac

SEQ ID NO: 827955 - DNA, 651 bp, Homo sapiens
gctctgggctgatgtctctggaccgtggtaaatatccagaagagggacataaaaaaggaggttggagaagtaagtgtgggcctgataacataagggagctaggccaagcaagggagttyagattccatcctaaggacgtgggcttggagtcagtatctttggttcaagctctggctacactatttattagctgtgtgaccttgggtagccatctcacctccttccacctcataagattgtgcaattaaatgtgctaatgtctgggaagtgtgtagcatatggtaagccctccggaaaaagagacggagagagagagagagagagatcttcccagctaggtggtcaatgggattctgcccagtttcctcctcacacctggctggcttctgggataataaaatgaatttccagatgttacctcttctctccctgcctccaagctagaggaactctttcctctgggcagaactcacctcacatcgtatatgacataaggattaaatgttttaaattgaaaatgtagcataatgacaccaaagtggtaaaagaaaaaaaaaagatatttgtaatcctaccatcctaattcaaggactgtttccatattttaatatcattctaaagttctttctcatgtatgcatgtgtataaagc

SEQ ID NO: 827956 - DNA, 617 bp, Homo sapiens
gtgtgttggttttgagctcatattttgctgttaaaacattttawtttctgctatttttacattttcaatgatattcttgacatttgagattactaattattttctgaacacatgaagaattactgtaaatgaagcattactgtgtggcttttggtgagtttgatctacatgctatcatttatatttttacttttctggtgagatttttgactcaaaagaaaagaactacttcaacacaatcactgacccttatgtattattcaaagttcaacaagattctctttaaaaagggaaaatttgcaatttgctctctcactttgccccttattctataaagcttcacaaagatgtttttaacagcacgactagctttgttcccaggtatgctcagaaacaactagttttgtctgtgagatgtagaaacctttctatatttatgagttataatgaaatagttcacctcattgaggaattgtgatgaattatttctggttttacacataagtattgatagcattaaatttagaaggtagtatctttggaattgacttttacatcacaaagtgcccatttggttcacatatgagacttatttaaagacaagtctccacattgtt

SEQ ID NO: 827957 - DNA, 528 bp, Homo sapiens
tctgactaagttgattttaaggactggtctccagttctgaaattcttgcctcagcttggtctagtctgttgctagggcttccaactctgttttgaaattcctgtaccgaatttgtcaattccagaagtttagtttggttctttcttaaaatgcctatgtcatctttcaagtcttcactcatttttctatgttctttggattggatttcaactttgttttgaatcttgttgagctttcctgacatccaaattctgaattctgtgtttgtcatttcagacatttcagtcttattactatccatttctagggagctactataatctttcagaagtaaggaaatactctgactttctgagttgccagcgttcttgcactaattcctattcatctgaggggtctggtgtttcttttctttttgaaattgctactatttagatgggaccttttattttcatattctttttactttgaggatttgactgcagtgtayattgtgggtaatcaattggctttgtatctgagtgcttg

SEQ ID NO: 827958 - DNA, 614 bp, Homo sapiens
tggacttttcttgatgatctggaaattgttgggagctcatctgacacagagttcagtaaaaaggctccaacgtcataataattcctgccacagagattcagcaatgactgtctcacccagttgctgtagggcttgtctgtgctactccccaaattgcacaacttagtaattttggcaaaagtttccaacaatttaggagaatgatccaaagttatctggcatcatgcatgtattaacttactctctcatcctgaagaaggtactattattaccattttaggagtgtataaactgagtttatatgtattaattttcctaaagtcacataaataatgagaatgagagccaggaatctaaccctggcaaatctgattttatagctctcctcttcccaatatattttattgccatgattaaagatttgtgtgtgtgtgtgtgcgtgtgtgcatgtgtgtgcatgtatgtgtgtctttgagagacagagacrgagagaaagaaatacagagagaaaagaaggaacagtttttcctcttcctaatgtttggaaagattttctttacattttgtaacttcatctggatatctttataaaatttaacttttgaaaaaatgtt

SEQ ID NO: 827959 - DNA, 625 bp, Homo sapiens
tttgaattaaattttacatgaagtataaatgagttgattaaacaatcttatttgtacactacttagttttaaaggtacaaaagttacaaaatattggtagaaattaaataattctgactaagaatatgctgtgctattacacccaaaaagaaacgtttttctccgctatctaataaaacatagactggagattaatgggcagagggagacaggtggagaagtttctcctgtctaatatatactgcttttcaggattttttcttatccttctgcctgctcttatttgaaatatttttcctccgttcctttacaaaatttgtatcttatagaaaagtctgataaaaaaaagtgagaaatttcatttaatccttgatcctatagataaccactgtagtggttgggtatatattttccggggttagggatgcatatgtgactatgtgaaagttagtgtattttctctagacttgttcttatatatattttctaagatttagatcatgatagaaaggctatttgaaataatatttttctttgtaacaatgcatcttgactctscatgtagagactcagagggattttgcaactttatcctccactgaaaatataatataacatttagatt

SEQ ID NO: 827960 - DNA, 607 bp, Homo sapiens
aatgcaacaaaaacagaaataaataagtgggacctaattaaactaaaaagcttttgtacagcaaaagaaataatcatcagagtaaacagacaacccactgaatgagrgaaaatatttgcaaactatgcatctgacgaaggactaatatccagaatctgcaatgaactcagatatattagcaacagaaaaacaaatattcccatcaaacagtaggcaaatgacatgaacagatacttctcaaaataagatataaaaatggccaaaaacatacgagacaatgctcaatatcacaagctgtcaggctgatgagcacaatgagataccaccttgcccctacaagaacggacattattaaaaagtcaaaaaataatatatgttggcttggatgtggtgaaaagggaatgcttatacacggctggtgagaatgtaaattagtacaacctcagtggaaagcagtatggagacttcttaaagaactaaaagtagatctaccacttgctccagcaatcccactactgggtatctacccaaaggaaaataaatcattatatcaaaaagacccctgcatgcgtatgcttattgcaacacaagtcacaattgcaaagat

SEQ ID NO: 827961 - DNA, 517 bp, Homo sapiens
tatcaacaatgtacattatgtcaatcttatcatttgaaaattattttaaaataagacacaaatattagctaatgcacatttacttttccctttctgaccttaatatatttagttataaattctaatctctataaaaccattaccataactaagaaatatcagccaaacattatatgaaaatagtttttttttaagactgtcagttgataacggaaaagaaaggagcaagagtgttattgagaagttatattactgcacaaagtagaggattgctttgtgatagattctctttgaatctgagaagtcattatttctaacagtacatttcagataacacatgcaattaaaatgtcttctttaattatcactaaagaaaattatttcaaaggacagcagcctatagaggtactttgccatgacagacaaacttaacaaaaaggatgaagaaagaagaacgyaatggataaggaatgtaaacaaatttatgaaagaaataaaataaagggtggcaagtgaa

SEQ ID NO: 827962 - DNA, 542 bp, Homo sapiens
atatttcttccaacaatacctgttcttgatatttctgctcgaaattctgattttaaaatgataatcgtgactttgaaattcactttatttgaytgcagccttatcttttccaccaaggattttaggtgactgccatgcaacttagttccagatggccttgaattttcctagtatagcttcttttaaaatttgcatgaggaaattaaaatgactgttttgttcttgatggatacttcaaggcaatcttttagcaaaatctcatacttttgcacaaacttttaaaaacttttaagttcagaggtgtaagtgctggtttgttacataggtaaacttgtgtcgggggggtatgttgtacaaggcttaatatttgggtgataaatttaaactttaaaaacaattaaaggtatcccttatagactagcagttaagtgtggctgctcattagaaatacttagtgaactttgggaggccaaggtggatggatcacctgaggtcaggagttcaagaccagcctaggcaacatggtgaaaccccatctctac

SEQ ID NO: 827963 - DNA, 670 bp, Homo sapiens
accttgagggatccattccaagattccctagtggatgcctgaaaccgtgggtggtaaaaagccctacatctgtttgtgatcctgtaacagagatgtctgctcagtgactctgggctgggcagtgacgcgcaggtagaggatacagcctagaaacgctggacaaagggatgattcatgtcccgggagagacagcatgagatttcatcatactgcttggaatgccatacaatttaaaatgtataaattgtttatttctggaatttttcatttgacatttttggactgtagttgaccgtgggtaactaaaaccatggaaagcaaaacagtggataaggggagcctgctgtgtagcaaagaattaatcaccagactatataaagacttctcttaaatctaggcactgttctaagtccattgcacttactaacatttactcttcatggctgctgaggcactcttaccttctctaattagcaaacatggagactgaagcacagtgtggttaagtaactcacccaggaatacacagccaaaaagtggcagcatgagcaaaggacagaaatagggatcattcaaagasccaggaaaaatgactgatattaaacacaatatgtcatcttggattagacaaagatcacagccaattttttttttttttttgctctaaaca

SEQ ID NO: 827964 - DNA, 586 bp, Homo sapiens
aagacaggagtgtgcatgacatcttcctttctcctgggcacatgggcttactgacatggggaggagaaccaagaccctgatgtgggacccaaggctggctggcagctcattctctatccagtgatattttagaaaagacctgtgctaagagggacaggatgctgctgatggctgagatttgagagagagagagggaggcttttgctcccatcttttcaggaacaaacaactttcctgttgtagagaatgcttgcgtgattaggagcttgagttcttgaagcagagagtcctgaattcagatctcagctccgccacttactctatgaccttgggcaaatcgcttcatccccaggacgaagtttcccccatctgtaataataataggtctaccaatagcagagagggtaagtggatggtacgtggagacaggctgcctgtttcaaaccccagtcttgccatgtacttgctgtgtggcctcaggaagcttaagtcaacctctctgtgcttcartttcctcccttgtaagatggtaataataacaacatcttcaagactaaatgagttaacatgtgagaaacaatgcaaa

SEQ ID NO: 827965 - DNA, 422 bp, Homo sapiens
tcatggctcacattctgaggtttcagagcagctcctcctctcctcccccacagtggaggaagccagccatttgcctgggtggagtatctgcgggtcaggtctttakaaatctaaatgtccacataggccaccactcacccctgtttaccacctgcagtcccagctttcatgtgagccgaggagggagccccttgagagtataaccagaggcttgatctgcgttctcagacctcctgggtggctagacaaggccctttcagctgccatgggaaggcgggtggactgtgctggtgcggggctgccctgatcccacaatggccccctgactccaaggcccagaggacacctgaaccacatctggctgagcctcctcaggccctgtgccttctctctgcagccaaggagacagaggtggagtgggc

SEQ ID NO: 827966 - DNA, 561 bp, Homo sapiens
taactccgtgaaacacccaactggatccaaatcactgccacagcaggtctgggtcttcctaatttctctactgttccccatcccctgatacctttgccaaccttcaggccagctrtatgggcaccaacattgactccgacccaggggataacagatggtaggtggaggagaccctcaaatacactaattacctctggccccagaaaaagatggaaggagttttctgcaagtcaacttgctacccttcagtaattataggatttggttctgtgctaatttaaaaaataattagtgcaaatgatatcttagtaaaagtgcctacattttttagcacttccttggatacgtaagaaataccaggtatatgttcatagtgctgctctctgtttagttcgtatttattgagtccctgctgtgagcccagcagatgcgtctgagtgggagcttctggatcactgccagtttgtagggtaaaaactagtttacacagaacaagatgacaacatacacgtaagatccccaaagagatgtcatcctggccacaagaactgtggtgattcc

SEQ ID NO: 827967 - DNA, 585 bp, Homo sapiens
attcaattttactatagtttattttcagaaatttgatataaaaacatcaggaataaaaacctgctctctcctgaaaatatggttcatgtagaaaagtggcttagagattaatagaaacttaatttagagactgatatcaactgcacagttactagtaaatgtcatttcatatagtctgttctaaagatcatattagctcatccactaaaaaatcaagcttattactcatgataagagttgatatcagatctagctcagataaacttattgtactatgttgacaagataaagctagctagtcaagaacactttcacgaaaaaagagaaaagtagtacaaattcttttcgcaatgctagtggcaaaaaaccactctatgatatttattaaactaaaatgtaggtcagacaagaaattgtattccacctcttatttaattagtaatcagaggtcagcagttcaaatgtgctccctttccttctcaactgtttggcaatttaatgctatgtaacrtgaaacacgtaaaatgtctcagtgttagataaagagtcacaagatagaagggagatctggattctggaaaatcc

SEQ ID NO: 827968 - DNA, 550 bp, Homo sapiens
aagttacactagagatgttgtaygttttactctgaaataaagaccacttcaaacagtatactttgtgatatttattaaaattacttcatgagagagaaaatacataggccaacaactgctcgaagcatcatacaggaaagggaatgatgccaggcagcaggttataggaaagggttaagcggcagctatttttcctatggaaacgtctagctttatttaagatcttatggattaatcagggggagaaaatatcatgttagaaaaattaacaaatagcctttataaaaataattttagaattatgcttaaaaatcttcaagagataagggtctaacagtcactttttagtactctaattcaagaagagcacctttggagacagaatgtaaagagcagattgagggcagagatttaatttttcttgtttatgttaatactcagatcccaaattagttgttggcacgttgtagacatgcactgaaacatgtatccaaaataaataaaagaatagatagaagattgctgaagagcaaaaattactgttctagtg

SEQ ID NO: 827969 - DNA, 550 bp, Homo sapiens
aagttacactagagatgttgtatgttttactctgaaataaagaccacttcaaacastatactttgtgatatttattaaaattacttcatgagagagaaaatacataggccaacaactgctcgaagcatcatacaggaaagggaatgatgccaggcagcaggttataggaaagggttaagcggcagctatttttcctatggaaacgtctagctttatttaagatcttatggattaatcagggggagaaaatatcatgttagaaaaattaacaaatagcctttataaaaataattttagaattatgcttaaaaatcttcaagagataagggtctaacagtcactttttagtactctaattcaagaagagcacctttggagacagaatgtaaagagcagattgagggcagagatttaatttttcttgtttatgttaatactcagatcccaaattagttgttggcacgttgtagacatgcactgaaacatgtatccaaaataaataaaagaatagatagaagattgctgaagagcaaaaattactgttctagtg

SEQ ID NO: 827970 - DNA, 550 bp, Homo sapiens
aagttacactagagatgttgtatgttttactctgaaataaagaccacttcaaacagtatactttgtgatatttattaaaattacttcatgagagagaaaatacatagrccaacaactgctcgaagcatcatacaggaaagggaatgatgccaggcagcaggttataggaaagggttaagcggcagctatttttcctatggaaacgtctagctttatttaagatcttatggattaatcagggggagaaaatatcatgttagaaaaattaacaaatagcctttataaaaataattttagaattatgcttaaaaatcttcaagagataagggtctaacagtcactttttagtactctaattcaagaagagcacctttggagacagaatgtaaagagcagattgagggcagagatttaatttttcttgtttatgttaatactcagatcccaaattagttgttggcacgttgtagacatgcactgaaacatgtatccaaaataaataaaagaatagatagaagattgctgaagagcaaaaattactgttctagtg

SEQ ID NO: 827971 - DNA, 583 bp, Homo sapiens
ggaatattaggaggaattctattcctgtcatcctattactagaatatcttcctatccctcttcatttcttytacctttatacatactcatgttttcagctacggtgctaatgaacacataatatatcctgcttgttaaaacttaatcatgaagtattttttgtattccgaatggtcttcatagtgtttctaacaagtgcatactttgccaaatggacagactgtcattatcctgttctgtgttcagatggagaacttaggcatttgttttgtttttcgtttgtttttactgtccagtttagaacttgtggttgagccgtggattgctggactctggccagccctcagaaagcattttaggtcaagcagaggacaagaggagataagtggcgcactcccggtggcatcacctgcatcctcgaggacagacctcgtgaagtcagagctgctacacattgaatctcaagtcgagcttctgagattcgatgattcaggaagaaaggattctgaggttttgaagcaaaatgcagtgaacagcaaccaatccaatgttgtaattgaagactttgagtcctcacttaccc

SEQ ID NO: 827972 - DNA, 563 bp, Homo sapiens
ttttaatctcccttctgtcagttgattttcaggcaaccttcagaaggcagagaagacgtctgcccttggctcctgcactagcgacttaaaggatgactcctgttaagtttcattatcctagtatgtaggtaytgtttgtttttcaaagaagctcaggcttattatagagaatttgagaacacaagacaagtagaaatgaaggaaaagtacacacatatataaccttagaaatgtcattttgttatggtctgaatgtttgtgtctccccaaattcgtacgttgaagcctcacccccatgtggtggtattgggaggcggggcctttgggaggggattaggcctgagggtagagttctcataaatggaattagtgcccttataaaagaagcgtgagggggcttgtttgcccttccagcatgtgaggatacagggagaagacaccacctgtgaatcataaattgagccctcacctgacacccaatctcacagggccttgaacttggacttcgcagcctccaggactgtgagaaatacactgctgttgcctataagtcacccagtcta

SEQ ID NO: 827973 - DNA, 524 bp, Homo sapiens
cagaatcagatgctcctccttctgcagttttcacttacagcctctgctgatcctgtctcatttggctctcccctaccctcttcacgtacgcattcagcagacagttctgatcacgctgggcacactcaatgctccagctctagggccaaataggaaagagcccctgcccttgaggggcttgaaacaggtgagattagtgagcaggcgatgggagtggtgaggcctccggcaccctgacacacagtcaaggctctgggaacacagagacctcatgcccacctgggcagtgagagagagcctcagagtgatttgtaagctgagttttagaaggaagagagcagggtctaggggcgcaattgtcaatggctggaacacccagtgtaaagcatacagggttggcccagggagggaggctagasctgcctctggccctgttcaaattttaatcccgaagtacatgaaaataatttaggctaatagagagatataaggttgctggtgtcactaacgagcaaatttgacaa

SEQ ID NO: 827974 - DNA, 630 bp, Homo sapiens
gctcccagaattcccatgtgttgtgggaaggatcctgtgggaggtaattgaatcatggggacgggtctttcccatgctattctcatgatagtgagtaagtctcacaagatctgattgttttaaaaaggggagtttccctgcataagctctcttctcttgtctgccatcatgtgagaagtgcctttcaccttccaccatgatcatgaggcctccccagccatgtggaaatgtgagtccaataaacctctttcttttgtaaattgtaaattgcccagtctggggtatgcctttatcagcagcgtgaaaacagagtgatacagcggctaagtccctcagctgtactgggtcttgtgacagtagctcacatattttacagagaaacttcttacaaagaaattacaactttctcacttccccttgaaaatactgaagcaaaagaaaaacttaataacctacagatatgttctgaaacaaaggcagaatttaactgctcttatacacaatggagtcatgatcttttgttaaagtcatccacctggaaaaataaaaacatgayttagaccttttctgaacctgttctttgcctgttaacctttagaaaatgaattaaagctgtgaaaggtgctgagt

SEQ ID NO: 827975 - DNA, 618 bp, Homo sapiens
caatgacaggataatttgtaggttaaaaacaaaggaatttaagagacaatagaaatgtggcacaaagttcataatgaaaacaggaaggtcttattatatgtgagatatttatacctttaagaacagtttttcatgacaaaagaatcatttcctatgatattaaaacttgaaattcagtttattaaggctcttctttaaagttttatgttcaacagacaaatatattctactttgcattttagcagtttatttaattttaattaaattttttttttttttgagatggagtctcactctgttgccaggctggagtgcagtggcatgatcttggctcattgcagcctcagtcttccaggttcaagcaattctcctgcctcagcctaccgagtagctgggactacaggtgcacaccgccacacccggctaatttttttttttttttgtattttagtagagacgggttttcaccatgttgcgcaggctggtctcaagctcctgagctcagrcaatccaccagcctcggcctcccaaagtgctaggattacaggcttgagccaccgtgcccagccaattttaatttttgagacagggtcttgttctgtttcccagactggagtg

SEQ ID NO: 827976 - DNA, 495 bp, Homo sapiens
tcctttcctttctctttctttttttctgaggtatattaaacctacaggaaggcacmtgtggtacaggtatggagcttgacaaatttgcaccaaatgaatttctcttgtaatcagcatctgcaccaaatcacaggaaattaccagggttccagaagctcctctccactcactacctgctgcccagcataaccacttcctcggcttctgaaagcatccactggttctgcctgttttggtactttatgtaaatgattacacagaccgtatgctcctgtgattggcttctttcactgaacatgagctattgctgtgtgcaattgtagatcatcaattctcattctaccgtgtcctttaaaaaactgttgctggtggtacaagtctgaaaatctattaaatttcagcagcaagtgaaatttccattctactaccaaaaaataatttaaattcagcagtccatttaaatatcaaatcctctcacttctatctggtaaccaa

SEQ ID NO: 827977 - DNA, 495 bp, Homo sapiens
tcctttcctttctctttctttttttctgaggtatattaaacctacaggaaggcacatgtggtacaggtatggagcttgacaaatttgcaccaaatgartttctcttgtaatcagcatctgcaccaaatcacaggaaattaccagggttccagaagctcctctccactcactacctgctgcccagcataaccacttcctcggcttctgaaagcatccactggttctgcctgttttggtactttatgtaaatgattacacagaccgtatgctcctgtgattggcttctttcactgaacatgagctattgctgtgtgcaattgtagatcatcaattctcattctaccgtgtcctttaaaaaactgttgctggtggtacaagtctgaaaatctattaaatttcagcagcaagtgaaatttccattctactaccaaaaaataatttaaattcagcagtccatttaaatatcaaatcctctcacttctatctggtaaccaa

SEQ ID NO: 827978 - DNA, 452 bp, Homo sapiens
tagtttccacagctttatttgatttttagacacagtatcggacttaaagagttggtagaagattttaaaggcaaagctaactgcaaagtctcttgtgacaaaaatgtaccagctttgcttctgcagaatttatttgaagcattcatatcagtttctgggtctcaggtaagctctgcataacatacttccctacatttatagtgggggatggaaaggtgcttcagtggtcttcattcttataagcatgcatgttcttgcactggaagaagaggtgggagcatattaggcagaaatcaagagtggacattctgctgtcagatctcttgactcctccgtttattagctgggtaaccctggacaaatgtttagcttcatggagaatagattttttacctggaaactgggagtaataatgtcrccttattcattggaatactgtgaagattacatgg

SEQ ID NO: 827979 - DNA, 645 bp, Homo sapiens
acacctgcatgcatatgtttattgcagcacaattcacaattgcgaagatgcagaagtaacctaagtgcccatcaacccatgactggataaagaaagtgtgtrtatatatatatatatatatatatatatatatatgtatatgtatatatatatatatatacactttatatatatatatatacacatatgtgtgtgtgtgtatatatatgtgtgtgtgtatatatatatatacacatacacatgaaatactactcagctataaaaaaagaatgaataatgtcttttgcaggaatttggatgggactgggggacattaccctaagtaaagtaactaaggaattgaaaaccaagtactgcatgttcttagttataagtgggagctaagctatggatttgcaacagcatacataatggtataatggacattggagactcagaatgggggaagtggggagggtagtaggaatgaaaaactacctattaggtacaacgtatgctacttgggtgcactaaaatcccagacttcacccctataaaattcatccatgtaaccaataacctcttatgtctttaaagctagtgaaattaaaaacttaaacaaattaatgacaaagaaattttgtcacatagacttatgtgagtgga

SEQ ID NO: 827980 - DNA, 572 bp, Homo sapiens
catgaggggagataaatatcaatcaatcccaaaagtaatcccactctatatatgctgtcagatgaagcaccatattgttggactgtatgtattctaagaattttcctggtgttcttcacccctgatatgatctacatctgaggttttgtgatgctacttgtttctcaccagagagtctagaagaggagcatttttagaatctctaggaaaagattgaaacctcggacaattttctcagtcctaggatgctgatataatttaaattacaattaatattaaacatactcttttgctataggttctcatactctgggtatcctttactactagtccagtacaatagttaagtacagagaattccaacttgccctgttgataacatgagctggatagccttactgatgtcattattatttttttctttttggaactttacagacaaatccatgatagtaaaatttttgcaagctttctctctctaccaatagccagagaagaatttggtggtataatctaagctgcacttartatgttatatagccaagggaaaaataaaatgctataaaaatcta

SEQ ID NO: 827981 - DNA, 645 bp, Homo sapiens
ttctccatgcacactcttattctattctggcaggaaatttaattgrtgcattttgattaaacttccaaattgatggctctcttatgctctgacttgtaataattgaaatgattaaagatgtagtttcttctttccaaagcttttcacttatcagttgctcctgttttattgagaaaggtgcttgtagtgatgttatattaagccaaactactttctgatttggttcaaacagactaacacacaaatgctaattaatatttagcatttagatatctgtatccaaattaaattggcacccagaggatgaaagattgaattattcagctgctgttgaaagctatatgtcataccgtgtttacaattgtagttatcagaagtcggctttcattattctaccaaatgtgtttattttctcatagagcattcaaatcttcatggttggctatctatatagaagataatattaaaggttttaaacttgaacaatttatataaaataaaaaaattaaaatctctagtcagataatgtcatttaagggccatttttggatgccttcccatatgcaaagatactaccaatgtagtatcttttgcatgtgttcccatatgcaaagatcaaccatttctgaagcagaatgcttattt

SEQ ID NO: 827982 - DNA, 584 bp, Homo sapiens
cttatttaagaaatcaaccaagattgtgtgaattactagcagttacaaaatacactgcaagttagacatgtatttttaaaaaatcactgagttaaaaagtggtaaccaaagcattagtcacaataacaaagacaagcagtcaacctaggtgcccatcagtggtggattggataaagaaaatgtggtacatatacaccatggaatactacatagccataaaaagaatgaaatcatgtcccttgtagcaatgtggatgcagctagaggccactatcctaagtaaattaacacaggaaaagaaaaccaaatactgcaagttatcacttataagtgggagctaaacattcggtactcagggatataaagatggcaacagtagacacttgagactactagaagggagagggagggagggggcaagcgttgaaaaaccaactactgaggactgcgctcagtacctgggatcattcataccccaaacctcagtaccatgcaatgaatytagataacaaacctgcacatgtccccaccttccgaatttaaaataaaaattgaaaaaaaaaaaaaagtcagccgaagaagaac

SEQ ID NO: 827983 - DNA, 604 bp, Homo sapiens
tagcctatggcaaaattggttttgttatacatcatttcacttaaagttacggttcccaagaacctatggatgacaataagtgaagacgtactgtgtagtgttttcttcaatagacgatattaccatctttcaatgaaggcaactggtcctttcaccttcaaacacctatcccagtgccagttactgggaatacagagagaaaacacacactctttacctgaagtcaggaagctggtgttacgtaagcacaaggaaaatcttagagaagcacgagaaggaggagaggcccctgagatcccgaatacatggattctcagtgcttttgtttggcttatgatgaaacaaatacgaacagggaggaaaccgtcaacctgcccagaagctgccagcacacaaggcccagaggtactttattggatgccaaattcttttaacacaccatgagaaaagaagttgacaactttcccatgcattttggaaggtgtgttagaacgattcaacacacacmcacacacacacacacacacacacacacacacacacacatttattgggttgggggagccttaaaacttacaaatctaaccagagctgactccgtccc

SEQ ID NO: 827984 - DNA, 585 bp, Homo sapiens
tttattacctgctggtgagagttcctgagacagtttgagataaaactttaggagtaattatactttatgaggacataatacccttcaggcttcatttcacgtggtgctaaatcaatactcatattcaattcttttctgtctgccttcaagttaaaggccacaatattaaagtttcctataattagccaagaagttggtgctacagagatggtaaaaattgacttcaaaccctttatctgattgtgcaaaaccaacacaagacaggtggcatattgggtcaccaagttacatcagcaagttccacggaaagcctagatgccaggaaagaaaataaagggagggaagtgttttctaccaactgctgggaaaaataatgccccactgtcatcttcactaccagagtctcatggggctattaaatatctttctgttttcatttccatgatgtttcctaggttgaaattgttctctctagaatgattgcataagccaagatccctaacactagagggcatgggctaactgygtacctatgcacatcaggctgttgaacaaccaaagcaccttgctctttgagacaatggc

SEQ ID NO: 827985 - DNA, 503 bp, Homo sapiens
tctggtggctctcatctctgggggggacgagctgaccaagactggttggggtagggcctgggagaaatgaaacctctccagaccccaaggactgaattctctgaagaaratgcctgtagtccaaggtaaaggtatggtgaattctgttacccatcatgattgtgggaagatcataatcagaattccagggagaaggtaggaatccaagagtggttggtctgactcactgcgagtgagacttgatacagtttcaaggaaaggggttggcagcaagaatatataagagttagttatgtattattaggctacactcttaatatggagaggcagtgttattataaagccttatttactacattgcaaagaactatgttgcgtgtttctcccagctggctctgcagcacctccctcaggacaccgtctcacattttcctagattgggtgacgactttttttctgaggtttctcagctccctgtaatagcactgtcaggatccttcctt

SEQ ID NO: 827986 - DNA, 597 bp, Homo sapiens
ggagggacctggtgggaggtgattggatcatgggggtagttttccccaggctgttctcatgytagtgagtgacttctcatgagatctgatggttttataaaggggctcttcccccttctctctctccctctctcctgccaccatgtaaaacgtccctgcttccccttccaccatgattgtaagtttcctaagctctccccagccatgagaaactgtgagtcaattaaatctctttcctttataaattactcaatcttgggcagttctttatagcagtgtgaaaacagactaatacacatatgtactgagtcaagtgaaactttcatggcaacagcagcagcagcaacagcaatggcagcagtgacatcatcatcattatctaggagcactccctacccatagcaaaggtctgctccattggacacagcagggagaatgcagtagctatcttaacaaatcaaggaacctcatattccctcttaattctcatttctgcagcagctaatcatgggatggaagaaagatttggagaatgaagcatgctcttttatgctccagctgtcatattttagtttgcctgaaaaaattctgtcaccc

SEQ ID NO: 827987 - DNA, 527 bp, Homo sapiens
atcatcatctgattctcctcttcccttaccttccccatatcagctctgaagaagaggaggctgaagctcctctcatttacagctccacaratttaaaacctagtgttgtttattacaaaaggaaaaccaagaagtatactatatttcaaataaactgaagaactggaagcaaacttcaaagaggaaaggaaaaaaccacagccatttttctccctataaataaaaatggaaatgggaagaatttatccgctggcctggttttcttttctaaaagcactcagctaagaagatagagagatgagacagacttgaggcaggggctcttgcctgctttatttcttcacttgtgaaaaagagccaaggggagcccttccctaaaaggcccaaagcaaagagtgatttaagaaatgtttcataaacttaggcccaatatttaaataagaggatcaaagagattttgcttggactctacagcaataaaagaggaactggggaaagtatgagatgggaggaaataaagataataa

SEQ ID NO: 827988 - DNA, 643 bp, Homo sapiens
cattaatcagtggatactttgggaagacactttgagattatgcaaatatcctgtttcctatcagatttttgtccatgacttttagtaaccatcgatggttcttccttgtaacaataaatctggtggtgtttgtcraatcaaaaatcaacttttcctaatttttatgtcctacttaaggccaaaacctaccaggtgaaagacgacaatctccctgtcacagtgaccttccccacattttgggattggccatctagtttaagcatagcaaatccatggtacccaactcattgtccccacccctcacctactgcaggaaccaaggctgtctttctcactgccctgcaggagacctcgacattctcaatgctattaggaaagaagccacagcagatcaatgagaactatcatgagaaatgaaacatatctcccctccttggtctatgttgggtgtttagtttttcttaaaaacactacatccctggagcatactggctttgccaagtcccttgaaaacccttaaagggtggcagatttagggtccactaggggaagagaattgcacaggcatctcccttgggtctctggatttttcttgtttggggccattgttttgagtccctggcaggggtgtgctggtagatgt

SEQ ID NO: 827989 - DNA, 643 bp, Homo sapiens
cattaatcagtggatactttgggaagacactttgagattatgcaaatatcctgtttcctatcagatttttgtccatgacttttagtaaccatcgatggttcttccttgtaacaataaatctggtggtgtttgtcgaatcaaaaatcaacttttcctaatttttatgtcctacttaaggccaaaacctaccaggtgaaagacgacaatctccctgtcacagtgaccttccccacattttgggattggccatctagtttaagcatagcaaatccatggtacccaactcattgtccccacccctcacctactgcaggaaccaaggctgtctttctcactgccctgcaggagacctcgacattctcaatgctattaggaaagaagccacagcagatcaatgagaactatcatgagaaatgaaacatatctcccctccttggtctatgttgggtgtttagtttttcttaaaaacactacatccctggagcatactggctttgccaagtcccttgaraacccttaaagggtggcagatttagggtccactaggggaagagaattgcacaggcatctcccttgggtctctggatttttcttgtttggggccattgttttgagtccctggcaggggtgtgctggtagatgt

SEQ ID NO: 827990 - DNA, 621 bp, Homo sapiens
gaatgagtgtacaatttctgttaagctttttgaaatattgcaaatagctcatgtacccccatttctgcaatgaaaaccttacctgagacgattgctgcagggccatttgttcatgtagttcaattttcacttaagctttgaaagtttacacgttaggaccgtgtaggtacagaacccagggcctatgactttattggctcaggatatttgttaattgacattaaagtattaagtatcaaaattgaaataattgcttaagtatttagaaaatgaacagtatattagctagtcaactacaactcaacagttttgcagttgtatttacgttgtatttatttggggaggttttttctttttaatatctttgacacatgatatgaaatggggccttcaaaagtcaccttgtttagagcctgcttttttgtctaaagagctccaagaaaggagattgagtggtataatttaagatctaaaagcagatgaccctgttcttcctggaaagtagactggagatgcaggtcccttgggcaagacatatctgctatctcctattctattgtgtggataagccrtcatttatataataggatccctgatgtggggatatttatcttgcttgtt

SEQ ID NO: 827991 - DNA, 539 bp, Homo sapiens
gcttcctgtgatgtagttaactggggacttattttgtgccagacactgtgttaggtgccttcagtgtattatcttgtgtgagyctcaaagtaacatctgtgacacaggtactgtcatcatcctgattttataaacgagaaaatgaaggctccagaggttaaggaacttgcccaaggtcagagacagcatgtggcagggccaggatggggacccaggctgccagcctcccaaacctagtttcttaacccctacctgacccccagtctatcagagagcagatgccataatcagaggaccacaattccatctccagcgagacagatgcgaggaagggaagagggatgccctgtgtgcatctgcccgcactgcgagtccttgccactccttagatcaacggagccagagatcttgccaccaacacactggcaaagcagctggtttgtctacactttctgtggagaacaaagttcattttgataaaggttggggtgctgggagggtttttgtttgtagtgagcattcagaataaaagaaccctc

SEQ ID NO: 827992 - DNA, 539 bp, Homo sapiens
gcttcctgtgatgtagttaactggggacttattttgtgccagacactgtgttaggtgccttcagtgtattatcttgtgtgagcctcaaagtaacatctgtgacacaggtactgtcatcatcctgattttataaacgagaaaatgaaggctccagaggttaaggaacttgcccaaggtcagagacagcatgtggcagggccaggatggggacccaggctgccagcctcccaaacctagtttcttaacccctacctgacccccagtctatcagagagcagatgccataatcagaggaccacaattccatctccagcgagacagatgcgaggaagggaagagggatgccctgtgtgcatctgcccgcactgcgagtccttgccactccttagatcaacggagccagagatcttgccaccaacasactggcaaagcagctggtttgtctacactttctgtggagaacaaagttcattttgataaaggttggggtgctgggagggtttttgtttgtagtgagcattcagaataaaagaaccctc

SEQ ID NO: 827993 - DNA, 510 bp, Homo sapiens
aggccagggttggggagtggattctgagttgggagaaacagaaacacgttgtggccaaccatagctgctttaaaatgaaagggctggagagacgaaagagagaggtcctttttattgtgatgggattccctcccttgggaggggaattccttgttatcatcagagaccagaccagacatcaaaagccaggctttctcctggggtctggaattattaaatgagtaaaagccaaatataagtacctccaccaggaaatacaggaaataaagacacagggagccaataaagttatcatttaagggtgttttcttctttttttaaatcttaagattacctctaatttatagtacaaaagtcctaacaaattaatttcttgttcacaaaaaagacattagatgatttcrgccaataagtaacatttccctcgccttctttaacataactgaaagcaagaaaaagtaggcaatctctaagcacaagcaaataatccatcattcagaaccttgaaaa

SEQ ID NO: 827994 - DNA, 581 bp, Homo sapiens
aacgataacaaatatgttactggcttatacattcactataccacccttttaatcattactttagagtatwctccttctacttattcaaaaaacaaaaacaacaaaaaaaaggtaactgtaaaacagccccagacaggtccttcaggaagtattccatgagaaggcattgttgtcataggaggtgactgctccatgcctgttaattcccctgaagaccttccagtgggacaggaggtggaggtagaagacagtgacattgatcatcctgactctctggaggcctcagctaatgtatgtggtgtgtgttcatttttaacaaaaaagttttaaaaataagaaatgtttgaaatcgtaaaagcttataagaataaggatatgaaagaaaatatgtacagctatatgtgtttgtgttttaagctaagtatgagtacaagagttaaaaagtttaaaaatttttaagtttataaagtaaaagttacagtaagctaaggctaatttactattgaagaaaaatattttataaatttagcatagcctaagtgtgcagtgtttgtaaagcctgcggtgttctacagtaatgc

SEQ ID NO: 827995 - DNA, 657 bp, Homo sapiens
ttagagaagtcttgtctctgcagttttcagcaacccattccctaattaagattccttcaggtacagcttattctcctattctccattccccaactttctaattgctttattatactcargctgcttgtcccctgaaaacatttgttttcaatagataatcaccaaatgatctccatggctttttttttcttaaggttccctgattatatttatgattcaaacacaacctcctgggtcccaaacacatctctaggtttcaaagataatcaaatcaagcccatcttaagaaatcttctgtaagctttactctccttgtttttcctaaagggctgctttacctttctcagaaatgtattaggcatcaggaactactgtcgacatgtagtttgtcacaaaacattatacataacttgaatggcccaccatgtaccaaaatctcagttaaccttatcctaaataaaacaggagacaagggaaataatcttttaacactccacattcaaatgtatgcaatttagaactactatttccactaatttcttcaatttaaaatatcaataacaatttttaaactctgcaatttgcaagactttaattttaatttctcaatactcaggatttattttttggtcaaagttctgtaacatttcctctggt

SEQ ID NO: 827996 - DNA, 620 bp, Homo sapiens
acaggcattgggtaaatgctcccattctaaatgggagacattggccaaaacaaaggggctacagtccccatgcaagtctgaaacccagcagggcagtcattaaatcttaaagctccaaaataatctcctttgactccatgtctcatatcctgggcatgctgatgcaaggggtgggctcccatgggtttgggcagctccgcctctgtggctctgcaggatacagctcccatggctgctttccccggctggttttgagtgcctacagcttttccaggtgcatggtgcaagctcttggtggatctacctttctgatgtatggaggacagtggcccttttctcacaggtccacttgacagtgctccagtggggactctgtgtaggggctccaaccccacattttccctctgcactgccctagtagaggctctccatgagggctccacccctgcagcagacttctgcctggacatataggcatttccatacatcctctgaaatctaggtgtaggttcccaaacctcaattcttgccttctgcrcacctgcaggcccaataccacatggaagctgccaaggcttgggatttgcaccctctgaagccgtggccctagctgtaccatg

SEQ ID NO: 827997 - DNA, 311 bp, Homo sapiens
cgacaaatagattttcatgataacccaacaagccaagatagagttgacagttcttgggtttctctaggttctgtgcttgtggcattatggagcctytcggccccccagctgatactttttttgtttgtttatttgttttaattttgagatggagtctcactctgtcacccagactggagtgcagtggcgcaatctcggctcactgcagcctctgcctcccaggtcaagcgattctcctgcctcagcttcctgagcagctgagattacaggcacccactaccacgcctgactaatttttgaatttttagtag

SEQ ID NO: 827998 - DNA, 615 bp, Homo sapiens
aaaatcctactggggtcctagttttctaatgtttaaagtgacagcatggaactaacaaatgaaggattgtttgtttgtttgtttgtttgtttktgtctcaattttctctgtgatttataatccagcctgtgctttggaaaagctcacatattaagataattgtcagcaattttctggcttttgcgaaagtatctgtgcttgcacagtggagacagaagatagtgtgacaagtggcagaaaataaatgcctataccagcaacttggggccactttacctcaggctctgttgcccacttccctacatctaaaccattacagattccagttgagtctacttctttcttcaaagtaagactttatttattaggaaattttgggttcacagcaaaattgagcaaattgagcacagtgtacagagacttcccttatatccccagcccccacacatacacagcctctcccactattaacatccccctccagagtgatacatttatgaggaacttgcattgacacaccattatcagctaaagccaacactcagtgtacattagggttcatttctggtggtgtacattctatggggttttttttgtttgttttttttttggaga

SEQ ID NO: 827999 - DNA, 511 bp, Homo sapiens
gtacctcattttctttattcaatcaaccaaatcaaccactgatggacacttaacgttggttccatgacttagctattgtgaatagtgctgtgatgagcataggagtataagacatcaactcttttcttaaagaatatacaattagttgcacaaagaagagaaatacgtattaaacaccagaaaacaggatagactactgtggaactatgtgctttgtagagacatttattgctgggtagaattcactggaaatggctccatggacgtcatgccagttaccctaaatcaggctaaaaagggtagctcttggaaagcagagaaaagctggggtggatttcaaagacaatgccatagtttggatgtttgcccctccaaatctcatgttgaaatgtgatccccagtgttggaagtgrgggctagtgggagatgttttggtccaggaggcagatccttcatgaatggtttggtaccctcgctgtggtaataaattaccatgagatctgattgttaa

SEQ ID NO: 828000 - DNA, 609 bp, Homo sapiens
ataattccaagtcaatgttttttattttattttgtagtcaacaaggatgatggatggttattatgctagtgtattagtctgttctcacactgctaataaaagcatacccgagactgggtaattcataaaggaaagaggtttaatgggctcacagttctgcctggctggggaggcctcacaatcatggtggaaagcaaaggagaagcaaaggcacatcttacatggcagcaggcaagagagtgtgtgcaggggaactcccattgataaaaccatcagatctcatgagacttattcactatcacgagaacagtatgggggaaaccactcccatgatttaattatctccacctggccccatccttgacatatggcaatcattacaattcaaggtgagatgtgggtggggacacagccaaaccatagcagctagagaaaaaggtacgtgggatatgagagaaagaggagaccctgcctttacctggagtaaatgaatgctcaggtaggggacaaggtcttaaagatgatgataaggtgatctgattgtggcaaaatgcagttyacatttcccttgcttcattattgtcttcttctgctcatcccaatgtgctg

SEQ ID NO: 828001 - DNA, 610 bp, Homo sapiens
tctaactagcatgtcctagattactggactaggacctcactgacaagtctccaagaagagaagctgtaaggctgatatccctgaacttcccctccccttttgtcttccctgccctccacaggaccttcccaaacaggtctgcaaagggcagcacactgtcagatgggtagtggggccgtaagagctgataaaccagcatgtatatatttgcatgatccacccctcatctctgtgaatcagttatgatgtctttggcagaacataacagataaggctgactcaagctgccttaaacaacaaggaaattggctgggtgccatggctcgtgcctgtaatcccagcactttgggaggccaaggcaggcagagggcttgaggccaggaattcaagaccagcccaggcaacacagcaagaccccatcgctacaaaaataaaataaaataaaatattagctggacatggtcgtgcatgcctgtagtcccagctactcaggaggctgagatgggaggatcacttgaacccaggagttygaggctgcagtcagctatgatcacactactgtactccagtctgggtgacagagcaagactcagcctcaaaaaatatacat

SEQ ID NO: 828002 - DNA, 530 bp, Homo sapiens
ccctatttaataaatcgtgctggaaaaactggctagccatatgtagaaagctgaaactggatcccttacttacaccttatacaaaatttaattcaaaatggattaaagacttaaatgttagacctaaaaccataaaaaccctagaagaacacctagacaataccattcaggacgtaggcatgggcaaggacttcatgactaaaacaccaaagcaatggcaacaaaagccaacatagacaaatgggatctaattaaactaaagagcttctgcatgacaaaagaaactaccatcagagtgaacaggtaatctacagaataggagaaaatttttgcaatctacctatctgacaaagggctaatatccagaatctacaaagaactcaaacaaatttacaagaaaaaaamcaaacaaccccctcaaaaattgggcaaaggatataaacagacacatctcaaaagaagacatttatgcagccaacagacacatgaaaaatgctcatcatcactggtcataagagaaatgcaaatca

SEQ ID NO: 828003 - DNA, 586 bp, Homo sapiens
ataaaagggataaaaccaataatctcmgcttccaccttatgaaactacataaagaggagcaatttatatctgaagtagaacatgagcaaaataaataataaatattagggcagaaatcaataaaactgcaaacagaaaaagtgacactgaacaccaggcagaccaaaggctggttctttggaaagaacaatattgtatagttcccatatatttgaaaatttgggggttacattttcaatattgatttctagtttgatccctccatggtcagagaacacattcactgtgattttaattattgcaaatatgttgagaggttatgtgggcaggatatgtcctatcttggtatatgttgtgggcacttggaagaaaaaaatgtgaacttctattgttatgggttggagtgttctataaatgtcagttagatctcgtgggttgatgatattgttgagtcctaaatccttgctgattttctgtccagttgtcctatcgaagattaacaaggggttttgaagtctccgtgtgcaattgttttgttagtttctgccacatgcactatatcgctcttttgcttggtgtctacgca

SEQ ID NO: 828004 - DNA, 586 bp, Homo sapiens
ataaaagggataaaaccaataatctccgcttccaccttatgaaactacataaagaggagcaatttatatctgaagtagaacatgagcaaaataaataataaatattagggcagaaatcaataaaactgcaaacagaaaaagtgacactgaacaccaggcagaccaaaggctggttctttggaaagaacaatattgtatagttcccatatatttgaaaatttgggggttacattttcaatattgatttctagtttgatccctccatggtcagagaacacattcactgtgattttaattattgcaaatatgttgagaggttatgtgggcaggatatgtcctatcttggtatatgttgtgggcacttggaagaaaaaaatgtgaacttctattgttatgggttggagtgttctataaatgtcagttagatctcgtgggttgatgatattgttgagtcctaaatccttgctgattttctgtccagttgtcctatcgaagattaacaaggggttttgaagtctcygtgtgcaattgttttgttagtttctgccacatgcactatatcgctcttttgcttggtgtctacgca

SEQ ID NO: 828005 - DNA, 640 bp, Homo sapiens
tcatcaaaatattgaataagatgggaggcagacaggtgaaaagaaagcagatcatgagaaagggcctggccraagtagtgtgggctgttcctgaagccttggggcagaacagtccaggtgagttgttgggattggtgggtgtcacggtcagtccaagtaaaggcaaaaagaggctgagaggagggatacaaggggatagtaaagaaggtgtctttgaggtcaataacaaaatagtgagttgtggaagggggtattgaagataggagggtgtagaggtttggcactataaggtggatgggaaagacgatttgattaataaggcaaagatcctgaaccaacctgtaagatttgtctggttcctggatgggtaggataggggagctgtaatgtagcaggatgagccatggacaaaacctctcagacaccgagttgtagaaggaagggctttattcagctgggagcatcggcaagctactgtcttaaaatcggagctccttgagtgcacaatttctgtccattttaagggctcacaacactaaagattttacatgaaagggtcgtgattgattgagcaatctaggggttatgtaacagggtcttcatgcactggtagtcagagtcaaacagaacagaacaggga

SEQ ID NO: 828006 - DNA, 584 bp, Homo sapiens
tttgtgtatctatagtacatagtttgatcgcatactggtaagaacaatggcataacaccattacctgatacttacaaatgtatgtaccatcatgtcaataaattttatttttaattttttttacataggaacaatgttaaactcacagaaatgttgcatgtatatgacaaatacccccttccctaaccggaatcatataagagtcttttgaagacttgagaattgtaccgtctaacattttactatgtgtttcctacaaacaacaatattctcctaaataatccccatacaccaatgaaatacattagtccatcaactcctgaggaatatttcaaatcgtcaaaaagaaaccaaaaaatgttactcacaacaaaatagttcccagtagaaacacattctctgcagacaaatttgtgctaccctggtcttacctgggacacctggggacactgarctggtgctgagttactgagatgagccagccctgcagctgtgcccagcctgccccatcctctgctcatttgcatattcccagaacacaacctcctgcctgaagacttcttaataggctggtcacacttctt

SEQ ID NO: 828007 - DNA, 489 bp, Homo sapiens
cttacactcacacaaacactggcacacatgcacacacacacattcacgcactcactgawgtactcacacaaacacaggcattcatgtataaatacacacataagcgtgtatttatagaaatattatgcacatacaatatataattttatttttacatagtatatatacataattatgtattaacaaatataagatcaattttattatatacttatttacataaagatatattatataaatgatgttatatggcatgtatatatcacatataactttgcttagtatataaaatttaatctataaaattatgtatcacaaataaaagtatattttacatatacactatatataactatttatatgaactataaaaatcatgtttatattaataaaatatatttatatcaatatattaatataaagtatgcacaatgtatatttatataaaaatttttaattaaaaaatattcatttgggttcaatatgtat

SEQ ID NO: 828008 - DNA, 597 bp, Homo sapiens
aagtgcgtagacaccaagcaacagagcaatacagtgcatgtggcagaaactaacagaacaattacacttggagatttcaaaaccccttcttaatctttgataggacaactcgacagaaaatcggccaggatagagaagaactcaacaatatcatcaacccatgggatctaactggcatttatagaacactccaacccataacaatagaagttcacatttctttcttccaagtgcccacagaacatataccaagataggacatattctgcccacataacgtttcaacacaattgcaataattaaaatcacagtaagtgtgttctctgaccacggaaggatcaaactagaaatcaatattgaaagtataaccccgaattcttcaaatatatggaacttatacaacactgttctttccaaagaatcagcctttgatttgcttggtgtttagtgttgctttttctgtttgcagttttattggtttctgccctaatatttattatatattttgctcacgttctacttcagawttaaattgctcctctttatgtagtttcataaggtgggagctgtgattattgattttatgccttttatttt

SEQ ID NO: 828009 - DNA, 463 bp, Homo sapiens
ctttgttcccaaccttgatctatcaggtattacctgtatgaactcaaaataatgtacgtactgccccatgcctcagtctccacatctataaaatggagatactgtgtttacctgtggttgagactaaatgaaataaagtctgtcaataccaggtgcttactgactggcagccccttctccttctggccctattcattgctaattctcctgcccggcctcttcctttgaatgcttttcatgactaattctccatatttcctccctatactcagccccttggtatgtttattcgcaaggttataatacgatgaatcagctctttaaataaatatttttcttcgtgagaattartaaccctaagtgtttaaggcgagtttttaaaaattccctaagtctctttttccccatccccagcaaactcttgatccaataagaaaacaaacctcataaataggataaactg

SEQ ID NO: 828010 - DNA, 567 bp, Homo sapiens
atggtggctcacgcctgtaattccagcactttgagaagttgaggcgggaggatcacttgagtccaggagttcaagaccagcctgggcaatatagtgacgtcttctctaaaaaaaatwaaaaaataaaaaataaaaagaagccagatgtggtggtgcatgcctgtagtcccagctactcaggaggttgaagtgggaggatggcttgagcctgggaggtagaggttgcagtgaactgtgatcatgccactgcactccagcctgggtgacagagcaagaccttgtctcaaaacaaaaaactgtatagtcagttagtcaaatcttggtgtttgcagggagggcttggtttaaaactcattttcccttgtaagatatttgcatattctaaattaaagattactctgctgcctttttagtactaggaaaaacagaagccctcttgtggtcagattaaaaaatacaagctgtgttccgtgaatcagtttcagggcttagttttagctagactaagcctcactcaaactgatttttaccagtgttttaccattaggaaaaatataacacacataa

SEQ ID NO: 828011 - DNA, 498 bp, Homo sapiens
tcccagctggatttgattgtgctgtgatgacttggctgttgcagaggctagattgaaagcatgtctcaacttcacctcttgaatgcaatgctgtttatatttgcctaatatttttctcccycttgggttatttgaagatcatgccaaacttttgtttcttttaactggatagagtattctataaagatattttaaagcagttattctcatcgacattttgcaaatctggaagagagtttttatagctatacagccgttctctcaccatggcctggctccacatacagcaaagtgatccttctaacccagatcacgcccccactgtgctccaaaccactcactgccttcatctttggatggaaaataacatcctcagatggtttacaaggactctgcaatgtccccttgctcccatgtcatcttcctccactctacccctgcctttcttgctagcccttgaatagccccaaatatgttcctgccttgaggcctttgcac

SEQ ID NO: 828012 - DNA, 498 bp, Homo sapiens
tcccagctggatttgattgtgctgtgatgacttggctgttgcagaggctagattgaaagcatgtctcaacttcacctcttgaatgcaatgctgtttatatttgcctaatatttttctccctcttgggttatttgaagatcatgccaaacttttgtttcttttaactggatagagtattctataaagatattttaaagcagttattctcatcgacattttgcaaatctggaagagagtttttatagctatacagccgttctctcaccatggcctggctccacatacagcaaagtgatccttctaacccagatcacgcccccactgtgctccaaaccactcactgccttcatctttggatggaaaataacatcctcagatggtttacaaggactctgcaatgtccccttgctcccatgtcatcttcctccactctmcccctgcctttcttgctagcccttgaatagccccaaatatgttcctgccttgaggcctttgcac

SEQ ID NO: 828013 - DNA, 585 bp, Homo sapiens
tcttcctggtaatttaattttttttccagcrtattgttagaggtgaggtgatcactgttgcttttttttgagatggagtctcgctctgtcatctaggctggagtgcagtggtgtgatctcggctcactgcaacctctgccccccaggatcaagcgattctcctgcctcagcctcccgagtagctgggactacaggtgtgggccactatgcccagctaatttttgtacttttagtagagacagggtttcaccatgttggccaggctggtcttgaactcctgacctcaggtgatttgcccacctcggcctcccaaagtgttgggattttggtcgtgagccactgcacctggcccatgttgcttttagctcaggctgagacataggtgagtcggctctgcagatttcctgttgcttgtctgttcttgctctattagtactaatattaagttcaatctgtaatttatttccaggagtctttttaagccacttgtccattttttgagggttaattaagctaacacatgagccacgtgtactgcgaaacaggacaatacatgggaagtaaggggtgggaaagcctgtttgt

SEQ ID NO: 828014 - DNA, 614 bp, Homo sapiens
atacattgtctcattttattctcatagcaaccttaggagatagctacttcaaggttccagttttacagatgagactaggtagtgtacccaagaacatggcagctaaagaatctgaagtcggattaggacccaggtccagctgattccaaaactcaattattatttacccttcctgccatgctgtcagccgaggagggctctcctaagtctctccactgacactgggtgaggctccccgtcacctcccatcttctctttcttagcctaaggttgcacagctgccaagtaagtggtgggatcaaatttctttctttctttctttttgaggcagagtttggctcttgttgcccaggctggagtgcaatggagcaatctcggctcacggcaacctctgcctcctgggttcaagtgattctcctgcctcagcctcccaagtagctgggattacaggcatgcgccaccatgcccaattttgtatttttagtagagatggggtttctccatgttggcgaggctggtcttgaactcctgacctcaggtgatctgcctgccttggtctcccaaagtggtgggattacaggygtgagccaccgcaccggcctaaatgctacaca

SEQ ID NO: 828015 - DNA, 607 bp, Homo sapiens
atctagctaatctagtggggacagagaacttttgcgtctagctcagggattgtaaaggcaccaatcagcagcgtgtcaaaatggaccaatcagctctctgtaaaacagaccaattggctctctgtaaaatggaccaatcagcagaatgtgggtggggccagataagagaataaaagcaggctgcccgaatcagcagcggcaatttgcttggatctgcttctgggtcgtggagggtttatatttttttttttttttttttagttttagctgtttgcagtaagtcttgctgctgcttgctgtttgggtccacattgcttttatgagctataacactccttgagaaggtctgtagcttcactccttgaagccagtgagatcacgaactcaccaggaagaacgaacaattccagacgcgccattttaagagctgtaatactcaccgtgaaggtctgcagctttactcctgagccagtaagaccacgaaccccacagaaggaagaaactctgaasacgtccgaatgtcaggaggaaccaagtctgaccacactgcttttaagaactgtaacactcacttcgagggtgcacggcttcattcttgaagtcagtg

SEQ ID NO: 828016 - DNA, 625 bp, Homo sapiens
tgacatgattgccttttttgttatgcttccttgtggactktgatccccccaaatcaaaaggagaactctatgtttaggatttctcattcattggcaaagagaggtaacctgtagatgtcatctgactcagttaatagaacaacagtgcaccagttcattaaactgtcatatcctgaatgcccccccaaaagtagtatacaagagaattccattattttagaagtcccctctgttggatctcaaggaaatttgctgaaaaatattgaggctctacctcattataatgccttcctcaatttttcctcttcagataagcaagacccctacaccctcaatatgcctccttagaggcctgttccctaaacatgttagaaatcacatatcttagctcccaacaaattaagcaatttattgaaactaaacagtccacatactcactttggggatccacaaatctatacttgcccaaataccaaaaagatggagctgggtactttctcgggtgaactttgttaccttggtgaggaatggcatccaatgtgtacatgattagaaatctctccccaactttatgaattcttgtgatgaagctgcattggcaatagacactcagaagagaggaatt

SEQ ID NO: 828017 - DNA, 625 bp, Homo sapiens
tgacatgattgccttttttgttatgcttccttgtggactgtgatccccccaaatcaaaaggagaactctatgtttaggatttctcattcattggcaaagagaggtaacctgtagatgtcatctgactcagttaatagaacaacagtgcaccagttcattaaactgtcatatcctgaatgcccccccaaaagtagtatacaagagaattccattattttagaagtcccctctgttggatctcaaggaaatttgctgaaaaatattgaggctctacctcattataatgccttcctcaatttttcctcttcagataagcaagacccctacaccctcaatatgcctccttagaggcctgttccctaaacatgttagaaatcacatatcttagctcccaacaaattaagcaatttattgaaactaaacagtccacatactcactttggggatccacaaatctatacttgcccaaataccaaaaagatggagctgggtactttctcgggtgaactttgttaccttggtgaggaatgrcatccaatgtgtacatgattagaaatctctccccaactttatgaattcttgtgatgaagctgcattggcaatagacactcagaagagaggaatt

SEQ ID NO: 828018 - DNA, 639 bp, Homo sapiens
cattctgcacacaatatacaatatcagcagtcaacacctctgcaagtggaatayagaaactgccacttctgcttaactagttggagtgatgtgacaaggattagttatgcgtgagagggtatcagtagacccatgtggtctcaaaataatgactttccttcttaccctgaaatcaaatcatcttagctgggaatgattaaaaatatttaattattgctttgaaatcaagtatgttatttggttctacttttttcactattgtgtcatatttttaactataattttaagaacctcacaaaaaatattggtataattccatatatactgtaaacagatttatttctgagaccagaagctctcttttttatgggtaagtaaatatttgcaagcatggttccattccggtagaatcattttgcagtcatttgttttgtttgttgttcattatttttgttttatacatttgtaaacaggtaagaacagatttttttcatagcaattatgaaattaatacttagacattttaacatgggagtgccagtttagctgcctgagaaccaataaagaatttaatttcctattctcattttcacatttcatggatcgtagtttcaaaggagttctaattataagagtacc

SEQ ID NO: 828019 - DNA, 639 bp, Homo sapiens
cattctgcacacaatatacaatatcagcagtcaacacctctgcaagtggaatacagaaactgccacttctgcttaactagttggagtgatgtgacaaggattagttatgcgtgagagggtatcagtagacccatgtggtctcaaaataatgactttccttcttaccctgaaatcaaatcatcttagctgggaatgattaaaaatatttaattattgctttgaaatcaagtatgttatttggttctacttttttcactattgtgtcatatttttaactataattttaagaacctcacaaaaaatattggtataattccatatatactgtaaacagatttatttctgagaccagaagctctcttttttatgggtaagtaaatatttgcaagcatggttccattccggtagaatcattttgcagtcatttgttttgtttgttgttcattatttttgttttatacatttgtaaacaggtaagaacagatttttttcatagcaattatgaaattaatacttagacattttaacatgggagtrccagtttagctgcctgagaaccaataaagaatttaatttcctattctcattttcacatttcatggatcgtagtttcaaaggagttctaattataagagtacc

SEQ ID NO: 828020 - DNA, 593 bp, Homo sapiens
ctggacggtgagcaaggtgaagaggtgttttattgagcaacagtacagctctcaggagacccaaagtgggtagctcctttctgcaagcaggtcaccctgacatctctgcttcctcagcggaaaggagacctggagtgggtagctcctatccacagacaggtcatcccatcatctcagcagagaggagactggagtgggtagctcctatccacatgcaggtcatctcaacatctgtgcagcccttagcagagaggagacccagaatgggtagctcctatccacaggcaggttgccccgatgtctctgcagccctcagcagagagaagacctggagttggtaactcctctccacaggcaggctgtcccatcatctgtgcagccctcagtggagaggagacccagagtaggtagctcctatccacaggcagatcaccctgatgtctctgaagccttcggcagagaggagatctggagtggatagttcctatatgcaggcaggttgtcccgttgtctgtgcagccctcagcgtggattctayccacaggcaggatagctcctatccacaggcaggatagctcctatccacaggcagg

SEQ ID NO: 828021 - DNA, 514 bp, Homo sapiens
gtaagtggatttcacttctatagctctttattctcaaattactaatatttgaaaagttgaatatgaactctaagattaaacatttaaaaagaaatcttaygtgaaatattaaaaaatagaatgttctttccagtgtgttaaagaaaacactattacctacatttttatacttcaaagtactgtttgaatttaaatataccatggttagatgagggtaacatttttactttcattttaaaatcttttaaaatgtacatttaaaacacattattttcaaaatagtgagttatccagattcaagtttcccgtacacatttcctaatatatacaagtatataggttgaattttgctttaaaaatatagcttccatttttcaggttttattttaaaatccatatgcttgaacaacactaaaaacataacttcaatttttagaaaattgattaaaatgtattctttctgaaaatatgaaatgacacagattctgaagagaccaaccatagtgctcttgta

SEQ ID NO: 828022 - DNA, 618 bp, Homo sapiens
aagtctacttatttacctatcattcttcattccagcaccattactaccttcttcacttcatgtgttataattatcttggtaataataaatatcattaaccmataaaatatataatgtacacacttgaaaagctataattaagaaatgtaaattacttcaatttctgtttgtccaaattgctaaaaatataataaaagttgtatccagttattgcgtgaaaatctacttatgttttttaaaattattattttattattattattatttttgagtctcgttctgtcatccaggttggagtacagtggcctgatcttgactaactgcaacctccacctcctgggctcacgtgattctgccatctcagcctcttgaggagatgggactgtgtgccaccacgcccctgctgatttttgtattgttttgtagagacggggttcagccatactgcccaggctggtcttgaactcctgggctcaagcgaactgccagtcttggcctcccaaagtgctgaaattagaggcatgaaccaccacgccaagccggtcatcatttttaaaaatgaattttggatttagtttaaagattgttaagacatgcctcttcacctaacagggcata

SEQ ID NO: 828023 - DNA, 618 bp, Homo sapiens
aagtctacttatttacctatcattcttcattccagcaccattactaccttcttcacttcatgtgttataattatcttggtaataataaatatcattaacccataaaatatataatgtacacacttgaaaagctataattaagaaatgtaaattacttcaatttctgtttgtccaaattgctaaaaatataataaaagttgtatccagttattgcgtgaaaatctacttatgttttttaaaattattattttattattattattatttttgagtctcgttctgtcatccaggttggagtacagtggcctgatcttgactaactgcaacctccacctcctgggctcacgtgattctgccatctcagcctcttgaggagatgggactgtgtgccaccacgcccctgctgatttttgtattgttttgtagagacggggttcagccatactgcccaggctggtcttgaactcctgggctcaagcgaactgccagtcttggcctcccaaagtgctgaaattagaggcatgaaccaccacgccaagccrgtcatcatttttaaaaatgaattttggatttagtttaaagattgttaagacatgcctcttcacctaacagggcata

SEQ ID NO: 828024 - DNA, 583 bp, Homo sapiens
accacatctttagaaaaagctaatttactaggcaatttagtattccataatagtagttgaggtcatttttttcattcagataaaaaacattaagtcatcacaaaattttaatacttctaagcagcaaaatgctgtgtggtagggcaagtcagaatatttatcttttgttttctagaaacatttctgtagctgatgatggttaagtacatgagaacaaatgaaattcatcattaacacatcttattctattataattacagataagatattgaaatatttctgcaaagcacttgctgatgaataatacattgaataatcaaggcttacatttgaatgagctttgcaaatttgcttaactaaaatattttttgctccccatacatattaacacatcttagtagatcccactctaggctgtaatgaattagtgttttctcaactactttgaaaatatttttttctgtagttgttcccagattattcatagaggttcatttmtaattcacttttaaatttcgattaactctttggatatacaacaattgagaagtttcagaaatatttgccagtttattaaaagcca

SEQ ID NO: 828025 - DNA, 557 bp, Homo sapiens
tttccaagcaggcaccctcagagataaattacctatggttatgtctccaaaccagtaattccattagtaaatgcatcaaaaatcaaaatgaacaacgtgaccacgcaggaagttttactaccaaaaacaagcacttgcaggtggtgtgtcgaggataaacagtagataaagaggcaggattcaatttccttttatactgaggtttgaggacagacagaccattattcactcatacctgccactgactaacagaagcacagggtttatgaactgcgagtcatttacctttaaaattcaatttcattccttcaatcgttgtgagcttgaatatctaattacaaggtttatacactgagatcctagtgtaataatctataaagcgtgtactagttggagttaattcattgaacaaatatttatcgagcacttatatatgtgtcagcccctgtgttagacatgaaggaacaaggcagacttgggytttctgtcatgtttgagacaaacctggagttccagactcttattttattgttcttgttgctactgcggttcacatg

SEQ ID NO: 828026 - DNA, 609 bp, Homo sapiens
ctgaaaatgtcctgctttctcacccaccttgggggaaataccttggctccccaggaggtcacctgtgtactcctggaccatccaaccccrcccctgtctggatacttggtggacccaatgtccatctttttgcagggcctctgtgtttccagtggcatcttaaaatagtaacaagtcttaaagagtggcacatttaccctaggaacaattagaaaatgttcatcaagttcaaaaatctctaatttccttcagagctagatgtaacttagagttctaatccaatccctgtaccaagaatccaatgctcagagaagttcagtgattggcccaaggcgactcagcgaaaaggttcgtgccctgaacgctggaatcagttcaagatggaccatctcaatcatgaatttcaataaaggaattaggtagttgtgtcaaacactgccagatgccaagtaggtcctatgaaatttgtgtttgtttgggtttttgtgagatggagttaacacacgcaaatgtgagccagacataagaaaaaatgatgaaacgctgccaagtcattacagtaccaataacaactatagctaagaaaagtaactgatgactcagaataaa

SEQ ID NO: 828027 - DNA, 572 bp, Homo sapiens
cacttcataactttttaagttggatgtttagaccacttacattcaaggttaatgttgatatcctagattttgagacttwcctcatgttgttaactgtatattttgttcactggattatgaggttgtcttatggtgtcagtaggctgtgtacttaaatgtgtttgtggtggcaggtattgttctttcatttccatgcttatcactctcttaaggacctcttttaaggcaggttagaggaaataaattcccctagtgattgcttgtctaagaaagattttatatctcctttgcttatgaggttttatttggtaggatatgaaattcttggttggaatttcttttctttaagatcactgaaaataggtcctccatctcttctggcttctgaggtttttgttgaggcatttactattaacctaatggtgtttcctttgtaagtgatctgacccttctctctagctgcctttgatgtgatttattttgcattgaccttaataaatatgatgactgtgtgccttggggatagtcgccttgtatagcatttcatggaggttttctgtatttcttgaatt

SEQ ID NO: 828028 - DNA, 552 bp, Homo sapiens
gatgtagcaaccagtttcaaagtgtgaaacttatttggatcctgatctcaacaaactggaaaaaataaaacacatatgaattttatgggcaattataaatctgaatacagactggctattttatattattaaggaaatgtcagtatttttagatgagaaaataatattgctgtttttaagtgtttaaatattttgtaggttcatgctggaatactgccaggtgaaatggtttgatgtgaatttgtctcaataatccgagggaggggaggtgacatggtacagatgagaggaggttggacttcagttgctaattgctgaagcagggtaatgggtacctgggggctcattattatactattctaagccagatatagtggctcacacctgtaattccaactacttggaggttgaggcaggaggattgcttgaggccaggagttcaagatcagcctgggcaacatagcaggactgcatctctaaaaatatakgtatgtatataagtatgcataaataaatagataaaatactattttcatagctgtataaaatgtt

SEQ ID NO: 828029 - DNA, 509 bp, Homo sapiens
acagattttcaatgtacataaagcagctttctattagaagaatagaccacctaggagttttagagctagagaggaatcaatrcctgacttcaaagcttcaaaaaataggcggcaagttggtggaatagtaagccaccaagggctacagctctctgtgactccaagtgaagttgaaaagcattctaggccataagaactgcaactcttaggtgagtcctacggctgaactaggcccagagaagggtaactagggagtcacatgacgtactgagatagaagctggggtagccaaaggagttccggcaagggagttcccctaacctcaggctgcacacctcagagctccaaaagcgactcttcccttctgcatgaggggagcaaagggaagagcagataggactttgttttgcattttggataccagttcagccacagaagaactctggacaccagccagagttgtgaggtccctgttccaagccctagctcccagatgacatttctagaca

SEQ ID NO: 828030 - DNA, 509 bp, Homo sapiens
acagattttcaatgtacataaagcagctttctattagaagaatagaccacctaggagttttagagctagagaggaatcaatgcctgacttcaaagcttcaaaaaataggcggcaagwtggtggaatagtaagccaccaagggctacagctctctgtgactccaagtgaagttgaaaagcattctaggccataagaactgcaactcttaggtgagtcctacggctgaactaggcccagagaagggtaactagggagtcacatgacgtactgagatagaagctggggtagccaaaggagttccggcaagggagttcccctaacctcaggctgcacacctcagagctccaaaagcgactcttcccttctgcatgaggggagcaaagggaagagcagataggactttgttttgcattttggataccagttcagccacagaagaactctggacaccagccagagttgtgaggtccctgttccaagccctagctcccagatgacatttctagaca

SEQ ID NO: 828031 - DNA, 412 bp, Homo sapiens
gaaacttggtgcgtttgtgaagcaaaagaagcactaaaatatcctcaagtcccacagctattttgttcaaaacttagtgctttgttaccacagtactacccattagccattatccatcatgggtttgtgaaaacaactcacatgccatttgcagcttcaaagtgcagactgatctctgctgaaacagggacaggggagggaaggcagggaaggcttgtcacatcctgcttggacacctattgaaattttattttcaagtgaccgggacagactcatgaataccactcttcggtttactacatttttcttccctttagataatagtggctattattttaagactaatcaatttkattctatttacggacttagataataaatcaggtcagctttcagattgaggaaatatgga

SEQ ID NO: 828032 - DNA, 532 bp, Homo sapiens
ggtgccaaatcattcatgaaggatccaccctcatgattcaatcacctcccaccagaccccacctccaacatttaggattacaatttaacatgagatttggaaggggcaacagatccaaaccatatcaccatattacaaataccttgaaaacaatacatattcaataagtatttgttattgaatttccaagtattttgcttagagagtgtattcattcttgcattgctataaattacttgataattactgggtaatttataaaggaaaaaggtctaactggctcaaagttccacaggctgtacagaaagcatggccggggaggcctcaggaaacttacaatcatggcgtgaagaggaaggaagcacatcttaggtggtgagagcaggagaaagagagtgaagggggaggtgctacacacttttaaacaaccagatctcatgagaactctatcacaagrcagcactaggaggatggtgctaagtctttaaaaactacaccatgatccaatcacctcccaccgggccccacctcc

SEQ ID NO: 828033 - DNA, 517 bp, Homo sapiens
ccctcatgattcaatcacctcccaccagaccccacctccaacatttaggattacaatttaacatgagatttggaaggggcaacagatccaaaccatatcaccatattacaaataccttgaaaacaatacatattcaataagtatttgttattgaatttccaagtattttgcttagagagtgtattcattcttgcattgctataaattacttgataattactgggtaatttataaaggaaaaaggtctaactggctcaaagttccacaggctgtacagaaagcatggccggggaggcctcaggaaacttacaatcatggcgtgaagaggaaggaagcacatcttaggtggtgagagcaggagaaagagagtgaagggggaggtgctacacacttttaaacaaccagatctcatgagaactctatcacaaggcagcactaggaggatggtgctaartctttaaaaactacaccatgatccaatcacctcccaccgggccccacctccaacactgaggat

SEQ ID NO: 828034 - DNA, 672 bp, Homo sapiens
tctgccagtctgtctaagtctggggtttttatgggcttcagaggggaagaagtgcctgctgattggtccatgggtggccatgggctgtcccggaaaaagccacaagttcttactcrgggcagtggaactggcagctcagtctccaagcttctgacactcactagcttgaaggtggggcttaactggggacacacccctttccacccaggagcctgtctgcctcctgctgccatcaacctaccctccatggtgcccatatttcccaggctgttcccgctgaggggtgcctgcaggcccatgctgagctgccctcagcccccacctcagctccctctcatgctcattggtgtcccaaatcctagaacgggccaaggcggcagggggactggtgtgtcagcgctggctcgagtgcgtgcacacccagtaggatcgtgacagcactcgggctcagcctcaactttgctccaaaatcggagtgggcaccgggagccgggagaggccaggcagtaggagcaggcacttcagagcctgcaggggaagggggcttcccgggccccctagcgcaggcatgtccaggtctgtagctgagactagttggctgcagctgggagggctggcctcccgaccctccaattcagaaaagggcggggatccctcctgttcctggctcca

SEQ ID NO: 828035 - DNA, 672 bp, Homo sapiens
tctgccagtctgtctaagtctggggtttttatgggcttcagaggggaagaagtgcctgctgattggtccatgggtggccatgggctgtcccggaaaaagccacaagttcttactcggggcagtggaactggcagctcagtctccaagcttctgacactcactagcttgaaggtggggcttaactggggacacacccctttccacccaggagcctgtctgcctcctgctgccatcaacctaccctccatggtgcccatatttcccaggctgttcccgctgaggggtgcctgcaggcccatgctgagctgccctcagcccccacctcagctccctctcatgctcattggtgtcccaaatcctagaacgggccaaggcggcagggggactggtgtgtcagcgctggctcgagtgcgtgcacacccagtaggatcgtgacagcactcgggctcagcctcaactttgctccaaaatcggagtgggcaccgggagccgggagaggccaggcagtaggagcaggcacttcagagcctgcaggggaagggggcttcccgggccccctagcgcaggsatgtccaggtctgtagctgagactagttggctgcagctgggagggctggcctcccgaccctccaattcagaaaagggcggggatccctcctgttcctggctcca

SEQ ID NO: 828036 - DNA, 604 bp, Homo sapiens
actgctcaggtgatgagtgcaccaaaatctcacaaatcatggctgaagagcttactcatgtgaccaaatwccacctgtaccctaataacttatggaaaaaaaaactggttgctgctcaaagcaatagcaacagcataagagccgtttcagtagaacatgccataggaagcagtaaagggtgaaagtatacagcagaggctaagctgactgcctgaagtttaatccctgccccttttactattgctgtgatcttgggtggatcgtttaacctctctgtaccttagcttagctatttatacaatggagataaccatagcttgaaccacatagcattgttacaaggattaactgagataatacgtatagagtaattaatacagtgtaagcaatcaatgatgttagctatttttttattattaccttccccctgcaaggggtttatctggcaataatacagtggtttccccttatctgtgggggatacaatccaggacccccagtggatgcttgagactgtagacagtactaggacttttatatatgtatatatattttccttttggtacatacttatgataaagcttaattaataaattaggtaagc

SEQ ID NO: 828037 - DNA, 604 bp, Homo sapiens
actgctcaggtgatgagtgcaccaaaatctcacaaatcatggctgaagagcttactcatgtgaccaaataccacctgtaccctaataacttatggaaaaaaaaamtggttgctgctcaaagcaatagcaacagcataagagccgtttcagtagaacatgccataggaagcagtaaagggtgaaagtatacagcagaggctaagctgactgcctgaagtttaatccctgccccttttactattgctgtgatcttgggtggatcgtttaacctctctgtaccttagcttagctatttatacaatggagataaccatagcttgaaccacatagcattgttacaaggattaactgagataatacgtatagagtaattaatacagtgtaagcaatcaatgatgttagctatttttttattattaccttccccctgcaaggggtttatctggcaataatacagtggtttccccttatctgtgggggatacaatccaggacccccagtggatgcttgagactgtagacagtactaggacttttatatatgtatatatattttccttttggtacatacttatgataaagcttaattaataaattaggtaagc

SEQ ID NO: 828038 - DNA, 639 bp, Homo sapiens
aaaaaatttttataagaaaaaaattatatttaatactttcaacatttattttagattcagagggtacatgtgcagatttgttacctgggyatattgcgtgatgctgaggttgggagtacgactggtcctttcacccaggtactgagcatagtacacaatagtttttcaacctttgtcctcctccttctctcccccgtctatggtccccagtgtctattgatgccatctttatgtctatgagtacccattgtttagcttccactcataagtgagaacatgcggtatttggctttctgttcctgcattaatttgcttagaataatgtaagcctaacctttactctccttatagactctggctggtaccataaaaaattaaatactaaatcctttatcttaatttctagaatctgattggtcaataaacataatgaaataaccagtcaaatggttctattcatagatctcttttttttttcaaaagcttacagagaaaatgcataataaattcaaaaaggaattctctaaagcttatgctattttgaattcagtgatgggaaggaaatttacctcactgcatatgattttacatgtcacttctttaaaaagttgtatagctacttcttcctctcagaattaa

SEQ ID NO: 828039 - DNA, 571 bp, Homo sapiens
ggggcacagctaaagcagtgataagagggaaagttatagtgctaaatgcccatatcaaaaagttagatctcaaattaacaacttaacaccacatctagaggaactggagaaataagagcaaaccaaccacaaagctagcagaagacaagaaataatcaaaatcagaactgaactgaaggaaattgagatgtaaaaaaacacacaaaagatcaaaaaacctatgtgtttcttttttaaaagaataaataagattgacagactgctaggtaggctaattgaaattaaaaaaaaaaagactcaaacacaatcagagataacaaaggggacattaccaccaaccccacagaaaaacaaaaaacctcagagactacttcaaacaccactatgcacacaaactagaaaacctagaagaaatgaataaattcctggatacacatatctcacaagattggaccaagaaaaaattgaatccttgaacagaccartaatgtgtttcaaagttgaatcagtaatagaaagcctaacaaccagaaatagcccagtactaaatagattcacagacaaattatat

SEQ ID NO: 828040 - DNA, 594 bp, Homo sapiens
gcaaatcaataaatggaatccatcatataaacagaaccaaagacaaaaaccacatgattatctcaatagatgcagaaaagggctttgacaaaattcagcaggtcttcatgctaaaaactctcaataaactaggtattgatgggacatatctcaaaataataagagctatttatgacaaacccacagccaatatcatactgaatgggcaaaaactggaagcattccctttgaaaactggcacaagacagggatgccctctctcatcactcctattcaacatagtgttggaagttctggccagggcaattaggcaggagaaagaaataaagagtattcaattaggaaaagaggaagtcaaattgtccccgtttgcagatgacatgattgtatatttagaaaactccatcatctcagcccacaatctccttaggctgataagcaacttcagtaaagtctcaggatacaaaatcgatgtccaaaaatcacaggcattcctatataccaatarcagacaaacagagagccaaatcatgagtgaactcccattcacaattgcttcaaagagaataaaatatctcggaatccaacttacaa

SEQ ID NO: 828041 - DNA, 513 bp, Homo sapiens
catactgtaaatgataaagttacacaatcattgtaaaaaatctggaaaaaatcagaagtatattgggmtcaccacccagagatagctagtgttaacatgttggcatgagtttttcaagtcttttctcttgctttgagtatgtgtatatatgtgcttgtatatataaagacaaagataaccaagctgtatcttgctttttctatttctcattacttcagatgaatttctccatgttattaaacattctttgtaatttaattgaaagtgttgtataagtgtgctccacgtagatggattatactttatttaccctgtctcagcattttggggcatttagattgtatccaaatttttagctacttgaaataacacttacatgaacatcttggtgcataagtttgcatttctgattatttccttaggatagatttttagcagtgcaattagtgcacccaaaaatgaatagttttaaggctctcactatgtattgccaaactgcttttcagaaagatt

SEQ ID NO: 828042 - DNA, 562 bp, Homo sapiens
tgttccaagctacttcctgcaatatatgagagctgctcttatgctagcttccttactacatggaagatggcatctcactgctgaataatttatatttgccagtgagggaaatttttttttttwaaatcatagaaatggggtcttgctgtgttgcccaggctggtctcgaacccctgcactcaaatgatcttcctgtcttgcaatcccaaagtgttgggattacaggtgtgagccatcgtgctgggacggaaacattttacagtgtaagatgtttattattttatagtgtgataaaatgtttattaatcatttggatatcttcttttgtgggtttcctgcttacattaattcccggttaatcattaacttggtatttcagatcacacaactaaggcacctgctgtcctgtgtggtggcacacttaacttggaggccagcctcttacgtaaggtaaggagaccttaaagtacaaactgcaagcctaactgtgcaggtgatgaaaaaaaatgtccacaactcttacaaaacaggaaagatgattagatatacataaacctttgct

SEQ ID NO: 828043 - DNA, 494 bp, Homo sapiens
ctttgcttcttaactagcattcggtgtgggtctctgggcctgtcagctactgtgtgtggaatatcttctacactttcttctttgcccaacattttactgtgaacatgtttttatstccattcctggaaccacctgaaaataagatggggcaacatagtgtctcaggaaggaagcatctcagtcctacagggtagaccacatctatgcctctgtgtccccaattctggctccataggtgacacctaattggcagttaggccaagtggtagactgtcttttagttcattattggcactctgtcaatgtgtttgaataaatgcatgaaggaagtagcacctgtccactctgtgtcctccatgtctgtcacattatttggcactcagtggatggctaatgtgtgcctcttccttaaaaggcattttaaccagctctagggactcatagtcatgaactcagctcaggccatcctttctctcttcaaagcagtaataacc

SEQ ID NO: 828044 - DNA, 547 bp, Homo sapiens
ggaggctacagaggatagtttcttaatgccccttccaactctaaaattgtatttctgttaatgtaacatatgcggtgtcatcctggatgacagggtgatcctggatttggttctctgcttggatgtgttaaatgtggaaacatggaaagtggcagcttcctgagacccaggatggacaaatgtgagacatcatcagagagccatttcctgggggcatctctttccattagaacatatgcactgttgatccaccttggtaaagtacccaaaacagtagggccaatcaatcaaagcaagaaggaccgccattgccaggaaggaagacccacagtggcccaacccaaggcagggagggcagcaaagaccacaggcaaaggttcccaaagagtgcttggttacagagttaacccctggaattggagagtttctgacctgagagatgacggagttcttgtactcccagagcttcctggcctcrgctttctccttgttactcagcagctgaggctggggagacttcccagaagccctggcctcaataaaccga

SEQ ID NO: 828045 - DNA, 556 bp, Homo sapiens
ttgccaagggcaagccagccatggagcagcgagagctgtgtgagcaagcaagcatggggtctggccactgcacacagccaggcatgccagctgtggcagtgcaggcagctccaggtgccagcacgggcacagctgtggctggaccaggcgtaccacaggcaacttccaccgctggcactggggaatgcggtggcacctggaagcttggagacaccaggaaccgcagagccccaaagagggtatcataaccctggattggggtgctcctaggtctgggctccccaaagggctgcagcttttctctccttctctcttttctccttctctcttctctccttctcgttgcccacaacgtggcaagcaaggggtgtgtttcagtcctgtttgtgttacagatcttttagtgccaccatttgcccagtgggtcccaagttcttgtcctgtgtccacaaagaatgaagtatgcagacaactggagggtgagcaaggcagaaaggagcctcaytgagtggcagaactgttctcagtgggtatctcctttcctcaggcaggttgt

SEQ ID NO: 828046 - DNA, 310 bp, Homo sapiens
taaaaaagctttcctttgccccagtctctttkggtggacccatatggctctgccatggcacaagtatcatgaattgcaattccttgcaataaactctttgttttggagagcccgtctctctgttattgtagttgagacctaagtatgaataggtccagcattctttgatcacacttctttccttccagactctgcgtgccattcatggtgaaataattacaatacagtgttaacaggtaataggaattatacctgattttccctccccttactatgctctaagctctttacatatattatctcgcagagg

SEQ ID NO: 828047 - DNA, 528 bp, Homo sapiens
ctcatctcagggaatttagctgaaaatctcaagcaaacttaatatatagcaaggtaaaataacataattcaaaaaacaaaactacagttaaggaaatataacaatatccacaagatacaaaagtttgttttattgtaatattattttgatgcttagtttttatcacaaaattctatttcacaccataatacttgataatttattctatgtagacacagagaggaaaggggacctggtggaaatatgagctaaccagttaacaaagaggggtgcagactctaaaccagaacaaccacagggaagaacatctcatccaaattctgagctttataaaaaaagaaaactgggagcaagagaaaattatgtttgcatacgatttaggaatctttaaatcattttcacatacctttgttgattcctgaaatatccctgcttccatggagcagaamttattaccttctgttcaggagaatggactataaaacagcaactcatagggaaaaaaaagaatgtgataaagaagtgaag

SEQ ID NO: 828048 - DNA, 475 bp, Homo sapiens
gccgtatacccttgactgcttaatggcataacatactgtaagagcttaggcatactacacmgttgttttgtctttgtgttttcccacttagactgacttattctgtatttccagctgtccaaaaggacaatggccctttgcttcaaaatccttaaatctgatatagaaaaactgttgaggacacaagtgtgcaagactatataaaaggaaatgtaaacattaaattatatgaagtcaagatctttatgtagcatataatcttcactattagccaactatcttgtttatttaaatatgaatggcattaatattatatggtagattctaggctctacagactgtaggaattttaacagatttggcatcatctctaagatgtccaaaatgcttttctttttttgtggtttctgttttgaaacacagtctggctgtgttgtgcaggctggaatgcagtggcacaatctcagctcactgc

SEQ ID NO: 828049 - DNA, 444 bp, Homo sapiens
actgtcttgttagactacgagcaatttctgccggtgttaagtcccgttcactttcattaaagcatatcatgtattcagggtaaacggtcttggtgtctccccccaggggtcactgtcaatattcagttgcagctgggtataacaagtgccctggatcacagagaaattcaaaataaggctaaaatatgaggtgtgtggtttgtaccatgagtggacttgtgtttcgcttccacacagataactctcctggctttgatgtatttctgaactctctctgacacccataatttctcttcaaggcagaggatgatgttactcaaraagaaaagcagccaggcacagtggctcatgcctgtaatcccagcacactgggaggcagaggtgggatgatcgcttgaagctaggagtttgagactagccttagcaacctagtaagactctgtc

SEQ ID NO: 828050 - DNA, 765 bp, Homo sapiens
attcttttctcaatatttccaaaactttggtttgcattttctatctccagtttcttcagtttgatcactcaagcaatcaattgtcttcagttaagtcccatctgttggtacattatctttttgtttatgtcagttactcaatttttttcttctgggaatgcaagttgcttgattttctcttatttgttttgtttttccacacaggctctattattccatttgcatttctagtcgttttatctcttccctttaaagtattagagcacacttacttttctttcagatagataatcttgagttcctatgtgctattttcatgtgtgtcgtgtctgctgagtctttctcacagttgatagcttcttgtgtagtttgttattcttattttaaagttcatgttccagtggagttatttatctctgggtgctctgtgcatcctggactgtggaaagttccacaaagagtggcttagcctttgcttttgcagggcacctgcctaagtcccatttcatgctcttttctggggatttccaaaccttgtgggaatatacgctcgtgctccctaccacctctgtacctgacccacacctgacgctttgatagtgcgcacacgccacactccaggctgacagtggcttcatcattgcttctgttctgagcttcgcttcgtggaaggatgtccctttcagagttscagctctgaatagaatatctcagtacagctccagccttctgcaggtcctcgaccccaccttccgtcccagcaag

SEQ ID NO: 828051 - DNA, 611 bp, Homo sapiens
ttagtgtcatgaccctgcccctacctgtgggagccatgtgcctcagactcggctacccagaacactgcctcctcttgctacaggactggcccggggtgacacatggaccaagataggacagcaagagamctcactagggcttaggctggagccactggggagcagacgcttcaagcttactgggattgctaagaaggtggcctacaaattaatcctgctgggcccaatttgccacctgatggaaaagcctactgagaattcagccagcacagaggaaacaaaagctagagtcagagacaggaaatgagagagacacccctgataacatcttttgaggccctgcctccatccatttctcccagttttatgagccaataaaaccccatttcttacttaaagtggttggaatctggttttgttacatgcgaccaaatgacccttaataatacattttttcttttaattgtcaaataagctattttaagaaatgaagtatatgtgtaagcctctcgtcactctaaagagtatggatgccacttataaatataatagggctaactaaagttggcattcaaagagataatccagaaagtcctgcacgtttgctaaag

SEQ ID NO: 828052 - DNA, 637 bp, Homo sapiens
ggaaggcagacccacagttaatctggtgggcacagtctaatcagctgccagcaaatgtaaaggaggcagaataagcctgaaggagctagacaggcctaatctcccagcctacatctttctcccctgctggatgcttcctgccatcagacatcagactccaagttcttcagtttttagactgagactggctttccttgctcctcaggcttgcagacagcctattgtgggtctttgtgatcatgtaaggtaatacttaataaactcccctttatctatctatctatctatctatctatctatctatctatctatctatctatctacctatcctattagttctgttcctctagagaaccctgactaatacagagagtaagcatcttgttctttgcaacatataaaacacaggaagcataacatttgcacatttggaagtagactagctagcattatgattgtcaccaaagaagtactgctgaatgccaaatatgatcacagaattagaaacactgaagaaccatccctccctaacaaccctcctctccccagtctaacacacacacacacacacatacacctgtactmacacacatacaaggaagaagagattatttttcaagggtactcactggaaacc

SEQ ID NO: 828053 - DNA, 602 bp, Homo sapiens
cacatattctttttctgttctaggatcccatctggaataccacattaaattcagttgtcatgaatccttaggttcctcttgactgtgagattcttttaattgtgtttaaatttgtatttccctaatgattagtgatgttgaacatcttttcatgtgcttatttgccatctgtgtgtcttttgtagtaaagtggtttttcaaattttgagtcatttattactgaattttttaattattgagttttgagaggatgactatttcatatatatatgaaataatatgtctgataagaggcttgtatccacatatgtatacatatgtgtgtatatatatgcgtatatatatgtgtgtttatatatgcgtatatatatatatatctgagacttctggatataagcgtcttatcagacattctttgaaaagcttttaaagcttttctctaagccagtagcttatcttttcattttcttttttwaaattcattaatttttttattgcactttaaattcttggatacatgtgcagaacatgcaggtttgtttcataggtatacatgtgccatggtggtttgctgcacctatcaacccgtcatataggtttta

SEQ ID NO: 828054 - DNA, 631 bp, Homo sapiens
tatagaacaaattatccagctacattatatctaagtccctwtttgctctaaaattctgtaattctaaggatgccatctgtataaatgttatctgttcttttgttaagaacagtacttgtaataagaaaactgaatacacagagaaatacataaacacgttgccagacaaaatacaggtaactcaactacattttaaatttcagatacacaataaacaaatttcagacattctaaaaatattagttgtgtacatgtgaaattcaaatttaactggctgctctgtatttttacttgctcaacttggctaccttaaggcagtccatcagatatagcttatacgcagcgcacagggaaggaattcataagcaggaaaaattacacacaggttcttgaaatagcatttttacatgcttctttgttaattgtacctatagcagttttagtataatttctcaattgaatttactaaatgaaataacattctatatcttgattataagactgtcttaatttggtcccttttaacaatgaattttaattcaagaaacaatttctcattgaactacatgaatgaatttcctaattgtacccatcatagacaagctcatattaggccttcacctggggcata

SEQ ID NO: 828055 - DNA, 683 bp, Homo sapiens
tttgaacagattcagatcttaccaaatgtaaatagccttattcctgggatcctttgccaaaaacaatcagaggaaaaataacacttcagctgcctagtggcctgctgtgatgggtaatagtaaggcraaacaacaggttaatcataagctttacagggaaaatctaggggaatatgtcaggcctctgagcccaagctaagacatcatacccccgtgacctgcacgtgtacctccagatgacctaaagcaactgaagaaccacaaaagatgacattccaccattgtgatctgttactgccccaccctaactgatcaattgaccttatgacaatacaccttccccgcccttgtgataatgtactttgtgatattccctgccctgcccttaagaagatactttgtaatattctcccttgagaatgtactttttgagatccaccccctgcccacaaaatttgctcctaactccaccacctatcccaaaactataagaactaatgataatcccaccaccctttgctgactcctttctcggactcagcccacctgcacccaggtgaaataaacagccttgttgctcacacaaagcctgtttggtggactctcttcacacagacgcgtgtgacagaagagatgtccatagagggttttaaaatgctccaaaatattcctggcaatatgtg

SEQ ID NO: 828056 - DNA, 602 bp, Homo sapiens
gtaaggcgaaacaacaggttaatcataagctttacagggaaaatctaggggaatatgtcaggcctctgagcccaagctaagacatcatacccccgtgacctgcacgtgtacctccagatgacctaaagcaactgaagaaccacaaaagatgacattccaccattgtgatctgttactgccccaccctaactgatcaattgaccttatgacaatacaccttccccgcccttgtgataatgtactttgtgatattccctgccctgcccttaagaagatactttgtaatattctcccttgagaatgtactttttgagatccaccccctgcccacaaaatttgctcctaactccaccacctatcccaaaactataagaactaatgataatcccaccaccctttgctgactcctttctcggactcagcccacctgcacccaggtgaaataaacagccttgttgctcacacaaagcctgtttggtggactctcttcacacagacgcgtgtgacagaagagatgtccatagagggttttaaaatgctccaamatattcctggcaatatgtgaagccacatgcacatgactaatttgtgtgcatgtccat

SEQ ID NO: 828057 - DNA, 602 bp, Homo sapiens
gtaaggcgaaacaacaggttaatcataagctttacagggaaaatctaggggaatatgtcaggcctctgagcccaagctaagacatcatacccccgtgacctgcacgtgtacctccagatgacctaaagcaactgaagaaccacaaaagatgacattccaccattgtgatctgttactgccccaccctaactgatcaattgaccttatgacaatacaccttccccgcccttgtgataatgtactttgtgatattccctgccctgcccttaagaagatactttgtaatattctcccttgagaatgtactttttgagatccaccccctgcccacaaaatttgctcctaactccaccacctatcccaaaactataagaactaatgataatcccaccaccctttgctgactcctttctcggactcagcccacctgcacccaggtgaaataaacagccttgttgctcacacaaagcctgtttggtggactctcttcacacagacgcgtgtgacagaagagatgtccatagagggttttaaaatgctccaaaatattcctggcaatatrtgaagccacatgcacatgactaatttgtgtgcatgtccat

SEQ ID NO: 828058 - DNA, 460 bp, Homo sapiens
cataccctccaatgtcactcatttgccattgttgacttatgctctgattttttcagcatgcctcttcaccctgactctcaatagctaatctcctttacatgggaaaagcaacagtgtccttggttagttgtgtaccagagatttacagaagaccccagttatttttcctggacattaaatgcaaatccaaggggatttcatcttcctttacaatttaacgctcatccaatatgtagatgactttcttctttattctataacgtttgataattctttggaaaccttggaaaccacacactacttattaaaaaccttggctctaaagggacataagatatcaaaaaataaaaccatctccattcacctggaataacagagcraatggaaaaataaaattaaaaaatgctaaaacgaagaaaggacttaatctcctatgatgtaaggttttattccttaggtc

SEQ ID NO: 828059 - DNA, 626 bp, Homo sapiens
tatatatatgctttttttcttgggtgtgcttagattacccagagaaatacatttcattttcctctgtttagaacaaggctgtctatcatgccacaaagtgaaggaaaggaccacatactttagtcttctatatttagacttctgcctttcttttctttctttttttttcaaacagtacacattcaatcatctatcatggtgaaggggagactatagcacctaggattgtaactactatttcaacagactttcaggcaattttcctgtttccagcactacctcagcctcacattcagaagcacttggtaatatccatttttcagccttgcagatttctaactctcccaaaatcagtttcatttcagaatttgggtttgttcatttcacttgtcatatatccatctgcctttcagttttaaaaattatgttcccatcctattttctaccttttctgggttcctgtgaaatttttgccttacaaaatcttttctattgattttgttatcatttgaggaaagaacaggaaaaattaatctgtccaatcttaaatattatacaaaagtgatatgcttttgcttaaaatatatraatagactaacataagaacaactttccaaaatcactaa

SEQ ID NO: 828060 - DNA, 611 bp, Homo sapiens
aaccttacacccaattgagcaataaattggcctaaattttaaattcaatctattcatttaaattcaatcctctatcaaatatagatccaaaatcgtaaatcacctaatttccctatggcaatttttaccaattcattcatatagcacagattgaatatccgttatttaaaatgctaggaatcagaagtatttcaaattttttattttagggattttgaaatacatgcagtatacttaaatgctgatcatgtcaaatttgaaaatctgaaatcccaaatgcccaaatttcatttcctatgagtgttacattggcatccaaaatgtttcagattttgaagcattctggatttcagatttttagacttgagatgctcaacctctaatatctaaataaatttaaattattgtatatgcatatttatatattattatgtatatttatgactacataggaatttatatgaatatatgccatgcctacctatgtttcatatgcccatcttagcagtaagtawaaattgacagtctctattggctatatgtttccaataatcctgataaaacaaatatacttgattaaaatgaaatcacttgtaaataataatcatcaa

SEQ ID NO: 828061 - DNA, 572 bp, Homo sapiens
atcacgccactgcactccaccctgggtgacagagagagactccgtctcaaaaaaataaaaataaaataaaataaataaataatwaataaataaataaataaatatacgaatgtgtttgtgggtacatatatcatatgtgttacaagaaacaaaattgtatttgttgatttcctacttataattaactgacagagttacatcaactggaattacctgaagtgcagatttcttgaaaacataggatggtaactttgaactaccacgtagaaacttagaaatttttaaagcactgcagcatccacaaactcatttaaactatttaagtcattttataatattatattagcaacaattatatttgctttagagcttggttttactaacgtcccttctattattttgaaaaacttcaaaatttgttaacttgggactgtgtgagctttctatagcatgagcatttatttaggtaacatagtggttttattttagataacactttcagattactgtctaaaaccttgaaggcaaaacaattaaataaacagtgatcttatcagatgatttctaagcca

SEQ ID NO: 828062 - DNA, 547 bp, Homo sapiens
ttgatgatatagacataagtagttgagctgcttctttagttgacagttataagggttataaaactgatatttacttcatatagccgtgttaaattactttcaacttttctggtccataatctaccaagttgtgaaattttgacatgttagccctcttgtgtactgatagtatacctttaattcataagtctagaatcactactgagtggcagagtaacattcttctgtctcatcatattttctaaaatggagtcattaactgccacatattcagggagataccaaagaattaatgaaacacttgtaaacctttggtaaaaaaaaaaaaaagtgtcttaaagtgttattcattagaggttcaaaatttttaacagacaaataataatattttttccctccaatgcaggtgttctttatacattttcctacagggcttctctgtggagaaatccgaaaagcatatgtagaatttgtcaatgtcagcaaatgtccacttactggattgaaggttgtttctaaacrtccagagttctttactttcggtggt

SEQ ID NO: 828063 - DNA, 572 bp, Homo sapiens
ctaggtaggactacaagcatgtgccaccacgcctggctaatttttcaatttttggtagagactaggttgcccargctggagtctcttaacacattattggagttgatttgttccttatcttttttttttttttttttaaggatttttacatttattcaaaagaggatgagtctctttatcaagttttggtgtcaggattatattagtttcataaaaggaactgggaaaacttgctgtattcttatgcttggaaatagtttacataacacaggaattacctattatttaaaggtttaatgcaagttacctgtaattccatctggacctggtatctttttgggaactagatctattacagtcttttcagttacttctgtggttgatagtatagggtagtgttttatttatctctgtattctcagcttctagtgcagtatcggttttatagtggctactaaacatgtttgttttgaataagtggataattgtaattatgtctctaaaaagtataaaaaacatatgaattaatagtaataatagctaagagtatgtgccagaaactagtctaaatg

SEQ ID NO: 828064 - DNA, 670 bp, Homo sapiens
atagtcatcatgaaagtaaagatttggccaacagagaatattagggtagacctagaatataagcctttggagacaggcatttaataaatattttttgagtgrttgattattttaccactcaacttttaactataaatgcataaataatacaccattaaaaaggccaaatgggtaaaactatgataaactctggagatttcaatttactaaatggaattgttaaagctcaaagaggaaaatttaattttaattgcagaatgtaggaatttagcttcattttaaaaatcagtccaagttactcaaaagctaacatcaaagaagactatttcacactgagagtcttgagctaatgaactgcaaattcataaggaagacagtgaccatttgtaatagtaaaaacaattacgacgtaaaattaggtatatcacgagtactttttgctttctacttatatttttcttcttcagaaagtttgtagtaaatgaatattttaatagattatttataataatatgaaaaagataaaattcagaagtagctttctgcattgctataaagatttgctgagctcagagttatatattgactcaataattataaggttaatatttgtcatttcaatgcatcttaaaattgacaaaatcattgatcaattcaatcacaattcaaa

SEQ ID NO: 828065 - DNA, 579 bp, Homo sapiens
tgaagacaatttaaaaatatgtattcgaattaaaagtgcttctatcccttggtctagtaattccactcattcacatattctatgaatattactttagcgtactatatctcaagccctgcctagtcacaggggataaaaataggagcaaagcaaacatggctggagagatcatggagtttagactgttaggaatttatcttaaagaatggcttcaaatatgtgaatccatagattgccaaggacaatcagtgcagcactatggcaaattgcaaatgataaataataaaaacgaaagaaaggaaaaaagaaataacatgaaataacaggaatgcctcttcaaagatggatggctatataactttgacatgttaatacaactgactatggtgtggccattgaaaagaatttgaattaatatgtactgacatggaaatgtcaaaaatatatgaagcgtgccaactccattcattttctaatagaagtattaaaaaattactttacatacagtgaaatggatatwtttcttggtggacaacttgatttgttttaacaaatgcaagtataagcacacgtgtaagc

SEQ ID NO: 828066 - DNA, 616 bp, Homo sapiens
cccagagggcctatattcttatctatgatacatctatgctttcaaagaaatttcctattagatttccatctggaggtcagtttatgaaattactgctaaggttatattctgatacctcgatgatatttgaattcaaatagtccatatgctttaaagaaatatcatgttttgcactaaggtcaagagcaacttgtaagttaacctatcccaatgtttaaacaggagaactaatcagtgtgacatttatttgctctatgtgagaatgtatagattaaatatcacttgtagaagtagcaagcaaactttcatgctaaggttttgcattatgtgtagggtttgtcattttctaaataaacacctttttgcaagctctgctatttagatatatatttttgcagcccttcaaaaactctaggggaaaaaatatttttctttttaaatgcacaatctcattcacataacaagttttaggaaattcactaagacacggttattagacttaayttgtaagtatgttaagtatgggactggaaataaatatgcacagagttgcaataaattctcagacctcctatgtatttaataggactattgaaattatgacagaaggaataga

SEQ ID NO: 828067 - DNA, 630 bp, Homo sapiens
taagttaattcaggtgtatccttaaaactagaatataactaaagaaaaacaacttatttatactgaaatgtattttttaaaacwaaacaaaacaaaaaaccctgggctaatagaagagtacggtgcttgactcaagtctaaaagaacaacaacaacaaaaaaaaacagaaaaatggatcagtactgctacaacgaatgaaggactatacagaccagccaaaacaagttttcagcttccctttgataagagaatttcagaaaacttctggcagtggcagtttctagaattaagtgtaacttaatataattaagtatattaatgtattcttaagtatataagaagaatgacaacttcaaaatataaaactcataggaatgtagatgtttcaacatggattacttttgaaagggcttattagttttaagcctttaagcattaatatttaagaattagctttaaggcttatgtagctctgaatataatttggtttgtgactttgggcaagtcacttacctctctgggcctctaattcctgcctgtaaactgaggaggttagattgtttctgagcgcagatgatctgtaggctctcctgtaagtctcatatttggttgtatgacttcaccatctc

SEQ ID NO: 828068 - DNA, 559 bp, Homo sapiens
tagagaattgcaaattaaaacaataatgaaacatatctattaagaggccaaaatccaaaatcactgacaacgctaaatgctgacaagcatgtggagcaagaggaactcttatttattgctggtaggaatgcaaaatggtacagtattgtactttgaaatatagtttggcagttctttataaagctgaacgtactcttaacttatgatccaacaatcatgctccttggtacttactcaagtgaacgaaaatttatgttgatacaaaaacgtgcacaaggatgtttataacaacttcactcataatggccaagacttgaacgcttctaaaatgtcattctgtaggtaggtgaatgaataaataaactgtggtacatccaggcaatagagtattattcaatgctaaaaataaataagctatcaagctatgaaaagatgtagaggaaacataaatgtataytgctaagtgaaagaagccaatctgaaaagtctacacactttatgatttcacctatatgacattttggaaaaggcaaaactgcggagacagtaaaaaggttag

SEQ ID NO: 828069 - DNA, 559 bp, Homo sapiens
tagagaattgcaaattaaaacaataatgaaacatatctattaagaggccaaaatccaaaatcactgacaacgctaaatgctgacaagcatgtggagcaagaggaactcttatttattgctggtaggaatgcaaaatggtacagtattgtactttgaaatatagtttggcagttctttataaagctgaacgtactcttaacttatgatccaacaatcatgctccttggtacttactcaagtgaacgaaaatttatgttgatacaaaaacgtgcacaaggatgtttataacaacttcactcataatggccaagacttgaacgcttctaaaatgtcattctgtaggtaggtgaatgaataaataaactgtggtacatccaggcaatagagtattattcaatgctaaaaataaataagctatcaagctatgaaaagatgtagaggaaacataaatgtatattgctaagtgaaagaagccaatctgaaaagtctacacactttatgatttcacctatatgacattttggaaaaggcaaaactgyggagacagtaaaaaggttag

SEQ ID NO: 828070 - DNA, 622 bp, Homo sapiens
atctaggtcctatattgctaacagatggtgaacattttcatgggcttgggactagtttagatcagagtgagaatcctccaccccctccccccacgaggctctaattagtacataggacattaragcaagttaaaaatctgggctgacatcttatttgttagttttagattgaactcatgccttagggtgactgaatttgctcactgaaacacacacatgtgctcacacacactaaaagagtaactttttcttttctatggggatcaaaataaagattttcaaagtcctcgagaaaagggctccaaagatttgttggatatcaaatagctccttcaagacaacattttgatgagttaagtgtaaatgaatcagaaacatatggattaagtttcccttgaaatacacaggggcttaaaaatcaaagaggaaacagtgcctggcccagggtcttgcaggttgtgccaaacccaacacatttgagcagcagttcaagatatttgagggatccaaggacgaggctggcctgacccacgcctagttcctaccgtattgaaatagagaacataagtaatgccatttatattgcattattactaaaaattcctccttccttgtggtttga

SEQ ID NO: 828071 - DNA, 606 bp, Homo sapiens
tctgaaaccatcttcctccctagggtgaaaattggggtcttctactgagaacctgtagtggaaaaaacagcagttaaaccatctcccttttgcaattgtctctcatttctgagatcacactgtgtggtaattctaaaacctctgaatggaaattgctgccatcattatgtaatccctctaagccatcagtagcacctttggctccccgttttgttttcataattctaaatacacaatttaatgagtgacagagctagatgagaagtccccaaataatgaaatccaagaagggaacggctggctgcaaccttggctaatgccagtctttttgttgatccagatattgtcctccatgtctccccctcctgttagtccaggaactaacccattgacacagaagttactttgtgactttatctataacaagcagcataatgcagcttgtgagcataaagcagcatagtgagcatttagaatgcacatctagttttcaatatgtcaaatctaaaacttttcaccacaaagttamaaaaggaagcaaatcagtgaaaaacaaatgttgggggtcaaaatattgaaaaggtttctgcagttatgtagaaacat

SEQ ID NO: 828072 - DNA, 629 bp, Homo sapiens
agatcctcaatcttcccacctaatggttttgtcaccagggtacctgtcttcatctcttttccaattatgacatttgccaggttagtcttccaacagggctactccagtcatgtttcatagttcatccctgtaaaagcagccaactgaattaaaactaaaaccattgacctggctttcagagccctcttttgtgtgaccctaacctaaatttccagccttttaaaactttcctacttgtatccacagtggacttgaccttgcctgcctatatgcctttgcttatacggttggaataacaagaacttctgtcctcatttctactggttgaaatcttagccatcacttttgatccctccttcaaaagacacctcatctgtaaggccttaattagttcctctgatttaatattctcaaccttctgtaaagcctctgctttgtgtacctctcttaaaagattttcacatttatcgttttaaaatttatttgtataattgtctcatcacctgtaacaactgaatcagcatgtttgctgcataagttttcctgaataaatcatttttaaaagctstgtttcaagaaacttctcaaatgtgggataaatttatcttcctccaataacgtgaagaggt

SEQ ID NO: 828073 - DNA, 556 bp, Homo sapiens
ttacttaaggagtatattattgaatacgtcttgagaggctggcttggaatagagttgattaataaggcccagtagctcatagcaaagaatttattctttatgctgagaataaaggtkagcataattagattaaaatttttttttaatgtttatgggtatacagttggtgtatatacttataggatatatgagatattttgacacaggcatataatacatgataattacctcaggataaatgtgatatccatcacatcacaaacttatttctttatgctggaagcatatcaattatattcttttagattttttaacatgtaaaaaattattattaactgtaatcaccctgttacagtatcaaatattaaatgttattccttctatttaattacatttttgtacccattaactatctcacttttccctatcccccactcactacccttctcagactctggtaaccatcattctactctctatctccatgaaatcaattgctataatttttagctcacacaaataaatgagaacatgtaaaatttatctttatgtgcct

SEQ ID NO: 828074 - DNA, 441 bp, Homo sapiens
agggctacagtgttctgtgtgtctaagtggacatgaaaagcagtctaggccataaagactgcaactcttaggtgactcctagtgttgaactgggacaagagacagtggactggagttgtgggaagatgcaacctgctaggatgccagctggggaagctaaaggagtgctgacatcacccctcccccaaccccaggctgcacagctcacaacttcaaaacagacttcttccttccacttaagtagaggagagggaacagtggggaggaatttgttttgaattttggataccagctcagccacagcatgatatggcascagtcaaagtcatcaggccccattccaggcatttttagcacaacctaggccagaagggaactggctgccttgaagggaaggacctaggtctgagagcattcatcatttgctaattgaagagccct

SEQ ID NO: 828075 - DNA, 622 bp, Homo sapiens
ttatcccctgatatggtttggctgtgtccccacccaaatctcatcttgaattacagctcttacaattctcacacgttgtggtggagggttggggggagggtggtggggaaccccagtgggaggtaattgcatcacggggtgagtttttcctgtgctgttctcttgatagtaaataagtctcaagagatctgatggtttcatgaggaggagtttccctgcacaagctgtctctttgcctgccgtcatccatgtaagatgtgacttgctcttccttgcattctgccatgattgtgaggcctccccagccatgtggaactgtgagtctgttaaacctctttcctgtataattacccagtctcaggtatatctttattagcagcgtgagaacagactaatacacccccagaagcgcatccttaaagtaagattcctaggaccaattacgacacactcttttaggttgggttctccagattgagtttcctagaagcagagcctgaggtaaagatttgtgtgcaagtgatttactgatggagtacttccaggaaaatctggaatgagaaaagctgacaagggtaggtggggamaggtaatcagggatccagtctcagctggagtctac

SEQ ID NO: 828076 - DNA, 647 bp, Homo sapiens
tggatcctgagatgtcagggaccaagtggtggcactcaatcgtcaaaggaaaggtagacatagctatcataatggacaccagaggcaaagtggcaatcagaatagtctgactcatgtagcgctttggcattagctaattaattacagtgttcctagaagtgaaattgatagggagcctgctgcatccctacctaagttgtataagcaggaaatttacaggtcaaatggatgaaagactaatttgaattataaaaacaaagaatcatggcccctcaattaatttctagacttgagccagtttataggcctagaaccctttgaatgaaggggaggctgggtccccttgaggaagaaccccactacactaccaacaatttatgttgttaatctttttcccattcttccccaagtagacctcccagccttttaccagagtaattgcacactggggaaagggaaatgatccaacattttggggagtactggacactggctctgagctgacattcattccaggagaccctaaaagtcattgtggtcctccagttaaagtaggtgcttatggaggtcaggtaattaatgaagttttagctcaggtccaacttacartgggtccagtgtgtccctggactcatcctgtggttttt

SEQ ID NO: 828077 - DNA, 572 bp, Homo sapiens
tactagccaagatgatggggaaaaagaccgtaagacattttcagaatcttctagactgcccttcaatcacaagtccagaggcctaaaaggactgaatggtttcaggggccaggtccagggcaccactctgctgtgccaccttggtaagcttgtctgccccatccccactcctccagctccagccttggctcaaagggcccctgatacagctcagaccgccactttggagaatgcaagatgctgtaagccttgttagcttccatggcatgttaagtctgcaggatcagacaatacaagagtaaaggaggcttggcagcttccacctagatttcagaggatgtatgagaaagcctaggtgctcagacagaagcctggcacagggccaaagcccctgcagaatgactcagctagggcagtgccaaggggagatatggggttggaacccccacagagagtccatactggagcactgcttagagcagctgwaggaacagagccactgccctccagactctaggatggtagagctgctggcagcttctgacatcagtctggaaaagccacaggagcag

SEQ ID NO: 828078 - DNA, 580 bp, Homo sapiens
tggggaaaaagaccgtaagacattttcagaatcttctagactgcccttcaatcacaagtccagaggcctaaaaggactgaatggtttcaggggccaggtccagggcaccactctgctgtgccaccttggtaagcttgtctgccccatccccactcctccagctccagccttggctcaaagggcccctgatacagctcagaccgccactttggagaatgcaagatgctgtaagccttgttagcttccatggcatgttaagtctgcaggatcagacaatacaagagtaaaggaggcttggcagcttccacctagatttcagaggatgtatgagaaagcctaggtgctcagacagaagcctggcacagggccaaagcccctgcagaatgactcagctagggcagtgccaaggggagatatggggttggaacccccacagagagtccatactggagcactgcttagagcagctgtaggaacagagccactgccctccagactctaggatggtagagctgctggcagcttctgacatcagtcwggaaaagccacaggagcagagctggccaaacccttgggagct

SEQ ID NO: 828079 - DNA, 461 bp, Homo sapiens
gtggtgggtgcctgtaatcccagctacttgggaggctgaggcaggagaattgcttgaacctgggaggcagaggttgcagtgagccgagatcacgccattgtactccagcctgggagacagagtgagactctgtctcaaaaaaaaaaaaaaaaagtccgtttataatagcatcaaaaataataaaatacttgtgaatacatttcaccaaggaggcgaaagatctatatactgaaaaactacaaaattcatgaaagaaattaaagaagacaaaaataaacagcaaaatatttgtgctcatggataagaagaattaatattattaaaatgtcatactactcaaagcaatttacagattcaatgcaattcttatcaaaatrccaatgacaatcttcacagaaatagaaaaaataatcttaaaactcttatggaaagacccagaatagctaaagcaatctcaagaa

SEQ ID NO: 828080 - DNA, 610 bp, Homo sapiens
gggcaccctgttcaataaatggtactgggaaaactgacaagccacatgtagaagaatgaaacttgatcctcacttcttaccttaaacaaaaatcagctcaagatgaatcaaagacttaaatctaagacctgaaaccataagtattctggaagataacattggaaaaactcttctagacattagtttggcaaaaagttcatgactaagaccccaaaagcaaatgcaacaaaaacagtaatgaataaatgggacataattaaactgaaaagcttctgcacaacaaaagaaataatcagcagagtaagccgacaacccacaaaataggggaagagcttcacaaactatgcattcaacaaaggactaatatcctaaatctacaaggaactcaaacaaatcaacaagaaaaacaaaaaaaaaataattccatcaaaacatgggcaaagaatgtgaatagacagttctcaaaagaagatatacaagtggcaaacaaatatatgaaaaaatgctcagcatccctgattatcaggaaaatgtaaattaaaaccmcaatgatataccccctgcaagaatggctgtaattaaaaagttaaaaaaaaaaaaaaaaaaaaaa

SEQ ID NO: 828081 - DNA, 610 bp, Homo sapiens
gggcaccctgttcaataaatggtactgggaaaactgacaagccacatgtagaagaatgaaacttgatcctcacttcttaccttaaacaaaaatcagctcaagatgaatcaaagacttaaatctaagacctgaaaccataagtattctggaagataacattggaaaaactcttctagacattagtttggcaaaaagttcatgactaagaccccaaaagcaaatgcaacaaaaacagtaatgaataaatgggacataattaaactgaaaagcttctgcacaacaaaagaaataatcagcagagtaagccgacaacccacaaaataggggaagagcttcacaaactatgcattcaacaaaggactaatatcctaaatctacaaggaactcaaacaaatcaacaagaaaaacaaaaaaaaaataattccatcaaaacatgggcaaagaatgtgaatagacagttctcaaaagaagatatacaagtggcaaacaaatatatgaaaaaatgctcagcatccctgattatcaggaaaatgtaaattaaaaccccaatgatataccmcctgcaagaatggctgtaattaaaaagttaaaaaaaaaaaaaaaaaaaaaa

SEQ ID NO: 828082 - DNA, 552 bp, Homo sapiens
ttgtcaaaatctgtgctaagattcccccatccccaattttccttacttgctcaagttgaaaatccaggggtctttgattttyccacttttatctgtcagatttgatccttctgtaactctatttctcctactacctccttggtctaaaccagcaagttttcccccatctctagcctggattactgaaatgaccaccaatctgagcttctagctctcactttttttcctgtctgcagtggattaagcacccaattgccaagtttatcttttgaacaggcagtgaaattatgtttgtgttgttttgttttgtttcgagacagggtctcactctgtcacccaggctggagtgcaatggtgcaatcatggctcactgcagccttgatctcctaggctttagtgattttcccatctcagcctgctgagtagctgggaccacaggcacacaccactaaccctttatttatttatttatttatttatttattttgtagagacggtgtcttgctatgttgtccaggctggtctagaattcctgggctcaagggatccacc

SEQ ID NO: 828083 - DNA, 613 bp, Homo sapiens
cctcattgttcaaccaatgataaatgctattattgttattcttctgagtcaatgataggacttttgtcacatttatacataaaaggggaaagatcatttgatgtaaaacttaagactttggtaactgtattgacaaagcaaattctgggcagataaatgtttaaaagacttatgagggagatgaacatttttagcatagagaactggctttggttaacagtggatggcaaattagtcacttgcacataccctagttgatacttcccatttcttctccttactgcaggtgaacgccccttccactgtaaccagtgtggagcttcttttactcagaagggcaaccttctgagacacataaagttacactctggagagaagccgttcaaatgtcctttctgtagctacgcctgtagaagaagggacgccctcacaggacacctcaggacccattctggtaagtgtcaccaactccttgagaagaaaagtaaaacaggaaaacttagaagagtactattgaatgatagtaacatggctttgttatgtagtcrgtaatgaccaagacaatcttgttattggtgtacattaaataattgataaatcttgcaggatgcat

SEQ ID NO: 828084 - DNA, 622 bp, Homo sapiens
agaaaagaaacctgaatcacacaaggggaataatgcccarttggttaaaaccctggctgcaaatcacaaaaacctaactcaaagtttaagcaaatcaactaacttactgactcacaggactctgaggcccagtgaggtatttctagttttagtagtggctgagtcttggtaatcaagtcatatttgtctagaatatgtctttctcttcttttgtatctcttcttctagtttggctttattcttaggcagatgctcccaagagtgttgagatggccattgctataatttggatgttttgtctgctccaaatctcacattgaaatgtgatctccaaagttggaggtgaggcctggggaggtgttttggtcatgggggctgataccttatgaatgtctgggtgtcatcctcatggcaatgagtgtgttctcactccatgagttcatgcaagatctgattgtctaaaaaaaaacctcgaacttcctcctcgtcctccctctcctcctcttcctcctccttcttcctccctctagcccccaatcatgtgacacacctgctcccccttcatcttctgccatgactataagcttcctaaggcctcaccagaggctgagcagatgctggt

SEQ ID NO: 828085 - DNA, 639 bp, Homo sapiens
ttggaataaaaaaacaaacaaatgagttgtgacatgttaatgatactcatcatttttagaagaggacggtgaacaaatacattgtcttgaataatagaaatgtaagtaaaaagtctaaaatacaggatgactaaagactttctgatgtggaccaaaaattattgaatatagagctaaatgcattttgaccagatcttacaaaaatacagaatatcaacagtaacatatctgtaatatacagttgaaagcctggcaccatggggatgctctgaatgagattctttcagctaaaagtcttggctgtcttcagtaccatcttgcaaagtgtaatgtcttttcacattttcaattgaaatgagctaataatttggcctaacagcctggtgctgcctaagaagtcctctcccacaagtcttgagttttgcatgtgaacagttagtcattagtcttcattctgtaccacttacagctggtcctcatattgttcaaagcaagtgacatcatgagttttcccaaagattgttaatgtcagtggtaatacaycagcttctaatgattctaaatgccctctgaagtcctctattctccccccaaaaatgtattaacctgaaatcaaaattattaatggtttgagtattg

SEQ ID NO: 828086 - DNA, 624 bp, Homo sapiens
tattgtaaaattgaaactttatctccctaagtttatagtattttaaatctttggctttcaatcttatgaaaggtttataaactgagtcaaggcaaagtattttgtaaataattgctggtctccacagcatgcaaacatacctcttgcttatcattaaaatgggaagatttttgtgtgtatacctgtagctatttcataatttccctttttctctagctttccttttttggagctcattgcccattttttgcttagctagttctctgggcattatgcccagcttgggttaatatttgtttattttcatttacattatccaggatgatgttttttagctgggtgccttagaaatgattgtaattcagtagcaaggaatatatttattaaatacataagtacattagatcatcagagatgtttttctaacatcagttaaatgacagatgagtatatatattttgtgatttttttagcttggtaacctttttgtctttaagccagtttagattgtttcatgtctagatgggttcatgtcccttcctgttattccaagggcaatcatgtgttaatatcccttgctatttcacactttaaaaaracaagggaaaatgtgtgttttaagca

SEQ ID NO: 828087 - DNA, 467 bp, Homo sapiens
agaaaatcaatgaggattaaaaatgctggcaccttagaaaaaatcaaggcagtggtactaaactgctaatagtcattatgttatttactgtcacacatatgcaagtagaaacaagccagttataccggaaaacattcttgatgaagcggtaaagactatcaaggctattaaatctaaatccctgaatacacaactttttaataattttttgataaaatgggaagtgtacataaagcacctttgttgcatactaaagtatgatggttttctccagaaaaagcagttgtatgattgtttgaagtaaaagatgttagccattttgaaacctaaacaacacattgttttatttgaaagcatgagagaaaaatcatggtcatttagacaggtatttggtagactttttctcaaaaataraggaagcaagacatcagtgaaaaaaaaatgacagtatttatcaaaaatatttg

SEQ ID NO: 828088 - DNA, 477 bp, Homo sapiens
gggagagaaagtgatgttacccatttatgaaaaccaaaatcatcaaatttttatcaattgattaaaacaactaaaaatcattaatccagaaattaccctcccagagataaggtaaaattgtcttaacgaatgtgggcatggggaggcagctcagcaattcccctcgagggttagttttatattcctattatttgagttacttgtaaaaataaaaaaattgattgtcttctttcaaagaataacacttgagcaaagtcaattttgggttgcatttacgtaacacaaaataattacttcaaagtggaagggagtgggcagggtaaagcaacttattttatatcatatgctctgctgtgttttgtatacaggtttatttgtccttactaaaatttatgtggaaatttgaycccccatgtagcagtgctgagaggtgaagcctgttgggaggcatttgggtaatggaggtggatcccctgt

SEQ ID NO: 828089 - DNA, 499 bp, Homo sapiens
aatctcatcgaatagcatcattcttcctttttccctattatctcttgacccataaatagtcttatagtagctgtaaaagcctttccccttatggttaaaattaaatacagtaaaacattttcccccacttcttccaattctgatattttaacagcaacacagcaagttctaattagcctaagttaaataaccattactaattttacaccaagatcaatatgggggatttctttttttttatctgtgtaattttttttatatactttaagttctagggtacatgtgcacaacgtgtaggtttgttacataggtatacaagtgccatgttggtgtgctgcacccattaactcatcatttacattaggtatttctcctaatgttatccctcccccagtcyccaccccacgacaggccccagtgtgtgatgttcctcaccctgtattcaagtgttctcattgttcaattcccaccgaagaataagaatatgcggtgtttggtt

SEQ ID NO: 828090 - DNA, 620 bp, Homo sapiens
agatcctaagtatttgagagaaagaaaagataaaaatctaaaataatctttattcaataaacatctaaggaatgacggaatcccatgtttcctaatagagcctccrtaataatggattgtttgacttaaggccagggctctgcagatatgagctggaattgctttgccctggatttccgggctaccccaggtaattcccagggtctctttctttgggtattgccagagtctgggggaggtgtcctgtttcaagtgtccagcaaaaccattttttgttgttgctttatataagtgactttattgtacaaatttaaaataggacacaagatctgacaagaaaaaagtgtagatatgcggaattttaagatgtgggaatatgtgttctgatcatcttaagaagagcacatttgttgtctcatgatactttaagtgcttgaaacactacggaattacaactgggctacttcagaatggatcatggcaaatttcattatacaaccatgatagttctcatcattatgacattgttatatcattatttccttccacaatcttatcctttataaacaaggtgatcctatattctcccaatgcatatcttatcaaatggaatttataat

SEQ ID NO: 828091 - DNA, 587 bp, Homo sapiens
gggtcttgatttgaaacataagccaggccagggtaggcaatctgaggcctggcaggcggcggaaagcaggcggggcgcccagcgggggggcctaggactggcttactcaagcacctgttgatgttcctggggaagaagctgagatccagaccctgaagccaacgcagaacggaacgagacaagcgggagctcttcggcgcatgcggatagaccagacacttcttaggcctccctcggatgggagctgctagctgtggcgaaagtgacggtgacttgtctagggctgccgcagtctgtgtcaaataccctttttcctggccggcggcagccatgacgctttctgggttgctgcggcaacagcagaaggcggggctgggccttattgctggcggcgcggcctcgtggggcggggcggagtcttatggggcgagacctcagcgcctgcgcaagcgccgcagcagccgcccgtacttccgctttactcagattttggaccgcggggccgggtatcgagggaggcaaagctgkggtcccagtggtgtggctgcggtctggggagcgctttcagtctcagatttagttggcct

SEQ ID NO: 828092 - DNA, 631 bp, Homo sapiens
caggataaaaaattaatatgcaaattcaattgtatttctataaaaaatgaacaatttgaaaatgaatttaagaaaacaattccatttacagtaacatcaaaattataaaatacttaggaataaacttaactaaggaggtaaaagtcttatacactgaaaattacaaaacctttatccaaaaaattaaagacacaaatacatggaaagatatttgtattcgttgattggaaaacttcagagtattaaaatgcaatccctatcaataaaaaaatcccaatagcaatttttacagaaatagaaaaaacaaatctaaaatttgcatggacccaaaaacggctcaaatagccaaagcaatcttgaaaagaaggacaaaactggaggcctcacactgcctggttttaaaacatatcactaagctacagtaatcaaaacattatggtactaacttaaagacagacatatagacaatggaacagagagcccagaaataaacccaagcatatatatataawatacacacacacatatatatgatgcggaagcaatgtaaatgtccatcagtgtatgaatgaatagagaaaatttggtatacacataaaattatggagccttcaaaataaaggaaatcctg

SEQ ID NO: 828093 - DNA, 626 bp, Homo sapiens
tatatacatacatatatatatattacattatatatatatattttttttttgagacggagtttagctctgtcaccaggctggagttcagtggcacgatcttggctgactgcaacctccacctcccaggttcaagcaattcttctgcctcagcctcccgagtagctgggattacaggcacgcgccgccacacccacctaatttttgtatttttagtagagacaggatttcaccttgttgaccaggatggtttcaatcctgtgatctgcccacctcggcctcccaaagtgctgggattacaggtgtgaaccactgcaccaggcctagattttttaatccactatgacaatatctgtctttcaactgaatgtaaatgcatctaatgtaattattaaaatgtttgagtttaaatctcttatcttcctggttggtttccatttgtcccatctctctctctctttttttttttttttttttttttttttgggctcttgaagagaacaatttgaaataatttaatagtttttttattattcaattttgkctccactatttatttggcttatatcatattttgggaattgctctaaaatttactctctacatctttaacttatcacagcgtacaa

SEQ ID NO: 828094 - DNA, 626 bp, Homo sapiens
tatatacatacatatatatatattacattatatatatatattttttttttgagacggagtttagctctgtcaccaggctggagttcagtggcacgatcttggctgactgcaacctccacctcccaggttcaagcaattcttctgcctcagcctcccgagtagctgggattacaggcacgcgccgccacacccacctaatttttgtatttttagtagagacaggatttcaccttgttgaccaggatggtttcaatcctgtgatctgcccacctcggcctcccaaagtgctgggattacaggtgtgaaccactgcaccaggcctagattttttaatccactatgacaatatctgtctttcaactgaatgtaaatgcatctaatgtaattattaaaatgtttgagtttaaatctcttatcttcctggttggtttccatttgtcccatctctctctctctttttttttttttttttttttttttttgggctcttgaagagaacaatttgaaataatttaatagtttttttattattcaattttggctccactatttatttgkcttatatcatattttgggaattgctctaaaatttactctctacatctttaacttatcacagcgtacaa

SEQ ID NO: 828095 - DNA, 626 bp, Homo sapiens
tatatacatacatatatatatattacattatatatatatattttttttttgagacggagtttagctctgtcaccaggctggagttcagtggcacgatcttggctgactgcaacctccacctcccaggttcaagcaattcttctgcctcagcctcccgagtagctgggattacaggcacgcgccgccacacccacctaatttttgtatttttagtagagacaggatttcaccttgttgaccaggatggtttcaatcctgtgatctgcccacctcggcctcccaaagtgctgggattacaggtgtgaaccactgcaccaggcctagattttttaatccactatgacaatatctgtctttcaactgaatgtaaatgcatctaatgtaattattaaaatgtttgagtttaaatctcttatcttcctggttggtttccatttgtcccatctctctctctctttttttttttttttttttttttttttgggctcttgaagagaacaatttgaaataatttaatagtttttttattattcaattttggctccactatttatttggcttatatcatattttggkaattgctctaaaatttactctctacatctttaacttatcacagcgtacaa

SEQ ID NO: 828096 - DNA, 659 bp, Homo sapiens
gtaaatacacagtaatgtcaacataaatgttgaaaaatccttcagaatgtaccagttactgaaatttaattacatttgctatggtttgaatatttgtcccctccaaaattcattttgaaatttaatccccagtatggcaccaggaaccaaaaggtgattggttcatgaatgctctgtcctcatgattggattaattcattgatggattaattgattaatggattataatgggagtagaactggcggctttataagaagagaaagaggaacctgaactaccacactcagcccctttgatgtgtgatgttctctgctgccacggtgccctgcagaaagtccacagcagcaagaataccctcaacagatgcggctccatgactttggacttctcagacttcagaagtataagaaacaaactttgtttcttataaattgcccagtttcaggtagtctcttacaagcaacagaaaatgaactaaggcaacactaattacccatttttaaaaattggtcttctctcacctttaaatataaaggggtttctttaaataggaaaggttcccattggtttagcgcctatcttcagaaaaggggcttttgggccaggttaatggraaccctttaatcaagtcagattgaatgtatcgcccaaaggaaaa

SEQ ID NO: 828097 - DNA, 587 bp, Homo sapiens
ttcaattctataaatttttcagtaatgttccctctggacccaggcagtatctgcatacccacttatcatgtttctctcaccttgaaatacactcggtaatgttttcttggagtcctttttattcctgagcttgtggacaagtctgtatgtacgtccacagaatcctctatggccttgaatgcagaatgaaatttgatttagtgtctttagtcatgtctacataagcctagctttaaaggtttaaagcaagaaattctcctgtgttctacaacacaagcaaacacaaatgccttggatttcagctgcattagaaattgttcagcccagaaatgcttaagacaacaaatatctgtttccttaggatcaaaactttgtttcagccaaacattcctaggaaatcctgaaattgcattgcaaggcaacgatggcctgcaaacgaatgttgcctgagcctgcataagtggtcttgagattgtgactgccatgttggccacctgtagggcagtattggagaggcsactcctgacctctgctgtttttataatttattcctccctttcttttgtgttcacttgctaaggctccag

SEQ ID NO: 828098 - DNA, 646 bp, Homo sapiens
gttgctgaaaaaatacgcaaaaatgtggaagcgactttggaatgtgtaacaggcagatgttggaacagttctgagtcctctggctcagaagaagacaagaaaatgtggaaagtttagaatgcccccgagacttattgaatggctttgaccaaaaggttgatagagatatggacaataaggtctgggctgaggttgtctcagatggagaagaggaacttattgggaactggggcaaagttaactcttgttatgttttagcgaagagactggtggcattttgcccatgccctagagatttgaggaactttgaacttgagagagatgatttacggtatctggtggaagaaatttctaagcagcaaaacattcaagaagtgactttgttactgctaatggcattcagttttacaagggaagcacagcataataatttggaaaatatgcaacctgacaatgtgacagaaaagaaaaacccattttctgggaagacattcagatcagctacagaaatttgcataagtagcaaggagcctaatgttacttcccaagactatggggaaaatgtctccaggccatgtcagagaccatcatagcagcccttccctggaggcccargaggaaaaaaggatctctgtactgtgtgcaa

SEQ ID NO: 828099 - DNA, 631 bp, Homo sapiens
aaaattcaacatcctgtttttatccatgttaaaaactctcaataaactaggtattatggaacatatctcaaaataataygggctatttatgacaaacccacagccaatatcatattgaatgggcaaaagcttgaaacatcccctttgacaactggcaccacagacaagaatgccctttctcaccaatactattcaacatagtattggaagttctggccagggcaatcaggtaagagaaagaaataaaagtattcaaataggaagagaggacgtcaaattgtctctgtttgcagatgacatgattttatatttagtaaatcccatcacctaagcccaataattccttaaactgataaacaacttcagcaaagtctcaggatacaaaatcaatgtgcaaagtcacaagcattttcttataccaacaatagacaaggagagtcaaatcatgaatgaactcccattcacaattgctacaaagagaataaaatagctaagaatacagcaaaccatggatgtgaaggacctcttcaaggggaactaccaaccactgctcaaggaaataagagagtacacaaatggaaaaacattccatcttcatggataggaagaatcagtatcgtgaaaatggcca

SEQ ID NO: 828100 - DNA, 553 bp, Homo sapiens
acaagataggaactataataatttgctgaactttggatgaattaatatgaatagttattcttatcctaaagaggaatatttacaaccatttattaaatattcaactttataaacaaaaacttwgttgttcacattaactgatttatttaaagaaaaatctattgcatgctatcaagttactcattaatttgccaaagtcttagaaaataaggccaataatactatataatgtccataaagagaactctctctctttatcttttttttttttttaacacaacttgtgattgtataaatagtatttcccattatggaacttaagttatatgtgatttatttggatcaatgctatgtcagtcagctttattgacagtgttataccacttgattaggggattaaaaatttaatccttgtgaatgagaacatgatgtaagttttctttaatatccccatttaattgtcttctgtttcttctatttatatagtagtttttgtctatcaatttttttaactttagtaggaacacaaaatccacattgattccacttgtgt

SEQ ID NO: 828101 - DNA, 606 bp, Homo sapiens
ttgagctctgctaagggtcagactgcctcctcaagtggatccctgagccccatgtatcctgactgggagacacctcccagtaggggctgatagacacctcatataggagagctctcattggcatctggcaggtgctcctctggaatgaaacttccagaggaaagaacaggcagcaatctttgttgttttccaccctccactggtgatactcaggcaaacagggtctggggtgtacctccagcaaactccaacagacctgcagcagaagagtctgttagaaggaatactaacaaacagaaaggaatagcatgtccactcaaagatcccatctgaaggtcaccagcatcaaagactgaagtagataaatccacaaagatgggaagaaaacagcacaaataggctgaaaattccaaaaactagaatgtctcttctcctccaaggactacaactcctcgccagcaagggaacaaagttgggcggagaatgagtttgatgaattgacagaagtaggcttcagaagatgggtaataacaaactcctccragctaaaggggcatgttctaacccaatacaaggaagcgaagaaccttgaaaaaaggttagaag

SEQ ID NO: 828102 - DNA, 607 bp, Homo sapiens
tggaatcatcatcgagtttcatcgaatggagtcatcatcatatgtaatcgagtggaagcattgaatgggctcaaaagaaatcatcggagaatggaattgaatggaatcatcaaatrgactcgaatggaatcctcatcaagtggaatcaaatggaatcatcgaatggacacgaatcaaatcatcgtcaaatggaatcgaatggaatcatcatcaaatggattcaaatggaatcattttcgaatagaatcgaatggaatcattgaatggaatcatcatcaaatggagtccagaggaatcactgaattgaatggaattatcattgaatggaatcgaatagaatcatcgcatggaatcaaatggaattatcatcaaatggaatcgaatgatatcatcgaatgcacttgaatggaagcatcaacgaatggaattgaatggtatcatcgaatggactcgaatggaatcatcttcgagtagaatctgaaggattcactaagtggactccaatggaataatcatcaaatggaatcgagtggattcatccaatataagagaattgaatcaccatcgaacggaatcgaatagaatcatcgaatgaactcaaatggaa

SEQ ID NO: 828103 - DNA, 340 bp, Homo sapiens
atggaatttcatcaaatggagtcatcatcatatggaatcgagtggaagcattgaatgggctcaaaagaaatcatcggagaatrgaattgaatggaatcatcgaatggaatcgaatggaatcatcatcgaatgaaatcaaatggaatgatcatatggactggaatggaatcatcatcgaatggaattgaatggaatcatcgaatggaatcgaatggaatcatcctcgaatggaatctaatgaaatcaccgaatagacacgaatggaatcatccaatggatttgagtggaatcatcattgaatggaatcgaatggtatcatagaatggaatccaatgtaatc

SEQ ID NO: 828104 - DNA, 617 bp, Homo sapiens
cctttcaatgatgattcaattcaagtccattcgatgattccattggagtccaaacgatcattccgttcgattccattcaatggtgattccattcatgtccattcgatgaatccattcaattccattcgatgatgactccattcgagtacattcgatgattccatttgattccatttgaagatgattccattcaattccattcgaagatgattccattcaattccattcgatgatgattccgtatgaatccattctctgattattccattcgattccattcattgacgattccattcaattccattcaatgatgattctcttctattccattcgatgattctggtcgattccattcgatgatgattccattagattccattcgattgttgcattcgattcccttcgatgatgattcctttgaattccattcgattatcattccgtatgaatccatttgatgattattccattggattcctttcgatgatgattccattcgagtccattcgrtgattctattcgaatccatttgatgatttcttttgattatagttgttgatgattcctttggagtccattccatgattccattcgattccaatcgatgatgattccat

SEQ ID NO: 828105 - DNA, 560 bp, Homo sapiens
gattccattcaattctattcaatgatgtgtccatttgattccattcgaccatgattgcctttgattccattcaatgattccattcggttccttttgakgatgattccgttcgattccatttgatgattccatttgattccattggatgagtccattccattacattcgatgataattccattcgagtgcattagatgattccattcgagtccattcgatgattccattctattccattcgatgttgattctgttcaaatccattcgatgattccactcgattccattcgttgactccatttgatcccattcgatgatttcctttgattccctttgatgatcattccatttgattcaattcggtgatttcatttgattccattcagtgatgtttccattcgactccattcgatgatgattccattcgactccattcgattatgatttcattcaattccattcgataatgattcccttcgagtccattcgatgattccattcgattccattcaacgatgttttgattcgtgtccattcgatgattccatttgattccacttg

SEQ ID NO: 828106 - DNA, 589 bp, Homo sapiens
ttcgattccatttgatgatgtttctcatgtattccatttgataattcctttcaattcccttcgatgatgattctttcgagtcaattcgatgattctattccattcccttcgatgatgattccatttcactccattcgatgattccattcgattcaatttggtgatgattcaattcgatgacattcgatgactccattcaatttcatttgatgatgattacattcgagtccatttgatgattgtattcctttccttttgatgattattacattcgtgtctattcaaagattccattctattccattcaatgatgattccaattgattccattcaatgattatggctatcgattccactcgttgattccatttgattccattcgatgattattccgttagattccattaggagattccattcgattttattcaatgattccaattgattccattcaatgatgattccattccactccgttcagtgattccatttgagtccatttgaggattccattcgagtccatwtgatgattccattcttttccatttgatgatgattccattagggtccattcaatgattccattcga

SEQ ID NO: 828107 - DNA, 618 bp, Homo sapiens
atgattccattcgactcccttcagtgattccatttgagtccatttgakgattccattcgagtccatttgatgattccattcttttccatttgatgatgattccattagggtccattcaatgattccattcgagtccattcgttaatgcctttcgagtccttttgatcactacattcgagtccattcaatgattctattcgattcccttccatgatgattccattcgagttcattcgatgattgcattcgagtccatttgatgattccataagattccattcgacaatgattccattcgtgtccatttgatgattccattcatttcctatcgatgaagattccattcgagtgtattcgatgattccattcaaatccattcgatgatgattccattccagtccattcgatcattccacttgattccatttgatgactattccattcaaatccatttgatgattccattcgattccattcgatgttaccattcgagtatatacgatgattccactcgattccatttgatgattattccattggagtccacttagtgaatcctttagattctactcgaagatgattccattcgagtccattcgatgataccattcaattcca

SEQ ID NO: 828108 - DNA, 542 bp, Homo sapiens
caaatggaatcaagtggaatgatcgaatggactggaatggaatcatcatcgaatggatttgaatggaatcatcgaatacactcgaatggaatcttcatcgataggaaatgaatggaatcatcaaatggacacgaatggaatcattgtcgaatggaatcatatggaatcatcaaatggactcgaatgcaatcatcgaatgaactcgaatggaatcatcatggaatggaatcgaatagaatcattgaatggactcgaatgtagtgatcaaaaggactcgaaaggcattaacgaatggactcgaatggaatcattgaatggaccctaatggaatcatcatcaaatggaaaagaatggaatcatcaaatggactcgaatggaatcatcaaatggactcaaatggaatcactgaayggagtcgaatggaatcatcattgaatggaatcaattggaatcattgaataaaatcgaatggaatctcctaatggaatctaacggaataatcatcgaatggaatcaaatggaatcaacgagtggaatcgata

SEQ ID NO: 828109 - DNA, 542 bp, Homo sapiens
caaatggaatcaagtggaatgatcgaatggactggaatggaatcatcatcgaatggatttgaatggaatcatcgaatacactcgaatggaatcttcatcgataggaaatgaatggaatcatcaaatggacacgaatggaatcattgtcgaatggaatcatatggaatcatcaaatggactcgaatgcaatcatcgaatgaactcgaatggaatcatcatggaatggaatcgaatagaatcattgaatggactcgaatgtagtgatcaaaaggactcgaaaggcattaacgaatggactcgaatggaatcattgaatggaccctaatggaatcatcatcaaatggaaaagaatggaatcatcaaatggactcgaatggaatcatcaaatggactcaaatggaatcactgaatggagtsgaatggaatcatcattgaatggaatcaattggaatcattgaataaaatcgaatggaatctcctaatggaatctaacggaataatcatcgaatggaatcaaatggaatcaacgagtggaatcgata

SEQ ID NO: 828110 - DNA, 602 bp, Homo sapiens
tgatatttctgccactggaaaaagcttttgagatataattcatatactatctgcccagcattagccaaaccacaaagtttgagggcacagtccccaagaccgcccttacttctgacgccractgcaagttcagaaggtttctgagaccgccctctggtttgataatgcactagaagggctcacagaacttactgaaaatgagttctacactcacagttacagttgtattacagggaaagaatacagactaaaatccgccaagggaacaaacacatggagcagagtccacgatggctccagacacaaagcttctactgtcttctcgtggagccagatgtgctaccctcctagcactggtgagtggcggcatgcaagcacactgcagccaggcagctcgccccagccctggcggccacagtttccagggggctccactgcacaggtatggcaggctggctgaccgcctacatggctgaactcagtctcctgattctgcatgacccaaagcccccatcccgaagcacctggttggtctttctggaaggtcagcctccatcctgtgactgtcaggtgtgaccagtcccctccctgaacaaagacac

SEQ ID NO: 828111 - DNA, 444 bp, Homo sapiens
tgagcatgatctaaagggtgccaagttgcccccttccctataccatacagtgtcctcattctgggtaaggatatagtcaaagtagagttgttatagaaccttctaaagcatgggaactagggccttatatgttagttatgagtttgaacaatttcctgccaatttacaagaactattgaagacttttatatggtagctgttttatacacagttttactttttcacatagctataaattatgaaagacaaagatagggattcttctcctttcaaggaaatgcaatattgtgtattgtcaaacctcttcaaaaggcttcatttattaaagtgttgcatgatagatataattagaattggcaagctaccaaaaatctgttcatgaccatttgtcatgtgtaattttctatgycttttaagtattccacataatgcttccaagctttg

SEQ ID NO: 828112 - DNA, 643 bp, Homo sapiens
gattatcatgctataaaatagaaaataatcrttctataaataaagaatttaggctgtttattacatggaaaaatgctgaaaatttaaaatgtaagcatgcttacatttaacattttccaagctccactctattttaataaaaataattgtcaaaacataaaaatgttcattattccctagaaaacaactcctttataattcataaaattataaatatagattgagaaataaaattataaactttttatacttttcttttgatagcctagataagtttttagattgaatttattgacatgtagacaacagtagttttccaaaggatgaaattagcatttatagtcagatatttgttttttaaagaaaattatacattttaataaatggattaattttgttagcatttatataaatcaaatatttaaaacattgaattcttataagcaagtacatttcagaataacaagactgatttaagtaatggcttggaaattgatgcaaggatttgcaaatcaactctgtaaccctaaagaagaagaatgaaaatggtaataaatgatatttattgattgctttcaacaagcttcacattaccctaaacatttacatgtattacttcaaatgaaagcactataaattctct

SEQ ID NO: 828113 - DNA, 512 bp, Homo sapiens
tcaatagtttctaactaagaaatgaacaggaaaaaaatgtctaytgtaatcactatagttcaacatagaactgaaagtactaggcactgcaataaatcaaaagaaagatataagacatacagaagtatccattgtttctcactataaaaggaagaaaatttttttctctattcgcagatgacacaattgtctatgtaaaacatctcaaggaatgctttaaaattttcctacaatgaataagtgagtttagcaaagtcacaagtgtttcacatttctactaacaatgaacatataaaaaccgaaattaaaaacatagtaccatttaaaatcatggcaaataaaattaaatatttaggaatataattatcaaattatgtacagaatctgtatgctaaaaattacaaaatgtagtgaaagaaattaaagaagattaaaataaatgaagagacatatcatgctcatagattgaaagcttcaacataataaagttttaattctctctaaattgatgt

SEQ ID NO: 828114 - DNA, 655 bp, Homo sapiens
catgtttactggaccatgaagaatattgcttaatgagtatatgagggagtgggatatggagagcaaagaattctacacagacacaagctgaaggtcaacccaatgaacastgtattcattgtgaatattttcatagacactaggagatatcattatactctaagtactgattgcattgtaattatgtctgacttgttcgatgtgcttatgagtgctttatcctcaaatgtacagcttaaaagttttattgggaagcatattgtgaatacaaggtgtcattctagttttatgggtcagaaaatagaggtccagactgtgtgagatttatccaaggccataaaggaaaacagaactaatttttcacaatgctctttatgttctaccatgcgatcattctctataacattactcttctgtaatcaaaaatatgtatgtagttggaaactataatatatttagaattattctcatcactgtggcatacagtgtaatttagaaacaaattatctgactctacagaatacctagataaaacaaagctaggagttaactttcatttgttgctttcaatttagttggtccatgaaacctcagctggcctaaaaatcattacaggtcattttagaaacccaaactagagaggcactcataaatt

SEQ ID NO: 828115 - DNA, 614 bp, Homo sapiens
gtgttacagcatggcacattcctggcttggggagccctgagttctgggatcccagcagggtgacagctcttccctcctcaacccttgcagcatggcmagagttggggcatgtttcagcccatttgtctaacagctttttcagtcccaccaccccactctggcccacacctcctgggctggcctggccccactgttgcttcccattgtgtgggccagtcgcctggtgccagcaaagagcaagagggatacagttttacagcagctctgcctgggaaatgctaaggtctgggccgccagaagggttgccactcttcactcccacagtctgggagcatgtcaccatctgcagtttagccagctggccaggaacatgatacagctccttttgctcccatcattcagcgggtcccaagttcttgtcccatgtccaggaagaatgaggttacacagacaactggaggataagcaaggtggagaagagctttattggatggccaaacagctatcagaggagagaagacccaaagtggatagctcctatctacaggcagttaatcacaaggagcgtagaggagacctgaagtacacagctcacatcctcaggcaggtagtcc

SEQ ID NO: 828116 - DNA, 586 bp, Homo sapiens
acaatttccaatccgcctgctcacctgatagctttgcaatatttggcattgctagctactgtccttttgaatttcacaactcctctttttgcttttaagacactaaggtcccatggktttcctttttcctctctgatactccttaatttcctttattggctacagtttctcataccaccactaaatattgggagtcacaaatactccccttaaatgtcttttcatgctacactctctctgtacaccatttcgtctgctttataccttgtaaacaacaaagtctcctgtttatatcttcaggcctgattactcttcctacattaagaccatgccattgacttcttactctatattttcacctagacaaacaaagttatcttaattatggtatattcaaacagaatgcctccactattcctttctttgccacccacacagttgtctgatccaaatacagaggaactatcctaggttccaactctttctgatacctgagagcaacttcattgacaaatcttatgatttcctgagctcccttgaatatatcttctcagcttctccatgattgcccttgcttaaatggttg

SEQ ID NO: 828117 - DNA, 654 bp, Homo sapiens
tttacctctaagcagtgcattcmctgcatcccacatattccaacaaattatattttcattttcatctagttcaaaatattttaaaatatctcttgatagtctccattgacttctgtgttacttagaagtatgttattaaatttccaagtattttgggatatttcagctctctttgtgttattgatatttagattaattctattttggtttgagagcaaacattgtatggtttctatttttttgaactgattatgattgttttatggctcagaatgtggtctgtctttgtgactattccatgtgagcttaaaagaatggattttctgctgttgttgaatgaaatggtctataaatgtcaattatattcagttgatggtgctagaaagttgagctatgttctttatgatcttctggccttgaaatatccccatttctgatacagggaggtttaagtctttaactatgattgtggattaatgtttcttcctaacgttctgtgtcctgtactttgatgctctgttagtaggcaaatacacattaagaactggtatgtcttcttggagtattgacccctttatcattatataaagcccttctttttccctaactaatttctttgccatgaaacctactcagtctgaaattacataaagt

SEQ ID NO: 828118 - DNA, 595 bp, Homo sapiens
cccatccaggatatggcattacatttagtcatcatgtctccatagcctccctctgggctgtgatagtttttcagattttcctcgttattgatgatgaccttgacagtgttaaggagtactggtyagctattttgtagaatgttcttcggtttgggtttgtctgatatttttctcatggttagactggggttatgagttttggagagggatcacagtacattatacaaaggggacatgctatcaacaagacgtatcactgattagggatgcctccaccacctagctgaggcaatgcttgccaagtctctccactgcaaaattacttttctcattctttctgtaccgaacaggaaagcaagtcagcaagacccgcaattaaggatggggtattatttctcacctaatttagtggggagtatctacattattttttgcagttcttctgtatgtaaatgttttcttctttcctgttaattgacttattcaattatttattaatatcagtatgaaattgtggctatttgttttatgtttgatttaaatccaatattgtattatttcttttgttgctcaaatttttccaaatttgaccatt

SEQ ID NO: 828119 - DNA, 632 bp, Homo sapiens
tctttttctttcagcctttgaatatgtcttcccactgccttcttgcattcatgatttctgatgagaaatccattcataatcttacagaggagttcttgtatataatgatcaattaaacttgtcatacatgtctctgaggctctgttcatttttctattcttttatatttctgtttctcagactagataatctcattcgaactctttcaagttcacttatttttttcctttgggctgctcaaatctgctatgagctcttctcatgatttatttattttctttttcatttccagaatttccatttggttcttttgaataaataatttatatattttcattgatattttaacatgataagacattgctttcataattttctttagttctttagaaatggtttcttttagttgtttgaacatattctaaataacggatttaaaatatttgtaccagaactccaacatctggacttcccaaaagagtttctattgactgatttttttcttgcatatgtgccacagttttatgtgccaaactttatttcttttcwttttttttttgtttttttaaacacattttaagtaatataatgtagtaactctaaaaatcagatttttcccctctccagggttt

SEQ ID NO: 828120 - DNA, 471 bp, Homo sapiens
gattctagaatgcttacctacagcaatcccatagrtgaaaaggaaggcagaggctctactagataggaggcactggctgtccagtaagaaatccatggaaagcctctttgctccttgatctcttcatccctctcaggctcaggaactgatataactcaaacccagtaattttagtcatccttgtttttttgggccagggatattcacagagtctaatgttgaactatgcttcacttcacattccttcccatcatttgatacttactattaattgcccagagctcacagaactaatattgcagtgtttgccccgcttgtgggacttcagatttgaaagaacaaaaccccagtgcagtcactgttaggaagcccatgcttctacttgcatctctgccacatttggttggggagaaacagataggttatacttaaggatccaatgataggaaatagcacatttttagaattgct

SEQ ID NO: 828121 - DNA, 589 bp, Homo sapiens
tgctataacagaaaaacctaggctggacaatttataaaagaaagaggtttatttatatcccagtgatgcaggctgagaagttcaaggggattgtcctggcttctgacaagggtgtttgtgttgcatcataatgtggaaaagagggtgaaagggcaattggacatatgcaaacaggcagtgtcccagcgtgtacaggtcagtggcactgcaggcctgtccctggaaaatattctgtcctcctaggtctctgggcctggggtgggaagggccacctgaaagatctttgagatgcctttgaggcttttttccccatggttctgattcttagcacctggctccattttacctatgctaatctctttatcaaggcccatgggtcctccgccagcccactcgaattcctctcctgaaaatggtctttcattctctgccacacagccaagctgctaattttctaaatgttttcactctgcttcctttttaattataaattccacctttagatcattcctttgctgtcaactgaacgtatgctgttaaacataaccrtactgctttatgaacgctttgctacttagaaattttcctg

SEQ ID NO: 828122 - DNA, 621 bp, Homo sapiens
cttgagcctcagagattgaggctgtagtgacttgtgattgtgccactgcagtccatcctaggggacagagtgagaacttatctcaraaaataataacaataatctgtagtaaaaatgtcattacatgtaagacatagatgggaagctaaaatgagtaataagatccagtcctgcccaattagccatgtgcatcctcaatttggatgctgttgaaactccccgaatgtaatttgttttatatcgaatgccatatgactcagagtatgtaataaaatctgtttttgagattaaatttccaactttctaaatatactgtactgtaacatacatgttataattgatgactaacttctaattaaatagtagataccatagagaaaatgttttctgacctgtctaccaaaatatagctcattttgacacaagaaaatgaatagctgtctttgaatcaaaaattaatccataagcaagattttacataacctttttagaaatgaataaattttacagctttattcattgtcaattccttgatagttttcagactgtatgagatgaagattgcaaattctatagaaagtgcaagggatcagaataacaccaaagtctagaagtatcatg

SEQ ID NO: 828123 - DNA, 535 bp, Homo sapiens
gcctctgatagcataaaggcaaacctagctgcctaaaaaaaagaaaaaaaaaacccaacaaaacaaaaaacaaataaactctttctggaggaacagtactatccagagtttgtaattatttgcatgatttttcatatataatatctgacacttaattttaaaaaagcatttgaacaagctggaaaaaataacagaataccaaaaaaagaagacaataaagatccaaaggatatacagttataaataatcagacatagactttataataactatcattatcatttttaagaaattacaagattaaatattcataagagaatgggaaactttaaaaagtctaatataaattatagaactaaataatacatgatttaaataaaaagcccaaagatttaatacatgawttaataaaaagcccaaaatattagatacagttgaaaagaacttttgttagctgaaaaataggtaaaaaatatatcaatacacagtgagaaagaaattttattattccattctcacactgctatgaagaaat

SEQ ID NO: 828124 - DNA, 326 bp, Homo sapiens
atataaatttatgtgtaaagattacataaaataaaaaggttatgtataaagattgaaagagattatatataaagattatttatatagaatacatatatatttatatatataaagrgtgaagatttggaccattattctagcctattgagagccttcagatcttgctctggaataccacatttattttactctcttagtgtcaggtctttggtattttttaataaccatgccaacaaagtcctcattcatatttctgagtaggacaaatccaaggacaaagtaatgaacaatacctctcactacttcccttgggtttatattcatca

SEQ ID NO: 828125 - DNA, 326 bp, Homo sapiens
atataaatttatgtgtaaagattacataaaataaaaaggttatgtataaagattgaaagagattatatataaagattatttatatagaatacatatatatttatatatataaagagtgaagatttggaccattattctagcctattgagagccttcagatcttgctctggaataccacatttattttactctcttagtgtcaggtctttggtattttttaataaccatgccaacaaagtcctcattcatatttctgagtaggrcaaatccaaggacaaagtaatgaacaatacctctcactacttcccttgggtttatattcatca

SEQ ID NO: 828126 - DNA, 614 bp, Homo sapiens
cattattagagaagtggatcctgaaagacctgtaggcacgctgctcccatggcaccatgtgccactgtcttctgcgcctgccctgcaccgccacccctgcgaagagaacctctcctactggaagtgcagggcaaagccactttgaaagtccttaaagtatgaggccttcaagaacaagatgcagacaatgggaacgttcttcaactttttaactgcttaaattgcagtcttcccaacaggatgctagggaggaacatccttttgtgtacaccatacctggaaacacattgtggagggaagtagggttgccagataaatgccaggacacccaattaaacccgaattacagtaaatagcaactaaaaaattatttattgttttcctgaaattcagatttgactgagcatcctgtatttttatttgctgaactagcaactcagggagagtcacctccgttgggggctgctgggccctaacagtctcagccrggtaggagttaaatgtgccatccctagcctgtaacacgttcctctggtctaggatccttgtactctcttttggaagatagagtagatgtaatcaggcataattataaaagaaagaaagcagagttt

SEQ ID NO: 828127 - DNA, 633 bp, Homo sapiens
gattcactgctgcctttttgccgatggatgtccttaggtgccaaactcctcagggattctatagaacaagttagcttgcttctgggtgtcttkttagcaagctgttggagaatggagaagtgttgtattgttatttgtacttttctgtatatattaagcaatttggaaactctccaggtgattctgatgtacatcccagcttggtttctgcggtgctgtgtaaatgatcatctgaaaatgcagatgaggctatatcacacctcagctccaaagccttccatggctcccatctcctgtagactcaatttcaaattccttattgtgatattccagatgctggcctcactttctagccttgccttccactactcaccattctgtgctttttacagatgcttttggttctgtatttaactcttttccctcactctctgacatttgctcatcaaaatattgtttttcctcaagatctattttaagttctacctccttcataaaactcctctcttttcaaaagctttcttttctgtgctgcctacagaatttcttttatgtttcttttatgatacttagaatattatggtataggtcattgttattcacttttatgcttatctcattatcccctatcac

SEQ ID NO: 828128 - DNA, 578 bp, Homo sapiens
aggtccatgcaggttacatagtggtgccccaaacagtgacasaattgggttctcaacaagtggtgactcagaacagggacgccaaggatgccaacaagtggcgtctgaacacgggacttcgacgatgtgaacaaaaaagatctgctggagcagagaagctgaaattgacaaggcaaacggggaccccaggatgagtctgccggcagcatatataaggtcagtgctataaagaggtactgggagcagtgctttatagaagtgctgggaatgggaagctttctgaatcagggtagcagggggaataacttgtctgttgaagaaaaacattatgtgcagttgcttaaagttctgttgagacagtctggagctcaggttaattctcagacactaacctcctgcagaagccacacaaagttattatgcataactcatggtttccacaggcaggcactcttgatgtggaaaactgggatagagcaggagaaggattaaaacaggctcatcaaaaaggtcttgaagttgattcttctgttttctccacttggagtttagtttgtactgtacttctgctattatct

SEQ ID NO: 828129 - DNA, 624 bp, Homo sapiens
ctcctttttactattctcagcatccctacttyagtcaaggacctagtcgtttttcctttctattttattgacctatttacttcactgccttcattcttgttcacaacacatttgtgtaagtgatatcttggtaaataaaaagcagatgattcaaaagagattcatttcagtctttcagtactctctcaagccttcacaatgaaacctaacttgttagcaaagcatacaatatcatttatgttccagcatacgactctttgtctgtcaggatgtctccattcaccactcacactgactcaaacttcttgaactatttagagtcttcttgatgtactctaatttctctggcctttgctccactttttctcctgcatagacagctaccacctcccaccgtcattatcctgggtgacttctacacatctttcaagactaatttccctccaaagccttctctgactgccaggggtgaatcaggtaaccttcatttgtattatagacatcagcttttgccttcacttatactgggttatgatttttgttgttatttgtttttttactgttcattctcctcaatgaatacattgtcttccataactgcatcctatccctgtattacaaata

SEQ ID NO: 828130 - DNA, 669 bp, Homo sapiens
aatatccccatgtaaaagaataaggttggacccttatcttaacccacatacaaaagttaaytcaagtggatcaaagacctaaatgtaagatttaatactacaaaactcttagaagaaagcataggggaaattcttcatgatcttggattaagcaatagattcttagttatgacatcaaaagcatgagcaaaaaaaaagaaaaaagaaagataaattccaccatattagagttaaaaacttttttgcttcaaaggaaactataaagaaagggaagaaacaacctacagaatggaaggaaatatttgcacatagtatatctgatcaaggatgttatccagaatcatttaaacaatctaaattcaatacaaatcccccaattaaaaatgggaagagaatttgaatatgtatttctctaaattagacatacaaatgattaataaatatataaaagatccttgatgtcatctgtcattagaaaaatataattcaaacccagaataatatattgcttcacactccctataaccatgtgaacaacgtagcctcaaaattccttcaccagcatacatcatctaatcttccacaattcacttcagaacttccctaccagggccatgatctgtcagcagtaatagcactttccaccactgtgaggttcataaattagaa

SEQ ID NO: 828131 - DNA, 590 bp, Homo sapiens
agtcaaccagtcatttcaccatttcatttcatctaccatctccccactaagagatttttttttttttttttttttttttttgagacrgagtcttgctctgttgcccaggctggagtgcagtggtgtgatcttggctcactgcaagttccacctcctgggttcacaccattctcctgccttggcctcccgagtagctaggactacaggcgcctgccaccacgcccagctaattattttgtatttttagtagagacggggtttcacagtattagccaggatggtctcgatctcctgacctcgtgatctgcccacctcggcctcccaaagtgctgggattacaggcttgagccaccacacccggccaagattttttatttttatctttcatgtattgtttcatttaacaatgttttggatttttataaataaaatgtatgttgtttctagtatgttttattttcttatcataaaatttagtatttatatttctgtgtcttcagtaattagccttacctagtccctgtaccaatgaaaaaatagaatgtgtccatccacctctatttctgcagcactgctctgtgagtcatgct

SEQ ID NO: 828132 - DNA, 547 bp, Homo sapiens
ttgttaattttattcctaagagttttaatccctttggtgctgttataaatggaattttcttattttaattttcagactgttcattgctagtgtatagaaatgcagttgattttgtgtattgatcttgtatcctgcaactttgctgaacttatttattctaataatttttagtggatttcttaggattttctatatacaagattatgtcatctgcaaatatagttttacttcctcctttccaatttggatgtgttttatttctttttctagcctaactaccatgggctagaacctcagtacaacattgaatggaaatggtgagagtgaacatccttatcttgttcgtgatgtatccagtctttcaccaattaagtatgatgttacctgttacttattattattgagatcatgtgatttttgttctttattaatatggtatattactgatatggtttggatttgtgtcctcttgcaaatctcatgttcarttgcagcctcattgttggaggtggggcctggtgattggatcatgggtgtggtttcccat

SEQ ID NO: 828133 - DNA, 614 bp, Homo sapiens
tttttttttacaacaacttatactgactttatgaggagtatgaaatgactaaaatatctgttagtagacataaatatctcttgtaaaaatttcattcacygaagtaaaagcacctcataccacatcctatttcccttaatttattattaaattgataaaaattgtcttatgtacatgatgcctggaaatatgtatacattgtggaatggctaaattgagctaattaacatatgcattacctcacatagttaccatttttatggtgagaacactttacatccactctcccagcatttttcaagaacacaatatattgctttgttttgttttgagactggggggggggtctcactaggctgaccaggctggtcttgaactcttggcctcaagtgatcctcccacctctgcctcccaaagtgctgggattacagccatgagccactgggcctggccaagaatacaatatattgttaactatggtcaccaggtggtgcaatacatctcttgaacttatttctcctaactgaaattttgcatcctttgaccaacatctccccaatcttcccactccccagcttctggtaaccaacgttcttctctttgcttctgtgaat

SEQ ID NO: 828134 - DNA, 513 bp, Homo sapiens
gttgataatggctgctgaccttaccaacrttattttttgcaaatgctgagatgggacagtgtagtttcttctaatagaatgattaaagtgttcatcattacagaaattacttctttggctgttggttaactcttcagagtgtgccctatcaagcgctaacagccaagtttcacatgtcctgaaacatctttttttttttttagtagagatagggtttctccatgtcggttaggctagtcccgaactcctgacctcaggtgatctgcccacctcggcctcccaaagtgctgggattacaggcgtcagccaccgtgcccggcctctgaaacatctttcttaatttaactttcaactaagttctagtctgtaaatgagaaatgcaagtaagaacaaggggtcaatttattttaagtaaatttgtcattaaatatcaatgtgtacaatttcaaacatttataaatcttccaatttatagaaaaattaatgtaatcttaaaattatttgaacagtggc

SEQ ID NO: 828135 - DNA, 563 bp, Homo sapiens
agtatgcagtacagtagtatcaactatagttatcatgccacatattaggtctccagaccttattctgcataactgaaactttgtactcttcgaamgacatgtctctactttccctactccccagcccctggaaactaccattctactctctgcttctgtgaattcaaatttttaggttcctcatgtaagtgagatcataaggtatttgtctttctgtgtttggcttttttcactagcataatgtcctccagattcattcatgtcattggaaatggcaagaattactttttaaaagctgaataacatttcattatgtattgtgtatgtgtgtgggtgcatggtatatatgcgtgtgtgtatatatatatgatatatgatatatatgtatgtgtatatatatgatagttccatttaaattattttgtggaacctccatactgttttctgtaatgacaataccaatttacattcccaccaagagtgtacaagtgttccattttctccatgtcttcaccaatgcttgttaaattttcccttttaattacagccattcagacaggtct

SEQ ID NO: 828136 - DNA, 542 bp, Homo sapiens
cagtagtatcaactatagttatcatgccacatattaggtctccagaccttattctgcataactgaaactttgtactcttcgaacgacatgtctctactttccctactccccagcccctggaaactaccattctactctctgcttctgtgaattcaaatttttaggttcctcatgtaagtgagatcataaggtatttgtctttctgtgtttggcttttttcactagcataatgtcctccagattcattcatgtcattggaaatggcaagaattactttttaaaagctgaataacatttcattatgtattgtgtatgtgtgtgggtgcatggtatatatgcgtgtgtgtatatatatatgatatatgatatatatgtatgtgtatatatatgatagttccatttaaattattttgtggaacctccatactgttttmtgtaatgacaataccaatttacattcccaccaagagtgtacaagtgttccattttctccatgtcttcaccaatgcttgttaaattttcccttttaattacagccattc

SEQ ID NO: 828137 - DNA, 620 bp, Homo sapiens
ccagctacttctttatggttcaaggcaaaactaaggagtcttagcctttcagggcatttttttttcaagccagaccctgtgctaggcactgagaattctgagacaaatgaaacaagatgagttcatgatttacttttgagaagactgataaaaaaaagaaagggcatgtttagggctgtaacagagtttctaccaagtgctcctaggagatgagaagaagctgctaagaagactcctgcatgatgttcttccaggactgaccaccaagcccattagagaatatccttaggacacactctgcacttctcccagcactcagtcctgagctccatgaagacggaaccacactccatttctgtgtcctcaatccccaccccaggttggcatgagagagatttcagggtcgatttatggaataaataattcataaggccttaacatagtgagttaatctctctggccttctacgtgtccatgtgtaaaatgagaaatatgaactaaataaaatactgttaaaactyttcagggacataatctcttcaaggatctgatggcagccacattttctatctctagaaaaatagtacctgtggtattgcacaaaattgcaggggcttcct

SEQ ID NO: 828138 - DNA, 512 bp, Homo sapiens
gttggtagatcctgtgatttttgtcaccaataaaaatattctatttttttaataccattgatatagaaattttctcttggcatctttgccggacttgcagcaggggcaccccatctatcgacctgctgcgctcagccacttgcaggagggaatacatgagtgaatgagtgtgggatctggcccgccactctgagagccaacacagattttctttctagggcttcaacctgaagcttagaattgagtttagaacaaaaaggtgcctcagggagtgcagggattgatttaaattaagtcgcaggtggccctggctaaatttgcagccagcagccagcagggctgctcctttgcttcctccttgtcataagccaaatgccaaagtgaagctgtggatctgggtcctyctcaaacaagagagagaaaagggagaattggagagctgacctagtaagatgctttccaaaaggaaaaaaaaaaaaaaaaaaacaacttctctcatagaaaatctcctt

SEQ ID NO: 828139 - DNA, 613 bp, Homo sapiens
ataaggccacaaagatgagaaacaatcaaggcaaaaatactgaaaactcaaaaagccagtgtgcctctactcctccaactgactgcatcacctcaagcaagggtacagagctgggcagaggctgacatggatgaattgaataggcttcagaaagtgggcaataataaacttcactgagtttaaggagcatgttgtaagccaatacaaagaaggtaagaattacgattaataaaagggggctgataactattacagtcaatttagagagaagcataactgacctgatgaagctgaaaaacacaacacaagaacttcacaatgcaatcacaagtatcaacagaagaacagactaaggggaagaattaatatcagagcttaaagactatctttctgaaataagacaggcagacaacaatagagaaaaaagaacaaaaagcagtgaacaaaatctccaagaaatatgggactatgtaaaaagactgaatctatgactcattggggtacctgaaagagatggggagaaagstaccaagttggaaaacatactttaggatatcatccaggagaacttcccaaacctagtgagacaggccaacattcatattcaggaaat

SEQ ID NO: 828140 - DNA, 584 bp, Homo sapiens
agcagcacaaatgaatctagcctgcagagrtcagaagagaacattccatggttgaggcccaataagaattagtcactggggggttccactttataaaatactatgttgtaaaagtttttgaaaacttactggaaacactaatctttgctggcaacaacagttacttgttctccatttataatccctgagataaaaggtgtgtcatataggagagaatgtttatttttcatttattcaggacttattctctgttaaacacttaacatatattaaatctaatcttcatatatacccccattttacaaatgagaaaaccaagaccagagaggcaaggcccatgctctagtattaattagtaattgatgggcctgggattccagccaaggtaggtctgactacaaattaccatactgtttttagtttgccatgatacattgaaataaatggtggaatggtagagaatggtccagacctacaattactgcagaaatgtgaatgactgatctttgctgaatatttcaatgcctttatctcccctttcttggcagatttatttacaataataggaattgtctagttttaag

SEQ ID NO: 828141 - DNA, 584 bp, Homo sapiens
agcagcacaaatgaatctagcctgcagagatcagaagagaacattccatggttgaggcccaataagaattagtcactgrggggttccactttataaaatactatgttgtaaaagtttttgaaaacttactggaaacactaatctttgctggcaacaacagttacttgttctccatttataatccctgagataaaaggtgtgtcatataggagagaatgtttatttttcatttattcaggacttattctctgttaaacacttaacatatattaaatctaatcttcatatatacccccattttacaaatgagaaaaccaagaccagagaggcaaggcccatgctctagtattaattagtaattgatgggcctgggattccagccaaggtaggtctgactacaaattaccatactgtttttagtttgccatgatacattgaaataaatggtggaatggtagagaatggtccagacctacaattactgcagaaatgtgaatgactgatctttgctgaatatttcaatgcctttatctcccctttcttggcagatttatttacaataataggaattgtctagttttaag

SEQ ID NO: 828142 - DNA, 581 bp, Homo sapiens
gcctcccaaagtggtaggattataggcatgaaccatgatgaccagctggataaattgtttcaggaagggttgagatgatgttgaacatcatgccctccacatcaatttacggggaaaaaaattcatcttgtttctgccgattcaagaggactgacaagagcagaaacaatagccaacactgtggtcatttcaactggttcagcttacaaaattctgactgaaaaattaaagttgagcaagctttccactcaatggctgttaaaaccctttgcacccagatcagctgtagacaagagcagagctttggatagaaagtctagacaagtacgatcaagatcctgaagcacttattcgaagaactgcaataggaactgaaacatggctttaccagtacaatcccgaagacaaagcacaatcaaagcaatttagctgggcacagtggcgcgtgcctgtagtcccagctaccagggaggttgagcctgcagtgagrcaagaccgcatcattgcactctagcctgggcaagagagccagatattgtctcaaaaaaaaaaaaaaaagggtactaagaggtcaaagtggc

SEQ ID NO: 828143 - DNA, 634 bp, Homo sapiens
tattaggacaagcatctgattttttaaagataactaaaggtctcctctacatttaatgattgcaaaaaggaytaaatgaaacagcatccatgaaaactgccagaccaagccaagcagataggaagcactcgataaacagcataaaaaattaaatatctagaaatggctcgtatgaactataaaacaaaaaataaaattttatcacttaagaattggtacaaggttgggcacaatggctcatgcctagaatcccaagactttgggacaccaaggcaagaggattgttttaggccaggggtttgagaccagcctcggtaacttggcaagatgccatctctccaataaagaaagaaaaaaatgggctgggtgcggtgcggtggctcacgcctgtaatctcagcactttgggaggctgaggtgggcagatcacaaggtcaggagttcaagacaagcctggccaatatggtgaaaccccgcctctactaaaaatacaaaaattagccgggcatggtggcgggcgcctgtagtaccagctactcgggaggctgaggcaggagaattgcttgaacccgggaggcggaggttgcagtgagccaagatcgtaccactgcactccagcgtgagagacagagcaa

SEQ ID NO: 828144 - DNA, 548 bp, Homo sapiens
taatgttaaaagaaaattggaggcatccaactttcactgaccaatttaagaagccagtgttaacttacacttgcatttctcctcttaaggcttcttacaggaataatcatcttgctaatcatcaatgctttcaaagatctcgatagctttccacaatcccccctccaaaaagtagtatgtaaataacccaaagatgataggatactaaaggatctgattaaagttttttgggaaaggagagggagattagaaaagctgctttttgggactgcccaaatctctggctagtaaaatgctaaataattattccttttcatacctctgtccttatttctgtctacatcacccccaaattattattatttgtttaagacacggtctcactcccatcaccctggctggaatgcagcagtgcgatctcagctcactgcacctcaacttcccaagctcaggtgattctcccacctcggcctaaccagtcgctgggacgagaggtgtgcaccacyatgcctggctaaatttttaaatttttagtagagagggggttt

SEQ ID NO: 828145 - DNA, 611 bp, Homo sapiens
atctcaagtccaatgggacacatgcagggaggaaaaccactcagaggaagcaacattcatcctcccattgcattaaaaataaatacaagaccaccattcattcaaataactgggcycattgtgtattcaaataaccactgactgaccttctcttccacttcatcgagtggtggagaattagcagaagcgacctggccaactggtcattttgttcacatgtacataggcccaacctcaaggacattggggtggtatctgttttgagttattttgaaagcaaagcctgaaacacacgtgtgaatgcaggtagcttccatggaaagtaatcgcaggaagcagtgggaaacagaagaccaaaagggaagaaagtcaacatggactatgttatcgggctggctactgcagtgggcaacgcggctcagctctgctggagggtttctgaggaactggaaagaatacgcctcatagttctctctcccaagggcagaaagctaggtagttcccactgacttccggctccccttggttgagggtccccattccagggctgtgtgtgcccggacaaagctactatctgaggcttaggagaaagtcctggggctgaagagaga

SEQ ID NO: 828146 - DNA, 633 bp, Homo sapiens
aaagcaaggcttggagcagcttttttttttgttttttccaaagctatgttttattgtaaaaatttattatttaaaatgtttgatatgatgccaggcaagcaaatttacatatccatccttccaaagttattttttgtcttttgggggggttttttttttttttttttttttttttttttggtaatagcacctaaaatctactctctgcagctttttcaaaggcttccagacttggccacttcaaaggatctttagagaagagcacatgccacaacaccagggcttacattttcaccaagtttgtcgatttctaggtacgtcttgatttaggtttctgaaagggaattccttcttcctccctcccttctactcttccttccttttgtttctttcaaaaaagtaaaaaagagcagagtgatccaatggcctgagcattattttgtccttgctacttgatattggatcactggtgccctgagtggctgaagtgggtggttacccaattctgctaatccctcccacttgtatttgaatagggaaagttattttaattagtgcacttaatgtcagtcaataaagagaactaagcattcccycaaacactaacacacacccacacacacacacagagta

SEQ ID NO: 828147 - DNA, 581 bp, Homo sapiens
tgatctcagagggccaaacactccactctcaggttatgctagcactgtcatttttttgtacatgccacccatgaagaggcatgaagctcaattgcacatgtgcacgtttctccattcgtgcctccttctgtagcttactgaatatgtgcatttggtcacctggttcagcataaatcccttttacattcttcccaccttctaagtgtctgtttctagcttctggccagaggctacgcttcccaacctgtcagaatggctaccctgcaggatgcaaccctgtatgagaaatctctcctttccaaaaatatgaacctcattattcagttaacactgcccagcaggcagtgtggatctcaacacatcacttcaacccttctttggctcttcagataaaccctctggtcttcaccacagccctccaggctcctgctccaagttccttttgtgccttttttctctttttccttcatgcctctgtctgttcctctaayggttttttttccctgcccctgaggaccttggtttgcaccagcccctctacccagacagctctctgtcccgtagccacctgtgcattactt

SEQ ID NO: 828148 - DNA, 581 bp, Homo sapiens
tgatctcagagggccaaacactccactctcaggttatgctagcactgtcatttttttgtacatgccacccatgaagaggcatgaagctcaattgcacatgtgcacgtttctccattcgtgcctccttctgtagcttactgaatatgtgcatttggtcacctggttcagcataaatcccttttacattcttcccaccttctaagtgtctgtttctagcttctggccagaggctacgcttcccaacctgtcagaatggctaccctgcaggatgcaaccctgtatgagaaatctctcctttccaaaaatatgaacctcattattcagttaacactgcccagcaggcagtgtggatctcaacacatcacttcaacccttctttggctcttcagataaaccctctggtcttcaccacagccctccaggctcctgctccaagttccttttgtgccttttttctctttttccttcatgcctctgtctgttcctctaacgsttttttttccctgcccctgaggaccttggtttgcaccagcccctctacccagacagctctctgtcccgtagccacctgtgcattactt

SEQ ID NO: 828149 - DNA, 556 bp, Homo sapiens
cctctcctctattaatgatctctcaggctgttgaagtaactcctaggaaaggtttctccatttagttcaactccaactcttatgaaaccctagcactgggtaygacccaccggaagccttgcctggtgggagggggctgctccagcatgcctgtagcatgtgtgtggtacatgcacatgttcatatgtgcatgtgtgtatggtctgcatgcatgtgcatgtgtgtgtgcacatgtgtgcacttgtgtgtgtctgctttgtagcacacatgctttggttctggcagggcctcttgtctttgatgcaaactgtacctagatttctcctacatcagcctcttgggtttctcccacaccccagtcacctcaacgtgatcgcaaagaaaaactggtcggtataatggctgtccaagatgttgctggtgaccttagatgaaaccctgagtgatgcggtcgtagggaagagtgaagtctcttgaatccactccatcatcctcacagatcagctcccccatcttaggcaggtcactgtctttaagcctcagttactgctgtgca

SEQ ID NO: 828150 - DNA, 574 bp, Homo sapiens
tgcactcattgttcttgattagaatggaatgggcagtgagtaacgtatacaggaatgattatatgtgtgaaaaagataatctagattccaaaaataaaaatcacacttgtacagtacaaccatggggctgctcacacattgttcaagatcataaaacaatcttaggccattgataaagagaaaacaatcttgtgttgaaaaaaactatgaagaaccaactctgactcacgtaggactttttgctagaaatttagaggaattgtaagaaataaaatatttattgtaaaggcatagtacatatttttccatgttataagtagctgaaaatgtatagctatttaggtatctgacttctttttctagaaccagttcaagagatgttgatgttttagaattataggaaacgacacagatttagattctaaatttaaattttactaagaatctaataaagaagatyaccattagaatccaggagttctcattgtactcctaggtctgatttttgaaagtcaaaagctctctggcctgaaagaaaaactggagcttcccagttttaaattccatgatcagt

SEQ ID NO: 828151 - DNA, 352 bp, Homo sapiens
agtgacccgagatccatcttgccttctagcaatttgtcctcagccctcaccggaggtcacaatgaccagccattctcctgcccagactctttctacaaggacaatttatgccacarctgagaccccatgtttttgtgtaaaccctttcatcagagcacgcactgcccaagacccacggaaggcccaagtctaggtggtctcctgaggtccctgacagaatacactgggagtgcttctctctggtaaatcttcattgttctttcccatcaatcggtatgacacagccctcaggaaggggaagggcatctgatttgccattccatttctttttcctcagaagaaagattcctaa

SEQ ID NO: 828152 - DNA, 603 bp, Homo sapiens
gccacgtacatctcttgggtaaacgtttcccaaactgaggaataacaagagcaacgtttggaggcagaaaagtatctgtcacattcaaagaacagcaaggaaaccaggtggctggagcagaggtgaataagtgcgaagttctggaagctgaggtcaaaaaggtaagtgcagattttatcacatagggctttagagccattccaggtgccttgcttttactctgaagtgggaaactaccagaggcttttgggtataggagtcgtgtgacctgactttgattttaacagaatcactccagctgctctgttgactatgaccaaaggaggacaagggcagacataggaaggccagtgaaggttgcattaaatgcaatgaagtttgactagatatttatctgccccagcctctggtccttaagtttatacatctaagctaagatactgttagcggaaaagaaggagcaaagcaacgtgcaacaaatctatstcattttttggcaacaagtcataaaaatttttgaggggtaaagagagaaaatattaagaagtgttctccttcacctttctttctctctctttctagccaagctttccatgctcacct

SEQ ID NO: 828153 - DNA, 469 bp, Homo sapiens
aagaattccctttgccttcctccagcccctgtcagagccaagtcagcacacattaaacgggccagggcagactaaatgtgtcctctggacamtgcaaatgtctcttgtggtatcttaagactttaaaaactgtacagggagctgtggcttagctcagtcctgcttcccattaggataaacacacccctcagtgtagggacccacgtacagctccagaaatagcctgcccaccagagaaaatgcactttatttgacaggcttcccacagccatgtcattatcatataatctcttttatccaccccttttccctgcctggaactcaaattgcatctttaaaatgtctaagtagcagtttggtgatcttcagcgatgctatacttgattctgagctgggaaaatcagcgtcaaaggagaagtctgggtgaggggcgagaggagcgttttacatccaattatttttctttgaa

SEQ ID NO: 828154 - DNA, 416 bp, Homo sapiens
aaaggagatggtatcagagactaacggaattgaccaaggccacacacttagaaagggctagagccaggatttgaatcaggtgaagtgtggtgccaaagcccacgatgtakaaacactgcctctgcagtgagcctttctaacttcgccccaccttctgagaccaagtgcaccatagtgcctgccttgggccaggtacacaggatggggcctgtgggctttggtggaccacagcaggccaaatgcatgattctggccacattggcagcaaactccaggcaatggagccagctgctggctggggtcctccttgggacactgtgggaagaagtaaagacctggttggagaataaagacccacaggcttactgagagatgacagaacttcactaaggtggaattttaaatttggacaagag

SEQ ID NO: 828155 - DNA, 582 bp, Homo sapiens
ggcccttccaccatcctcctacagggtgctgacaagactcctggagatgtacgggaggcctcatggtactaagaaccacagctaaaaaccatggcagagcagggggcttggtgcatcaacaaggaagcatcctctgggcagcaaatgagctggtgggaaaagagacgctctgcagtcctgacacccagcagggaggagcagggaggagcagggaggagcaaggaggatcagggcctgctgactacatttgggtcctgaggagaaaggtcaggagctactgcccagggtgtcagggaagacagaatagattcaatgcaggaaatcagtagccctttggtccccccttttcccccctggggttccaccacataccactgggtcataaatgacaaggtgcaattacagcaaagtgctaaagttacaagtttgttctaaacactcttcaacaaagaatattcagtgaaaaggaaccccaggsagttataaaccttttttgctgtgtagaaaccataaggtttccatccaagaatgtgttgtctgtttgaggctggcctttattctttcagacgggtgccagtggca

SEQ ID NO: 828156 - DNA, 535 bp, Homo sapiens
aaggcatcatcatttctcaaattgggraaacacaggcatggaggggcaaaggggttttcccaaggcctggggctggtgggctcgatgccaggagaagactcagggacgatgctttcggctggaggacaggatgagtcaggcccccaaggtgttttccccacatggtttcagttcttaggtcagggtcttggcacctgaaggaaaacctggtctaggccatgtggaaatcccgagctgctgcagcatctcactccgatcgggcatgtctgggaggcagcaggttgcaaataagtgatttacagcatgttccctgatgttttacattttcatcatttcatgttgcagtcctatctccagtaatggtatctgcaaaggagtgcagctcccagcctgctatctgcaggagcccgagtggggaagcctgtgtagtctcaggtctcagccttgactttcacggtgtgactgtggtgtctcaggactctgcgacccaggatcatcattgtgaccatcttcctagtcttcactgcttccttta

SEQ ID NO: 828157 - DNA, 605 bp, Homo sapiens
tggtgcaatctaacatgttyctgtgagctctgtatttcctgtaactgggtggttggaatgttcacatttttctcaaggtggctcctgtgcccgtgccactcacaaatacaggtattttcctagtgggtgcgctactgccttcagctgggtcctcgtgttgacctgccttgtagacagggcacacctgcgggaaacgtcacgcatcagaggagaagcacttccccgggcccgggctctgtcctggtggccccatttggcctccctgtgtgtccttcttccaattgggctagtcgtcctccagcttaagcaaaacatctgtccttttgtggttttcaatttgacactaagaaacttgacatttacacagatgcaagttttcaaagcaggttccaggaattaaagttattcttaatcaaattagcccttgaaacaatccggaagctcttgtgtctgcagctggcgtgctgtccatccacactccccagatctacagggggcaattcacacacagcccttgcagcggcccccatggcttgtccaaaagccaaattcctgccattccaacggttgaggacaaaaaccacagagacaaaggtagagaacaa

SEQ ID NO: 828158 - DNA, 619 bp, Homo sapiens
accactttccccatttagacgtgaagaaactgcggttcagagaagttacttctctgcagaagtggcaggactgagattcaaaggcagacatgtctggagcaaagccttktcccaggatatgccccttgtcttcttgatccgatagtccatgagatgcctgagggctggggcgtgtctcactcgtcttgcacatccctgtctccacctagcgtgcagtaaatgcatgaatgaaggattgcacgaatgaatggggccagctcctctgagcctcagtttctctgtctgtcaaataggctaacaagtccctgtctgcttctctttgatggggcttatgggaatcagagaagacagtggctctgagtgcctaaagtgatagctgatgtgaggcagggagttccctccaccttcagccttcctttctcctgtctccaccgctcttcagaacaacactgggcagagatatgagctccctcagggtagttggtttgaacatctcagggttgatccctgatgtctcacaataaaacagcactggatttcccccaaagctctgggagtctgtagctttgtagctctggctcaatctcttttcttctaaaagtgcatgacattaggaatc

SEQ ID NO: 828159 - DNA, 343 bp, Homo sapiens
cagcagccctaagccaaaagtgggcaggctcacctgcaggggatcagagtaacatggcaggaagtaagggtgaaagccrccctggaaccgtgcctctctgccccctcatgtcactcgggtgcactcctccctcacctcacttaggcagcggcatgagttcaatgggagtgatgtcctgctccctctgctgcctctttttagtcttggggctaccataacactttcccttccccagccctgccaacctggtgggccattgggcttccctctcccagggtcctggggacagacctgtcctgtatcatactcacagagagacccttttttttctccaggacttgag

SEQ ID NO: 828160 - DNA, 610 bp, Homo sapiens
tggaggcctcttttttgcctggtgggtcagcaggtcctgtctgtacaaatgatgtttactggtccactcctccaggtttataaaaatgagcattttctctgtactgacaataatgaaataaggaaactgaggcttggagaggcaatatagccccgcccaaaatcacatgggtaataagtcagagaactagaattcaaactccaagtctacctcctggacccaagctcttaacttctgtgctatgaactaataccacatggagaattttgattattttcttagcatttaccaccatataacttaatatgtattatacttatttatcttgggatgtcacttctgggattaggtttcaaaaaggactgtgaaactatctctcattttctttttctgtctcttcctctttcccctccctagccctggagtaagccagctgcttcttatgaagaggtgcaagtggacaagaactgatgtctccagcccacagccagagaggacctgaggcctgccagcagccgtcgaagtgagtttcaaagaggattctgaagccttgagagagctgcagccctggctgacascctgattgtatcctcgtgagaggcctgaggcc

SEQ ID NO: 828161 - DNA, 492 bp, Homo sapiens
gcctacattggtccaggtatgccagctgaccacagctcgcctctgctctgactccaggatgctcatgttctaacaggtgttaagtattttgaataccaccttgcaaacatctytggaattgtggccatcttaaaattcccgtggggttgggcgcggtggctcacgcctataatcccagcactttgggaggccgaggcaggtggatcatctgaggtaaggagttcgagaccagcctgaccaatatggtgaaaccccatctctattaaaaatacaaaagttagctgggcatggtggtgtgcacctgtagtcccagctactcaggaggctgagacaggagaattgcttgaacccaggaggtggagcttgcagtgagccgagatcgtgtcactgtactccagcctggaagacagagcgagactccatctcaaaaaaaaaaaaaaaaaaaaaaagtcccttggaatatgtcacttcacacaaccaatttggatgaaa

SEQ ID NO: 828162 - DNA, 378 bp, Homo sapiens
attctaggtacttcatagaaatggaatcatacagtatttgtcattttgtgactgatgttctgtcacttacgataatgtgttcaaagttcatgtacrctatagtgtcagaacttcattccttttcacataatattatgaaataatattcattccttttcatataatattatgaaataaaatgtgttctatccctacaatagaatattattcagccataaaaaggaatgaagttcttctatcttctacaatattctattgcagggatagaacacattttgtttatcattcatcagtgacaaaagcttgggctgtctctgccttttggtgattgtgaataacgctgctacaaacattagcatacaagcatctgtttgtgtc

SEQ ID NO: 828163 - DNA, 530 bp, Homo sapiens
cacatatttgttcattaaacaatagtaatgatcttaataaggtactatgcatatttgatgagttttaatgtaaagcatatttcctaatatacaaaatatascaaaagtaatctttcaattcgagtaattttcttccctagaatttattaagagcagaaacttccaaatgaatagaaatgaattatatataaatgattttttttctggaaaatcccacgcaaccaaaagagttaatattgcataaaaaatagataggcaaattaactgtggtacaagcattaaaagtatataaatgctggccaaaaaagctaaacagcccatggaaaaggacaactgtaattcaacaaatttaaattctaggcctaagggtaacaaaaatatagaccctaataagatggttccaactcaagttttcagaggaataactatttctgtggaatgactacaaatagtttctaatgctattatcaacaaaataataaaagcctggaggcaagataaaacgcacatcaacactttatattttaaat

SEQ ID NO: 828164 - DNA, 530 bp, Homo sapiens
cacatatttgttcattaaacaatagtaatgatcttaataaggtactatgcatatttgatgagttttaatgtaaagcatatttcctaatatacaaaatatagcaaaagtaatctttcaattcgagtaattttcttccctagaatttattaagagcagaaacttccaaatgaatagaaatgaattatatataaatgattttttttctggaaaatcccacgcaaccaaaagagttaatattgcataaaaaatagataggcaaattaactgtggtacaagcattaaaagtatataaatgctggccaaaaaagctaaacagcccatggaaaaggacaactgtaattcaacaaatttaaattctaggcctaagggtaacaaaaatatagaccctaataagatggttccaactcaagttttcagaggaatmactatttctgtggaatgactacaaatagtttctaatgctattatcaacaaaataataaaagcctggaggcaagataaaacgcacatcaacactttatattttaaat

SEQ ID NO: 828165 - DNA, 567 bp, Homo sapiens
ccactgccccccctgcagaaatgccctccatcctcccctgcagcctctgctgtgtctgagatcccactgccccycctgcagaaatgccctccatcctcccctgcagcctctgctgtgtctgagatcccactgccccccctgcagaaatgccctccatccttccctgcagcctctgctgtgtctgacatcccactgcccctcctgctgcttccaccctggcaagcttgataggaccagagcttgtcatcagcagcttctgaaattgctaaagctcatggaatgcagtctgtcccataatttagccccgattgaaagctgaagtgtgttgagggctgagggttgtcctccttagctgctgtagtgggcccttccctggctggcttgctgctggcctgagattccttctaaccccctcctggacacctactgggagaacatgaaggcagcctccagttctctttgaacacagttcaggaaaggtggaaggtaacagccttcctttccatctggttaggctgatctctctaagaaacactggctggaatgaaagaagggcagcccctacca

SEQ ID NO: 828166 - DNA, 604 bp, Homo sapiens
ccatcattcacagtgatttacatgaagyacgaatctggccagattcagatgttcaattttgtagcatattcaacgatttcagtattttctaacctgctttagacttacctagttttcttcgaaactagtgtccagtgaaaagctggccgggcgcggtggctcacgcctgtaaacccagcactctgggaggctgaggcgggcggatcgcctgaggtcaggagttcgagaccaacctgaccaacatggagaaaccccgactctactaaaaatacaaaattagccgggggtggtggtgcatgcctgtaatcccagctactcgggaggctgaggcaggagaatcgcttgaacccgggaggtggaggttgctgtgagccgagatcgtgccattgcattgcactgcagcctgggcgacaacagcgaaactccgtctcaaggaaaaaaaaaaaaaaagtatataaatatctgatgggaataatattctgaggatgccaaatattttgtcctcctcaatatcctggttcctagttgtccctcagttcctaggttaacagtctcacctgtctcacctgcaggcttaatgggggtctttcgtaatgtagaaagg

SEQ ID NO: 828167 - DNA, 839 bp, Homo sapiens; identical to SEQ ID NO: 824381

SEQ ID NO: 828168 - DNA, 583 bp, Homo sapiens
cggcctcccaaagtgctgggagtacaggcrtgagccaccaggcccggcctgaatccctgttttcaattcttttgatcacacaccccaaaatggagtttctgggtcaaatagtaattatattttttgaggaaccactgtactgtttccatagtggttgcaccatttgacattcccaccaacagtgcacaggggttcctatgtctccatattctcatcaacatctgttattttctgcttttttgatagcaactatcctaatgggtatgaagtggtgttttattatggttttgatttgtagttcttcaatgattagtcatattgagcatgtcttcatgtgctttttggccatttgtatatcttctttggggaaacatctgttcgaatcccttgcccatttttgaattgcttgtgtgtgttgttgctattgagttgtaggagttctttatatattctagatattaaccccttgtcagatatatgatttgcaaatattttcttccattctgctggtttccttctcactctgttgattgtgttcttcgatgcacagaacttttaaaacttaatgtagtccagtttatca

SEQ ID NO: 828169 - DNA, 638 bp, Homo sapiens
cattctccgatgatattttcttgctcataggttctgcgtgggatgcacatttgccctgcattaaatcaggcctcatgtcatcagtgtgctgagtcctgtccagtgctcttcccagcctgctcactccagcactcagaaagtctctgcttgttctagcctgtctttcgcacctctccaacatgtgtgaatctcccttttgaatagagagcaaaccggcgtcaggccagagccttggcaggcagaatcgcaagttggctcgctggctgtttcaggcgctcattgtgcttgtgttctcaggtacctccgatggcaagtggtactgcctttccgctttcttgtcgggatccatagatacatttgtttaggtttataaaagggaactgaattgaaagtgtgtatgaagtaaacaatagcgtaggtggtatgacaccctgacaaaacacacagatggcggaagtgtggggatgccatttgacagaatgaagccagaatgcagcccaccatccggttgctcccaccctaacctgctctgtcaaggtgccctcccatgggccctccatagccccatgtgctggggatggtatgcagccctgccttgggctttccyacctgcagaccttcttcctggactgcccttc

SEQ ID NO: 828170 - DNA, 607 bp, Homo sapiens
tttaactgtatctatttccattaatcaaacttgcttaactcccctataccccctactctttctggataactaccattctactctcctcctccatgagaacaagatttttacctcccacatgtgattttttttctacacttggcctatttcatttaacataatggccgctagtgtatatatatatatgtttacaacattttattcatttatccatgattgggcacagattaatcccaaaacttgattaccgtgaatagtgctacagtaaacatgggagaacatatatgtctttgatttactaaattcctttatttagggtatatacccagcagtgagattgttgaatcatatggcagttctatttttagttctataaaaaaaaaaaaaaaaaaaggaggggtaggggagaggtcaagacggcctaatagtaacagctccggtctgcagttcccagtgagatcaacgcagaaggtgggtgatttcttcatttccagctgaggtacccagtttatctcattgggactggttaggyagtgggtccaacccatggaggacgagcagaagcagggtggggagttgcttcacccgggaagtgcaaggagctggg

SEQ ID NO: 828171 - DNA, 619 bp, Homo sapiens
atccaggagaacttccccaacctagcaagaaaggccaacattcaactcaatacagagaacaccactaagatactcctcgagaagaccaaccccaagacacataactgtcagattctccaaggttgaaatgaaggaaaaaatattaagggcagccagagagaaaggtcagtttacctagagaggaaagcccatcagcctagtaatagatctctctacagaaaccttacaaaccagaagagactgagggccaatattcaacattcttaaagaaaagaattttcaacccagaatttcatatccagccaaactaagcttcctaagcaaaggagaaataaaatcctttccagacaagaaaatgctgaatgattttgtcaccacaaggcctaccttacaagagctccagaaggaggaattaaatatggaaaggaaaaactggtactagccactgcaaaaacacactaaaatataatgaccaatgacattataaagaaattgcatcaactaatgtgcaaaataaccagctagcatcatgatgccagaatcgaattcacacataacmatatcaaccttaaatgtaaatgggctatatgccacaattaaaagactcagactggcaaat

SEQ ID NO: 828172 - DNA, 619 bp, Homo sapiens
atccaggagaacttccccaacctagcaagaaaggccaacattcaactcaatacagagaacaccactaagatactcctcgagaagaccaaccccaagacacataactgtcagattctccaaggttgaaatgaaggaaaaaatattaagggcagccagagagaaaggtcagtttacctagagaggaaagcccatcagcctagtaatagatctctctacagaaaccttacaaaccagaagagactgagggccaatattcaacattcttaaagaaaagaattttcaacccagaatttcatatccagccaaactaagcttcctaagcaaaggagaaataaaatcctttccagacaagaaaatgctgaatgattttgtcaccacaaggcctaccttacaagagctccagaaggaggaattaaatatggaaaggaaaaactggtactagccactgcaaaaacacactaaaatataatgaccaatgacattataaagaaattgcatcaactaatgtgcaaaataaccagctagcatcatgatgccagaatcgaattcacacataaccatatcaaccttaaatgtaaatgggctayatgccacaattaaaagactcagactggcaaat

SEQ ID NO: 828173 - DNA, 493 bp, Homo sapiens
tacccgaatggaatggtatggaatgaaatcgaatggagtggcgtggaatgaaatggaatggaatggaatggaatcaattcctggggaaggaaatggaatgaaacggaatggaatgcaattgaatggaatcwacccgagtggaatggaatggaatggaatggaatggaatggaatggaacggaatagaatagaatggaacgaaatggaatcgaatggattcaacacgattggaatgcaatggaatggaatggaattgtgtggaatggaatggaatagaatggaatggaatggaatggaatggaatggaatggaaactacccaaatggaatggaatggaatggaatcgaatggagtggaattggaatgaaatggattggaacggaatagaatcaactcctgtggaatggaatggaatgaaatggaacggaatggaatggaatggaatcaacccgattggaatggaatggaatggaatggaatagaatggaaagga

SEQ ID NO: 828174 - DNA, 529 bp, Homo sapiens
ggaattgaatgtacagcaatgaaatgcagctaaatggaacggattggaaagtaatggaatggaatgcaacctagtggaatggaatggaatgyaatggaatggtatgaaatggaatggaatggaatgaaatggaatggaatgtaaagtaatcaacactagtacaacggaatggaatggaaaggaatggaatggaatggaatggaatggaatggaatggaatggaatcaaccccagtggaatggattagaatggaatggaatggaatggaatggaatggaatcaacctgattggaatggaagggaatggaatgcaatggaatgtaatagaatagaatggatcgaaatggaatggaatggaatcaacccgattggaatggaatggaatggaatggaacggaatagagtggaatggatcgaaatggaatggaatggaatcaactcgattggaatggaatggaatggaatggaagggaaaggaatagaatggaatcaacccgagtggaatggaatggaatggaatggactcaac

SEQ ID NO: 828175 - DNA, 614 bp, Homo sapiens
atcagacaaacctggttcaaagtgattattcaacaaatgtaagctgttatcatcttgtcctccatcattcaaatatgtcctgtatagatcttccattaatttcaaatatctaatgatctacaccatcaaatattatgaaggtgatgtttagcaggtcattggctaagacaggctctacctcagtctctaatagagaaggaaagacaagtagcatttactaacacccacagtatgcttcatattgttgccagaaatttcaaatgcaccatctattgatgcatggaatcctttcaacattcttagaaggtgagtgttatcttaacttttcattttaggaaaatgaagctgagagtggttaagtatcttgcttaaggtaatattcataccatggggaggatcattatagttgaccagttaaatacgtgaattgaaggtaatatcacagatccctgctactcaaaatgtggtccactgaccagcatcgctggcattacctgggagcttgttagaaatgcagcgcctcaggcstcaccctgtccctacggaagcagaagctgcatttttcacgtggatctcctggcgatttctgcgaacatttactgctgttatagaag

SEQ ID NO: 828176 - DNA, 585 bp, Homo sapiens
agatatcagtgaggctcgtggaatgtggaaataagggactgtgtggcctcagggcagaatgtaatatggtggggtctagggtctcaaaatggtgccatgcttcagcttcttggaccttggggaatgtgtgggacccagcacaaactccctctctgaaacaatgccatcacatggactgcaggaaactcagggtccacatgggctgaggggctctcccttggctggaattgcagaattcatggtgaaactatagactgctggggctctcttgcttacctttctgtccgtcacaatagtgcttcctcctggctctgagtcaattccagccaggttggctgctttacttccctctccatctgtgcctcagaggttccctgtcacttgcatgctgaattttagtgtctgtctctcttacaagctctattcatagtatggttacctgttcgctgtttggtccttatctgtggagaaggtgagtgyggtgagcctctattcagccatcgtgaagtcaagtttaaccaatttttttctctggacttccaatacatggtcagattatatttcatactttgtttcttgccagta

SEQ ID NO: 828177 - DNA, 551 bp, Homo sapiens
atgcaaactatgggatcacatgtcagtaaaacctcagacacattgtgacagttctggctaaagaaacctatagagtacttcacagtaaaatatgtcctcctctgttcagcctgggcactagttactgactgtgctcttactacttccatatctgattgttacctctattgtagggagtcttggacaagtttccctacttcctataaggtgtttctttttccttttatgggctatctctttagttttttactttctgtatttttgcatctccttattgcaccatatttttatttcagcatctcttcactgccataaataagagaaagtagaatgtttacttttctgtgtggcagtcaccatgctagacatttacaaccagtgtaaatcattgagttgcaccaaccatatcataaatgttgaccaattacagatatcattatcatttttgttctattattatttaattcataaaaacacyatgaaacaactgagaatattctcatttttccttagaaaacaaaactactgtattagtttgctagggctgccct

SEQ ID NO: 828178 - DNA, 614 bp, Homo sapiens
atttataggaaaataatctgaaagtctgcaaagatatatakatagatagatagatagatagatagatagatagatagatagatagatagatgctgactatagtactctttataaaaaaggaaaatgtcagcaaattcaatatacagtaatacagaattgtctgagtatatgatagaatttgtatataatggagtattatgcaaccttttaaatgaatgatataaagagctacagtacatagttaagtgaaaattaaggtattttcacatcatataatcatgtaatatatgattcccactttgtattctcatattattagattttattataatcatttctatccatctatcagtctacctgggaagctacattccaaaagtcagcaatactcaggctgcaaatgattttcattctcttatttctctattttatttttattatatttattttatgatataaaaatgtaaagccattttatgtcacaaaaaagaaaaaattaataagggccctgaaacaagaagtgagcactgagaaataaattttatgagattttgaaaaaatgttggatacccacaagtaaaaagtctagaaaaatccaagtcagacacaatccc

SEQ ID NO: 828179 - DNA, 606 bp, Homo sapiens
gtcaaataaacaataagcatctgagtactcccagttaaaaacctttatttactacaacatgaaatgcatgcaaacatgtgccatcttttataaagaaaggtgttttataaagttgagcgttgaatttaatttatatgtattgttcccacttttgtactgttcagtgatttttaatacaaacttttttatgtttctgagaatcagtggtgcttgacggctttcaactatattaatagaggttataacagtgcccatacattaatatagtctgtgttttatctaaactctgattgaatttagggagtgcctaaattctgtgttgctatacttgctgccaactacataaactttattaatttctttcaaaggctacctaacaacaacaaaatagggaagtatatgcaaatgacatattaagaaaaaaagtcactaatcataaaatctcttaagttataacatttttccttagtggcaaacaccataccgtgtaataagggaacatcataattacagcmccttataccacaataaaaaatccccaaaatgtgaagcttatatataaaagaaatttttactttgtatcattgtgacttgcaagaaaaaggt

SEQ ID NO: 828180 - DNA, 630 bp, Homo sapiens
ccatgccagctagcaggtaaaccagagactgacttgctgacatcttccttaccttattcctcaggtatacatcctaggcagggaaaatttacagaatgcatcccagcctgattytggaagaatgagaaagttatctgagggctcccaagggcctcctgtgcataccatctttatcttccaacttagaactaaccaaattcagtctttttgtgtaatgaaaaaaggataagctgggcacagtggctcacacctgtaatcccagcactttgggagaccgaggcgggaggactgcttgagcccaggaacaagaccagcctgggcaacatagcgagaccctgtctctatacaaaaataaagaagaaaaaaggatgcaggaaattagcaataggatagccaacaccctcactaaagcatcaatttccatatgatgttaagtaccaggtagaaatctctctgactttaaggagctttggacacaaaaacttttccttaaacaagccatttattttctaaacatggacttccactagttgtgtaactctcctagaattctagccaatatttaataattgttgccacacttttgtatttcaacttaagtattttatattattaaaaactaccaattat

SEQ ID NO: 828181 - DNA, 279 bp, Homo sapiens
aggtcatcaggagagaaaggtcaaggtctttgttggctaaaccatggcacagaatcagtaagccaagacaagtcgtgaaggtgggatgctgygccccatgacagggaagccaacctacttccgtgaattcctgagtactgcagcaggaagcacacacataggcacacacacacaggcatacataggtatacatatgggcacacacacacacaggcatacacacttgggacacacaggcacacacacagacacacaggtgtacacacaggtgcacacaca

SEQ ID NO: 828182 - DNA, 602 bp, Homo sapiens
tagcataacatcttcaaggttcaaccatgttctagcatatatcagaattgcattcttttttattccattgagtgcttatatcacattttatttacccttttttgtgtcgaagaccatttgggttgtttccaccttttatctattgtgattaatgctgcagtgaagaatggagtataaatatctttgttgagtctccactttcatttcttttaagaatatacttagggatagaatagatgaggttttttctatgtttatggtatagtattgtgtattttctatgtccaagattatggtaatttctttcttttttttttttttttgagacagagtctcgctctgttgaccaggctagagtgcagtggcaccatcttggctcactgcaacctccgcctcccaggttcaagcaattctgcctcagcctcccaaatagctgggactataggcgcatgccaccacacctcgctaattttttttttttttttgkattttaatagagacagggtttcaccatgttgcccaggctggtctcgaactcctgagctcaggcaatcgcctcggcctcccaaagtgacaggattacaggcatgagccaccgcgcc

SEQ ID NO: 828183 - DNA, 601 bp, Homo sapiens
cagacacttctctggggccctgggttctgtccrctgaagcacagctcctcaatatttctgtcttggggagtgatgtgttcaggccgccattctggccgacgtcatcgcccctcatccagcatttcctccagtgaccttgaagttttcatagccacagtggctgggacatctgtcttacagaaagactgttcttgtctttgcagctatcaaaagtagtatcttccagtccataaagcaagggctgccaatccgtaacatagacggtggcttagttgtctctccacccgcaatggagctcaaaggtgtgcagcagtccccgcggccccactcctcaaattcctccgggccacgtggggacagacggtgctgaaaagtgaagggtggatttgtagaggaaacacagccctcaggttcaccaaacatcattcaatctctccttctttcccccagaccaagctgtctctgcaaagaaaatccaccccccaggctgatggatgccctgtctggtccccagaaatcccttcgggcttccgtttctccacattcccagtgccctcctcctcttgcctctctccttggggtgcatttcgctaataaccca

SEQ ID NO: 828184 - DNA, 599 bp, Homo sapiens
tataaggtatggagacattctgactcttctctactcttctcttaccggaccttacttcctagcagtgtgggcccaaarggcttccttagttgtagtggctaacagcagatggatgtgggcaccagctcagttagctgacctcctccggatactacaatgtggtgagttcttataaggggggaattggcaaggccttccttgtgtctcaggtagagacatttgtgacatttcttctgacaagtacaggcttttaaagaaacagctccagttttattttatcaccgtagaagtatatgatacatagtagatgctcagttacagtctgtagcaaggtgaataagaaagcagaggctctactgtagattgtgtgtctctcaatagggagagtcccaaattggtcgacatacttttcattgccagggagacttaacagacaccagacagcctgcttccaggacttctttaaaccatctatttttaggaaaacaaagtcttgagctagtctgccagaacaatggagttaggaatttcttcctcttcacctttgctttctaaattaagagtctggttctatggaaagaaaacagactttgagttta

SEQ ID NO: 828185 - DNA, 540 bp, Homo sapiens
tgtgcataaataagcatagtttggtttttgttcaccaaacacttcagattattttttcagatatttagccctctctttgctttttgaagacattcaacataaagaaaaagaaaaaaatgcttttttaaattcatttacacttcaatcatccatgttgtttaatatgaactatttgatattcaagagcccttggggcttttcaaacatgctttggaaaaatctttttttttctcccctaatataagaagtagcatttcgccaaaggcaagtcatactgaatgccagggaagcagggtgctactttactctgaacttgtgaatcttgagtaatgtctaaattggggaaaagagagctcttggtagtttgttgtatgtgcatacatgggtaccttcgtcttatacagtcacaaatcaatctttataatctatattattttacagaataagaattttaatatcaatctaggaagaccaggatacagacataagattagcrtctttccttcttccatctctacccacttctcctcctcctcccca

SEQ ID NO: 828186 - DNA, 592 bp, Homo sapiens
agataaatttaaaaagttccagaggatggaaaaaaagaaaaagagatgtggagaaaagaagagtggagggcatgggcctttgtgaccaagtttaagctgctttctgtaactcctctttaatgcctcaaatgcctagaatctttaccagccctaagagtttaagtttccatcatgttatcctaaaattgcttgctttcttctacaaagacatagttccatgagtgcatgaatccttgtgtactgaaggccaactctctccctagaatattccagaattccctgtgcccctagttcataagtcttagcctgtcaatgacctaccttctcatcagaagttgatggactaactacactgaagagaagtctctgctattctgtgggttgctaagcccacagactccttgtgaaaggcccctcactcacaattggaatgggttacgacctgtgtctctgcctctctgggcacagtkgatggaaaaggggtgaaaagtcaccaagcagaagaaaactttgatttgcttatcaaatcaaagttgtccaggatctcatgaggtaactagacatgaaagcactgccaacaagggcattttat

SEQ ID NO: 828187 - DNA, 592 bp, Homo sapiens
agataaatttaaaaagttccagaggatggaaaaaaagaaaaagagatgtggagaaaagaagagtggagggcatgggcctttgtgaccaagtttaagctgctttctgtaactcctctttaatgcctcaaatgcctagaatctttaccagccctaagagtttaagtttccatcatgttatcctaaaattgcttgctttcttctacaaagacatagttccatgagtgcatgaatccttgtgtactgaaggccaactctctccctagaatattccagaattccctgtgcccctagttcataagtcttagcctgtcaatgacctaccttctcatcagaagttgatggactaactacactgaagagaagtctctgctattctgtgggttgctaagcccacagactccttgtgaaaggcccctcactcacaattggaatgggttacgacctgtgtctctgcctctctgggcacagttgatggaaaaggggtgaaaagtcaccaagcagaagaaaactttgatttgcttatcaaatcaaagttgtccaggatctcatgakgtaactagacatgaaagcactgccaacaagggcattttat

SEQ ID NO: 828188 - DNA, 619 bp, Homo sapiens
aaataaacagaatcaagaagacctagtattgagatatggtttggtgtttgtttttaacacatatgtgtactctacaagacacttgtgtcaatggctgggagtgacaaaactgaatgcaaaggtgtataggattcctctgcttcatttgggctgcagaaataaaggaaacataaatgacttctataagcccagttactctctggtaagccctagaacaacctaaacacaatccccagtgggcgggtatatggtggtgtctgatactatctaaaatgctcaaggccatacagaactaggtggatagagggagcaaatttggctcaccattagtggataccacatagtttcctctcaatgcttctttttcctcctcattaatttccactttttttctgcctgaggctccctgaactcactctttctctattcaaaagagatccactagacagcatcagataaactcccttgctcttggaatggagttcattttcagcatgasgaataattatctcaagggatacatcactctctgtggaatgccagaccacagaaagttgtgtgaggcaggacattttaagggcaagcagccctaaaattaaaattaaactaattaggtaac

SEQ ID NO: 828189 - DNA, 545 bp, Homo sapiens
acatcaaaatgattgaatttgatcatagttttccaaagaaaatgaaaacattgacaaagagacagtgattaaggctttactaataaaggcaaggacttcttgcaaatgggataattacatgatttcaaagaagtttgtcttacctcctgtttagagaaaacagctaaaattaactagaactaacctgacattctcaaaggatgattgaaagctgtaaatctgaaagctgaataatatgtattattgcaagaacaactttaaaaggtcagggaagtagttcaattaaaagaacagaggaatacaaagcaaagcagactcaagccagctactgccactcacctttgctgagtctcagcacagggatctcaggttgcagtgctgctgctatcaggcaactccccgctccgtggggtctgccttgctgccagcggactgccatytaaactgctttcctctgcagcctcaggtgtcacacgaagacatgaaaatgcccatgcaataagatggacttggttcccttacatcttttttaaaccccttgttat

SEQ ID NO: 828190 - DNA, 630 bp, Homo sapiens
gtgcatttgtgggtgtgtattcctggcttgctgaaaaataaagtaatatggacagagcctttgcttcatcaggcagaggctccctgttctgaagctggctgtcagcactcccccaactgccgtctcaagcagagaaagcaagggagggaagcttccaggaccaagccctggtgggcaggtagcagcccacctccagtgagacggagaagttggccggggccagcaatgaaggaccagcctgtctcctccccgagaactgaaaggcaaaaggcacccaaggctgggaagagagcagcagcctcaccaagtaaggaagacaaaatgaagcaatcagtgagggtttcctgggtctacacagggattgaaggaggtgagagaagggagccaaatcataccccacttccccatggatgcccacaggaaaaatctgtctaactccagccctcgggatttctccaaagctcttaagtttggtcattttccccagggccgaaagtttagttcaatggcaggctttcttcatctctcatttcctttctcttctctccctcttcgcacttttgagtttytattatagaagctgatttaagcaattcctgagggcaaaagtatttgagttatatagcaatt

SEQ ID NO: 828191 - DNA, 653 bp, Homo sapiens
acattctcctgagaagtcctccctcaaccatcggcctgaaatagcagcgagcctccccagggttgcctctgccttttcttgactctttctgtcaccttctatgcttgttgtctggtccccactagaatataccttctgtaagagcagggatttgggacagtgcctagaatagtacttgcagacagtaggctacgataaatatgaatgacggccccatgcagatggtagcccctctcgctcgaacgcttcacccagttttattttcttttcatcagttaccgccctctgaaggtatccacacacaaacatgaaactggaccaaagcagggaccccccgcacgcagaatagtgctgggctcgcgtaaggcacctcagtgggtccatcagctgatgcatggacagacaaaatgggtgtatccagacactggagtatcgtgcagcgaggaaacgtgctgagtgtggatggaccttaaacacaccatgcaagtgaaaaggcgtcacagaaggccacatacgatatgatcccatttctatgaaatgtccagaagaggcacattcataaagacagaaggtgactgagtggttgtcrggctgggtggaggggatagggagtgaatgcaagaaggatccttctgaggtaacggaagtatccg

SEQ ID NO: 828192 - DNA, 298 bp, Homo sapiens
aaggatctctactaacaacttcacacttataaattcaacagcttggaagaaatggattaatttcttaaaaaccacaaactaccaaaactcacccatgatgaagttgagtatcgaaaagccctatatccagwaaagaaattgaactactaatgatctacccaaacagaaatctctaggcccagatggagaactgtaccagtcatttaaagaataatttatatcagctttacatgatattccagaaaaatagaagagggggaatatatctctcaactcattttatgaggccagtattaca

SEQ ID NO: 828193 - DNA, 619 bp, Homo sapiens
cctttacagtatataccaccttcttcctgtataaaagcctatatatataatcctataccrtatatgctcctacatatagtccactctgctgccttcataagggcttgctcctctagcaatggtcccttataccccagcacctccagtgtgtctagcacatctccgtctattgttggttcaggacccggctctggccctctaatggctctttggctcaaacctgttcagtgctcttaagtatgccccaaggtttgaatcttgttttgcagctccctagtgatagaactttgtgggaaaatcacttcatttttttgttttttcgctcttctgaaaaatggggataacaataatacttaccttatttaatttttgagatagttacatgaattagtacatatacctcactaggagcagttcctggaacatagctggacacacttggctcagataagggattttctagcacctagccacgcaggtcagcaagtaaaaacaaacccaaggagagggacttttgttgccggaaattctgatagggaccccactcctatacagcctaaggagggcttagtgtccgttaggatttaatgtctgggaagcatttgggataaagtagctg

SEQ ID NO: 828194 - DNA, 599 bp, Homo sapiens
accatctcaaaaacaaaacaaaacaaaacaaaaaaacaaaaaaaacaaatcacctctaaaattagtagcctataatggcatctgtttattgttcatatttctgtgggttgaaatttggactggaatcagctgagtggtgcttctgctgatctcccctggaaccacttgacttgtcatctctctaagatggtcttttgtttacatacgtagcacttggtgctatcaacttgtatacttcaggccgtggcctcatctttaatacgctatactgagcttctttatacaatagtctcagggcagaattctaagagcaagagcagaagccagaagaccttttcaaaatgaaattcagaagtcatcacttctccattttattggtcaaagtcacaagaccagcccaagattcaagaggtgggtaaatagacttcacctcttttcaggaggggatacaaataatctgtagctttatttatttacttatgcgacagagtcttactctgttgcccaggctggagtgcagtggcrtgatctcagctcactgcaacctccacctcctgggttcaagcgattctcccacctcagcctcccaagctgggatt

SEQ ID NO: 828195 - DNA, 634 bp, Homo sapiens
ttttagcctgcttacttacaaatgctagcagagggaagaaatacgaaagccactcaaatggtatggagcacgtaacccacagcacgttaacactgtaagtcaaagagccaaccttcacacatgagtccatggaaatctggcaggaaatcagtctaaacctccacttacaatagctgtataaatagttttgaaatgttttgctttgaacctgtggaggtactttctacaatatttgtatcaggaggccactcctgaaccccagaaactgactttaggactctatttagggctatcatatgtaaagttcaagctatgtcttggccagcagtatcctttggcaatggtggaaaaaaaaaattggtttttaatttctccttcctcctaaagatgtcttaagatttaaatgaggcaagtgcctgtcacaaggcaggcattcaacaaatggctctttcacggtagcctgtaaaaaacacctcataaccatagggaacatggttaccaagggctttattctccctacgtggagaaaggtggggagggaaagcctcrgggacttttgtttctctctttatgacacaaagtggatccagaagagttcaatgaagacaatggtctctgaaacagaagagcaagc

SEQ ID NO: 828196 - DNA, 599 bp, Homo sapiens
acaaagtggatccagaagagttcaatgaagacaatggtctctgaaacagaagagcaagctagaaccttcccaatgataaaatggaaagtggttaaaraagaaactctccttaggataaggggcaggcagacaaggggccattagccactagaaattagaattcaggtcagacacagtggctcatgcctataatcccagcactctgggaggctgataaagggggattgcttgaagccaagagttcaaggccagcctgggcaacaaattgagaccctgtctctacgaaaaaatttttttaaaaaatcagctgggggcagtggactacaagtccgagctactcaggaggctgagacaagaggatcacttgagcctaggagttcaaggctgcaatgagctatgatcacaccactgcactccagcctggaggacaaagcaagaccttgtctcttacaaaatacaaattttaaaaaattaaatataatagaattcagagttgatgcagggagaggaatgcattcattagctgaaaatacaactctaggttgttttcgtttttcagtttccctaagaaatgcatcctgaaatacagtgtttgtata

SEQ ID NO: 828197 - DNA, 542 bp, Homo sapiens
tttaaatgcttcctaactgctaaccttcttacaagaatctggcttactgggagccaccagctgcccatgtggctcctaatttgtcacatttgaatgctgatatgttcatcgatttggccacatctttgtatacaaaaacagtaaattaactcttttataaagcagtttagaagcaatgtttggaagtcattttctgatgtcagttttaaagaaaagtaaatgttttctttatattattttgattttgaaaggttatagaaaataatagaagaaacttattataaagcccctagaaatcaagctacattttagttcatctgaatatgttcatgtaacttggtgaaattgaacatcttcatatttcttattttataaaatatgatttctaaacaaaattaagcattttatttaaagaatgtttttgtcactcaatgtaggtgacccttttggcagtrcttttctgatccttgatatgttggtcctgtaacgtaaatccttttgtttttcccgtttactctaatactcaaatttatataagtgtt

SEQ ID NO: 828198 - DNA, 570 bp, Homo sapiens
aaatgtgtttggcaggtcagacgcaggagagcrgaagaggaggcatatctagaaggaaaaggctttacagttcctggagttccattttttgccagcctcagtggcgccaggcttaaataggatgtgcacgcacagcattcatttgttttttctgggaaatcctgtagctttagatgccagtgatgagtgtttgaggttgtagagatggctggcttggaaagtggcaattacagaagtttttttcttctgcatccttggtcacacagcagcccacctcagtgtcattgtaagttgtcctcatcctagatctggttgggggtctgcgtctagcttccaggctgtggctgctccctgtcacaatggcttatagttggcacgctcagcagaaattgctaggctcagaagcagctttttatctttgtaccctaaaggtggtccgttcagaaaatgattgaggcttgctcatatggagacacagggagctggcactgctgtggccttcactgtagtgaaatagaagatcagatcttcaggactatcaatccaatacctttcattggctatacattt

SEQ ID NO: 828199 - DNA, 344 bp, Homo sapiens
  misc_feature 2: n = A,T,C or G
tntggagctaactcatccaatcagttgaaaggccaraagggcaaaacaactttctctgaggaataataaattctacctatgggatgaaacttcagcttctgccccagaatttccagcttgccagccttccctacagatttcaaactagctaatctctacaattccataagccaattccttgaaataaacatatttatcatatctatctttctgcctagatctattctaattccaggagacccaaaatgttattgtgttctaccagtcagagtagtggcttatggaggtcaagttaggggcttatggagtcagagtaggagattatgggggtcaggttatcaatg

SEQ ID NO: 828200 - DNA, 541 bp, Homo sapiens
tctcttgacctcatgatccgcctgcctcagcctcccaaagcgctgggattacaggtatgagccaccgcgcccgacaaataatttctgtattcctttttaaactcaccattttgtctccctgctttgttaggaaacaaaagccaggtatcataggtactaattcagtgcctcttttttatcacttatttgggcaacgtttagaaaaataggcctacatcactgagttttggcctataaaccctccaggtcacactatgttgtgcctttgtccattgttattttgttaaatatcttcggtttatttgctgtgttttagcaattatactaagaatgccaggtcatttcatagcatccagactcttatccccaaatggctctttatatctctgaatctgaccctcctcaactgtcaaaactttcccactgtacttgtagaacttactacccttggcaaaatctcttacaatcttagcctattccagaatgttgccttcaccttytgactctaatagaaacctgcctgtaccctggagacgttact

SEQ ID NO: 828201 - DNA, 514 bp, Homo sapiens
atttttaaaaattgtgagtttatgaccaaattagcaacactaatttctgcatgtttgctgagacttcagtagacgaattagtgttataatcaaatgaaacttagaacaaatttaacttgacatgttaatttatatgttgccattagtgtgctgaatagcaacgggagttctgtaccttccttactgtttctgaagataatcttatttcacagctgcacctaggacaactcttttgaaatttcaccttcttagatgccaccccaagatggcattgtggggcaaattagtgatacatgtagaggaacttacacccaaaagatctgtcacttaatttttacatgtcctctggtttccataccctcatttatcgcagcctttttctctagcyagctgtgggggtggagatgaaaggagtgggaagtcagctgtaatgaactatctcaagagttcagagttcttagcctgactcataagctcacatataatctggccctacttaactccagcgtcatgt

SEQ ID NO: 828202 - DNA, 644 bp, Homo sapiens
ttctataattgtgctttccattttaaagtttttccaagacaaagataattcttcatgcagctaagagcttgtgtttaggagagtttacacataacagaagtttctcattaatatttaagtyttcttagatctgtagacaaggcagaaatttctagagaaattatgaaaatatgacattttttgttaccgctgcagaaaatactatagctaaccacatgggttttactcatttcagaattaggcaaaatcacagtgttgtaagcaagacaaaaagcaagtggggttctctacttgttgcgtaaattttttaaagtataatgtaataaaacttaattcaatacctttgaacattgtatatttgaaaaacactagtagtaaatggcatttctgtggttgtcatcaaatttgtctcattgtaggtgctgttacagccttggatatcaaggtgcaatggcaatgttctctcaggaagtggaggatatatttgagctccaattccaacccatagagaaatggcaaatccagccatcagaccaacaagtgctccctgtaaaacaagaatgcctttaaaagaaaaataatacaatttgctttgatgtcaaaattaatattagaaagccaagttcaacatggcacgaaattat

SEQ ID NO: 828203 - DNA, 647 bp, Homo sapiens
aaggaagttttgccccctaatatgctgttgtaacaccctatgttttgcttatagttcatcttgttgcacccccactcttttttttctgagatggagtttcactcagtcacccagactggagtgcagtggcgtgatcacagctcactgcaaccgtagcctcctgggttcaagtgattctcttgcctcagcctcccgagtagctgggattacaggcgcatgccaccacgcctggcgaattttttgtatttttagtagagatgaagtttcaccatgttgaccaggctggtctcgaactcctgacctcgggtgatatgcccaccttggcctcccaaaatgctgggattacaggagtgagccaccgtgcccagtgaattgcaccctatttttgttacctatttattattggcattcctccataggctgtagactttttgaggcaggattgcatcttgatggttctctatagatcctcaactggtagcataatctttgacacagcatagctgttcaatacgtgtttattgagtggaaaagggaacacctraataaatgcctcttcagcacctgctactttttccctcttttgcagccaaaaaaacaaaacaaaacaaaaaaacctctcaaactattttagagggaagcttttt

SEQ ID NO: 828204 - DNA, 428 bp, Homo sapiens
ctaccaggccttagtagagactgaaccatgagccagcaagtcaccatgggacctgagttgaccacaaggaattgagtgttagctggcctatcaagctataaatggaggcgtgcacagcaayactccattatccaatggaagtggtgtatacgtgatggggtctgagcaggtcgtgaaggcacaagtaatttacatgaagtgtcccaaatgccatggtcgccagttctgctacactgctttctcttttccattttggacttatgacctcatggggggtcccctacaatcagttgacagagaaagagaaggcttggaacaggtttaccgatggttctgcatcatgtgcaggcaccactgaatgtggacagctgcagcaccacagctctttcctggggcatcctgaaggacagtggtagatggaaatcctt

SEQ ID NO: 828205 - DNA, 614 bp, Homo sapiens
cttacagaaaacacagttctgtttctcacacacacaggtttttcattgtattccatccttgtttataggctatttttagcatccagcattattcctggttagaagaatgactttggttattatccataattaattaaggccatatggctcttgaaatattctacttatgaatataataataattgcaataagatcattactgttaacatctttcaagtcatgatcacattcagttctaaccctgtgaagtacacaaggcaggaatttacaacccattctccagatgagatggcgatgaaattatacatatatcttaggattggctttcagaggcaataacttgaaacagggccacaaacacatgtaagagggacttgtcaatgtgtcccaggatgggactgatcagctccaaaaaccagttttcttggttcccaaaccgtggctttttctatcaaggagatttgaaacgcaaaaatactactaataatgtgtatatagcatttttctaagtcctttttgtgtattatctcacttgattttccaaacaatgctatgagataggctgtgttattagmactattgtgtagatgagaaaatgagaacaagaagaggtg

SEQ ID NO: 828206 - DNA, 577 bp, Homo sapiens
catgcctgtagtcccagctactcgggaggctgaggcaggagaatcacttgaacccaggaggcggagactgcggtaagctgasattgtgccactgcactccagcctggcaacagagcgacattcagtctcaaaaaagaaaaaaaattagctgggcttggtggcacatgcctgtaaacccagctgcttgggagtctgaggcaggagaatcacttgaacccgggaggcagagactgcagtgaaccgacattgcgccactgcactccagcctgagtgacagagcatgactccatctcaaaaaagcaaataagataaacaaaataaataaaagtgttcctgaacaatgcaatattacttaataataaaaaaggaacaaaaccggcacgtgtaccaacatggatgggcggcaaaggcactgagtgaagaaagtccgtctcaaaagaatatgtactgatcgattccatttatacaatactctcaaataacaaaactatagagaaggagaaaaaagaagtaggtgctgggggttagagggagggaggctggggtgccaccaaaggtgagcccaagggactgtcat

SEQ ID NO: 828207 - DNA, 567 bp, Homo sapiens
tgagccactgcgcccggcctatcacttactattaataatattagcaaaagtttcccaaaacccaaacagaartaatttggccattacacttaacaaatgttttgaataattttagagaaaacttttcctcaatcagaaaggacctggatgtgaaacatgcaacaaaagtaataattgaagaaaatatttaaaaatcagaatgaaataaaacatctgcatgactgagaaggaaaagattcacatagacctaatccccaaacatttcacatagaccattttctggccaatatgcattatggtacacgcattacggtatactcctgggttgcccaggcaacagagtaagtaagagtaggtggtgcaatctcggctcactgcaacctctgcctcctgggttcaagcaattctcctgcctcagccttcccaagtagctgggattacaggcgcctgctaccacatctggctaacttttgtatttttagtagagatgaggtttcaccttgttggccaggctggtctcgaactcctgacctcaggtgatccacccgcctcggcatcccaaagtgc

SEQ ID NO: 828208 - DNA, 725 bp, Homo sapiens
atgcatttatttatttttgagacagagtctcgctccgttgcccaggctgccgtgcagtggygcaatctcagcttactgcagcctccgcctcccgggttaaagcaattctcctgcctcagcctcccgagtagctgggattacaggcgcccaccaccacacctggctaatttttgtatttttagtagagacgaatggggtttcaccacattagccaggctgctctcaaactcctggcttcatctggcctgcttgcatcagcctcccaaagtgctggcattacaggcatgagccaccatgcctggctaagatcatacatttaatggtacatggctatattccaacatgactctgtaagaatgtaggtgctactgctgtggtccttctcgttttgtgattcatattctgaaaagaaaaaattcatactctacaaaaatttctaaacctatggtttagaccatatttcgtactctaaacaagagaaaactaagatacatatgttcataacatgtccggcatctgctgttttcaagattttccttaaacccacatcctccaagcactttcttattcttttttgcatattgccactaactcaaggatgttttttcaaactttttataccatgtataaaaaatattcagtaaacaacagccaaaaggtagaagcaacccatgtgtctgccaataaatgaacagatacaaaaaatgtggcacatccatacaacg

SEQ ID NO: 828209 - DNA, 613 bp, Homo sapiens
actcatcttccacacacgagaggcccgttctgctcatgttaagcctccaagcggtggatgctgacctgaaccctgctmgtctccacgctaagcccccttttacacagtggctgggggctgacatttctgctgctaacaaggcctccagaaaactagtcaagtttattcttctccataaactccaatacaagtgccttatctgatgcaggtgcttcaaaaacacatgaagctggagtcaaaggctctgcagacagccattgggcgccactcagtccccatctcagacctggcctgacgatgaaggggcaggaggcagaaggagttgttgctgggttcatgagatattactatgtgcatggcaagaccttttcttaaggaattgtaaaagagaagtcaagaaaaagagaaacgcgaccaactaattttaactcttctttaaataagccataccataaggaaagtgaatcctattagttggaaacaagaaaatcaataaatacctgctttcaagaatagctcgttcaacacaggatgtcttctcctttaaggacaattccaaagactgttgactgatgactgacagaaacttgaggatcaatttagtgctttcggt

SEQ ID NO: 828210 - DNA, 533 bp, Homo sapiens
tccctctggacttcactacgcagagagaataaatgtctatcatgtttaagcccctgttagttcgggtttcctgtcccagtcaaatttgttcgtaatcaatatagtgcgtcttggcaaggctgtgagacgacagaactcccttgcactgctgctgctgggagtatttctttacacctgggctttggagagcagtgggcaatgcctggtaaaggtgaaaaatagtgtctgttgcactgggtttgtcagcaggtagcagaaatcctggaagggtttactccacacacaacagtattgcctggtacagcagctctgcaacaccaaaagaggtggcccaccaccttttcctcctctccttaccatgtggcttttggcatcatagtgcaagaggacctgtgcatctccggtgtcacatctaagggccacctctggcccttcagtgctggcagtggataaggkcctctatcactactacagcaactctccttggaaaacctaggagggtgactggaggaggaaagggtggaggacacaat

SEQ ID NO: 828211 - DNA, 391 bp, Homo sapiens
tgcctcagcctcccgcaacgctgggattatgggtctgagccactgcacctggcctctccgtatttctatgattctcaatattcccatggacggctgtgacccagtcagtctgcactctcrggaggacatctgctcagataaaagcccagttcaggggctctgtcttcaggatcccaaagaaacttgaggcttctccatgaggggaaaaagtagtgggctgaggtgattctagtttatccttctataaaaatctttacccacagaatgggacgctgtgcagtcattaactagaacgataaatacttacattcagaaacagaaaagtgcctgtaacgttgtgctggcttgtaagaacagagaatagagttcatgtaaaatgagagacacacac

SEQ ID NO: 828212 - DNA, 550 bp, Homo sapiens
ttcagttgacctgaagttagatakatagtgaatgcttttcctttttttgcagggtttaaaatctgtcgatagcagcatcaaaaaagaaagcgaccttccagcagctgaccccagcactccaatcccgttaaaatatgaagatgaatcctcaagagggggtcccgaggggctagagaagcagatggccttgtttttggacaaaagtaagttgaattgatgtgcaaataaggccttcaatagaataatacactggttctttatcaacagcagacttatgtcaattaaggcattaattgaaaggcattgagaaaaagatatcctgtgaactggaattaggggtagtattctttcatttgaaatataaaaaggataattttgatgtttcatggacatttctaataagagcataaggagcctgcatcttcctgttacccacagtggggaactaatgcttcagcctggtggagttctcgctggatcgtgtaggagccacagacttagccagactgcctaacttcatatcttggctttgcgagggcaagttgctcca

SEQ ID NO: 828213 - DNA, 632 bp, Homo sapiens
gaatgatctacctcaaggcctagaatgtgtattcattcactcataattagatatgttgactgtaatataacaggaatctaaccaggataaatcagatgagtaactgttgttgctttacacaccagtaataagatcctttaacccaaaaaatattttcaaatacaatcaattctgctctaacacttgttttgagaaaatgagtttgatccaatacaattcatgtattagggaacaatttgagcataacatgaatttcgcatttgcttaggtgcaaaattcagatgagaaacactaggttaatgcagaaagctgcactcagctgaactgagccatgcacctgcacacatgcacacctaaatatctaccagatacctcagtttactgcatgtgttatgagacacacccatctatatctggttttataaattcccatctgacttcagataaccaactattgggagacacttttctatgaatatttttatgttttagcatggtctgacctgkctgagcagagcaccagtaaacttggttaaaggatgattaaaaagcaaacatgccttggaaactagagatatgtattactccagaaaaattgagaaacattcctcccctggaagtcatttccttat

SEQ ID NO: 828214 - DNA, 642 bp, Homo sapiens
aaatcttaaaatcacctttgtcagtaacaggtttttattaaaataagtcaggattactttactgtgtcaacacrtcccattctttcccttgttgctgcccttctggagggatcaagagggaagcaacaagttggtatgaaccaggatttttctataccttgtggcatttgcaactctgacaatgctctatagaatattcctatgtttactaatggctaatttgaattccttttccctcccaaaattaaaagtcaaattgtaggttcctgagagatatggccatctattgaaacacaccagattactgctgaaacaggaagagtggcgtggataccacaagtctgctaaatggtatctggtgtaagtgggatcatgggctttaccaccagatggctctaggtcagatcctagctccagaacttacactatgggcattggcaaagttacacgttaaatcacatttttactatttataaattggtgatacctaccttgcatgttgttacgaagcaatgtgttgtatagagaattggatttttgttgtaaatacaacttgctgtgatacagtaatgagaattcttagggacattctcctttgttctgtcacgatcagaactatgcttaatgagggaagcaatcctt

SEQ ID NO: 828215 - DNA, 634 bp, Homo sapiens
  misc_feature 326: n = A,T,C or G
taacaaaagtttaaaaacttaaaaatattttttaacagaaaaaagcgtataggccaggcgcggtggctcacacctgtaatccyagcacttttgaaggccgaggcgggtggatcacttgagatcaggagttcaagttagagatggtgaaaccccatctccactaaaatacaaaaaattagccgggcgtggtggtgcatgcctgcaatcccagctactcgagaggctgaggcaggcgaattgcttgaacccaggaggtagaggttgcagcgagccaagatagcgccattgcactccagcctgggcaatagagtgagactccgtctcanaaaaaaaaaaaaaaaaaaaaagaaaagggccgggtgcagtggctcacgcctgtaatccctcgggcagatcatgaagtcgggaaatcgagatcacggtgaaaccccatctctactaaaaatacaaaaaaaattcggtgacgggcacctgtagtcccagctactcgggatgctgaggcaggagaacggcgtgaacccggaaggcggagcttgcagtgagccgagatcgcgccactgcactccagcctgggcaacagagcgagactccgtctcaaaaaaaaaaaagaaaaaagaaaagaaaagagcttata

SEQ ID NO: 828216 - DNA, 374 bp, Homo sapiens
aacaatattgagtctgaaaatacgaaatactctctcatggcaaagaatgcaagkatttaaaagagacaagtcaaatggtaggaaaagcaatgaaatctatatggaaaaataatagttgaagtaaaatgcaaaacagaatataacaaccattgatggaaaagacataagttggggccctctacctacaaagaagaaactataatcctatcccactgttttccccaggactgaccaatacttaaattgacaaaggtgagttgcgcaagggaaaaggaaaggcagaggagtcatgagaatacagttttgagcataaagtcctaagattagagtaaacattgataaaacaagaacttaatagaaaaaacttgagattg

SEQ ID NO: 828217 - DNA, 335 bp, Homo sapiens
gttctcatggcagtgaatacgtctcatgagatctgatggttttataaggggcatcccctttcacttggttttcattctctttttgcctgtcaccatgtaagacatgtctttcrccttctgccatgattgtgaagcctccccagccacgtggaactgtgagtccactaaacctctttttctttataaattacccagtctcaggtatttctttgtcaacaacatgagaacagactaatacaagttctactagtcttttggtggagtcattaagtttttctaaatgtaagatcgcatcatcttcaagcaaggatagtttgacttcttcctttccaatt

SEQ ID NO: 828218 - DNA, 335 bp, Homo sapiens
gttctcatggcagtgaatacgtctcatgagatctgatggttttataaggggcatcccctttcacttggttttcattctctttttgcctgtcaccatgtaagacatgtctttcaccttctgccatgattgtgaagcctccccagccacgtggaactgtgagtccactaaacctctttttctttataaattacccagtctcaggtatytctttgtcaacaacatgagaacagactaatacaagttctactagtcttttggtggagtcattaagtttttctaaatgtaagatcgcatcatcttcaagcaaggatagtttgacttcttcctttccaatt

SEQ ID NO: 828219 - DNA, 663 bp, Homo sapiens
acttatgttatggcaagagctatggatggtttcacttaaaactcattaaaactgtagaaggtgggtactactattatttccattttagggataaggaagctgaggtaaagaggcattaagcctgttgcccaaaatcataaagtttgtcagactgcagtgttcttttgaaaagaattcaagatcataaacattttaagataaaacacaacttaagaacacaattgctttaaaagaatatttttatgtgtttcaagaaaatattctacatttattgtagccttgaaagtgagaaaggaagtgtttaaattttccttggaaaaacattcttctacaatttcaaagtattacaatttcaaaatctaaagagcacgcactcacctctgggaaaatcagtttgcaaatactctctgccaaagtgtgaagatagactcggctccgactggtttttctttgaggaagactttcttgtatgttcttctcaggaatgtcttgacagatgggcacggttgctttgcagctctctgagcttcctgctgcctcctctgaagactcgttaggaayttgacctggtgccagtaaggagaaaggacactctcctgtgatcttgagatccttgagcttcgtgcagaacatggtgttggtgtctcttaccctgctgcgatc

SEQ ID NO: 828220 - DNA, 590 bp, Homo sapiens
acttcataatttggagggttgggttcacataaatgtaggtgccatgcccagttgttccctgaggcagtggagttggcgtagcagttaaaagcttaggctacatgaacagatggcctgtgtttgctccctgcgtctaccatgtgctaactctgcgacattagtgaagttcttaactgaacttcacctcaattttctccatctgaaaaataaggataataatagcaactatctcataaatgtgttgtgagattaaacaaagcaataaatagaaagcacttagaaaagcactgctacccagtatgggaggaatacatgttgactatcacaaatgctactcggtggtagtgtgacattggacaagtttcataacttcatgaattctgttatttcacacataaaatggtaaagtcatgatgtaacagattcaaattaagaatttggaataatatatataaagtgcctggtcttgcctagcatccataggtccataatttttttaaaamaagataaaagtccagtcttggatcaagtcttcagtcacttgccttacgaaagctgtgatgcttcttctactagagctctaggcaact

SEQ ID NO: 828221 - DNA, 494 bp, Homo sapiens
ctggaaatagagtccagtatctttaaatctaatcagattasagagccagttccataaaccttggaatgaattcagaaaactcatccttaatatgttcctttagaggcagtctcagtaccaaaatctatattagagttttccaaaaatatgtattattatgagaaactggctcaggtaattatggaagctgaaaagtcccacaatctgctgtctgccggcaagccagagtcccaagaaagctggtggtataattcaatccaaatctgaagaactgagactgaggggagtttatctaaatcccagtccaagggcaggaaacaatgagatgagatggtgatatagtttggctctgtgtcactaccaaaatctcaccttgaattgtaataatccccgcatgtcaagggtaggatcaggtgaagataattaaatcatggggacagattacctcacactgttctcatgatagtaagtgagttctcatgagacctaagggt

SEQ ID NO: 828222 - DNA, 629 bp, Homo sapiens
gtgggagagcaatttttgtggaaggtggccttgtgatatccctcatatacaactttcttgctctcagccaagccagcaggcaagccataaagccataggtggtaascagtctaggttaagataaactctcacagcttcaaagaggaggagagagagaagagaagaaaagcagtgactttaattaggataatttgttctccaaagtataaactcttatcagggcatatcacagctctcctacataccactgctggatttttgttagcataagatgaaacaacaagggcttatgaattattctgagccagtgacacagaaaataagcagaaatagatgctgcggtgtattaaattgttatttgggatagagctggacaaagaggaatatgacttacaattagtgactacaaatattttaaaacattaaaagaaatagaattttacccaaagacgtttgttttcgctgggaagcctgccttttgctaatcatatttacaaatgtatagtgctaatctaatatatggatatcttgctttacaactcatgtactgacaattttattgcatttacccaaatttccttcaatgctacatttgtaactctctaaatacttcatatatagtgctaaag

SEQ ID NO: 828223 - DNA, 613 bp, Homo sapiens
gaagcttccagagaaaggaacaggcagcaatctttgctgttctccagcctctgccggtgatacccaggaaaacagggtctggagtggacctccagcaaactcccacagacctgcagcagaggggcctgttagaaggaaaactaacaaacagaaaggaatagtatcaacatcaaataaaaagatgcccactcagagaccccagcagaaggtcagtgacttcaaagaccaaaggtagataaatccataaagatggggagaaaccagtgcaaaaaagctgaagattccaaaacccagaacacctcttctcctccaaaggatcacaactcctcaacagcaagagaagaaaactgaacagagaatgggtttgatgaattgacagaagtaggcttcagaaggtgggtaataaactcctccaagctaaaggagcatgttctaaccctatgcaaggaagctgagaaccttgataaaaggttagatgcattgcttactagaacagcmagtttagagaagaacataaatgacctgatggagctgaaaaacacagcatgagaacttcgtgaagcctacacaagtatcaatagctgaatcgatcaagtggaagaaaggatatcag

SEQ ID NO: 828224 - DNA, 601 bp, Homo sapiens
aaaaattgatggttgaaacaaacttagtattcaccaactttaatattgcttttaatctgagaactccacaatgttcttgmcccttaatctatacttctagttacatgattgtaatactattatttgttatttatatagataaataattccttaacatcaattatttacttataatgtaaagtccaaacacattagcataaaaacagttacttggcctgtgaccagtgtagcttcatattcaatcctctgtaattgttttcttaaaattcttgctaattttatcttagaatttattcttgtaagcaaagtcccatgggatagtggagcatatgccaaaggctgggacagtaggctcatatatagtccatcaccctgccatctccggaacaggttcttagcgtctccctccccacacccacctggtgaactctgccacccacggtgtggaatcatgcttgggttgcagcatcagagcaaggcttaaattttacctcctttgctttgggccctgtgcagtgtcctgggtgtgggtataggaaaagtagaaaaaggtaggggtcaaacacactttccagggcacttagggcagagcaagactgtg

SEQ ID NO: 828225 - DNA, 595 bp, Homo sapiens
ctgcaggaggacacctggaatcccctagccaaccctctgttttggtctaagctcatcagccagcctacatctgccttgggagcaatgatggcttctgygtctcttctgacccatcacttgaaagtaactctcattgacagaatctaaccctgaacctagctgccaaggatttggggaaatgtagtgttgaggttttcagaactgtgtccccctccaagagagggatgtgaatagatggggaaaaatggttctatattaatagtgaacaatatatcacactgtattagtccattcttgcacagctataaagaattacctgagactgggtaatttatgaaaaaaagaggtttaattgactcacagttccataggctgtataggaaacatggataggaggcatcaggaaacacaatcatggcagaaggagaaggagaagcaagcacatctcacaatggcagagcaggagagacagagaatgaaggaggaagtgccacacactttcaaacaaccagatctcatgagaactcactcactatcacaagaacagaaagggagaagtctgcccccaagattcagtcacttcccaccaggctcc

SEQ ID NO: 828226 - DNA, 613 bp, Homo sapiens
atgctcattatttctcatgattccatgggtcagcgtcgtggctcttctggcctgagttggctcaactggcataaagctgcagttcagctggctcacctaagcacactgggccagctgcaatatctgggtgctcctttcatgtggtctctcttcctcctgaagggcagcctgagcttattcacatgatggcagaagagttccacagaagagcaagacaagcgagccccagtacacaaacacctcggagagactctgcttccgttacttttgcaaatgtctcaataaccaaaaaagtcatatggtcaagcccagattcaaggacagggaaatcaactttacctcatgataggagaagtgtcaaatggagatagatgcacatctagagatggaaggatttatagtcatttctgaaatctaccacaccatgaaatgtacaacaacaccacagaaaccacacatattatttatatttatatacggatgttgtacatttgagtttacatattatgtgtctwtgtgaattttactttggtgcttaggaagcaataaaaagaaacaaggaaaatatttcttctatcttgtcttaacctaaataaaaaaagcaaaaactatt

SEQ ID NO: 828227 - DNA, 647 bp, Homo sapiens
attggaacatatttcacattaatggactagaagactcagtattatttaaatgctaattctttccaaattgatctatagatttaataaaatctctcagcaagggatttggtagatattgacaaatatattccaaaatttatatggaaagacaaaaaacctagaatagctaacatgatgccaaaaagcaaagttagagtactcaaactacccactttctagactttgtataaaaatacagttattagacagtatgatattggttgaaagaactaacatcagtggaatagaataacatccaaaaatagacccacacaattatagtcaactggcctttgacaaaagaataacagcaattcaagagaaaaattatagtcattttaaccattagtactggaaaaattggatgtccatatgcaaagtaatgataataataatacagataaagacctaacaccttttacagaaatacgctcaaagtggatcatatagttaatgtaatatacaaaacgataaaacttgaaaacataggagaaaatttatgggagtttgggtttgatgatgagttcttacaaacagtatcratagcataataatacatgaacaaataaattaatatgttggacttcattaaaattaaaaaagacttt

SEQ ID NO: 828228 - DNA, 616 bp, Homo sapiens
gttctgagcaattatcctgaaaattctgccaggtgataggaataaatagggtgcccattactcagagttttcctttttaggaaagcaagatcaagggagccaaacaaagtcaagacccatcacccaatcttagcaagcataactatagctgccagttttcttggcatgtcacaggatatccttttctctcccttgttggaagaggactcaattttacagcttcaccttagcattcagtttatgataaagagtccccccaaaacacatttttgtcccaaattcaattccaagcttcaggtcaaagccctaggaaagaaaactggatctaagggatccagaggcagacaataatggaagttaaaaggcacagaacaggtaagcatgactaattcctgctgattaagccaaacctcctgtttcatggataaatgtcattctagtatccatggcataaatgaggtctagaaaactcaaaggctactgacagcagaggggatagggcgtatgtgggtaagagcagatattcccacccccttgggcaccccattaatatgggtgaaagccgctttgacacccatggamagcaccctgtcgtagtcaccagactcagggatac

SEQ ID NO: 828229 - DNA, 600 bp, Homo sapiens
gtgcttacagcattctagctggtctggggaactacttgagagactaatttctgtctcacttaacttggagagctgatggaaagagtggcatagtttggataccagattggaggccactgacagcaaaggcaggtgatgtggtgtgctggaactgcagaacaagtttgaagggacccagaactcatataatggagtaattggggaagtacttctcctgcactaagccagtccacagagacaaggaaaagtggctatttgttaaacactcaaatttcaacaaatgtttacaaagtatataaagaaacaggaaaaaaaattgcacattccacagataaaaataaatcttcagaaaccaaccctaaaaaacacacatctcttactgaactgacaaataatttttacaaatttccctaaatatgcttaattacataaaagagaacatggatagatgaacaaaatcaggaaagcmgtttatgaacaaaattagaataataataataacatgagcatgtctgcattgagggatgcctagatggccggtgaagcacttttctgggtgtgtctgtgagggtgttgccagcagagactgacatgtgagtc

SEQ ID NO: 828230 - DNA, 410 bp, Homo sapiens
acatcacaccaatgcacaattcctgaaagcattttctagagaccctgcagatgcttaggtcacaggcattgcagaactacctactaccactaccttgcattcctgcagaagaagcccttgcctccaggcaaacccaattcagcatctacaaatcccaggatatggagggaagaagaatgtgcaagcgctagaatgggaagaacacctgacctggtttcagggatttgggattctcaagctgactgcatggccaacgtggatcacatgctcattccaggcaaactaagcagaagtgaggttatgggattgccccagtcatttgtgcatttgtgctcaggtatctcttttcagaacatgtgggtaaagtgwgactttaccataaccatggactgaagattactagtgttgtg

SEQ ID NO: 828231 - DNA, 527 bp, Homo sapiens
ttatgttaaacaaccaaacctaagaataattgatgttcccaagaaataagacaattctaaaagcttggagaacatatttggggaactaattgaggaaaacttccctggccttgctagagacctagacatccaaatccaagaagcacaaagaacacctgggaaactcatcacaaaaagatcttcactaggcacactgtcatcaggttatccaaagttaagatgaaggaaagaatcttaagaactatgagacaaaagcaccaggtaacctataaaggaaaacctatcagattaacagcacatttctcagcagaaaccctacaagctagaagggtttggggttggggccgtatcttcagcctcttcaaacaaaacaattatcagccaagaattttgtattcagcaaactaagaatcatatatgaaggaaagatggtctttttcagacaaacaaatgctgacagaattcaccattaccaagccaccaccactaytaactgctgaaaggagcactaaatcttgaaacaaatc

SEQ ID NO: 828232 - DNA, 530 bp, Homo sapiens
ctcaactaggcccagaggcagtgaactggggaacaggagacaccacccaccgacatactagctggagtggctaaagtagtgctggaatcaacaaccctcccctaacccaggctgcacagcttatggctccctttcttctgcttgaggagaggagaggagagggaagcctggggagaactttgtcttgcatcttggataccagctcagccacagcaagataaagcacaggtcagtcctgagtcccccattctaggccctagctcccagacaacatttctagacatatcctgggctagagagaacccacttccttaaaggaaacaacccagcccttccagcactcataacctgcaaacttaaaagcccttgggccctaaataaccagcagcaacacccargtttagcagcagtactacatcaagggccttggtgaagctgagacttgctggcttcaggtaccaacaatgccatatgggggtagagcaccaaggaggctctttgggatccccatttctaggacttgactctgg

SEQ ID NO: 828233 - DNA, 613 bp, Homo sapiens
tataatgttcggcctttgaacaaatatctcagattaatcgttcagcagcacaaacggtctggactgtgcacctacaattagttttcatttttttgtttgtttatttcctttcttccttgctttcattttcttttcttttctcttttaagacaaactgaaagccagtgaccctggtagaactgtttaaaattctatgcctttgagataagcaacttttccattgttgcaaaaaaattaaaaattgcaaaattctaattttgaagttttaaaattggacagaaatattcattcctgaatccgaaaatggaaagtttgcattcatgcacaaaaaagaaaaagtatgtgttatttattctctaatcttgagaatttgggagcatgtagtgaaggggatctgtcaagatttatgttttctttgttaataaaaaattaaggttgctatcttttgcatatgaaatactgtttcagacaaacaatgtctgtctttttctttctccattcaatgtgaatactctcataggagccacattagggaataytgtttgagagaaaaataagtcaaattcttccaagtagaaaaaaaaaaaagttcccaacaacagccagacttttt

SEQ ID NO: 828234 - DNA, 591 bp, Homo sapiens
ctttaaaaatgtttacaagaaattaaartagtgagggtaggcagaagttgtcctacaacctttacaagagcaattcttttatttaagaaagtggctggattatttcccaagtgaataaattctctgtccactgccaatcagaaccgttagtggcctcatttcttcttactaactggtcctctcctttccttccgtcctctagataacacacaacaatgccaccttcactctgtcgacactggtgctttaagggaaggctgggttaggtgttcacaaacatattctctaatggtgtttattttccatggctggagtgatttctttttcccctactgaaactctattatatacccttttgttgtcatggctgaagcctgttgtttctgcaaaaacaataataggcctgaagattagggttgcattttatgggcctagcagcccagcagggcatcatatttgtatcaatcctataaattcctggcatcaggcctctttactcctagtaattaatctttttcataaatgctgtcatgtttagagctgttttattaagtttctgccttctaattttttctgcgtcactcctttgcc

SEQ ID NO: 828235 - DNA, 546 bp, Homo sapiens
tccttatttctaagaggaaagcttattttggatatttgattacttacttattatgtctagagggtgggcagtgggtggtgctgctcaaatgagtgtgattcaaggagcagacctccaaatacacttgaaatgcaataaagatcagaaacgacagtatctcccttaattcacagtggttatgttccatgatctccactggatgtctgaaactttggataatactgaactctatgtatactatggataatactgaactttggataatactgaactctatatatactatgttttttcctatacatacatacctatgacaaaatttaattattagtcatgctaagacattgactataacatctaatattatagagcaattattaacaatatactgtaattggccgggcgcggtggcttatgcctataatcccagcactttgggaggccgaggcgggtggatcacctgaggtcrggagttcgagaccagcctgaccaatatggtgaaaccctgtatctactaaaaatacaaaaattagccaggcatggtgg

SEQ ID NO: 828236 - DNA, 546 bp, Homo sapiens
tccttatttctaagaggaaagcttattttggatatttgattacttacttattatgtctagagggtgggcagtgggtggtgctgctcaaatgagtgtgattcaaggagcagacctccaaatacacttgaaatgcaataaagatcagaaacgacagtatctcccttaattcacagtggttatgttccatgatctccactggatgtctgaaactttggataatactgaactctatgtatactatggataatactgaactttggataatactgaactctatatatactatgttttttcctatacatacatacctatgacaaaatttaattattagtcatgctaagacattgactataacatctaatattatagagcaattattaacaatatactgtaattggccgggcgcggtggcttatgcctataatcccagcactttgggaggccgaggcgggtggatcacctgaggtcgrgagttcgagaccagcctgaccaatatggtgaaaccctgtatctactaaaaatacaaaaattagccaggcatggtgg

SEQ ID NO: 828237 - DNA, 516 bp, Homo sapiens
tgttgatattgtcctgttcttgttgtctttctagattgaaaggaccaagtccactttaactcggcatggcagccagcacaactytgatgagcatgtagacacttgacagacaatgtttgtggtgctgctatggaaggctccaaaactgtgctgtcaacagtgccataaaatcataatctgggccaggttttgtgcctcacgcctgtaaccccagcactttaggaggccgaggcaggaggatcacttgagcccaggagtttgagaccagcctgggcaatatggtgaaactccatctctacccaaaaagaaaaacaaaaacaaaaatcaaactaaactgaaaaaaaacccacaaaacttagcccagtgttgtggcacacacctatggtcccagctactcgggaggctgaggtgggaggactgctaaaggttgggaggcagaggttagcagcgagccaagattgcacccttgcactttagcgtgggagacagaataagaccttgtctcaaaataaataa

SEQ ID NO: 828238 - DNA, 604 bp, Homo sapiens
gtaataatagtgggggacttcaatacccccactgatggcactagacaaatcattgaagcagaaaatgaacaaagaaactgtgaggtaaaactggaytctaaaccaaatgaacctaatggacacttacagagcattctacccaacacatgaaaaatatacattcttctcatctgtgcatagaacattctcaaaaataaaccatatactagtctacaaggcaagtctcaataaatttttttaaattgaaaccataacaagcattttcttggatcacattggaataaaattagaaataaatattaaaaggatctctcaaaacaatacaaatccatggaaattaaacaacctgttcctgaaaaaacttcatatcaatgatgaagcaaggcagaaattttaaagaaattggaaacaaatggaaatagaaacacagcatctcaaaacttctgatatacagcaaaagcagtgctaagagggaacttaatagggttcaatgcctacatcaaaaaagtagaaatatctcaagttgtcaacctaatgttgtacctcaaggaactagaaaatcaagaacaagcaatagccaaagttaaaagaaaaaaaactacac

SEQ ID NO: 828239 - DNA, 574 bp, Homo sapiens
tgatattagagtctgaggccaagtgcagtgctcatttccctctccttccttcatgcagaggctatttctctcyatgccatgctgcctggggttgtggggaacatgggtggtgacacaggtaatgtaaaatcgtcttttctatcctcttcaatgcatcttttcttatttctgtgctacacccaggtgctataatatctcagctggtttccttagctcttgtgaaggtatttttaatgtagatagttcaaattgatgcttctgtggagggacaagagttgtccggtgagaattttcatatcattattgataaagaagcttaaggttgagagattctgttttggttcctattttcctgacaagtaggaggtgtaatgttctgagattaaaggaaaatttgtggaatgtagatgtattagttctcgtactgctataaggaactacctgagaccaggaaatttatgaagaaaagagatttaattgactcatagttctgcaggctgtacaggaagcatggctgggggtcctcaggaagcttacaatcatggtggaaagtgaagggggaagcaagcacatc

SEQ ID NO: 828240 - DNA, 574 bp, Homo sapiens
tgatattagagtctgaggccaagtgcagtgctcatttccctctccttccttcatgcagaggctatttctctccatgccatgctgcctggggttgtggggaacatgggtggtgacacaggtaatgtaaaatcgtcttttctatcctcttcaatgcatcttttcttatttctgtgctacacccaggtgctataatatctcagctggtttccttagctcttgtgaaggtatttttaatgtagatagttcaaattgatgcttctgtggagggacaagagttgtccggtgagaattttcatatcattattgataaagaagcttaaggttgagagattctgttttggttcctattttcctgacaagtaggaggtgtaatgttctgagattaaaggaaaatttgtggaatgtagatgtattagttctcgtactgctataaggaactacctgagaccaggaaatttatgaagaaaagaratttaattgactcatagttctgcaggctgtacaggaagcatggctgggggtcctcaggaagcttacaatcatggtggaaagtgaagggggaagcaagcacatc

SEQ ID NO: 828241 - DNA, 605 bp, Homo sapiens
aattcagagatttcttcttgatttggatccattgccagggagttggtcttttggggttgttatagaatcctgtttgtcatattaccagaattattttctgggggttccttttcatttggwtgactatttctgtggagagttctgaaactcaaggcctgctgttcagattttcttgtcccatggggtgaccccttgatgtagtgccctcccccttaccctagggatggggcttcctgagagttggacagcagtgattgttattgttcttctggatttagccatccatcggggctaccaggctctgggctggtgctgggggttgtctgcaaagggttctgtgatgtgatccatcttcaggtctcccagctgtggataccagcatctgctctgatagagattgcagagaagtgaaatgaactctatgaaagtcttttgttgtaaatatgtttagtgtgctggctttcttgaatgctggttatgctagcagtgaagttgtcatgtggacatcctcaggacctctggttagccaggatgttgccagcagtgggaacaggtgttgtcttcttgggttcaaggttattctttcatgagttgctgtaatggcc

SEQ ID NO: 828242 - DNA, 590 bp, Homo sapiens
tccctttttcaagaatttttaaataaaatgtaacttttatcaatttgtttagattgtttaaaaggatactttgaaaaaaatcattatttcttgctttagtaactggaggacatctctttatctatatagaatccatgcccaaacttaatattcctctattttcttgattttagaggtgaaaagccaggcatccttcaagctagtggatctttgacaaagatgcattgcaaaacaatcaacaaacaatcagaaaggcatgctatgtgtgagtgatgatccctgcagcatatgccataggcttgttgtagaggagctgctcagtaaatggtggattcaattgaaacaagtcttttttggatgcttaatgggaagttgtagggtgggtatgatggactaaaaattatttctaaagaaggttatatattgtatatattccagaatcttccgtttttatcgtttcttaaattaaaaaataaaaatttaactctgtcccaggttaactcagatgttaacacktatatagaaatttttttcctctttcccagttaggcatctcacagtattttctgcttgtctgtttaggatgttag

SEQ ID NO: 828243 - DNA, 552 bp, Homo sapiens
agactgctaaggagaggagccgtcattgcaatgtgaatagaggcaactgggaattgcattaaagggacttcaaggatctcccagcttcattctgcggacagccaatgtagaaccctgcctcagtcccaatctatgtaacattcatctctaaccctttcttggcctcgtggtagctttcctccaatactccaattggggcctttgccatgatgacatcaggatattttttaagttccccttggattgcatcgaggcttctctatgttgcttgagaggggctgcccatcttgcaaactttaaagcacagtgaaaacaaccttccacaagctcccggaaactccctgatgcctttctctgaggtaaaggtctttagatggtacctagttttgtgttagaagctttcacaccaagcagccaaaaaggctccatcctcacctgatttgtggtccccagaaaggagcmtgcattaggccgataagtcatcatccagagaggtgatgacagtcgtctccatgaccattgattaatgaaaacagggctagttggacccag

SEQ ID NO: 828244 - DNA, 541 bp, Homo sapiens
aaaactttctaaacgtttttgtaaggcttctttgtttcaatcacaatttgcaaatcaactgcacgttagtgagaaatagcttgggcaatcctggtgacattctccccttttccttgttctcccttttcaccctggcctccttcagcctcattcttcctccttctccattgctcctgtagacccaaaccaacaacagcaggacctcttattaacctctgttaatacctcaatttagcaaatgtaatgagtactgtgggtaagagggaaggaaatgagccctttgacattcactctctttgaaactgtcatcccacagggaaagaaacaggccaagagtggccagagtatgtaagagaatgggatgactgtgggcagaatcacaggagagacacagaatgtggcggtagagacggtcagagcgaaaaaacaggcacagagcaaggacacaaggcaatatccagaggcagaaaggaggctggagggcactgacaacacaraggaaccaaaacccagacaattcccttcaggggccccagagaga

SEQ ID NO: 828245 - DNA, 645 bp, Homo sapiens
tccaaatgctgaggaaatatggagatgtagaacacttggaattcaaatacatttctggcgggaatgtacaattatatagacactttgaaaaataatcttccaacatattataaatttgaccatatacttactattcagtccaggaatcccactgggtgatatttcctccggtgaagtgaaaatttgagtttaaaattttaagcaaatgtttaaagcaggtttattcatcattgccccaactggaagcaacttcaatgtctttcagcaaacttggtccctggatggactacacaggtcaacaatagaaagcaacaaactatgggtacatgcaagagcatctcaattcagcattatgttaagtgaattcagacagtatcagaatgctacatactatatgattatatttacaataattagtgaaactgtaagggtagaaagtgcatcattgctcaccatggggtggaggatcaggggagtggctgactacaatgaccatggagaatttggtgggcygatggaactttacattttgacagtagtggtagttaaatgactgtatggatttgtaagaaattgagaaattatacatgcaaaaattttactctgtgtaacttataatctaataagaaaaaaaatgatttaaaa

SEQ ID NO: 828246 - DNA, 388 bp, Homo sapiens
ctaaaaatgccaaaccaacatagtatgtactataattattaayattggttttattcaaccaaatattctagaactagttttaaatatcttaaatgtagcttaaaggggctagctttagtatagcaggaagcaaaaattcttatacattcaatgtttatctttttcaagaagcacttacagccaaactctaccacagaagtagaaattctctagtctaaaagatattgttttaatactcaattattttcatttaaactctaaaagtattaaaaacatgaagagtgagatacccaatcccctcaaaagtcatttatagacacagggtatcataacaccttaggcaacattaagaacaaatagagttgcagcaactacactactgtagcca

SEQ ID NO: 828247 - DNA, 388 bp, Homo sapiens
ctaaaaatgccaaaccaacatagtatgtactataattattaacattggttttattcaaccaaatattctagaactagttttaaatatyttaaatgtagcttaaaggggctagctttagtatagcaggaagcaaaaattcttatacattcaatgtttatctttttcaagaagcacttacagccaaactctaccacagaagtagaaattctctagtctaaaagatattgttttaatactcaattattttcatttaaactctaaaagtattaaaaacatgaagagtgagatacccaatcccctcaaaagtcatttatagacacagggtatcataacaccttaggcaacattaagaacaaatagagttgcagcaactacactactgtagcca

SEQ ID NO: 828248 - DNA, 514 bp, Homo sapiens
aaacttttgagttagaaactatatagggaaaatttgtgatgataatatctcctgtttatagagcatctatgaaccatgagaccctagggattattctattcctttttcaattaatgactccttcctttcttgttccaggtgagctttgctgttctttaagttaggcactctctgtatccaagcattgtcctattcattctctaaacaagtcctcagggtggacagggctgtgcagctggagccctgtgctctgtgtgcaggccccagcctgaggaggagctgagcaggagattccttcgtcaggctccatccagcgggaagcagcgaaatcctctgatttacatcaagaggctggtctcctggccaagccttgccacggagggctatgcctttgtgtagtctcttttctccaagagggtgccctttttctgtataaacgcagtgcccaacctgcagatagtgctgaggtagggattgcaatgwagaaacgggctctagagggcaaatgagttgc

SEQ ID NO: 828249 - DNA, 513 bp, Homo sapiens; identical to SEQ ID NO: 814398

SEQ ID NO: 828250 - DNA, 548 bp, Homo sapiens
atgcatagaagtttttggatatacagacatcatttttagtggttacyttcagggacagaaatggagagaggcagtaaaaaaggaaggagttgactctttagaaggaaaatgaattagacaagctgaattggcccctatgtccccaggggaaggtcagagcagctgtgtctcacctggcatgatgatctctgggaatcccagcttcctggccaccacggtggtcctgtccaccaggtgtggatagtccttgcgaatctgaatgatgtcacccaccagcatcttcatggtcacccagaggcctgcaaaggaacagctcaccgtgaagagcccacttttgcaagtgacccctcagtcggccctcccgccacctctcccctctgtctttctggagatcactgggaacagagtcatacagccacagatgcagccacccagcccacagggcctctggaacaggcgatctctgggtctgaatcccgctaatgatttctagcggtgtcagcctctggcaaattatcccacttctctaagcccaaagtgaggatgac

SEQ ID NO: 828251 - DNA, 634 bp, Homo sapiens
tttctgtttgggagaaggttgtgaccaatggctgtgcttgcgtgcygttgttaccacccctgggggacctagggacatgcaggtggagagaaggcttgtacttaacatggtgttattaccaggctgagagatttaggacactcatttaacctacttccgatggactagggagcatagtcatgctggttcactttcagcttagttgtcattttatacctgcatttgcaaaactctcccttaaatcccaatgtgagacttaatgtctcttcccccatcctaaagtagccaacccacacaccatcaactaactcaaatgcacaattacaaaaatgtttcctcaaaagggaagagaagtaaaaattggttggatttgaatgctatgaagttaaggagaaaatgaaccaattatttgaggtgggacaacccactgataataacattataagtaactcttaatcagagctcattgtacaccaggcttggtgctaagtgttttgcaggcattgtctcatttaattcttataataactctatggagtatgcagtttgattatccccacttttttccgataaagaaaccgagggttttcagtagggtaggtaacttgtccagagtcgcgcagctagtaaatga

SEQ ID NO: 828252 - DNA, 642 bp, Homo sapiens
acacaggaaataatacaggtatttcaaacattatgaatttattcttcccaagctgattcatctgttagtcaatatactgtactggtaaaagtctcaggataaaataggcagcacaaacagtgacttttctagtttgttacactctaatcaggggctagcacttataattccaattttcaacagaagaaatataatgaagtatagtggaatgtcaatgtaagatctataatgcctccaccccacacacttgtgggatgcccctacaaaaaattttgacatctgtatattcaacagtttttattctctttggctttgattttaattacaaaccctaatctgtcagaacagaaatggttcataattgtttgaccatactgaatcatttacattgtctaatccatccttatgtaacatgatgagtttgttttgcaaaacagatcaaaatttaatttctttgaattgtctttcagtattgactttggtgtgctcttggttaagcagcaatcttttctgagaaatggtttattgttgaaacattttaaacaaatcaattaccttcctgtaaygcaataatattacaatatgcaggcaaccatagcttccattgtacatgacacagtcgattttatgaagccgtaaaca

SEQ ID NO: 828253 - DNA, 649 bp, Homo sapiens
ttctgaaataatcttttgttaagtaaaacatcctcctttattcaaatcagcattccacataygctgaaacatacattcattttgccttctgctcccatcctttctattaattgaaaaaagtttaaacgaagttctagaatgttccatcatccacaaacccacctagcaactgccttaaatacagtaccacaaatgaaaatgtatccttgccaaatgctaatttatttcctctggtgtgattctatttttacatcagactcaagcagatagtcaaattatctcatttcatagggaagaaattgtaataggtatcatttaaaggaaaaaaattattgagggggatgagaggaaaaggtaaaagaaaaaaactttcaaggagatcaacaagtagctttcagctagaagttctgatatcctatacacaccacatagagacaataataaactggtacaggaattgtatctgacagcatttcaacattagagaatatgttaatgttaatatctccacaggagttagtttatttcaaaccacaaatgaaatttacacatttcagggcttgctaattccagtgcttacaagagctaagtaggtaacataatggaacaaggataaagttgggagttggggagctaagaaaggcatgtg

SEQ ID NO: 828254 - DNA, 621 bp, Homo sapiens
gcctattcctattttagccacaagaaatatttcataatttaaagggggaaatgtctgtcaaatatttacaacttttaatatttatgatatgtatatatttttattaatgaacagttgtataatccaaattacctatagctaaatgtacaacatacacacacatgcatgcacaccttcaaacacacacacaactatcatgaagtgattaacaacatttaagtcaagtgagatgatttaggtataggtaatgttaacatgaggcaaaattctgcaacatggatgactcttgaggacgttatgttaagtgaaataagccagtcacaaataattataaaaatgatgtataattccatttatatgagatacctacagtaatcaaattcatagagacagacagtagaatggtggttgccaggggctggatgtggggagggagagatgcggagttgttgttcaatgggtacagagtttcagttttgcaagatgaaaaggttctggagagctgactcacaaaawatgtgaatatatttaacactactgaactatacacctaaaaatggctaaaatggtaaattttatgtcatgtgttttttaataaaatttaaaaattaggaaaaactt

SEQ ID NO: 828255 - DNA, 565 bp, Homo sapiens
accctagaagaaaaactaggcaatatcattcaggacayaggcatgggcaaagacttcatgacaaaaatgccaaaagcaattgcaacaaaagccaaaatttacaaatgggatctaattaaactaaagaacttctgcacagcaaaagaaactatcatcagagtgaacagacaatctacagaatgagagaaaacttttgcaatctactgatctaaggtctaatatcctgaatttataatgaacttaaacaatatttacaattaaaaaaaaaaaacaactccgtcaaaaagtggccaaagatatgaacagacacttctcaaaagaagatatttatgtgggcaacatgtgaaaaaaagctcaacatcactgatcattagagaaatgcaaatcaaagccaaaatgagataccatctcatgccagtcataatggcaattagtcaggaaataatagatgctggcgaggctgtggagaaataggaatgcttttacactgttggtgggaatgtaaattcgttcaaccattgtggaagacattgtggaaggcaattcctcaaggatccagaaccag

SEQ ID NO: 828256 - DNA, 636 bp, Homo sapiens
tacattttgaaagcaaagccaaaaggtttgttcgtagattgcttgtaaatacattaragggagaagtcaggaataactccacattttttagcctgagcaagtagttaaagatgatattacaaatacagatggagaacaatgaagtaggggcaagttaaggaagaaaaatcaagtgtttgttttggacatacattttagatataggtatctattagacagatgtgcaattggagtgagctgtcaagtaaatattagataagttagtctggagttgagagtagagctcagagatggagatttaaatttatattggaagtcaacagttgagttgatacttaagggaatgggattagatgaaatcacctaaatggttagtataggcaaagaagaaaaagagacacaaagagtgagcctcactgtaactgattggttgcattaaagatctcagatcatcatcccttctcctatacacaatcttcaccatgtattttgtgggacccttccatcctaactctgagcttagagttgcaacttgctttgacattgccaagttatgcaagcagagggttgtacatttctgctcatgctccttatactctgcccttaccatgagaagatatgcctgggctagcccct

SEQ ID NO: 828257 - DNA, 193 bp, Homo sapiens
tattacgacactgtactcaaaatctgaggcctgcacaacctgggaagyggtgtgctcaaacgcaaggtgctggggctatgtgggggcaggggtcagcttcagggtagggctgaggcatctcccacaggggatgtgactcaaaactgctctcagaagtggaggacatgaaggagcggcagaaaggaggacggga

SEQ ID NO: 828258 - DNA, 600 bp, Homo sapiens
tcctgctttctcacccaccttgggggaaataccttggctccccaggaggtcacctgtgtactcctggaccatccaaccccrcccctgtctggatacttggtggacccaatgtccatctttttgcagggcctctgtgtttccagtggcatcttaaaatagtaacaagtcttaaagagtggcacatttaccctaggaacaattagaaaatgttcatcaagttcaaaaatctctaatttccttcagagctagatgtaacttagagttctaatccaatccctgtaccaagaatccaatgctcagagaagttcagtgattggcccaaggcgactcagcgaaaaggttcgtgcctgaacgctggaatcagttcaagatggaccatctcaatcatgaatttcaataaaggaattaggtagttgtgtcaaacactgccagatgccaagtaggtcctatgaaatttgtgtttgtttgggtttttgtgagatggagttaacacacgcaaatgtgagccagacataagaaaaaatgatgaaacgctgccaagtcattacagtaccaataacaactatagctaagaaaagtaactgatgactcagaataaat

SEQ ID NO: 828259 - DNA, 620 bp, Homo sapiens
gactacattttatttcttgtttgatagctgatagacatttggactgcctccacttcccggctctaacactgctgtgaacattaacatacgggtctttgttctcatgtctctcgggcggggcatatggtaattccatgttcaattttttcaggaacgcttagactgttctctagagtggctgcaccctgttccaatcccacccacagtgcatgcaggttccagttcctctgcaacctctcagtccttgctatggtctgtctttttgattcctgttatcctggtgggtgtgaagttgcgtcttgtctcttggctgagattctattccattatggagggggatgatggcgctcttttgtaataaactcgtcaaccagaaccaccagactcctctctttaaaacattagatctgatttttttctttttgttttcactgaaggtacgccctgcccccaccaattatttatgtatatgacacagttttacaaagtatyggaagacactagttggtttatagtgcttctgtggttggcttgattactttacagaactacctcaaggaccttaaagggacaaagtgtacacaaaactgtatataaaatatactaagacattaattaaa

SEQ ID NO: 828260 - DNA, 530 bp, Homo sapiens
aataattatagttatgctttaatgtacttacccgctaaaatgtcaaggatagttttctttaaatcaatagaataatacattttgtcatgctgtctgcccgcccacatgtagacatggcttgctttagtctttacatagataagacttctatataagaaaaacttaaaacaaggacagtgcattccttctcttgcttcctgaggatgccctactccctaaggaagtaggtttcaataaactctctcttttcacagcactctgcaacttgccttgaattctttcctatgtgagatccaagaaccctctcttagggtctggattgagaccctttttctggtaacaaaatggtttccaaactacttatttatttatttgagatgaggtcttgctctgtcgcccagcctggagtgcagtggygtgatcacaggtcactgcagcctcaacctcccaggctccagtgattctctggcctcaacttcccgagtagctgggactacaggcatgcaaccaccatgcctggctaatttttt

SEQ ID NO: 828261 - DNA, 645 bp, Homo sapiens
attgtgcttgctttaccctgaaaagtaggaatttcagactcttgtggaagatattgggagcagagagaacaaaygcagcttgatcacaaagtatgtgccagacactttgccttctctgattacatttgcaccacaaccttacaccatgaaccatctcccaggtaggggccttggggctccagctgacaaagtgaggtacctaaagccacccagccagtagggcgagaagctaagaattccaacccaggactcactctccacatgcctggagtctctccttcaagaggcaggcagtcccagagagcagcatctttgtcatctccttgtccctgtccccgcaggctcaacagcagagctcccctcagatcctagggcaatgacattgacagaagctcatgttttatgaggaaagatgggccctgtctcattggaagaatttaatctcagagcagcatgcccttgtctaagacattgtccgggcagcttgcaacccaataagactctgacggaatgagcctctcagggctgcagccctgatgtgagatttgggaccaggctggcagctgtggcgccagaatcccagccagaaaaaggaaaagatgagaaagaaaaacaaatagccccatgcgaagaattatggtggaa

SEQ ID NO: 828262 - DNA, 645 bp, Homo sapiens
attgtgcttgctttaccctgaaaagtaggaatttcagactcttgtggaagatattgggagcagagagaacaaatgcagcttgatcacaaagtatgtgccagacactttgccttctctgattacatttgcaccrcaaccttacaccatgaaccatctcccaggtaggggccttggggctccagctgacaaagtgaggtacctaaagccacccagccagtagggcgagaagctaagaattccaacccaggactcactctccacatgcctggagtctctccttcaagaggcaggcagtcccagagagcagcatctttgtcatctccttgtccctgtccccgcaggctcaacagcagagctcccctcagatcctagggcaatgacattgacagaagctcatgttttatgaggaaagatgggccctgtctcattggaagaatttaatctcagagcagcatgcccttgtctaagacattgtccgggcagcttgcaacccaataagactctgacggaatgagcctctcagggctgcagccctgatgtgagatttgggaccaggctggcagctgtggcgccagaatcccagccagaaaaaggaaaagatgagaaagaaaaacaaatagccccatgcgaagaattatggtggaa

SEQ ID NO: 828263 - DNA, 547 bp, Homo sapiens
gatcataaacaactatgttactggtttatgtctttattctactgtactttttatcattgttttagagtgtactccttctacttataaaaaaaaatagtcaactgtaaagcagcctcagagaagtcctccacaaggtatccagaagcaaatattattatcataagagatgacagctccatgcacgttattgccactgaacacctgccactaagatatggaggtgggagacagtgttactgatgatcctgaccctgcgtaggcctgggctaatgtgtgtgtttgtgtctttggtcttaacagagtttaaaaagtaaaaaaataaaaataggccaggtgcagtggctcatgcctgtaatcccagcactttgggaggccgaggcaggcggatcactaagtcaggagatcaagaccatcctggctaacacggtgaaatcccttctctactaaaaatacaaaaaattagccggrtgtggtggtgggcacttgtagtcccatctactagggaggctgaggcaggagaatggtgtgaacctgggaggcggacctt

SEQ ID NO: 828264 - DNA, 581 bp, Homo sapiens
aggtaccaccaccaccatgcccgtccaatttttgtatttttagtagagacggggtttcaccatgttgktcaggctagtctcgaactcctgacctcaagtgatccacccgccttggcctcccaaggcagtttcttattaaactaaaacatgcaataccaaatgacctgacatttgcactcctgggcatttatctcagagaaatgaagatttatgttcacataaaaacctgtacataaatgttcataggagctttatttgtaataacccaaaactgaaaacaatctagatgttcttcagtaagtgagttgccaaaaacagttaaacaaattttagtacttgcgtatcatgtaatactctcagtaataaaaggaaacaaacttgatacatgtaacaacttcagtgaaatgttcaggaattatgctgagtgaagaaagacaatctcaagaggttatatatatgattccatttatataatattcttgaaatgacattatagaactggaaaatggattaatagttgccagggctaaacgatggcgggatcggggaggcagaggtagacgcagaggcagaatagggta

SEQ ID NO: 828265 - DNA, 644 bp, Homo sapiens
tgtatatattgttttgaattagactaagttctgtcaaagactctggcaaaccagagggtatttggggtaactggttgtcttcaagcagtaactcccttaggttttttaggttgaggaatgccccrtctgtgatattcaagccatttgattgtataccgggatttccgttctggtgctgtacattggggttgtggtttagatttattttagtgagattttgcagcccttgaaatgattcattcgttatgtgtgtgatgaaattatcagacaggtctagttctgtcacatatttgcccaccgtttggggaacttcctgtagtcgacgattgctgcactctgcaataactgagtcattttgctttttctcatcacaaggatagcttctagaaaaattttcttcggcgcataactcacaggaaccagatattagcaggaaaatgcaggtcagcattgacgactgaaggaacatgttttcctaaggaaaatcaaaagtggaagcacagtattagagtagcagtatttgccaggtgttttgtaaataaattagcagcgctgccccatacttgtatgaattttgatgtgtgcattcacttaacaattaaataaattgcatcagattaggtccagaatgattttactttttt

SEQ ID NO: 828266 - DNA, 555 bp, Homo sapiens
aaaatgtcatcagttaccagtctccctccactgaaggacccagatagtcacttagatgatgaaacaaagttttcttaaaaaattgaaatcggaagctaattaatagtcaggcgtggtggctcatgcctgtaatcccaacaatttgggaggctgaggcagggagatcacttgaggtcaggagtttgagaccagcctggccaacatggtgaaaccctgtttctaataaaaatacaaaaattagccggatgcggtggcacatgcctgtaatcccaactactcgggagggtgaggcatgagaattgcttcaacctgggaggcagaggttgcagtgagctaagatcgcaccactgcattacagcctgggcgacagaatgacattctgcctcaaaaaaaaaaaaaaaaaaaaaaaaaggaaactaattaataaaaaagctatttgaaaagagtagggcagtggaatgtaragaggtgacatccagggccactgcatgacattaataagctatagatgcattttccttcgtgaagcctttcctccactaaaaaaataataat

SEQ ID NO: 828267 - DNA, 505 bp, Homo sapiens
tgttctcccgctccaaggttctggggccccttttgtttgggaggccctgggtgtgtgtgttgacataattcacagttccccaagccctctcagtgcgcgctgtaccatgtctgggcctcatggcagggatccattggcttggctgtcaccatcctcgctgtagagtccccaggcagctggggctgtgcagcccagctttagcggatgaagtcaaacgcgcagtccacaaacattgcgctccgggtgaatcctggctcgcgccgatttccagctgctgctactaaattgattgcaactggaatctatctagtgtcagcggctgtgctactcctcggggacaatcatgcttgactaaactgcaaatttaggaggcagctcaaatctttgggcaacatcggtacatacccccctttcatgctcacccccaccttggggatacacyggccaagtggaggagctgatggcagactcctcccagtgtgtccctgttgtttatttactttga

SEQ ID NO: 828268 - DNA, 685 bp, Homo sapiens
aggtgatgaagccaagatccgcggatccaccgagggtcaggggcccggcctgagtcgcttggctggcggcagctctggagttcagccacagtgaagctccctcctgggattccaggacccatcacagggcctrgctcggaagatgcgctgcttccgggcttgccagcgtgtggagcatttcaccggggatttctaagatcgtgtggctcttgcttaggtatgattaagacgtctcataagataaactctcacagaggaaagaacacgtctcctcctccccttggggccaggcttgggtagaggaggtacagccgctcctgggatcttcccatgtcccgggcggttctccagtgcctgaggcacagacaccagccccagagcccccacctcagcccggagccctgcacagggcctgcaaagaacatgggggtgattattgcggcgatacctggtgctgagactcaccaggtctcacacaagcattaactctatcaaccctcacaaaagcccacaaggaaactggggctcagagagggtgataaatgtgcccagggtggcacagcaggcacatccaacccaggtcctgctggttccagggcacactgagtctgctccccacccccaggctctgctcaggatggatgggtgggagctctgcccctcccagcccttctggcccagggaa

SEQ ID NO: 828269 - DNA, 621 bp, Homo sapiens
  misc_feature 1, 2, 3, 4, 5, 6, 7, 8, 9, 10, 11, 12, 13, 14, 15, 16, 17,18, 19, 20, 21, 22, 23, 24, 25, 26, 27, 28, 29, 30: n = A,T,C or G
nnnnnnnnnnnnnnnnnnnnnnnnnnnnnntctctccaagcaacagctatttcaactaacagacagttaagaaattttttaccattacagaatttttaaaaactcctctgagtggtaatggccagacaaaaaaataaaataaattttaaaattagaatttaaaacaccaaccttcaagaatccctttacaatatcaaataataaaataaaaattaatttaattaatatcaaccatcaataccattatatccaatgttctccccataacaaaatcaatatgatttaatttagttttatgctaatatacaatatatgcaatataaatttgttcatcaatttcatcaatctaattctgttcattgatctggtacaacagtgttagtactataaatatacacaatagataacagatcaatcactattctactagttatttacagctatcccagggctatgtttgaccaaaaccgtatatgtcttgaagacagccaatsagtcaacacaactcatcctccacttccgattctagttccagctatgtcatcttggtttgtatgagccagtggtactcaaacgggaacatttttttcccccagaggacaactggcaatgtctggaaac

SEQ ID NO: 828270 - DNA, 518 bp, Homo sapiens
gtgaaagccattttggtaaagagaagtgattgtaaaaaggaaggtggaaagggggacttttagaaaatagataccaaagatgacagtgttagttctgatagaatgtattttgagccactctgatttgakacttagataccagaactattctagttaataaaatgaggcatgattagtataagaaagaacacttaaccttcctgctactaaggcaggtgggggcattcatccagattatttaatatgtgagacaaatatgttcaggtaactgcttgtctgtttataattgttttatttaaagtaatagttctcaaatgttttagttttgaaatcctgatgctcttaaatattgagaaccccaaagagcttttgtttattctggttttatctgttgttatttaccatatcagaaatgaaaactaggaaatttaaaaaatacatttattcatttaaaaataataataacccccttattggttcattgaattatgccaatcttctgatttttgtatacattt

SEQ ID NO: 828271 - DNA, 552 bp, Homo sapiens
tttccacttatagtgattcaataaactatagtgattcactaaactgtgtccatccacacagtggagtcctacacagctataaagaagggtgaggaagaagatctccagaatacaccagaaactagttacaaacactgggtgggtacaggatggaaagtaagaagactgggaataggatagttgggacaagaggagaatgttgctgctttcagtatacattttttgtatagctctgactcaactatggttatgtttcacataacccaaacataattaaagtcaaccatgaaagtgtgggaactcagtgaaatacaaactattaatgaacttattattacaaatgagtaacaccacactgaaggggacagggaagaaaaccaacatatataactttggaaaatagtattatcactgtatactgtaagactgaagacaaaatgaatgatcacaaaggctrtagctagtaaaggggatgggttagcaatgcaaagctacctttcacatacactaagactgagcaaataagtaaatacgttgtggataatgagagca

SEQ ID NO: 828272 - DNA, 576 bp, Homo sapiens
acgtgaaaaagagactggcctagcctcccagcctacatctttttcctgtactggatgcttcctgccctcaaacatcagattccargttcttcagttttgggactcaaactggtttgccttgctcctcagcttgcagacagcctattgtgggaccttgtgatcttataagttagtaaactccttttgatatatctatatctatatcatctgtatctatatctatatctatatctatatctatatctatatctatatctatatctatatctatatctcctattagttctgtccctctagagaaatgtgactaatacaatccttaatagaatactaaggtgtggttaaaaaagcaatgaaataactaaaaatggactaattcatgagacattcaagataaattagtaagttcaaagatcaagttgtaaggtacagatagatcttaaatttatgtttttaaaaattcataataacatgctagtatgtgaacataaaaagcattgatgtacttttcataagtagttatttggggttgggggatggcgagaaaatgaagaacttttctgtattatatacata

SEQ ID NO: 828273 - DNA, 607 bp, Homo sapiens
gctgtggataccaattattgggatgtgatcaatatctactgagtgatagtcagtagatattgtaattttttttgttaactttccacacatttacaycttcctagttagactgtgggcagaactatctaaaacatcttcttacccttcgtggtgacaaataaatgacatgcagctatgtatgtatgcatacacacagcgtgtgcgacactgttcaaaagctcttgatcataaaggtaatatatcttcatgtttaacaaagttaaaacagtgcaaaaggaaaatgaaagttaaattttctcaattattttgagtctcccaacccattcctttcattccttaccctctcactgtctgttcccactccacagaaggaacaataattatttatgtgggtctttcaagaaattttctatgcatataataacatatatattataaaatatattttaacacaaatgagattatgttatgtatacagtcctgaaacttgataattttatttgtttttttgtttttttgttttgagacagagtcttgctctaccacccaggctggagtacggtggtgtgatctctgctcactgaaacctctgcctccctggttcaag

SEQ ID NO: 828274 - DNA, 625 bp, Homo sapiens
actcaaccatcagactcacaccttcaacagacacttcaatgaacacaggctatataccaaagactgtagagaattaggatgctgcaccagagaaaaaaagaagtcaccgatgaaccacgtttctctgtccactcatttgggcaatggtgatgtattctgagacgaagaaatggcagatttatagaagtcatgttttgactgttttatgtttgagatggcatttgtgagctgtatcaagaaagcagttagctctatgggtgtagggttcaggggagagcttaacttagcaattattagcatacactaattagaaagtttaattctcatcagaaaatgtgtttcagccataagataatatttcaccttattctatacattctctactttgttgcgtctgccttggtgctgcagtcacatctaattttcagcagatccatgtatactcatacccaaaatccaatgaaataaaataaaacaaggtaacaacaactgatgtgtagcattttaatttarcaggaccaaattgcatacaacaacacaagacctattagaattttgcttttctttctcccacctttcaaatgcttcttttggatttcacatccaaaatgaaaacatccacagg

SEQ ID NO: 828275 - DNA, 498 bp, Homo sapiens
cttcacacagaagataatcacctgcraagtctataatttccaggctgactctttagagcaaagatggggatcagttaagtgaaacatctaagagcgaatgaactcaaaggaaaggatctttagaaaattccatccatgttgtggttgttaattaaccattgatcacccatcaagtgcctggatgcatatcatttcagataatttctactctgcaggaaggaaccttaaattgttacttttgaaagtagaacaaatgtttttgttcttataatttggtcagatatttctgtaacacatgctgagtagagaggaaagagcaggtggcattgtttagaaagagctgatcagggattaagtgctgcaaggttacagtcagagcttttcatgtgctgtccaggcagaccacagaggatgactttattacaggaacgtcccgcagagggtctctgttctctttacaagtttggcaataaattaggctggacagggtacttccgg

SEQ ID NO: 828276 - DNA, 577 bp, Homo sapiens
gcccctgttgcaggattttagaaaaaccactggttgccatcattggaaagtggtaatttaaaagctttaagcttggtaaccccaaaggtttkggggaaaatattagttctacctggtttaaagtatctagagaggaccctgcagtctttgaaccacagtggtccaatctaaagatatagtcaatgcattattcagtgtgttttaatggaatgggagacagaggtgagtgggagacagaggtgagtaggagacatcgtatatgacacaggacatttgacaaagactagagacatttttgatttggagcgcactgatggcatctagttggtagaggccagagatgcttgtaaacatcctacaatgcacacgacagcccctgccactacaaagaattatcagtccccaaataccaatagtgtcaaggttgagaaagcacgctggaaatccatatgatctctccaacggaagagactgctgcttctatatcttgcttagaagacagggtaccttagttccagacttccttgattcagaactgcttttccaagctaggatcccatcacctccgctggtccct

SEQ ID NO: 828277 - DNA, 633 bp, Homo sapiens
ttaacttatctgacattatcagggatcccagtgttccatatcaatgaattttctttttttatttggagacagagtcttgctgtgttgcctaggctggagtgcagtggcatgatctcggcttactgcaacttccgcctcccaggttcaagccattctcctgcctcagcctcccaagtagttgggaccacaggcgcatgctaccacacccggctaattttttgtatttttagtagagacggggtttcatcgtgttagccagaatggtctcgatttcctgacctcgtgatccgcctgccttggcctctcaaagagttgggattacaggcgtgagccaccgcaccccaccataaatgaatttttaaggcaacttaagcaccaacactttaatgataattaaactgccatttttcttccctcattacacagattactaaaagtgatttttaacctttgttagggttgtcacgattattttcagcctagatcccttctgtcacactgcccttacactttagctctttaaattactcctctatcctcattcatctatgcaaatatttactggacatctaytccatgccaggcaccattctgtgcagcagtcacaaagcaaggaagttacctcattggtta

SEQ ID NO: 828278 - DNA, 559 bp, Homo sapiens
tggcctgcatgcatttatttttgtagagacaagatctgttgcccaggctggtctcttaactcgtggcctcaagtggccttcccacctcagcctcccaaatagcatgagccgccttgcacagcctaattcttgaagataagagttgtctctttggtctctttgaaaagaactctgagagtattatttgtttctgggacaatttttttttcctattctctcacacacatatatatatttgtagagaccaagtctccctatgtttccccaggctggtctcaaactcctgggctcaagtaaatcctcttgccaaagtgctgggattagaggcatgagccaccacacccggtccaatttttaaaaagaactttacatcacataaatgtctgcaaaagcaaagctgcaacaaatttaacacatcttccatttgaagttccaaaaatcaaaattctctaagttgatctcccygcaccccatcctaagcaccccccaaaaaaacacacacaaaatctctaagtacttcttactaaaacagggtgaggagcttatattattatcttca

SEQ ID NO: 828279 - DNA, 450 bp, Homo sapiens
cctgctcgtgtaaaatcggagagcaggtcaggatctcgtagtccatcaagggtttccaaacactctgaatcccattctcgatcaagatcaaaatccaggtaagtgtgtttaagataatacttaaaatattcttctggggtttttgaggacaaagcagttgttggctgcattttgtgtagaaatttcacgaaagactcaaaattatagtttttctcagactgctctttgtaaatgaatactatatcccagacaaagacttggaagtatggcttgagcccaggagttccaggctgcattgattgcaccactgcaccacagcctgggtgccagggagaccctatctctgaaaaaataagaaatcaatactaaaatcatctyccagcccaattaatatattggatagttgcaaccagtacaaattatgtgtatatagccatcaatttaaatgtg

SEQ ID NO: 828280 - DNA, 609 bp, Homo sapiens
tttttttttttttgagacgtagtctygctctgtcgcccaggctggagtacggtggcacaatctcagcccactgcaagctccgccttctgggttcgcgccatttcctgcctcagcctcccaagtagctgggactacaggtgcccgccaccatgcccagctaattttttgtatttttagtagaggggtttcaccatgttagccaggatggtctcgatctcctgacctcgtgatccgcccgcctcggcctcacaagttgctgggattacaggcatgagccaccgtgcccggccccaagtgatttttcttgcttcatctttccatgtagctgggaacataagcacacatcactgcacttagctaagaatcaaaggatttatttatttatttgagacagagtctcgttctgttaccatgctggagtgcggtggcgcaatctcggcttgcaacctctgcctcctgggttcaagcgattctcctgcctcagcctcccaagtagctggaattacaggtgcctgccaccacacctggctaatttttgtatttttagtagagacgaggtttcaacatgttggccaggatggtcttgatctcttgatctcgcgatctgct

SEQ ID NO: 828281 - DNA, 583 bp, Homo sapiens
tagaaatgtaaattagtacagccactatggagaacagcttggaggttcctcaataaagtagaaatagagctatcctatgatccagcagkctcgctgctacgtatatatcaaaatgaaagaaaatcaatatatcaaagagagatctgctctcccatgttcgttgcagcactgtgcacaatagccaagctttgggaggcaacctaagtgtccatcaacagacaaatggataaagaaaatgtggtgcatatacacaatggagtactattcagccataaaaaatgagagtcagtcatttgcaaaaacatggatggaactggaggtccttatattgagtgaataagccaggcacaggaagtcaaacatcatgtgttctcacttatttgtgggatctaaaaatcaaaacaattgacctcataaccatagtgagtagaagagcagaggctgggaaggacagttgggggctgagatggagaggtgcggatggataatgggtacaaaaaaaaaaaccatggaaagagtgaataagaactagtatttgatagcacagcagagtaactataattaataatggtttgtacatttt

SEQ ID NO: 828282 - DNA, 494 bp, Homo sapiens
cagaattcggacccaggccatttgagtaccagtctaaatttcttcataaagcaccttactgcatttaccattcatttgttgaccrcacattatatggttcttcaggaattgacaagatttatttatttatttatttattttgagacggagtttcactcttgttgcccaggctggagttcaatggcatgatctcagctcaccgcaacctctgcctcctgggttcaagcaattctcctgcctcagcctcccgagtagctgggattacaggcatgcgccaccacgcccggctaattttgtattttttttagtagagaccgggtttctccatgttggtcaggctggtctcgaactcccgatctcaggtgatccacccgccttggcctcccaaagtgctgggattacaggcgtgagccactgtgcctggccagacaagcttttttttttggtaaagaatcatatagttaatattttaggcttgtggtccatatggtctt

SEQ ID NO: 828283 - DNA, 627 bp, Homo sapiens
actgcgcctggctcctgggatatttatcccctggctccattccccattgtcaagttgccctctgcacttctgagctccacatgtgctgagacagagtaagctcccccactgtttgtggcatcagaggatcccagggaagaggcttcactgtcagcttgcaatggaagcctgcaaggaactatcccctgcaaccatggctgaaatcagaagacaagcatcttgtctcctttgttctccagatgtgaagcagaacatctgatctgtctgctacaatctactttgcagaagtgttaggaagactgatagaccctccaggcttgtacggttcttagcaaattaccatgtaaataacaaacactcacaaatgttctcagtttgtatgtagatgaattgttgaacttctgttagcagcttaatgaatcctacttcgtttaatgttcagacagcagtgctctgtaggggagaatatgctcattttacagatgaggaaactgaggctcaaaaactgactttgcagcttgttcagagtcaaaccactaataatcagaagaacagktttgtctattctgctttttctactgcaccacaactccctggtgggagaagaaggagccctctctcttaggc

SEQ ID NO: 828284 - DNA, 621 bp, Homo sapiens
gttcccagggggaatatggctgcctttgctgcatcatacatatcaccagggaagtggggaaaaccagcagtgacaggtgtcacccagcttccatgcagccagaaaggccagtctcactcccatcatgacccaccaatagcactgagtttatgtccaggcagcagggctgagatcttcccccaggctaccagcctccccactgagaaagcaagcagggctatcaggtcttgcctctccctgcctgccttattacagaggtcagctagaagcttccttcaccctttggcccctccccaattctgctggctgcctttcccaaggatccctgtgagataaggccagggatggcttccctgggcttggactggagaccaggggtgcctacagggctctttctattgcttcttctacttttatattttgctcggttccttaaatctgctttagctctaggtaaggttaaatccttctctcccatgatctgattttcaggttccctagtggggatgtrggtttggaggcagacttttctccctctcacacattgaaaactcagtttttcagctgccttgcagagtttgcagcggcaagctgcttctttcaaagggtatgtgaattctt

SEQ ID NO: 828285 - DNA, 621 bp, Homo sapiens
gttcccagggggaatatggctgcctttgctgcatcatacatatcaccagggaagtggggaaaaccagcagtgacaggtgtcacccagcttccatgcagccagaaaggccagtctcactcccatcatgacccaccaatagcactgagtttatgtccaggcagcagggctgagatcttcccccaggctaccagcctccccactgagaaagcaagcagggctatcaggtcttgcctctccctgcctgccttattacagaggtcagctagaagcttccttcaccctttggcccctccccaattctgctggctgcctttcccaaggatccctgtgagataaggccagggatggcttccctgggcttggactggagaccaggggtgcctacagggctctttctattgcttcttctacttttatattttgctcggttccttaaatctgctttagctctaggtaaggttaaatccttctctcccatgatctgattttcaggttccctagtggggatgtgggtttggaggcagacttttctccctctcacacattgaaaactcagtttttcagctgmcttgcagagtttgcagcggcaagctgcttctttcaaagggtatgtgaattctt

SEQ ID NO: 828286 - DNA, 456 bp, Homo sapiens
tgatgctacatgctggtcaaacggaagtgactcagttcttgctcttaagaaactgaatctagaagagaagacacaagtaaacacaatagttgctctagggcaagggtccccaattcctgggccacggactgacactggtccacggcctgttaggaaccaggctgcacagcaggaggtgagcagtgggcaagggagcattaccgcctgagctccacctcctgtcagatcagcagcagcgttagattctcttgggagtgcgaaccctattgtgaactgcctatgggagggatctaggttccgcgctccttgtgagaatctaatgcctgatgatcttttactgtctcccatcactcccagatgggaccatctagytgcagtaaaagaagctcagggcttccactgattctacattatggtaagttatatagttatttccttatatattaaaatgtaata

SEQ ID NO: 828287 - DNA, 563 bp, Homo sapiens
gagtgtgagaattatttattgtataaatgaatgaatggggcgccaaggtaaatctataaagcagtgcttctacaggcattttgaaaactatccaaaaggctaaaagagccacattaaacctctttagtgcatcacaggcaattgatttaatttatggtgatcatgagttgttgttatcttcttgagacctttgtgcatagagagtttaggaaatacttagactcatgggtacgtgggtctaaatgtaaaactagactccagggaggaaaagtcctttcctgtgatattacatttaattttgcagctacatctcattccttcattctgatttgaatttgctcccccaaagatgaatattgctaagatgaggagttgacatctgcaatgggttgtgactccaattcaatgaattctctattccaaaactgcactttggaaaacttggatatcagtttccaaaggtacrctttggaaaaaggaatcatgaacccatgtgaacctggccctaaaaatattggtatggccgtaggaggtaccaagaattcaggaggcttagcccctac

SEQ ID NO: 828288 - DNA, 604 bp, Homo sapiens
gtcctaaaacacctgtcattcatctagtgttactggggwcctgctatttgccaggcactgtgctgtgcattgagaatacaaaggtaagacagcagctctgccctgaagaatttttagtaaggagtacaggaaaatatgcaaaaaaacaaaaacaaaacccaaaaaacaaaacgaacctttggaagaagcagcaggagaatcagggcaagcttcccaggagaagcaaaatctctcaaacgcacgttgtcagtcatcaggcggttcagataagactttgaaaacttatcagcacacgtcttccatcactattagaaaaataacttgagtgtacccaaccccagtttatcttccaagttggtaacacatatctatgtgttcctggaagctttgaccatatggcatggtcaaataatatatttattaaaatatattctacctttaaaactgattaagtttggggagaagagaaatagcaaattgataaacggtcttctgtagtaacatgtttgagccacaacgaggcgctctggattcaagaatgagtgggcttctcttattgtacagtctcttctctatgaggggctttcaaagaacaaaatgcatt

SEQ ID NO: 828289 - DNA, 640 bp, Homo sapiens
aaaaaagaagacttattgtaaaaagtataagcaaaatgtgggaaacataatttttaaatttggaaataatatagaaaagtgatattcacctattcatacatatcttgctaattgtgctgagmaaaatagtaaaggaaataacacaatactgaaaaaagaaacatgcaaactgaatttattatctcttaatctctggttggtttaactttggaatgttaaagggtggttggcatctaagagagtgttagaaaaatgaaaaaataagagtgtaagatatttctaacaaatatatattggaagtagagcagaaaattcattttttcttcagaaatttagtcttcatttacatgcatgagtttcaccatgggacacataatgtattatacagaataatagggaactgtaaagcatgtagagaagagttgaactaaaggctactaaatataagtatcttgaattataaataaaggaggaggaaaaaataagaaattaaaaactaaaatagttctgtgaaaaaaatcattttgcaaaaatcctgctaattgtaaaggaaaagaattagaaatttgattaggactggaaagaagatgtagaggaaaaaaaaagagctttaaaatgtttaatagtgagcctcccaagt

SEQ ID NO: 828290 - DNA, 558 bp, Homo sapiens
acagtagttcatagagacaattgtcacattgcacattttctcattgacaatttaacaatataatcaatcaccgtgtttttctgtacatgtataaacacaatatagccacattcagttagtatttaatttgaaataattgtatattcacaaaattcacaagcatagccaagagccgtatttgaagaggagactgcagagaacgttctgtagaaataaaagacctcaaaaatgtcagtgttagtcaaccaagaaaggaaaagatgaacaaaactctattaaattgctgtctcatcttctatcaatccaattcaatggatgaatccttcccactgtactaaaatttagtttctgattggtactttgttattttttcatcattttaaacaatgccaatttaaattatatgacactgcaatgtaagtacctgatgtgtctaaatgatgaaacaccaatccttgccaaaaatgatagaacagcmcatactcagtattaattgtgacagctattgcggtccctagattacaaacagcttttccttagttaatcgagtagaggtac

SEQ ID NO: 828291 - DNA, 490 bp, Homo sapiens
gactcacgtctgagtcacaagattagggactgcaatcaagagtggaaaaaatcttgaagaattgactcactaaagcttccgtcagacattgacagctcaatggagcattgctttgcagcccctgtaatggtaatcatatgaaagcatttgccccaccccagggtgaccgtgggaacctggagaagttaagaaatgaatgtaatagactgaactgcaagctgtggcagtctgggtctggaaggagaagaagctgtagaagatattttccttcagtagcttctccacagccatggtgggagatggcagaaacagccagcatcacttctgggaggtggaccacagaagagaaaaagaaacaacagacccaatagggtaggtaaaggatgccctccttcactcargagaaacagttctttccttctcagtctcctctgagaggaatttgaagagatagagttgggggttgagaataggctggagtggctataga

SEQ ID NO: 828292 - DNA, 475 bp, Homo sapiens
ctttttcgttcaagcatttaatctggaatttgtttgaatttgcccaatatgcatttactacagtttttcacagaaacctttttttgtaatattgcttstttttaaaaccgtattttagccactttcacagtaaattcttaagatgaacagctgtctccaaaatactgctcatcctgattacagcaataaaaattaaagtataagaaaaaacagcaaccacttgacattcatttgatgaggtttttgtagtataaaaacctaaatttgtcactaaactttattaaaacaaagaacttgtctaaaagtaaaagtacagaaataaaaccaaagtaaaagatgaactgatataaataattagatatagtggtgtgaaaatgcagacacagatacacagagaagtacaaaatgccaaatgcaggtttcctacgtaaacagagctgtttttgaagacacaaggaagaaaattgccgaaaga

SEQ ID NO: 828293 - DNA, 629 bp, Homo sapiens
taaaaaaattgagatcatgaaatataaatattttcctaatgttacaagtcaaaaaattaacaagcatttttttttttttttttttttttgagacagagtctcactctgttacccagactggtgtgcagtggcacaatctcagctcaccacaacctttgtctccggggttcaaatgattcttctgcctcaacctcctgagtagctggtattacaggcacctcgtccacacctggctaatttttgtatttttagtagaaacagattggccaggctggtctatgttggccaggctggtctcaaactcctggcctcaggtgatcctcctgtctcagccccccaaattgctgggattacagacgtaagccaccgctcccagccaaacgtgaatttttttaagccctgtaaattatgtattttacccaaattatattttaatacttaatcaattgcatacatttaccattaacctaagttataaaagttacttaacattgtcataaataactgctcatttattaaatgctaattttatgaggaaagaaagttgtcactagatcattagataagtttgagcacaaaactttagtgaaaaggaacaactaacaygatcacaatgtgttatatttaag

SEQ ID NO: 828294 - DNA, 590 bp, Homo sapiens
aaatacattggtttggttcagaaaggcaggacaactaaaagcgggggcttccaggytattggtaaatttaaacattttctggttgacaattggttgagtttatcagaagatctgaaattaatggaaggaaatgttcaggttaagataaaggattgtggagacctagttttattgtgcagaggaatctctcagatagcagacttcagagagagagcaggttgtaaaatgttccttatctgacctaaaagggttcctggctcttaattgattgattatctcctggatctggaaagaaaggaagaaaaacaaatggggaagaggattctctaaagaatgtggatttttcccacaaaagactttgcagggcaatttcaaggtatggcaaggcaatatgctttggggctaaatattttttccttgtcttataatgttatgccagactcagattgaaaagtaagtcacaatatgtagggtcaaataaaacgcatctgatgagaatttctggtttgtagggcataaatccctggatcccttaagtaggaatttggacaagataaaaaacagagcttactcctcagtctcccctcttg

SEQ ID NO: 828295 - DNA, 594 bp, Homo sapiens
aggaggaaagaggaggagtatgaggaagattgtgaaggggactgccaacccttatacagggagggttatttcctttttaattaaatttctagacatgcaatttgccttttccgatatattaggtttttcatcagtttttttctcatatagtggcaaatcacgaatggctcattacaggaacaatcataggagggaccacttcggggcccactcataccaagcctgcattttaagcataaatacaccttcaacagagaattgcaagtgaaaagtcaaggtgctaaaaaaagacccaaggggatttttaactctcacacttcaggtgcattcaggaaagagaaacacccaaattctttcattttcaaagaaaataacataagatatttctatatcttctcatagctcagaactagatcccacaacaaatgggttcctgcataactcaatttctcaggatataataaataagaagaaaatgtracttgtgcctctccaatgcccaatttattattctgtccttttcttaacatacataacccaggccggggtcacacctgtaatcccagcactttgggaggccgaggcgggcagatc

SEQ ID NO: 828296 - DNA, 498 bp, Homo sapiens
atcagcgtcccctgggagcgtgttagaaatgcagatcctcaggcctcagcccaggctcctggctgggagcctgcaattacttttgtctacaggacctaaagtgtgagcatgctccgctgacgccctgggtgaggccccgggatggacagtggtggtgttatctctacacccaggcaccgaggttgctcagtcaccccttcggggacacaggacacagagctcagcttgtgttcttgttcatttttacttgattggctttctttcagtggggcaacgcacccaccttcttgtcttgcccagtctctgctatatataaatccaaataaattcttacctagtcctggcctggatgcctacagcactccctcacatgccccctaactggtcttgttctcrtgtgcaccagctcctgggtgctctaccaagagtcatccctggccccatggggggaaatggcagccccctgtcataggctggggtggagtggtcaaaggagaa

SEQ ID NO: 828297 - DNA, 545 bp, Homo sapiens
ccagggaataatttgacaattctattcatttcatcaatatttactttgtcttcaatgcccagtgcactgtgtgaatgacggttttggctsgagttaaacgtgaacatacaaatgtctcctcgacaagcctaagaggtcttattcacccatcaaggctgccccggcttacttcttcctccgtagcaccatggacgtgtcctcctggcttgcacagctcacagttagttctacctggccaagaatgtaatcgctcactactgttgcgtggtattttccttttctaagctatacttccagctttcaagaggccaaatatcttctgtattctaaacagtcctgctatccatctttccttttgtccaggatggcctttatcctcgacggcaactatctggtaggctccaatggggacatagggaagccttaggtgaaattatttctaaggttctgcatgaactgtccattattatggaattaattcttttgtttcaggggtctggataagtttctgatgttgttgtctaggatctaggcgtagattcaac

SEQ ID NO: 828298 - DNA, 550 bp, Homo sapiens
ctggtgattggtcactctgcctggtgcccccttatgactttagtgttaggcacttattaggtgaattagagcacttatcrgtgacggttggttggttggttggatggacagaattgcttctaccaggcggctgtattccctcctgcctgataggcactaaaataagacattctagtggctttcatttcaggtcgaaaatggacagctgagtgtgtgtgatgagtgtgtgtgagagtgtataagtatgtgtgtgagtgtgtgtgaacggatgtggctgcacatgtgtgtgtgattgtgcgggagtgtgtgtgtctgagtgtgggtgtgagcatgcatgcatgagtgtatgaaaacacgtgtgagtgtgtgcagatgtggagggagcggaatgggtgctggagacatgggcaaggacactatcgcttttgcagtgcctgctacattttctcacttcacactcccaacaatgccatgtggtagatgttataatctgtgtttatagatgagaaaattagattctgagaaattaagtaccctgccaagtcattct

SEQ ID NO: 828299 - DNA, 523 bp, Homo sapiens
acccaggctggagtgcagtggcgtgatccttggctcaacrcaacctctgtctgccgggttcaagcgattttcctgcctcagcctctcaaatagctgggattacaggtgtgtgccaccacacccggctaatttttgtaattttagtagagatggggtttcaccatgttggccaggctggtcttgaactcctgacctcagataatccacccgcgtcagcctcccagagtgctgggattacaggcgtgagccactgtgcccggccaagaccatgcttttcagaagcactcttcattagaatttttaagttggaaggatatttagaaattcttttctttaagcctctttgatcaagatgaggaacttgataccaaggtggctagaggaggcaccactaacctcagatagttagtggtggccccggccaggacccaggcctactgactcccagcatatatgtttttgccacactgcaccagtgtctagagacatcattgttgtcttagtctgtttatgttgctatcaa

SEQ ID NO: 828300 - DNA, 658 bp, Homo sapiens
ctgtagctatgtcctttatgtctgcttttaagattattttctatttgtcttttttcttttttattctttattgctttggctagtagtttgtctaactagtttttttttgttttcaaatcaactttttttttttgctgattctttttagttttattcttgtttttaaacattttattaatttctgcttttactgttattattttattttatatactttgtagttgatgctctcctaattttttgagttgcataggtgagttattgatttttactctttctgaaaatgtatatagcattgagaatataaattttttcaaaatattgctttagctttatctcataagttttgatatgtacaattttcatcattcaattaattataaatattttgaaatggtcattgtaattagaatacataaattatataaattttaaatttctaaatatatgggattattttttgtatttgacttctaatctgattgtacttgttcagaggctgatctgaatgacagagattctttaatatttgttgagaattgctttttgttctaatagatgatcattttttrtaatttttctacataggcttgagaaaagtatgtttaattggtggatgcatttttatatgcaaaatatgaagcaatgcatagtaata

SEQ ID NO: 828301 - DNA, 616 bp, Homo sapiens
tgttccagtattttaaattaagtatttgatatttgaacaaatgtttgaggttgataccataatgtatacatatatataatattatgtatatatatatggattttttttatatggggtctcactctgtcatccagcctggagtgcagtggcatgatcttggctgtctgtaacctctgcctcctgggctcaagcagtcctcccacctcagcctctcaagtagctgggactacagatgcttaccaccatgcgtggctaatttttgtatttttctagagacagggtttcacaatgttgcccaagctgatttcaaactcttggacttaggggatacacccacctcgaccttccaaagtgctggcattacaggcatgagccaccgcgcacagtcgaggttggtactattaaatctcattttatggaaaaaacctcttaggcttacataagttaaagtatgttgcccaggctcataaaggcagtaagtgtgtaggccagaacttgaagtctagtagtccttattccagagctctratgtcttcctgcctgtgctgactcccataatctgcagtgaagcagcagggaggcagttttgtaatgggctttccactgggctgggtct

SEQ ID NO: 828302 - DNA, 566 bp, Homo sapiens
ataaagttgggcgggggctggttctccccaggcaaaaatcagaaaagttagatgaccttatctagattaagaagggctaatattaaaagtagcatggtgccctcttctatggtacatctcatgattgaattttccctttaggagctgccaaggaaactgaattttctaagaaaaaaaatatcaggaggaaacagtaactctgttactcaaaagcattgttctttaaataactaagacatgagggtgaagaggagatagcctaagtggacattcaactttgatgctttactgtattgaggaggaatgagcccaaatgacattttgaaaatattatgccctgctagtgactggaaataacagttgacaaatttaatttcttagcaagtgtacgtgatggtaattgaagccagaatatagtttccaatgggaaaaatttccattttgagcaggggagggatgtagaattttttcttatgrtctaacggttattttctatcttcatttatattaaaggttccagatagatttcatcactcaagataagcaaatgaaccacagaattttga

SEQ ID NO: 828303 - DNA, 585 bp, Homo sapiens
gtcaaggatcccacaattcagagagttaatagaggcaatactccttgaagttagttacttactgaagaaaaagcgtgtagcagtgctttgttaaatgacaacaattctatmaagtgaataatcctgtatgaaggtttttcatcacctctcttcataagtggtgcactatatgggggcgggggcagaaatgcaattgaggcaagagaataggtatctttttaaaaactaacattatttttaacgagttatcaaattgaaattgtccatgagttgcacataatttcaaacgtctcaacaactaaaattggagcatgcttaaactctctgcccaccacaggcacaacgttatatggcttgtatttgtgcatagactcattcatgcttgtacacctccacacaaacacaagccatacatacatacataacacttaggatatgacactaggtatgtgtggaagggtgggctggagggtggttgctaataaagataatatgagaggccactccttcccttttggagtcccttaccagtaatttaacagaaaactgacattattccctggtcactcatgtataaatttaact

SEQ ID NO: 828304 - DNA, 625 bp, Homo sapiens
ttatatagaaaagtcaaatgaacaataattagactttttgttttgttttactgcgggaaatagatcagtcaaggtcagtacccacttgtgatataaggatcttgagaaatgaagcaattaataaacaagcttcctttagtgattggtgatgttgtgactggtgctatgtctacactatcagggtttgtgcaccaagcacagatgcaaccctgtgtcactgattgctatttgaatcatatttggcagagggccgaggaccatgggactccattacattgtttggtgactggtcagcaacatcctgtaaaaatcaaaacccatttggaaagatcccttactgggctgagactgggaagtcagactaaagtggagaagaagaaatcagtgacactttaattctttattcatatcatccccttgttttagtgcctgttgtagacattgctaaaaggggttccatttaggagatttctcattttaaaagaaggtctagaagccattaaaactatctcaaaaataattctgaaatgcttagtttatatttaataagcacaaaacacttarggtatatctgccattggtctaagtgattatgaaatactcattcacttacagcagtgaggga

SEQ ID NO: 828305 - DNA, 646 bp, Homo sapiens
tacttattgaataattatttgatcagttaatggactgcaatgtatcccacaagatattatatagtcatagatatatatacacacacatatatgtaaagattatgctaattgtcatgtacacatatatgtatctgtgtaaacgtttattcttcttactgaaattctttcaaaatagcatatagaaatataactatttactcttaaaaactttagaatcatttgtcatttgccaaattgtcaaaaaatggtattttgattggattgttatataaattacaaaatagtttgtgaaaaaaatctacacctttacaataatcaattttgtcttctggaaaagtggctactatattttcaatggtctaaggcttcatgtttcattcttgagtaaaattctatgatttttaatatagatcccaatttattatttatgaataacataatatgatattatatataggcttaggatctatattatttattaatatattatctattaatataggtcctaatcctggctatacaaaagaaccatctgaggagttyttaaaaattgccatttgtgagccatccccagagatatttcctaagagaaagagacagacagataaatgtagatttataaataaatatagatttaaatatagac

SEQ ID NO: 828306 - DNA, 646 bp, Homo sapiens
tacttattgaataattatttgatcagttaatggactgcaatgtatcccacaagatattatatagtcatagatatatatacacacacatatatgtaaagattatgctaattgtcatgtacacatatatgtatctgtgtaaacgtttattcttcttactgaaattctttcaaaatagcatatagaaatataactatttactcttaaaaactttagaatcatttgtcatttgccaaattgtcaaaaaatggtattttgattggattgttatataaattacaaaatagtttgtgaaaaaaatctacacctttacaataatcaattttgtcttctggaaaagtggctactatattttcaatggtctaaggcttcatgtttcattcttgagtaaaattctatgatttttaatatagatcccaatttattatttatgaataacataatatgatattatatataggcttaggatctatattatttattaatatattatctattaatataggtcctaatcctggctatacaaaagaaccatctgaggagttcttaaaaattgccatttgtgagccatccccagagatatttyctaagagaaagagacagacagataaatgtagatttataaataaatatagatttaaatatagac

SEQ ID NO: 828307 - DNA, 631 bp, Homo sapiens
ctacataagactaactgtagtaacactgtactactgtaataattttgtagccagcccctgttgttattatggtgagctcatgttgtgagtatctgtttaaaatgccatgtcatgctaatcatttctataggaatagttcatctctgtagtaaattttgtatctcagtgaaaagggatcttttgcagttctcacatatttctcatcgttttttatatagtacaatcctgtaaaccttgagcagcacagtgggatgcacatgaaatgctactaataatgctgaaagtgctcctgagaaacagagacaagtcacaatattacaagaaaatgtttaatcacttgaggtgcgtcatagactatggtctgtatttggtgttgcccatttcaagataaagtaatccagcataagatccattgaaaacgagaaagggaaatttgtgaaccaccactgcagccatgccagcaggtgcaaaaacctttcatggtttataaaatatgtttttatgttgtactgaaaatgcagctttaatgtgggtgcaggattgctgtaagagtcatacttacagtcyctaatatgatttgagagaagcagtcattatataaaagcataatgcaaaaggaagtggaaagagc

SEQ ID NO: 828308 - DNA, 639 bp, Homo sapiens
ttatttattttatcttattgatagtgtaatggtttccatttgtttatttatacttctttaattttattttaaaaaagcttttggtttattccattttaaattttaatcattatattaattaactttaatatttctattaaaatttttttatgctttcttatcttaatgaccagcaagaggctagtgcaagtaggtggtattgttgagtatttgatagaaatttacattaaaaataagacctgattgtaagacctcctttcagctgctgcaaccattgttctgactcctccagggaaatgtcatttttttctaaacataggactactaaagcgcaaagcccattgtaattcacagacacctaattaataatcctcagtacaaaatgactctctccatatagacaatatattgaattactttgaaggtgctgtttctaaatttatgaggaaaacagtgtcctaaattttaagctatacgataggccatgcaaataaaatgtcacagtacagagggagaaagtacatgaaagttgtatcgggacaggattattctcatatgtattcctgccctgaccctgtgtaggaawcaggtaatgccagccttcaaacatgcgttagccctgggaaaagggcactgcag

SEQ ID NO: 828309 - DNA, 610 bp, Homo sapiens
aacaagtaggtcagttaaatacttgagattagaatagtaggaaacagtccagtgttcacataggctcacagatagaggaaggggttaagtatttcatcatgtaaacccagaatagatggaaaaaaaatatgaagtagggaaggagctcatctttaccttgtctcttctggctagcttttcatgagtatgagtagtcacaaactaagtctgtaaatagccagaggaaaaaaaacctggtcagcttatttgatctcctatatgatgtgtagatttctctgtaaagaaaaaaatcctttactctataaaccactcacccagcacatttaatcccttctagtgagaaagcactctatttcccaaggcaaatccatttcctcctcgattcttgatatattgcttatttaagtttagcataaacaactagctctatctcacaggcttgctttaacacatcggttctcaaccctgacagtatattcaatgttgttagaatcagtatggacactttataaaaataccaatgcctgagccccattgycagaaattctgtttcaatttttcgagggcacaatggtcatttttcaaacctctctaagtgttttgaataaac

SEQ ID NO: 828310 - DNA, 630 bp, Homo sapiens
caaagctataaaaatataatgtggattgtattgtttataaaatccttcaatyaattggattttggagcaatagtttgctagatgaagattgttttttaccctgattaaaatccaaaatgggatattctctgtgagacttacatatatagaaaataacaaaacagatttcctagcatttaaatggatagttcgcttgcttttcaagactaacaaaatctgctaatgctatattttgaagtttatcaacctatgtctaagaataaataatttccacaatacagtagtagctgtcatgaaacattttagttattgtttctctggtctcaggcttttgcaagtgtccttatgtactccagatcattgtgtactatttgtaagacagaagaaatacagatcctgatttttggcaagaaacgcacagagtaggacagaagcagggagtcaagctactcttgacttcctgtttactctaatagcctttggaaaacttggtgagacttccaacatccactgaccttgaccactgttgggtcattcgatggtggcattttgtggcatttatatattgcatgtaggcattactactgaaatctttggaatatagttggcaaatgcagttgggattctctc

SEQ ID NO: 828311 - DNA, 607 bp, Homo sapiens
atggcagcagcttctaaggccctacactggagccccaagtgaatcattgatttgagattaaaattaagggactatataataattttctaattttaatctgttaaaaattaatcatataacaaattggtaaagagacttaacctctatttaaggtcatattagaattaaccatactcaaaataatatcttcccttactaggtaaaatgttgtgaaaaatactatatgaatatataagaataaatagttatagctgcttaaatcttgctaattcctcttaactatttgctagatataaaatgaattttgaaagagttagaagtaacgattaagactatataaaaccaagggcaaataaagaatagaactttaaaactctagtcctatagagaaccttgagtaacctctatgaccttaatttttgctttaagatgaccttgagataaggaaccgaatattggtgtatcaacatcaactttgttttctacttaaaagcatagtatatacyatcaaagacaattgtagaatgagtaactccattgatagcaagaataattcttgagggagaaaaagaaacagagagaatgaatcagatttgtagtcaataaa

SEQ ID NO: 828312 - DNA, 483 bp, Homo sapiens
agaactggcctataatttagtaccttctatgcasaatgagtaatacacttattggccatagtatgtctcattgttaatgaggcatctcttgtaaatgaaaacatatgccacatggatttaatgtacttaatatagttttcaaaataccttctataaattatattctaaaattaaacagggcataaaagagtattttaaacaatttaattaaactggtcataaagtaatataaaattcaaaactgattcaaaagatgcacctttgaacacatgatcttcataacttatctgtctacattaaactacttggtaaccttattttaagagcccgtcattatctctaattttacctctaatattccatcataaaaaattaactaagataaattgattcaagaaacaatgtgagttggttttctaataaagttaagttatgcaactcagtagattttctgtgaatagaatgagctccaacatcttatta

SEQ ID NO: 828313 - DNA, 503 bp, Homo sapiens
taaaatataataaataaactcacaatttcataaatgcagtcataatttatttctgtaatgacagacattctatgtaactgttttatataaactratgcaaaaatcaacaaaatattgtattaaaatttaaatataaaataacactcaatgcagaagtcttgagaataagttttaactaagtgtagacacacacacacacacacacacgcacacacacacacacacagatagcctagacattcattaggaaaaatagttttgataagaaccatgaatgcctcccatactcatggagtatgccatacagaattgagataatggtgagctaggagcctttctgactcaaaccctacctgtttgagcagcaacataggttagaactatagtatctaggtttaatattttagtccaacacttactagatttgtgatttttggagaacttatttaatcactttatgtctcattttgctcattttaacaatagggacagtaatagtgtca

SEQ ID NO: 828314 - DNA, 522 bp, Homo sapiens
agaagtatagtaacagtaaaagaattaacaagattaaaactgtgttatagaactttccagtagcaaaataattctgttctaatcctttgaaagaacttccttagcatactgtttagaaagaaaaatttttaataaaattattttatatcacttgttcttttaaaattttgtctaaattgatatatccttttattcaagaaatgtctgagtgcagttcggtaagtcttaacttttaaatagtgaagcttccatctggtatttttccatttattatcacattgcctctttaatttatttaccttaaaaattcttatactaattatgtcttgaaaatagtacatcctgttacggtgcaacacatctcttaaacataacacacatgatttttagcagtgttccaagtcaccctgtgccatattcttgtgcttcttcccatggttaagaggtgagtaagtaargataatttatcttctatttatcagcaccatacttttctattcatccttaccccattttttcttt

SEQ ID NO: 828315 - DNA, 589 bp, Homo sapiens
gtgtaattaatgccactgaattgtacattaaaaaatggttaaggctgtgcgcggtgtcatgcctgtaatcccagcactttgggaggctgaggcaggtggatcaccttwgatcaggagttcgagcactacctgtccaacatggtgaaaccccatctctactaaaaatacaaaaattagctgggtatgatggcgagtgcctgtaatcccagctactcgggaggctgaggcagaagaattgcttgaacccaagaggtggaggttgcagtgagccgagatcgtaccactgcactccagcctgtgcaacagagcaagactccatctcaaaaaaaaaaaaaaggttaaaatggggaccaggcacagtggctcatttctacaatcccagaactttaggaggctgaggtgggagaatacattgaggcctggagttcaagagtagcctgagcaacatagcaaggctccgtctctatattacaaaaaaaaaaaaaaaaatatatatatatatatatatatggccgggcacagtggctcacgcctgtaatcccagcattttgggaggtcaaggtgggcggatcacgaggtcaagagatca

SEQ ID NO: 828316 - DNA, 589 bp, Homo sapiens
gtgtaattaatgccactgaattgtacattaaaaaatggttaaggctgtgcgcggtgtcatgcctgtaatcccagcactttgggaggctgaggcaggtggatcaccttagatcaggagttcgagcactacctgtccaacatggtgaaaccccatctctactaaaaatacaaaaattagctgggtatgatggcgagtgcctgtaatcccagctactcgggaggctgaggcagaagaattgcttgaacccaagaggtggaggttgcagtgagccgagatcgtaccactgcactccagcctgtgcaacagagcaagactccatctcaaaaaaaaaaaaaaggttaaaatggggaccaggcacagtggctcatttctacaatcccagaactttaggaggctgaggtgggagaatacattgaggcctggagttcaagagtagcctgagcaacatagcaaggctccgtctctatattacaaaaaaaaaaaaaaawatatatatatatatatatatatggccgggcacagtggctcacgcctgtaatcccagcattttgggaggtcaaggtgggcggatcacgaggtcaagagatca

SEQ ID NO: 828317 - DNA, 311 bp, Homo sapiens
ggtgtcaccatgttggccaggctggtcttgaactcctgacttcaggggatccacttgcctcggcctmccaaagtgctaggattacaggcgtgacgaccacgcccagttcctttgtttctactagaaatggccctgctctttctggccggggcaatctccccatgctccaaaattgaatggccccattatacctttgctacccaactccttcccctgtttgctttggatctcctgacacacgctcccatccgtacaccaaagcactgtgacctgttggcttcctctaattggtaccagactccttatgtacc

SEQ ID NO: 828318 - DNA, 570 bp, Homo sapiens
acatttaggtgaagaataggaccgatttatttgcagggctggttgagaaggagggctttaggtgcatccgttgtcttccatccacatgcaccctcctgctggctcctgctggggacatgaaggtgaaggattcccacagagttgaacaggagccgagcccagacccacctgagcttttcttcaggcagcagttccataaacacactcaccagtgcccacccccgtttgccacacctaatagagtttaggggtagaaggtatttaagcaaggccgggcacgatggcccgtgcctgtaatcccagcactttgggaggccaaggcaggtgcgtcacttgaggtcaggtgttcgagaccagcctggccaacatggcgaaaccccatctctactaaaagtacaaataatagccaggtgtgatggccggcacccataatcccagcttctagggaggctgatgcttgaatccaggaggcggaggttgcagtgagcygagatcgcacctcttcactccagcctgggtgacacagcgaggctccatttcaaaaaaaaaaaaaaagaaggtgtttagaca

SEQ ID NO: 828319 - DNA, 294 bp, Homo sapiens
cgttaagtgtgacttattcaacaaacgtgtattaagctctttgtmtggatcacagacaattgctggtgccatgaatacgaaaatgtgaagtggccgggcgcggtggctcaggcctgtaatcccagcactttgggaggctgaggcgggtggatcacctgaggtcaggagttcgagaccaacctggccaacatggtgaaaccccgtctctactaaaaatacaaaaattagccaggtgtggggtgggtgcctctaatcccagctactcgggaggctgagacaggagaatcgcttgaa

SEQ ID NO: 828320 - DNA, 621 bp, Homo sapiens
gagccacttctaaaatgtgccaattatatttagacatttagaackggaaagaactttcaagattaacctagtttaagatcctcattttataagtaagaaaaaatgaacacactctaggtcatcagtagaacatgcacagctagtcatgtttttattttattttttactgtattatgtgccactcttcaaaatgtacaatacatgggccaggcgcagtggctcatgcctgtaatcccagcactttgggaggctgaggtgggtggatcatctgaggtcaggagttcaagaccagcctggccaacatggtgaaaccctgtctctattaaaaatacaaaattagctggacatggtggtgcatgcctgtaatcccagctactcgggaggctgaggcaggagaatcgcttgaacccaggaggcggaggttgcagtgagtcgagatcgagccattccactccagcctgggggacaagagcgaaactccgtctcaaaaaaaaaaaaaaaaaagtacaatacaccaatacacgaaacttgcagggtctattctacctattctaagaaagggcacagaagttcattttgctctcacaaaagacacactccaaacatccaaactcatggaaa

SEQ ID NO: 828321 - DNA, 614 bp, Homo sapiens
ttcaggattttaggtaggagggtaaatccagtccctcttactccatcttgttcagaagtagaactatggaaaatcatttccatttgaaattaaaattcagttgagatttttgggaaccaataacagtttaaacaggtttggcttctatatcgataattcagcagtctttattaacagattggagtgttagagcaaggtagcgaaaagacagagcatctaagccaagacaaaggatgggtgggaagacttcaagtagacagaatgccatgaacaaaatggctgaggatgcaaattttatgtgtttagaggataagtagctcacattcactggaaagcatgagtctttaaatgaagccaagcttcaacataggttgggatcagattttgtagagaaggctaatgggagttataaagaaaatgagaatttctctttcaataaaatctgtcttttcctcatggtgttccccaaacttttttttctcctaagccsccactaatattcatttttcattccttcaccttctcctaatatctaatccatttcttagctctgtaaggtcggccttatttgtagctctagaaagaacttcactgctcagtaaggtagacattag

SEQ ID NO: 828322 - DNA, 536 bp, Homo sapiens
aaaatctacatgtacttgtagacgtttgtttccccaaaagatcaagctgtacacctgtttacaattataagtgctagtgataagtgacaaggaaacagtagactccttaaagctctccctgtgcatgcttcttacactattttggctggcttgtttttctggttttcatgcatcttgttaactgagcatgaccaaatcttgaagtgccttatatgcagtattactgattttagacttcttccagatgactttatctggaagacactgaagggtgtttaaatagggtactgctgtgattttaatggaagtttgaagataatctctcttgggtactctgaagaattcagaggaaagtgtgaaaagaaacagacccatcttttctagcctgcgtgtcatcttatgcctgtttattactttgattaatctaaggtctgtgtttcytttcttaggtaacccaggtttttctgccttttatgtgccatttgcaaaggctttatactctttgacaaacagacgctttccagtttggactatca

SEQ ID NO: 828323 - DNA, 589 bp, Homo sapiens
agcaaactgcagacctaggaaagccaatgatgtaattgtagtttcagtccaaaggtctgagagccagaatttctgatggtttaattccagtccaaaggctggcagcctcaggacccaggaagmgctgatgtttcattttgagtctgaagacagaaaaaaaaaaaagtcctagcttgaaggtggtcaggcagaaggaattctcttttattaaaccttttggttctagtcagaccttcaactgattggatgaggctcactcacattagggagggcaatatgctttactcagtgtaccattcaaatgttaatctcagccagaaacaccctcacacatccaaattgtttgaccaaatatctgggcaccctgtggcccagtcaagctgacatgtaaaattgaccatcacagcttggcaagtattttttttaactgaatacctgacattatatgtgaaaaattagtaaaacaatattagaatcttatcttcctccagggaggatttacctttgtttttgcaattattcttagggtaggtcactttgatgccattgggaattgggttgaatcaaagctatctttggaggggctggc

SEQ ID NO: 828324 - DNA, 522 bp, Homo sapiens
tactaaaagactgagacttaatcataggatgatagaatgtctcccctcccctttcccccacctaactgctacattgctaaaagctgatttataaaagttccttttacctggtacatcatgtccagctaccaagaaaaaattaccaggcataccaaaaggcaaaaaaaaaaaaaaaaaaatctgaggagaatagagcaagcttcagacccagacagatagggattctggaattatcagatgaggaatttaaatccactatgattaatatactaatggctataacagataaagaaggcatcattcaagaataggtagacaatgtaagaagagagatggaaatcctaaggaaaaagcaaagagaaatgctagagagtaaaaacaccgtaaaataaaaatggctttgatgggcttatcagtagaytgaacatggctgaagaaagagtctctgagcctgagaatgtctcaacataaacctccaaaattggaaagcaaagaaaaagactgggaaaagaaaaaaaaaga

SEQ ID NO: 828325 - DNA, 559 bp, Homo sapiens
aaaagaacgagagaaagaaacaagaaatatttcaaacaataatgacagagacatttcttaaattaatgtcagacatcaaacttcagatccaggaaactcagaaagaaaataataggggtttgaaactcagatctccataaagaaaagaagagcatcagagagggaataaacaaagactaaaatgttcatttttcttattcttaattgatctaactgataagtttgttcaaaataataatagcaacagtgctttcgattttgtatgtttatatgttatatgtatgcttacatataactgaaatgaatgacaacaacacaaggagcaggagggaagacttaggattattttgtttttgtatgatacactacttataaagtggtatagtgttatttaaaagtggacttgggggtgcagcgcaccagcatggcacatgtatacatatgtaastaacctgcacaatgtgcacatgtaccctaaaacttaaagtataataaaaaaaaaaaaaaaagtggacttggactagttgtaaatggatattgcaaaatctagggcaaccac

SEQ ID NO: 828326 - DNA, 591 bp, Homo sapiens
tacacagatcctttattggcatctgcatgagaggcctagaaatcggatgttagaagctaggaatcatggctctgagcgccttgcatacaggagatactcactgatactaaatcaargcatgtaaacaatactgggtaaatcatacctaccagaataaagagtaacattcagagcttttcttttatctgttattttaaatgttactccatatttcaaaagtctgcacgtatgaaattgtgtcttatttctggtttttagagcctaagaaagatactcattcttaattcctatttatcatctgaaaaccaaatgaatttttgaaataaatgttttaccagcatttctgacctggtctggcctgatctctgtgttgggcaagagagggtacaatttgagcagttctcctgagttagactcggctcaaagtctctcttttaaagtgaaaagcacctttctcattgcttttttcataggtggaagaatcagatttcaagagactgaagttcattctgtttcattagggattagactaaaatggacaaacagtggaagaaatccattttccagaagcagctctgcctgtatgtccca

SEQ ID NO: 828327 - DNA, 510 bp, Homo sapiens
aaatgtggtcccgaaaatgtgtcccaggaccagcagcaccaatattacctgggaacttgttagaaatgcaaattctcaggtcccaccccagatctactaaatcaacaactcagaggtagccacctgtgttttaataaaccctccaggtgattttgatgcatgccaaagtttgagaacacctgatcaagggtgatcctctgagtctgttttcaactttcaaagttgccattcatgttctcttcaaatgttcgcttctgtctatagtatgacttaagatagctcacttgatcatgaccatatccttttaatgtgatgttgaattcagtttgctggtattctattgagaatttttgcatgtatgtccctcaaggatattgacctatacttttcttgttttgtccttattcagytttggtggtttaatttctttaacagatacagtctattctgatcatctatttttccttgtgtgagttttgggagcttgtatctttcaataaattggtccct

SEQ ID NO: 828328 - DNA, 626 bp, Homo sapiens
  misc_feature 225: n = A,T,C or G
aaggtactgtaactcatctgtgttatagttaacatatattgaactgaacatatatataccactgaaataaaagagccaggatttaaaaccacttctttccaacttgaaattctggactattaactacaattctattatcacatttaattctaattgtcagtaacctccaattagttttgagtttctttagcacacaaaatataatttacatatcttcatgttccncagcctctgcctttcagcataggtcctatgctgcaccgcttaattcaatttgaagtaaaaagtaagtctatgttggctgttttaccgagcaaggatacagcattcatcaaaagagcaaagatggtgtttcatatctgttatttcccttttctgtttttctgtgtataaaaggcatggtcatgaacctagtgactgctatattaaatgcaaatgtagagctaggaagaattaattcaccttcatgttcttagtagtataccgtgtatcccagttcagtgcaggaaatgtcacacagataattgttaactaattcttccatacagagaccctcaatcttattttcrtatgacactaaaatcctttagcttttgcatagattgtttgaaaataatattgtgcta

SEQ ID NO: 828329 - DNA, 616 bp, Homo sapiens
ttgtcttctcagtatatgtctggactttaaaataaggaaataaaggagcttggctgyggtatgtaatgtatgtaacttcttattctaagaagtaaacatttttgagtaatatatagttaattgggtggcagatataaatgagttacttcgaaaacctactaaattgtaccaccacagactataacaaagtatgtctattaacaagagcttatattttgatctccaggaaaataacttacaacattaataaaataaaatatgtaaaaaatgattaagaaaccaagggcttttcttagtctttaatttaattttaaagtaattccttgtaattagtttattaccatgcattcttcccacagcattacaacattgcttcacacttggttaatatgattcagaattcctgggacagttttgatttgggaagagtaattttgaaagatttggaaacccaaaatttatgcttgattctcttttggattacgggtatgacttctgttcattttaacaagaggtgcctaatattacttcaaaagtggatttagccatataagcatagagtcctttagcaatttgatcaagaaatattcatttaacctcacatttttaaggcttg

SEQ ID NO: 828330 - DNA, 616 bp, Homo sapiens
ttgtcttctcagtatatgtctggactttaaaataaggaaataaaggagcttggctgcggtatgtaatgtatgtaacttcttaktctaagaagtaaacatttttgagtaatatatagttaattgggtggcagatataaatgagttacttcgaaaacctactaaattgtaccaccacagactataacaaagtatgtctattaacaagagcttatattttgatctccaggaaaataacttacaacattaataaaataaaatatgtaaaaaatgattaagaaaccaagggcttttcttagtctttaatttaattttaaagtaattccttgtaattagtttattaccatgcattcttcccacagcattacaacattgcttcacacttggttaatatgattcagaattcctgggacagttttgatttgggaagagtaattttgaaagatttggaaacccaaaatttatgcttgattctcttttggattacgggtatgacttctgttcattttaacaagaggtgcctaatattacttcaaaagtggatttagccatataagcatagagtcctttagcaatttgatcaagaaatattcatttaacctcacatttttaaggcttg

SEQ ID NO: 828331 - DNA, 560 bp, Homo sapiens
caaaaaaaaagacatacaaattgcaaacaagtatatgataaggtgctcaacaacactgatcatcagagaaatgcaaatcaaaattacaataagatatcacctcaycccagttaaaatggctttcaactaaaaggcagcaaatagcaaatgctggataggatgtggagaaaagggaatgttcataaactgttggtggggatgtaaattggtacaaccactatggagaacagtttggaggttcctcacaaaactaaaaatagagctaccgtatgatccagcaatcccactcctagctattcatgcaaaagtaaggaaattagtctatcaaagacatatctgcactctcatatttattgcagtactattcaaaatagccaatatttggaaacaacttaggtgtccatcaacggatgaatggatggccaggcacagtggctcatgcctgtaatccctgccctttgggggccgaagtgaacagattgcttgagcctgggagattgagtctgcagtgagccatgatcatgccactgcactccagcctgggtgacagagcgagaccc

SEQ ID NO: 828332 - DNA, 634 bp, Homo sapiens
agtatttgtgtgggagtgtcccatttttccaggtagtctcccacagcatcccttggctaggaaagggaaatcccctgaccccttgtacttcccgggcgaggcaatgccccaccctgcttcagcttgtgctccaccctccctgcactgcacccaccatccaaccagtcccagtgagatgaaccaggtacctcaggtggaaatgcagaaatcacctgtcttctgcgtcaatcacactgggagctgcagactggagctgttcctatttggctgtcttggaacgcccacccagattcatcatttctagaaatggtacctgctgtattagattgtcataaaggacttaaataatgaaactcaggtttaggaggaaaactaatgtaaaaggctgagaaacgataatggagatatagagggacaaccaaaatgaagtgttattacagaaagaaagcgtcttactatggttatggaatcaacagggatgaatgttgctcaaagtttcagtagaaagaaaacggagaactatctttagtatttggcataagatgagtgaaaaatkccacaacataaatgtgtttgtaaaaataaaggctgacagaggaggagcaatggaaccattggaaaagctgcagatgaa

SEQ ID NO: 828333 - DNA, 570 bp, Homo sapiens
tgtttgttctgacccatctggagctggggatagagtgacacaagaccccagaggccatctgcaactaggactgcactggctcagatcygaagctagcacagcactgggtctcacccaagatatgctgtaatcactctctggctactgtttatgtttgatcaaagccttgtggctctacaaccagaaggtttcaaagccagccaggcctctatctttcccttcaggatggtgaattccaccaggcccaagtgggtccagagttgctgtccagaagccaggggctagagtcaaacaccttagacatctacctagtgttctattgtacttcagctgagccggcactcaaaccataagatgcagtgcttcccactcttcctttccctttcctatggcaggaggcctcactccatggccactgacacctcaggcccacaggcagtactgccatattactgctaatgttcccttaaggctcaagcacacttcaatcagcttgtggtgaatgctgcaaggcctggcactcacccttcagggcagtgggctcctctctgacccagggaaggtccagaa

SEQ ID NO: 828334 - DNA, 549 bp, Homo sapiens
tcattttctcttctttgaattcctgcatattttattgtttcaatgggtatgaatggcagtgccatgtgtatggtgtatgttttctgcatgcattacctctcttcagttagactcttatgttctttgagatcaggttctctgtcttgtacatactttcggatgaggttgtaattcttagtgtctaatctagtgcccagatggattctggcatacattgcaagctcagtgttttttctttatggacaaactgtttagatgtttactttcatatcagtgatttcaacaccacctgtgattctggataccagagtagaactgcatgttataaagaacaacagcattgacctgactgattggggcaaagcagataaacatttgcttaaaacttgagcaaggggagaggaagaattgtttakaagtggaagtgttaaaaaaaaaaaaaaggaaattatagagagggattatcgattatctaacaaagcaattcaagaatatctactagaacaatggaaatttgccaaatataaaaataaccagagaatgtaagtt

SEQ ID NO: 828335 - DNA, 620 bp, Homo sapiens
aaatcctcttgcctcagcctcctgagtatctgagaccacaggcacatgccactgcactgaaccaaaaaaaatgtggctgagttcaaggtcttgtgaggaagagcttatgtattatccatgtgagccctaaatgcaatctcacatgtccctatatgagtgaagctagggagcatttaacacacacaaaagaggagaaggcaatgtgaccatgaaggcagaaactggagtgatgcagccaaagaatgtccgcagccaagagcaggtaacaggcctcccctacgccctccagaaggtgtgtggccttactgatacccctatttcgacatttttatcttcagaaatttaagaaaataaatttctgttgtattaagccaccacagttgtgcaatttaatccagaactcaaagaaactaatataccatctttatagcctggcttgaattccatttccaattgcaccaaaggatgccttattgtcttggggttggtgaagttccctaatrgaattatttcagcatcttgttttcacacttaccatatttatactgccatattaatgataatacatacatatatatcacatacacatccttataatacacataacaaacaatacacct

SEQ ID NO: 828336 - DNA, 565 bp, Homo sapiens
ctagccttcatctaaagggcagtcattgaatgatgattgggccacttattgctatttttccttatgaaagtcttttgctgaaattagggaaaacatttgcttttcacaagagaggtatgttatttcttgaaacctttgcagaaataaaacataagtagcctgacattaacaaacggagtttctttcctctctgagcttctgctttaccatggatgcctttaaaaatgggcccatgtttttaaataaaacacactcattttctagtataccatgaacacctttaaaaatgggccaatgtttttaaataacacacacacacacacacattttcttgtcacttattaattagtttaacaaatactttagtaccccttctgggcctggcactgagtcaggccctgaaatcaggggtgagcaagcagacttgtggctctgacggaatgaaaatctgcgactgcactctgattaaatgttcttgtcccgggttactcacaagcccacacttgtatttgttttcttcctattcatgttaaaatttccwtctacatcagtctggttcttagat

SEQ ID NO: 828337 - DNA, 685 bp, Homo sapiens
cacggcactaatttccaaaagcctaggatcctcaggatgatgytttagtaccagatcaattgcaaattcataattaaccacagaggaatgccagtaatgctatttgttatttttctctactggtgccccaccaggaatgtgtccatgtttcgtcatggaccagattcctatttaatttttctgtttcctttgctgctagccaacactctggagtagctttgaagtactcctcaacattccaagaaaattctttgaagttttcttttgaatgtagaaaattttaaaaccttttaacaggttgtttgttaggttttctatctaatcaaaccgaaaggtatctctgtaagtagcaacgtaacaacatgttccatccactttttctgttggaattgcactgtagatacctgcatctaatgcctcatgacttacagttttcgttgccaaaactttaaatggctgattctgcctttcggtggagggctcctttttcacctccctagaaacacacggcattttccgctacacggagcccaggcgcctcgtggtcggcccagcaggcggtgctagaggagagcgcgtttgtgagcagcgccaagcacacgcgggaagaaagccctgagcaagtaagccggaggctcagaccgctcacaccacgcgcccagcgacagctgcagcccgcgccccc

SEQ ID NO: 828338 - DNA, 580 bp, Homo sapiens
aatatgcatggatctgtcatttcctataataaaaatttcttctggaatatctcctaaagaacttgccttaggctgttttgcagttmgcacttttttttttaatagagtacactctaaaataataataaaaagtatagtatagtaaatacataaaccagtaatgtcatttattattatcaagtagtatgtactgtacataattgtacattctatatttttataggactagcagttcagtaggtttttttataccaacatcaccagaaacacatgcactataacattatgatggctacaatgttactggacaataggatttttcagctcctttgtaatctatttttatctatctatctatctatctatctacttatttttgagagagagtctccctccgtcacccaggctggagtgcaggtgacgcgatctctgctcactgcaacctccacgtcccaggttcaagtgattctcctgcctcagcctctggagtagctgggattacaggcatgcaccaccatgcctggctaattttgtatttttactacagacagggtttcaccatgttggccaggctggtctc

SEQ ID NO: 828339 - DNA, 550 bp, Homo sapiens
aaaaatttcttctggaatatctcctaaagaacttgccttaggctgttttgcagttagcacttttttttttaatagagtacactctaaaataataataaaaagtatagtatagtaaatacataaaccagtaatgtcatttattattatcaagtagtatgtactgtacataattgtacattctatatttttataggactagcagttcagtaggtttttttataccaacatcaccagaaacacatgcactataacattatgatggctacaatgttactggacaataggatttttcagctcctttgtaatctatttttatctatctatctatctatctatctacttatttttgagagagagtctccctccgtcacccaggctggagtgcaggtgacgcgatctctgctcactgcaacctccacgtcccaggttcaagtgattctcctgcctcagcctctggagtagctgggattacaggcatgcaccaccatgcctggctaattttgtatttttacyacagacagggtttcaccatgttggccaggctggtctc

SEQ ID NO: 828340 - DNA, 550 bp, Homo sapiens
aaaaatttcttctggaatatctcctaaagaacttgccttaggctgttttgcagttagcacttttttttttaatagagtacactctaaaataataataaaaagtatagtatagtaaatacataaaccagtaatgtcatttattattatcaagtagtatgtactgtacataattgtacattctatatttttataggactagcagttcagtaggtttttttataccaacatcaccagaaacacatgcactataacattatgatggctacaatgttactggacaataggatttttcagctcctttgtaatctatttttatctatctatctatctatctatctacttatttttgagagagagtctccctccgtcacccaggctggagtgcaggtgacgcgatctctgctcactgcaacctccacgtcccaggttcaagtgattctcctgcctcagcctctggagtagctgggattacaggcatgcaccaccatgcctggctaattttgtatttttactamagacagggtttcaccatgttggccaggctggtctc

SEQ ID NO: 828341 - DNA, 629 bp, Homo sapiens
gtactacacatgtttaaatgattagatcttgtgaaaattcactcactatcacaagaccagcaagggggaaatccgcccccatgatccaatcacctcccaccaggcccctcccctaacatgtggggattacaattcaacatgacatttgggtggggacacagagccaaaccaaaaatgatggacctaaatctactcaaatctttagttctaactaatgagttccatgtcaaaagaaattttttaaagattaaagatttaggccaggcacagtggctcaagcctgtaatcccaacactttgggaggtcaaggtgggcagatcacttgagcccaagagttcaagaccaggctgggtaaaatagcaaaatcctgtctctacaaaaacacacaaaaattagccaggcatggcggtggcatgcacctgtattcccagccactcaggaggctgaggtgggaggatttcttgagcccaggtggtcaaggctgtagtgagctgtgaagccatgatcatgccactgcacttcagcctgggcaacagagtgagaccctgtctcaaaaaacataaataaataaaataaagattaaagacttaatagccaaatacaaacrgtagaactcatttagataatca

SEQ ID NO: 828342 - DNA, 404 bp, Homo sapiens
gtggctacttttaagctttgaagtatacgtacactaattcccaaactaaaattggtggtatctgttttagagttattttaggggcctaatgaagagccttctacgaactggacactctactgagccccatgggaataaggatgtgtctgagaacttcagagtgccacagtctggtagaaatagtcaaattagtctgtgataagtatttacaccaaatcctttaccagcagcaaagaaacagacatctgctatacaacagagttgggtgggaaggggtagaaatgtggaggttcaggcaatattaataaccctagcattggccggatgtggtggctcacacctgtaatcccagmactttgggaggccgaggcaggcggatcacctgaggtcgggagtacgagact

SEQ ID NO: 828343 - DNA, 615 bp, Homo sapiens
taagcttgattttataagtgctgtgttacactgtyaatgaaaattaaagtttctcttgatcttagttagacactctccaggtacctgtatcagagacgtagacaaatgtcacagtctagctcaaggaaagaaacaagaggtgatcaatagaaattcagtaattgataaaagaaagaaccccagagcccttaccatgtgccattcatgaatgccgcattgaacaggacagatcgacacttgccttcaccagctgtcagtctaattgcccccaaggaccttctaattttcttgacttgggcctccttgcaccctccatggtctctggcccacctcattgtccccattatagctctgcagcttctttcctttcctcctgcttctttcattcccggtctccctacatcacagtagggggttgacccatggaaaatctggtcataggaatctccaggaaggcagtgtcccaattaggggaaagagactgccttcactttaacacaagcccaggaaaaagttggcacattctgcgacaacgttctggttttctagtttgctcctagtttactgtccctgctacctcttctccaacttgtaaggaaatagcttcataaaatt

SEQ ID NO: 828344 - DNA, 611 bp, Homo sapiens
agtttgctctttgtggcttcctgggtgccgtctcctgtcagggacctaactgctgtggaaggtggctggctggggtgcagctatagccagattaggatcaaaattaatttcaggactgtgtaacgagcattccaggttagtcaaagttgacaacatttttctaaattgagatttcttatcctgtaacaaatgttgtaagcctcattgttcactattttcagaattttgtttttaatcaacagtaaaacagggcagtgcttttttactgatggtagaacagtgtctagcatacaataggcacctaaaatattatgtgtccagaaaaatgtatagttatgtatgtacatatacatctatctatacaagcacacacacgtaccatattgataacacagctgcttaataaattaacctgtccatttttatttagaggaaataaaattaactgccagagtatgaactgatccatctgatctctctgtcaaaaatataagaatcaatcattttgggctgggcrcgggtggctcacacctgtgatcccagcactttgggaggtcgaggtgggcagatcccccgaggtcagaagttcgagcccagcctggccatcatgg

SEQ ID NO: 828345 - DNA, 633 bp, Homo sapiens
tgacagtttttttttatttttcccagtggtagagatattatttttcttttcctttgctaacgagaaaacaattttcgagattaagtgatttgcccaacattatgtgacaaaacttctgattcttgttcyagtttttactctgtccttctccctctctattcctcttttactttcttttctctatttcttttttaaaattatgtcataacttacataaaggaaaatgcacagatgttaaatgttcagcgagataaatgtatacctcataattcctcctactgccttcacctcaactcgcacaaaggttatcattattatgacatctattaccatagagtagtgttgtctgatcttgaactccatttaatggaatcatacagtataaattcttatgtgtctgagctctcttgcttaatattgtgtctatgaaattcattcattgcatttagcagtaattctttttcattgcaatgtagtatttcattatatgaatattactcattctcttattgatggatatttgggttgcttctagttttttgactcttgtgaataattttgctgtgaacattcttgtacatatcttttggcagatgtatacctttatgtctgcagcacctaattttagaatag

SEQ ID NO: 828346 - DNA, 474 bp, Homo sapiens
aatcaaatagggtacaaatcaaaacactctataaaatcccttaaatcaccccccaaaaaacatagttttaagtatgcaacagcattcagtaataggtttggagtcatacattgaaaaacttccccmccttaaggatgtataaattaaagtgtatttcacttggtattcactcattcaataaatccccaatgtaacaaacagcatgtgataaaaaccatgctataaaaaaatggagaccttatcaaaatcatacttatcctagaacttacgcctacctatgaatcatgtcttccatggatagacagcccactcaccatactgaatgtaaacagttaacagtaacaaatagttgggttttttaatcaaaacactaaagtggaaacactttaacctatttaagcaaaattaaaaaaaaaaagatataagttgcccacggtatttctgtcagaactctttttcagatatactgccatt

SEQ ID NO: 828347 - DNA, 621 bp, Homo sapiens
aagccctgcaacacacacayacacgcacacacacacacacacacacgctgtgcttcatgccctcactagggtggcctgggaggaaatgcgtgtttttaggagaaatgaagacaactcaggcccctcattctcctggtgtttgcacaagtgccttctctgcagaccatgcttcagcctctttcttggttctccctcttactgaaagagagaagcagaggcccggcacatactcggctgcttagggctcaagccaagttcgcaagcttcctggggagcctagtgagatgaaggcactgcagagcctccccaaaagagtcgtcggcttttcgtggatccttgagcccaggaaggcgataggtgagacatcacagttcatcagaagacacgagcaaactccggcgagaaagggcaacggtcaaagattttattctctcggaaaagggttctcgggctgtaagcagcaggcagaagactttattgcacgcgtagttaggtgatggcgacctacggttttcactggggactgggatcgagagtgacccgacctcctactcatgctcgtctctccctgtctctctctttgccttttgtgtctctctgcctgtctctctcgctcctttt

SEQ ID NO: 828348 - DNA, 452 bp, Homo sapiens
gtgcccggcactttccccacaggatcctctagctagaatatccaagggtcatggagagaaatacccagttaaaatatcagaaatgaaaaagygataccattagagacactaaaaagaccattaggtaatagtattagcttttgtattctgagatccaatagcagcagtcacttccctccaccgctatgtgtatcccaggaccaccctgggcggggagggctggggttagggagcagccatggatgctctgatgctggccctgggcctcgggggtgacagtgatgaggaactgggtgcacacatgagtggggcagccgggcctggccagagaagcagcacacacgtgcacagacgtgtttacccacatacacatgtgcacgcacgtgcacaaacacattgcaggcaggcatgttgacgcctcaggcagcggaggaccctgactctgggcgctg

SEQ ID NO: 828349 - DNA, 484 bp, Homo sapiens
tcttctgatgaactgtgatgtctcacctatctccttcctgggctcaaggatccacgaaaagccgacgactcttttggggaggctctgcagtgccttcatctcactaggctccccaggaagcttgcgaacttggcttgagccctaagcagccgagtatgtgccgggcctctgcttctctctttcagtaagagggagaaccaagaaagaggctgaagcatggtctgcagagaaggcacttgtgcaaacaccaggagaatgaggggcctgagttgtcttcatttctcctaaaaacacgcatttcctcccaggccaccctagtgagggcatgaagcacagcgtgtgtgtctgtgtgtgtgtgtgtgtgtgtgtgtgtgtgttygcaggaatatgcatgtgtatgtgtgtgcatgtgtgtgtgtgcaggtatatacatgtgaatgtatttatgtatgtgcatctgtgtgcatgtgtgtgtgcatgtgtg

SEQ ID NO: 828350 - DNA, 636 bp, Homo sapiens
tggtatggcctttgcagaaagcagtttggcaatttgtggtaagagtattttttaaaaggtcctgtttttgagccrgtaattctgggtgtctgtcctgaagaaagaatttgatgcctgcagagagattagtgtataaagtcattaatccccctaatgcttttatcagcagtcctgtcagatgcaaaaaatatctaagaggcatgaaaggaaactcatggaagtgttgcctcaaggggtgcaggtcctagtgttacaaggcagaacatggtgtcatcaaaggaaaagcacttgatgggcagttagcctgaccccacagctacgtactttcctcattaaacagatcatatctggttctttgcagaaaaagcaaagttcagagaccatgaccctgttttcctacagaaccagggtggaatcccgcctgtatcactgaggacagcagacactgtgctgttgctgctctccccttttctcttgcagacattgtacccatcctgacgtcaactgtgattgagtgtcacagggcaggcctgaagaactctgctttcagcttcgcagctatgttgatgaggcctgaataccgcagcaaaatagatgccaaatacaaaaagaagatcgagggaatggtcaggtagg

SEQ ID NO: 828351 - DNA, 559 bp, Homo sapiens
tgaagaatgagctaatgttttaagagtctgatcattttacattttagtcacaaattgaggtagctttatgaatcagtgaaattttccaatttttaggggaatgctctcctataacatgtyatatctagtatatataggttggtcacaatatttcccatattttctcttaaatcctttctcttaaagcctctacactagttcagagatttatattaggatattttccattttgtagaagttaatgaactattttacactagctagaagctgtgtgttgcatgtagctgctacaattaaacgaaatttaattaattcatatgcaatccaaagaaagctcatattatgtaaatgaatagctagaacataccctttctgacagtaattatccatgactaatgccgaacttaagtttcagctgagattaaatcaatttaatctgatcaacgtgtcaaagatttcttctaagtacattcagtcagataacacactaaatgaattttaatcaagaacttatatcctggtagcttatagttttatcaaatagcatttactcctaaaa

SEQ ID NO: 828352 - DNA, 632 bp, Homo sapiens
tgggtaaatgtatcatggcacattcatacaatgcaatgctgtctagcaaaacataaagaacaaactacagcttaaagtaacacgggcataaatattatgaaatgatgagctgagcatgaaacaatctatattacattattcatatatatacagtgaaaactggtcaaactaaactagttgtcagaagtcatgatagtagctaacttttgaagtttccagtgatggggagaatggataatatcagtaagtataagaggaactttggacagtgtggaagtttctatttattgatatggtatatatcaaaatacgtacttataatttgttatgtaaaatatactatgataaagtatttgtttttaaaggaataatgaaaattgtatataaatggaaagttgctatatgtatattgctggacattatgaaatttaaactgtttgcccagattaatgtaatgaccattaatgagagaacaagtcttgccaacaaatcttcatcttgatctttaaaaaacttaaacatactgtataaaattaagaaaatacaggtgttctayatagttataataatagttcaatgtaagccaaagaaccataggcatagtagaagatgttaggagccaatgttaagat

SEQ ID NO: 828353 - DNA, 632 bp, Homo sapiens
tgggtaaatgtatcatggcacattcatacaatgcaatgctgtctagcaaaacataaagaacaaactacagcttaaagtaacacgggcataaatattatgaaatgatgagctgagcatgaaacaatctatattacattattcatatatatacagtgaaaactggtcaaactaaactagttgtcagaagtcatgatagtagctaacttttgaagtttccagtgatggggagaatggataatatcagtaagtataagaggaactttggacagtgtggaagtttctatttattgatatggtatatatcaaaatacgtacttataatttgttatgtaaaatatactatgataaagtatttgtttttaaaggaataatgaaaattgtatataaatggaaagttgctatatgtatattgctggacattatgaaatttaaactgtttgcccagattaatgtaatgaccattaatgagagaacaagtcttgccaacaaatcttcatcttgatctttaaaaaacttaaacatactgtataaaattaagaaaatacaggtgttctatatagttataataatagttcaatgtaagccaaagaacyataggcatagtagaagatgttaggagccaatgttaagat

SEQ ID NO: 828354 - DNA, 580 bp, Homo sapiens
cccctgcacacacgctcttgcctgccatcatgtaagatgtgcctttgattcttcttcaccttccaccatgattgtgaggcctccccagacacgtgaaactgagtctgttamacctctttttctttataaattgcctagtctcaggtatttcttcatagcagtatgaaaatggactaatacagtaagttggtactggtggagtggggtactgctattaagataccccaaaatgtgtaagcaactttggaactgggtaacgagcagaggctgaaacagtttggagggctcagaagacagaaaaatgtgggaaagtttggaacttcctagaaacttgttgaatggttttgaccaaaatgctaatagtgatatggacaacaaagtccaggctaaggtggtctcagatggagatgaagaacttgctgggaaatggagcaaaggtgattcttgttatgctttagcaaagagactggtagcattttgctgttgcaatagagatctgtggctttaaacttgggaaagatgatttaaggtttctggtggaagaaatttctggggagcaaagcattcaagaggaagcaga

SEQ ID NO: 828355 - DNA, 631 bp, Homo sapiens
tatatacacaatggaatatgattaagccttaaaaataggaaattctgtcatttgtgacagcatggatgaatcaggaggacattatgttaagtgaaataagccaggcacagaaacacaaatacctaatgatttcacatatttggagtgtaaacatgttgaactcagtgaaatactaaaatcgtggttaccaaaggctgaggggcaggggggaaatagggagatattggtcaaaggacaacatttaaattaggatgaataagtccaagagagctgttgtatatcttagtgactacagatcataataatatattgtatatttgaaaattgctgaaacagtagattttaaatgttctcactgcaaaaaaaacatgataattatgggaggtaaggtatatgttaaatagcttgatttactcattctacaatgtatacatatttcaaaatatcatgttgtacactataaatatatacaatttttacttgtcaatttaaataaatatttaaattctaataagtacatgmatttctgataaaatagtaatataatcataactgactctcgttacttataacaatggaaagcaaggtcaattttatagggctggatgagaaaaagtgattcgcatggaga

SEQ ID NO: 828356 - DNA, 606 bp, Homo sapiens
aaaggttataaaaaagaaccaatgtacaatatagaactgaaaaaatacaataaccgaaataaaaacctcactggataagctcaatagtagagtgtagatgacagagagcagaaccagtggacatgactacaaataaattaaacttatgaaatctgaaaaacagagaaaaaatagacaaaagaaaaaaaatagagtctcagggatcagtaggagaataacaaaataacttacattcatatcatcaaagtcccaaagaggggaagagagagaaaatgggactgaacaagtattcaaagaaatcatgcccaaaaaatatccaaattcagcagaagacataaatctatatattcaagaagctgatcaaactccaaataggattaaaccaaataacccacaccaaagatatatcacaattaaacttctaactcctaaaagcaaagagagtatcttcaaaatagagaaataacacattacttataaaggaatactaacagaaataacagatttgaaccatgatatgaaaccataggggacagaagaaagtagaaaaattttaaagactaaaamggaaaaaaaaaactgtcaactacaagttctaaatgcagt

SEQ ID NO: 828357 - DNA, 633 bp, Homo sapiens
acacaccacacggaagcactaggctacagtggttgaaatcyggtttttcacctagtatcagttccaggttttcactaggagagcacctcttagaggctctacccaaagatcaaagcaaagtgacacactgtcccagatcacaaaatccccctgtgtggtttcatttattggctgatgaactacagtaaccttccctttggggtcataaatcctaaccaaaaagaaaactctcatctttggcaaatcagacatttataatcatccatgtatgaggcaacaccctttcccaaagaacagctttaattctacttggaaacaataaaaaacactagcattatgatgcacaaagtactgtgatagaagctgaagtaaaaatgagagcaataaaataataattcaaatacaaagcccctaccctcaaggaacataataaacggaaaaggcatgcatacaaatgtgcatctgaagtgctcaagctcttattacaaagtctgcacagagtagctggggcataggaggaggagtgatggatccacaggaggatgaaagctcaggaggggctccacagagacaagtggcaggaaatgaatcctgaaagataagtgtttttctttatgcatgtgttagggattg

SEQ ID NO: 828358 - DNA, 633 bp, Homo sapiens
acacaccacacggaagcactaggctacagtggttgaaatctggtttttcacctagtatcagttccaggttttcactaggagagcacctcttagaggctctacccaaagatcaaagcaaagtgacacaytgtcccagatcacaaaatccccctgtgtggtttcatttattggctgatgaactacagtaaccttccctttggggtcataaatcctaaccaaaaagaaaactctcatctttggcaaatcagacatttataatcatccatgtatgaggcaacaccctttcccaaagaacagctttaattctacttggaaacaataaaaaacactagcattatgatgcacaaagtactgtgatagaagctgaagtaaaaatgagagcaataaaataataattcaaatacaaagcccctaccctcaaggaacataataaacggaaaaggcatgcatacaaatgtgcatctgaagtgctcaagctcttattacaaagtctgcacagagtagctggggcataggaggaggagtgatggatccacaggaggatgaaagctcaggaggggctccacagagacaagtggcaggaaatgaatcctgaaagataagtgtttttctttatgcatgtgttagggattg

SEQ ID NO: 828359 - DNA, 483 bp, Homo sapiens
tcacctggctgttgtcaggaagtttccatttcttgctatttgggcctttccttaggactgctcacaacgtggctgctcacagactgagtgatgagagagagagagagagagaccgagagagagagcagaagcaacactatatttatgacatagtctttaagttgtataccaacccttctgccttattcttttcattagaagcaagtcactaagctcagcccacatttaagaggggattacacaaaggactgaattctaagaggtggggcgcatcggggtctatcgcggaggctaactataacaatctagtctctggcccttcattgattcatgttcttcccacatgcaaaaagtactcrccacctcccaagaccctcaaaaatctcagcccattataatatcagcccgaagtccagaatctcataaccaaaatgaggtccagctgtagatatagcccttacataaagttcttcttaatcatta

SEQ ID NO: 828360 - DNA, 483 bp, Homo sapiens
tcacctggctgttgtcaggaagtttccatttcttgctatttgggcctttccttaggactgctcacaacgtggctgctcacagactgagtgatgagagagagagagagagagaccgagagagagagcagaagcaacactatatttatgacatagtctttaagttgtataccaacccttctgccttattcttttcattagaagcaagtcactaagctcagcccacatttaagaggggattacacaaaggactgaattctaagaggtggggcgcatcggggtctatcgcggaggctaactataacaatctagtctctggcccttcattgattcatgttcttcccacatgcaaaaagtactcgccacctcccaagaccctcaaaaatctcagcccattataatatcagcccgaagtccagaatctcataaccaaaatgaggtccagctgtagayatagcccttacataaagttcttcttaatcatta

SEQ ID NO: 828361 - DNA, 608 bp, Homo sapiens
cttaagaactactagcctgaagcagttcatagtttcaaaagtagttagttagaagtgcatttctttacctttaaggtgggtgttgttaatcaccgcgatgaaagcaagtattgtgctaaagtcagtgtggaataggaataaggtccagtggttgagatccagtccgattttaagatttgaaaagttgtgctgtgtgcccaacaggcacaaacatcccattagtaagtaaattgtgcttttttaagaaagaaacaaaaatactgtttctacttccatcgcgtgttattttttatgtgtacttgcaaatccatcaccaaaataaaaataatgaacatatctagcactcataaaagtttccccttgcccttttataatcccaaactttctgtatcttcctaccttaccactctccctggcaatcaccaatctgtcactataaaatagtttgccttgtctagacatttatataattgaaatgtagtatgcacccttttttggaggggtctggcatctttcacacagcataattattttgagattcagctatattgcaggcatcaatargtcattaattttattactaagtagtattctattgtgcagatcgg

SEQ ID NO: 828362 - DNA, 634 bp, Homo sapiens
cacacagttgaacctttcttttcattaagccgtttggaaacgttctttttgtagaatctgcaagtggayatttggagcactttgtggcctagggtagaaaaagaattatctccacataaagtctagacagaagcaatctaagaaactcctctgtgaagtgtgcattcaactcacagagttaaacctttcttttgattgaacagttttgaaactctctttttgtagaatctgcaagtggacatttggagggctttgaggcctatggtagaaaagaaaatatcttcacataaaaactagacagaagaattctaggaaacttctttgtgatatccgcgtttatctcacaagttgaacctttcttttgattgagcagtttggaaacactctttttgaagaatatgcacgtggacatgtggagcgctttgcggcctatggtagaaaaggaaatatcttcacataaaaactagacagaagaattctgataaacttctttgtgatgtgtgcattcatctcaaggagttaaacctttcttttgattgagcagtattgaatctatcttcaggtaagatctgcaagtggacatttggagcactttgaagccaatggtggaaaaggcaatatcttcacataaaaa

SEQ ID NO: 828363 - DNA, 624 bp, Homo sapiens
aagttttcagggaatcagagaaaaccaaactaaagataatggcctcagaacccaaattatttttactctgtcrtgaattttgctaacaaaatcaaaataatgagtactaactgacaaggaccatttaataatctacccagctaaggttagcagtcaatattttacatgatatttcactgataacttatttatcatattttacatgataacttaagattctgtgggtcttaagttatgcatattctcttttattactttaataaatattaaaccacaacatgatgtaattttagcttattactaagtattataagagcacttagaatataactttttacaattacaaaaattttttaatgtcttatcaacatgaaatacttagtcatttatttagaaagtataagtttattagtggatttactgtgtcctgatttaggtcagttaccttaaaaatacgttcatttgtctgtttttattaatgctacatgccaaactaatgacatttaaaatcataggaaaaagagatttggcatttgatttatatttcatggcaaaatgcacaggtttgggtaatctcaggttcttaaattctttccacattaaatagtgagctaattctaactt

SEQ ID NO: 828364 - DNA, 619 bp, Homo sapiens
ataaatcatacataacatatactatccctttgtgctggaaaatgccatgtttttatggttgtggttgtacagctaggataataggaaccaaagacataaaacagtaattaatatatttcagaagtgaagtgttttattggatagatgctaattaagactgatagatggcagtgattgaaataagcataagccatttggtcaacacaagtgaaagatcagctatcatcttgaatgctttaattaaggatgctttgctttttgtttcttcttccctactcttctgaatatatgaaaaaacatggagaaaaaataataataactgctttttgacagggaaactgatgtgtagtgcatgcctgatatggtttggctgtgtcctcactcaaatctcatcttaaattgcagttcccataatccccaagtctcatgggagggacctggtgggaggtaattgaatcataggagtggttaccctcatgctgctgttctcatgatagtgagtgaattctcatgagatctgatagttttataaggggcatttccctctttgcttggcacttctccttcccgccatcatgsgaagaagaacatgttttcttccccttccaccaggattata

SEQ ID NO: 828365 - DNA, 559 bp, Homo sapiens
cccctccatataaataacttttggcatgtagcgcaatagccccccyttatccacggtttcacttttcgtggtttcagttacttgcaggcaacaatggtctaaaaatattaaatggaaaataccagaaatttaaaaatcataacttttacgttgcacacccctttgagtagtgtgatgaaatcttaagacagtccacccaggacgtgaatcatctctcgtccggtgtatccatgctgtatacgcactaaccacccgttagtcacttaatagccctctaggttatcagatcaactgtcaaggtatagcattgcttgtactgaagtaaccctttattttacttaataatggacctaatgttcaagagtaatgatgttgataattcagatatgccaaagagaaataataaagtgcttcctttaagtgaaagggtaaaagttctctaataaaaaaaaaaatcatatgctcaggttgctaagatctacaataagaacgaatctccacgaaattgtgaagaaggaaaaaaaaattgtgcgtagtatatgtaggctttggtactatc

SEQ ID NO: 828366 - DNA, 543 bp, Homo sapiens
catgtagcgcaatagcccccccttatccacggtttcacttttcgtggtttyagttacttgcaggcaacaatggtctaaaaatattaaatggaaaataccagaaatttaaaaatcataacttttacgttgcacacccctttgagtagtgtgatgaaatcttaagacagtccacccaggacgtgaatcatctctcgtccggtgtatccatgctgtatacgcactaaccacccgttagtcacttaatagccctctaggttatcagatcaactgtcaaggtatagcattgcttgtactgaagtaaccctttattttacttaataatggacctaatgttcaagagtaatgatgttgataattcagatatgccaaagagaaataataaagtgcttcctttaagtgaaagggtaaaagttctctaataaaaaaaaaaatcatatgctcaggttgctaagatctacaataagaacgaatctccacgaaattgtgaagaaggaaaaaaaaattgtgcgtagtatatgtaggctttggtactatccccagttt

SEQ ID NO: 828367 - DNA, 543 bp, Homo sapiens
catgtagcgcaatagcccccccttatccacggtttcacttttcgtggtttcagttacttgcaggcaacartggtctaaaaatattaaatggaaaataccagaaatttaaaaatcataacttttacgttgcacacccctttgagtagtgtgatgaaatcttaagacagtccacccaggacgtgaatcatctctcgtccggtgtatccatgctgtatacgcactaaccacccgttagtcacttaatagccctctaggttatcagatcaactgtcaaggtatagcattgcttgtactgaagtaaccctttattttacttaataatggacctaatgttcaagagtaatgatgttgataattcagatatgccaaagagaaataataaagtgcttcctttaagtgaaagggtaaaagttctctaataaaaaaaaaaatcatatgctcaggttgctaagatctacaataagaacgaatctccacgaaattgtgaagaaggaaaaaaaaattgtgcgtagtatatgtaggctttggtactatccccagttt

SEQ ID NO: 828368 - DNA, 603 bp, Homo sapiens
atttaaaagtaatgagtttgtctgtgactttaacaagaatagtttcagcagagtagcatggccagaagtcagatttcagaagtttgcrtactcaactagaggatacaagtagagaaagcgcttgtagatgactctttatgaaatttgattataaaatagaagagagaataaggggaacagctagaggaggatgtagatttggttatttgttttattacaaggaagaaaaatgtttaaatgttgttgtaggtggtggccatctaggacacaggctagaaagtgtgtatattagggagggtggtcccagagaaggctgtatgtgttaggcaaacagaaatatagaagcaaggtgggaaacttttacatggtgtattagttcattttcacactgctataatgaagtatacgagactgggtaatttatcaagaaaagagatttaattgactcacagttcaacatggttggggggtctcaggaaacctacaatcatcatggaaggtgaagggaaagtaaggcatgtctttcatggtggcaagagagagaaagcatgcaagggaaactgacacttttaaaccatcagatcttgtgagaacttcctcact

SEQ ID NO: 828369 - DNA, 542 bp, Homo sapiens
gttagataggaagagcctgactggtttagatmaaggattcacgccagggctaagtgttgagctaaacccaccaaatgaaatgccgctacacagtgggacacagagaaattggctgttgagaggaaggcacacagtatgtttttgtcactgatcaggttttccaaggcagattctgagagcgaggtttagtttattggcatctctaataaactgtttattagagagttcccttgggatcaacacctgtaaagagaggggaggaaagctggagtggggagagcagcaggcctaatgacaggttttaccgaccctatgaagacttctgaagccagagtcatccttcagtgggtcaaagggtcagacttttattctcccatgtagatcagccaccagatgtggcggactgggaaaggggtgtgactttggtagctctcagcaggtgaggcaattcctgaagcgctgagagcacacctagatgctggggcagcaagtccttcaccaaagggaaatgtgggtagtacctcccctagaaacatgtgaca

SEQ ID NO: 828370 - DNA, 613 bp, Homo sapiens
agactggggataagcccttttaatattttttcttcccttactgttctgtatagtttgaatttttataataaattaacatatattatttaaatgactatttatgtaaaacatcaaaataagaactaaaaacttactctatgtgtccgttaaatagtacctacttaaaattgtcagcctgatacatgagaatgtgagggctgatcttggccaatgtatattctgctaattgatttgcttcaatagataggcctccaaaaaaaatgtatttatttatttagagacagagtctcactcagttacccaggctggagtgcaatggtgcaatctcagctcactgcaacttctgcttctcgaattcgagtgattctcctgtctcagcctctggaatagctgggattacaggcacatgctaccacaacaggctaatttttgtatttttagtagagatggggtttcaccatgttgggcagcctggtcttgaactcctgacctcaagtgatacacctgccttggcctcccaaagtrctgggattacaggcatgagccaccatgcccggccaaattttttttatttaaaatgagtaatagaaattatatatcagttttctgcagg

SEQ ID NO: 828371 - DNA, 613 bp, Homo sapiens
agactggggataagcccttttaatattttttcttcccttactgttctgtatagtttgaatttttataataaattaacatatattatttaaatgactatttatgtaaaacatcaaaataagaactaaaaacttactctatgtgtccgttaaatagtacctacttaaaattgtcagcctgatacatgagaatgtgagggctgatcttggccaatgtatattctgctaattgatttgcttcaatagataggcctccaaaaaaaatgtatttatttatttagagacagagtctcactcagttacccaggctggagtgcaatggtgcaatctcagctcactgcaacttctgcttctcgaattcgagtgattctcctgtctcagcctctggaatagctgggattacaggcacatgctaccacaacaggctaatttttgtatttttagtagagatggggtttcaccatgttgggcagcctggtcttgaactcctgacctcaagtgatacacctgccttggcctcccaaagtactgggattacaggcatgagccaccatgmccggccaaattttttttatttaaaatgagtaatagaaattatatatcagttttctgcagg

SEQ ID NO: 828372 - DNA, 613 bp, Homo sapiens
agactggggataagcccttttaatattttttcttcccttactgttctgtatagtttgaatttttataataaattaacatatattatttaaatgactatttatgtaaaacatcaaaataagaactaaaaacttactctatgtgtccgttaaatagtacctacttaaaattgtcagcctgatacatgagaatgtgagggctgatcttggccaatgtatattctgctaattgatttgcttcaatagataggcctccaaaaaaaatgtatttatttatttagagacagagtctcactcagttacccaggctggagtgcaatggtgcaatctcagctcactgcaacttctgcttctcgaattcgagtgattctcctgtctcagcctctggaatagctgggattacaggcacatgctaccacaacaggctaatttttgtatttttagtagagatggggtttcaccatgttgggcagcctggtcttgaactcctgacctcaagtgatacacctgccttggcctcccaaagtactgggattacaggcatgagccaccatgcccrgccaaattttttttatttaaaatgagtaatagaaattatatatcagttttctgcagg

SEQ ID NO: 828373 - DNA, 605 bp, Homo sapiens
tatttcaagcaaggagaatttaatatatggatctgcaccatatgtgaaagaagagctgagaagttaaaaagaacacagggagatattctggggattagaaacaacacaaaacagccacaaccatctggaatgggaaggatgcaagaggaggtagttactataactgtatagcaggattcagaatcacacctctgtagagaccacctgacagaagctaggatatcaaagaatgggactctctggtaggggaatatattggtttatgttactgaagaggctaaagataaacccgttttcattgtggctttatttttgttaaagcaatgtgatcacaccctggtttatccttctcaacttttctttcttggttttgcttatgattcttaggtcagctgtaaactcttggccctaaaaggcagccagaggctcctgcatgctctcttgttcttatactacatgggaaaagaaatagctttcatcatccattcatttaaagaaaaataggacctcatccagataaaaacagctgaagacaggtgcccaatcttgagctcatcactgtaataaaagtgwtgagatcacaatgagaggctcaggacaatctg

SEQ ID NO: 828374 - DNA, 565 bp, Homo sapiens
gtagtaggtgtatgtttgacattttaagaaayggtgaaacttttacaaagtggttgtaccattttatcttctcatatgaatgtatgaaagttttagttcctccacttgttcaccaacacttggtatggttggtcttactaatttagccattcttatagctgtgtagtgataactctttgtgcctttaatttgcagtttcccagtaacaaatgatactgagcatcttttgatatgcttgtcattcatgtattgttgccgaagtgctgcttcaaattttctgcctattttgtaattgggttgttttattattgaaggtgttaaaagcaggtttattgaggcataattgacatgtaataaagtacacatatttaaagtatacagtgagaaaaattttgacacatatatatactcaggaggccacaaacaggatgatgaatatattcatcacccgcaaaagttctcctggtgccactttgtagttcttctccaccacgttcctttttgggggtctgtctctttaacagcatatagttcaggattactttgttttcccactgaggcaaga

SEQ ID NO: 828375 - DNA, 567 bp, Homo sapiens
agattattgctcagcacatcttttcattttcgtatttataataagtattcatagcagattcttactagcatacttaaattaccataaagagtgtataaaactttaaaaatcccaagaatgcttkatggcatagtcttcataaaaatctagaaactggaaatccagttgtcagttgaatggaggaatttagactgctgactgtaatttgaatcacaaacctagtactgtattcctaatcagcataaacccttttacagttgccaaaataaaaataaagcaaacaaaaataccttcttgatagattaaggcattttgtagtctatggattatatttttccataatagtattttcttttatttatttaaaacccttaacttctttatttgaggttttataaaaattttatattcctatgacctctaattctagtggaagtccaactttgaaaatagccataaaaacgtgataatttatgatagcctaaaagtatccttaatagcacataatttttttctttctttttaatatttgaaaatttggatagatatgtaataaaatagcataga

SEQ ID NO: 828376 - DNA, 567 bp, Homo sapiens
agattattgctcagcacatcttttcattttcgtatttataataagtattcatagcagattcttactagcatacttaaattaccataaagagtgtataaaactttaaaaatcccaagaatgctttatggcatagtcttcataaaaatctagaaactggaaatccagttgtcagttgaatggaggaatttagactgctgactgtaatttgaatcacaaacctagtactgtattcctaatcagcataaacccttttacagttgccaaaataaaaataaagcaaacaaaaataccttcttgatagattaaggcattttgtagtctatggattatatttttccataatagtattttcttttatttatttaaaacccttaacttctttatttgaggttttataaaaattttatattcctatgacctctaattctagtggaagtccaactttgaaaatagccayaaaaacgtgataatttatgatagcctaaaagtatccttaatagcacataatttttttctttctttttaatatttgaaaatttggatagatatgtaataaaatagcataga

SEQ ID NO: 828377 - DNA, 583 bp, Homo sapiens
acccctgcctggtggacagagtgagactctgtctcaaaaaaaaaaaagaaaaagggcaagatttgtacactaaaaccacaaaacatcattgatggaaattaaagaagttataaataaatggaaagacatctcatgttcatggattggaagattttttattgttaagattgcagaactctccaaactgactgacagattcaatacaatctccatcaaaatcctagcctgcttcttgcagaaattgacaagctgatcctaaaatttgtatggaaatgcaaaggactcagaatagccaaaacgatctcaaaaagaagaataaagttgaaagactcacaattctcaacacttactacaaagatgagtaatcaagattgtaatactgccataaggatagatatgttgatcaacggaacaaaactgagagtctagataaaaacccatacatttatggtcaattaattttcaacaagggtgtcaagaaaattcaatgtggggtaagaatagtcttttcaacrattggtgctaggaaaaccgcatatgtacatgtaaaagactaaagctggatccctacttcacaccatat

SEQ ID NO: 828378 - DNA, 583 bp, Homo sapiens
acccctgcctggtggacagagtgagactctgtctcaaaaaaaaaaaagaaaaagggcaagatttgtacactaaaaccacaaaacatcattgatggaaattaaagaagttataaataaatggaaagacatctcatgttcatggattggaagattttttattgttaagattgcagaactctccaaactgactgacagattcaatacaatctccatcaaaatcctagcctgcttcttgcagaaattgacaagctgatcctaaaatttgtatggaaatgcaaaggactcagaatagccaaaacgatctcaaaaagaagaataaagttgaaagactcacaattctcaacacttactacaaagatgagtaatcaagattgtaatactgccataaggatagatatgttgatcaacggaacaaaactgagagtctagataaaaacccatacatttatggtcaattaattttcaacaagggtgtcaagaaaattcaatgtggggtaagaatagtcttttcaacgattggtgctaggaaaaccgcatatgtacatgtaaaagamtaaagctggatccctacttcacaccatat

SEQ ID NO: 828379 - DNA, 631 bp, Homo sapiens
ttctggatgcattcaaagtaaacatgctgttttaggaagaggaaatatcgcatcacagaaatagaacaagcaccttatatcatagttctttgttgttgatttttttwaaaataaatacaatttatttgaaatcaaaaagagcattaatgttttggggtataaagtatttccttgctgagatttttaagtcttatgcctgaagaagagtaattagaatgctaattgttatcaaagatgaacacatacctaattgtgcagcaaactcatacttttttaaaaaaaacttttaggtttagggatatgtgttgcaggtttgttagatgggtaaattgtgtgtcacatgggtttggcgtgcagattatttcctcatccaggtaataagcaagcaaactcatactagaaaacattgtggtatgtcaaattttagccaaaataataattacgtaaccttaaattctcataataaaattttaataataaattaatataaaaatttaaaattttaagtgtggtttttagtactggtacatgcattacctatctatcttctcagaagttatattaatctgtactttagatggatctttttttaggttttggagtatctcaaattcatataccactgtgagta

SEQ ID NO: 828380 - DNA, 638 bp, Homo sapiens
ttctccaagtccctactagactcaggagcccagctggcttcacccagtggatcccgcacagggccgcaggtggagctgcctgccagtctcgcgccttgcgcccgcattccgcagctcttgggcagttgatgggacctggcgctgtggagcagggggcgacgctcgtcggggaggctccggccgcgcaggagcccagggcgggggttgcggggaggctcaggcatggcggcctgcaggtcccgagccctgccacgcggggaggcagctaagtcccggcgagaaatcgagcgcagcgccggtgggccagcactgctgggggacccagcgcaccctccgcagctgctggcccgggtggtaagcccctcactgcccggggctggcggggcggctggccgctcagagtgcgggcccgcccagcccacgcccatccggaactctagctggcccgcaagcagcgcgcgcagcccaggttcccgcccgcgcctcctccctccacacctcccggcaagctgagggagcaggctccggcctcaaccagcccagacaggggctccacagcrcagtggcaggctgaagggctacccgagcatggccagagcatacgccgaggctaaggaggcaccaagagcgagcgaggg

SEQ ID NO: 828381 - DNA, 631 bp, Homo sapiens
ctcattgcagtgactgggacatgctaaaacctccataaatatgagctctccttcctcttccttctctcatctgtcttcctttctcctcagccctcttcctttttcttcttcttctgcatttgagacatacatygatagaatttatatagcaactacagcaataattgctttcagaagtatttatatgaaggcccagaaattagatgtcccaccaaagaaagtaaaaccactctacatgaactacataccatatatctgttacattatattttaacctgtaatcttataacagctttatcagataagtagttctaaccccattttttaaaatgaagctaagacgctgaggatgagcaagattaaataatttattcaaggttgtaaagttagtaagtgacagagccagttttctaattcaggcttgtcacactcagataaagcaatttactttgcatagtgtctttgaatgttttatgacaaatttaatctcaatttattcccaagatacacttactcatttgacagggcatccttgtcatgcccctatgtctactagcaagtagaaaaataataaatagggtgtgggtgagaaaatgttccttagcaaagggactaatattttggaactgtg

SEQ ID NO: 828382 - DNA, 569 bp, Homo sapiens
atgtacagacagtgtgggtcttggaagacagagaggaagcctcagggaaaaggatgcaggtgctgacagtcaaaatagtacagaattgactggaatggtaaggatcaaggaaatatgggcarcacttgacttggtacaagccagtaccagtcattaatgtcatctatagaatcaattaacaaaatggaaaaaaacccatatatcccatatatatatatatatatatatatatatatatatatatatatatatatatatgttttgtgtgagtgtgtttggagaaggaaaaatatcaggaaatttaacttaggagataaaataatccatccctaaaaggcgtgtgtgtgtttgtgtgtctgtgtgtgtgtgtgtgtgtgtgtgtgtgtgtatgttttcttttcctatcaggaatatgaggggatggcagatgggatagagacacattgttaagcagaagaaagtaccgtgaagttactgtgatctcagggcagaacagaaactgcaatgctaaatcagaattagagagaggctgggtgcagtggctcatgcctgtaatcccagcactttgt

SEQ ID NO: 828383 - DNA, 626 bp, Homo sapiens
ttcaatgtggagtttggatggaaatgaggtggtcacaggagatagaaagagaacttttaacaaacaagtaactttwgagagtggtaagcactataaaggaaaaaacgtaggacactgagatagactaactgacccaaggtcaccagtatttgtaaggaagaaggacagaagtgaaggagtcctattacatactccctcacacagagggagagcaacttgatttaccaagggactcagaattcaagggaaaacctgagtttggggcatgtgcaaattttcttctggaagagaagaatgtggaaagggaagaccctgaaaaactatgcagagaagacacaagtttagtttttcgaaaggcagacaaatgtactctgagggcagtgacctttgactggtgctgtcctaaattgtcttctgatatttttatgagttataaacttttagatgcgtaaaaagcttagtatgtgaagaacaaataactataattcaccaccgaaggaagcagtgggcctatagataggcatttacatatgttctggcattggcaaagtaattcagcagccgccagtgggcttcagtctagttctgaaccagggggggaatgtgcccccaggagacatttggca

SEQ ID NO: 828384 - DNA, 621 bp, Homo sapiens
ttaattttttaatccacctggaatgatwtttatgtatagaatgatgtagtgattcaatttctttcctctccccattgataacccagagtcctagcatcattttttgaaaagtctattcattctacactgatttgcaacaccagctttgttataaatcacatttccatattttcccaagctatttgtgagtgctgtattctgactgttatcaatttgccaatgcctaatatcactggtatttaaatcctctaattttataacaatttgtatctgcaaaagcaagtccacctaatccttttttcttctggatgttgtctatgattgatcttagcatttccaattatattttaggttttagcttgccaagttccatgaaataccctgttgacattttcattgtaattgcattagatttatggctcaatttggtgagaagcttgacatctttatagtattgagtctggtctctctatctattctgtaaggtctttattatctttcaaaagatttttggaatttttgtcataatggacttgcataaactttgttggacttttttctaggtagtttatgttgttatatatgtatctgtttgaatattacacattttaggttttaata

SEQ ID NO: 828385 - DNA, 621 bp, Homo sapiens
ttaattttttaatccacctggaatgatatttatgtatagaatgatgtagtgattcaatttctttcctctycccattgataacccagagtcctagcatcattttttgaaaagtctattcattctacactgatttgcaacaccagctttgttataaatcacatttccatattttcccaagctatttgtgagtgctgtattctgactgttatcaatttgccaatgcctaatatcactggtatttaaatcctctaattttataacaatttgtatctgcaaaagcaagtccacctaatccttttttcttctggatgttgtctatgattgatcttagcatttccaattatattttaggttttagcttgccaagttccatgaaataccctgttgacattttcattgtaattgcattagatttatggctcaatttggtgagaagcttgacatctttatagtattgagtctggtctctctatctattctgtaaggtctttattatctttcaaaagatttttggaatttttgtcataatggacttgcataaactttgttggacttttttctaggtagtttatgttgttatatatgtatctgtttgaatattacacattttaggttttaata

SEQ ID NO: 828386 - DNA, 611 bp, Homo sapiens
ttacaaggaatgtattagggggaggcgtgcctgtgaaggataagaggcggaatgcatgtgggtagrtggggaaagtcggccaatctcagggtaggtctagaatcagggagagagagaggtagagcctcaggtggcagagcagctctgagagagtcttgatcaatgattgggagtccagattaaagcagaggttctgcctaggcaggatagccatccctagtatctgtaatgtgctcagttgatgacgagaagcagccctaggagggtgtgatctaagagtgcaccctgcagaagatcccaaagatgtggcagctggaggctgtagcttcactccttgaagcaggctgcctcatgaagggagtgctgggtggcacaccttcatggctcttgcaaggaaagaccaaaaaatgcctaagacagcacctgaccttatatgatggtgtagccagtgtgctttgggaaatccactatgattcgctctctttgataattgtcccatcccacgctgaagcagggtgagctggagcgtcatgtaacattttaaccatgggatctttctccaatggatcctaggaataggaatggaatctttaaactgtgaaaggaaaata

SEQ ID NO: 828387 - DNA, 646 bp, Homo sapiens
atcctacttttctgagggataatgttggggtgaggaaaaaaaacctcgccctgtttttgggtgatgtaggagatgagaaaatcacccatgaagagatagtagataaaagaaggtggccttggacrgagccctgggttgttccagcatgtagaggtttcacataagaggagtgagaaaaggaatttgagaaggagcaggcagggagatagcaggaaaactaaaagagtagtgaaaaagtatttttgagatgaacagggaagggatcaggtgtgtcaaatggtgatagatcgagcaatacgaggacaacacactgaccatggatttggcaaggcagaggctgttagtgagcttgaagagagctatttctttggagtaatgaggtatgagaatgattggataggggtgagtagagactgagatatgaagaagtagaggcagaaaaaaaagacaagtcttacgctctgaagggaagcagaaatgaagtaggattgagaaagataaaatttagtgtgcatattggagttgttataagtaaaaagatgggccttggagaagaatttggaaagcaagtagacaactaaaagtaacatttcatctcaaagactacagagatttgtggctttagagcctctgaaaggtctgtagt

SEQ ID NO: 828388 - DNA, 646 bp, Homo sapiens
atcctacttttctgagggataatgttggggtgaggaaaaaaaacctcgccctgtttttgggtgatgtaggagatgagaaaatcacccatgaagagatagtagataaaagaaggtggccttggacggagccctgggttgttccagcatgtagaggtttcacataagaggagtgagaaaaggaatttgagaaggagcaggcagggagatagcaggaaaactaaaagagtagtgaaaaagtatttttgagatgaacagggaagggatcaggtgtgtcaaatggtgatagatcgagcaatacgaggacaacacactgaccatggatttggcaaggcagaggctgttagtgagcttgaagagagctatttctttggagtaatgaggtatgagaatgattggataggggtgagtagagactgagatatgaagaagtagaggcagaaaaaaaagacaagtcttacgctctgaagggaagcagaaatgaagtaggattgagaaagataaaatttagtgtgcayattggagttgttataagtaaaaagatgggccttggagaagaatttggaaagcaagtagacaactaaaagtaacatttcatctcaaagactacagagatttgtggctttagagcctctgaaaggtctgtagt

SEQ ID NO: 828389 - DNA, 646 bp, Homo sapiens
atcctacttttctgagggataatgttggggtgaggaaaaaaaacctcgccctgtttttgggtgatgtaggagatgagaaaatcacccatgaagagatagtagataaaagaaggtggccttggacggagccctgggttgttccagcatgtagaggtttcacataagaggagtgagaaaaggaatttgagaaggagcaggcagggagatagcaggaaaactaaaagagtagtgaaaaagtatttttgagatgaacagggaagggatcaggtgtgtcaaatggtgatagatcgagcaatacgaggacaacacactgaccatggatttggcaaggcagaggctgttagtgagcttgaagagagctatttctttggagtaatgaggtatgagaatgattggataggggtgagtagagactgagatatgaagaagtagaggcagaaaaaaaagacaagtcttacgctctgaagggaagcagaaatgaagtaggattgagaaagataaaatttagtgtgcatattggagttgttakaagtaaaaagatgggccttggagaagaatttggaaagcaagtagacaactaaaagtaacatttcatctcaaagactacagagatttgtggctttagagcctctgaaaggtctgtagt

SEQ ID NO: 828390 - DNA, 531 bp, Homo sapiens
aaacaactgcacaaagaaaaattgtgtccttgtacaaggaacagttgagscaatcagatcctgtctcctttccgtctccttcccctggtacacagaataaaccctgcagccctggcctcctgggtaaacgtggaaaatcgttcctacagtgagcaatccaccttgctcactggatggatggatgtgggaagcagcgactgtggtcctacagatactgaagcgggaaaggggttaaatgaggaaagccagctccactgcaaagaaaaacccaccctggcaattgcagaggcctccagcctgcctactgatcttcagccagctggaatcccaaattaaactcaaccagtcaacaggcctcacataccacatatcagccctttctttaaaggaaaggctattggagaaagagacttaggcacgaataaaggaaactcgtattgccaacttctataccaatcaatttaatcatttattcataatataaacgaagaaacagagatcaccaggcatttgagaaataaacagcattaa

SEQ ID NO: 828391 - DNA, 344 bp, Homo sapiens
atattctgtcctaaatgtggactaagatggaaaatagtacagtgatttcctgaggtcactgggctatcaccagaatagtagacactgtggtgcttcacctagatccccctccaggctgaggtgctcactcgccccacttgcagaagtgttggttcctcatggctcacaacaaagtccccctctgagagctgctcgatgaaaaggacctgcctcaccccaagtgatgccgtcgcctgggcagtctacrttccgtgcctggttaatatggggtttcataggcctggcccccatatctcaagacaacggaaggacttcccagctctagagcttcctgaaggagcagc

SEQ ID NO: 828392 - DNA, 344 bp, Homo sapiens
atattctgtcctaaatgtggactaagatggaaaatagtacagtgatttcctgaggtcactgggctatcaccagaatagtagacactgtggtgcttcacctagatccccctccaggctgaggtgctcactcgccccacttgcagaagtgttggttcctcatggctcacaacaaagtccccctctgagagctgctcgatgaaaaggacctgcctcaccccaagtgatgccgtcgcctgggcagtctacgttccrtgcctggttaatatggggtttcataggcctggcccccatatctcaagacaacggaaggacttcccagctctagagcttcctgaaggagcagc

SEQ ID NO: 828393 - DNA, 625 bp, Homo sapiens
aaaatgtgaaaaccttactttttaaaaagtgaagaaaatcttccattaacatagtcattttgtaattacttaatacttgcaatcagatggctatgcaaacacaacattctggaaacacagattattcaatcatttcagggtagcaagagaaaggcctgggaaatggttgatcttccttttgtccttgaaccaacaatttccatcctttattacctgaagtatgtttattttatacctactacagttaaagtttctattccacctgctataacaggtatcacttctagagtgttctagacattttgcatacatccttcactcaatcctttcagtaatcttacaagtaattattaataattattaatatacctacactttacagatggctgagagaggaggtaactcatggggtcttccaaggtggtgtcagaatttaaacttcaacccctggactctggtctccatcctaaaacaaactctttcaaatatttattgcaccactaattggamaagtttcttcagggatattacctctgtcctcagcttcttgtatgttggtctgtgatagtatttgaagaagcaagcagcattgattcccatagattttgagacattattcaaggtc

SEQ ID NO: 828394 - DNA, 337 bp, Homo sapiens
tattgctccattttagattcaattccctccattcagaatatatttatggagcattttctaggtgccagacacatagacaccaggaagatgaatatccgggtccttgattttaagatgtgcacagatctgttttccatcttaatgacctaatttccattactatcatccacaaataatattcatacacatagttctaccttttgttaaacctctccaacttataaaggatctcatttgtacaaccctgtttatccytcctgtccttaagcacaggagggatgcttgtcctggatccctggcccattcatcctcagcggctgcttctgctctttctagg

SEQ ID NO: 828395 - DNA, 655 bp, Homo sapiens
tttattttttaaaattatttttttctttatttttgtctgactgagttgattcaaagaatcagtcattgagctctgagattctttcctcagcttggtctattgtcctgttaattcttccaactgcgttacraaattattatagaaaattcaattccagaagttcagtctgattctttcttaaaacagttcttttgactatcagctcttggatcattttactggattccttggattccatggattgggtttcaagtttctcctgaatctcaatgagctaccttgtcatccagattctgcattctattttttgtcatttcagccatttcaatgggttagaaaccattgttctgggactagtgtgtttgtttggaggtaagaagacactagcttttgaattgccagaattcttgcactgatttttctcatctgagagggcttttgttttattaactgtgacacaaaatgagtataatcagctcgcttcatttctgggtgctttcagaggtctaaggctctgtacaggatctttattcgtgaacaaatttttgccttaggtttcaggcactgtatactggcaaaatatttttggtgttgtaatttggtctggtatccagtaaatggcacttaagagtgatggctggcagataggctctta

SEQ ID NO: 828396 - DNA, 655 bp, Homo sapiens
tttattttttaaaattatttttttctttatttttgtctgactgagttgattcaaagaatcagtcattgagctctgagattctttcctcagcttggtctattgtcctgttaattcttccaactgcgttacgaaattattatagaaaattcaattccagaagttcagtctgattctttcttaaaacagttcttttgactatcagctcttggatcattttactggattccttggattccatggattgggtttcaagtttctcctgaatctcaatgagctaccttgtcatccagattctgcattctattttttgtcatttcagccatttcaatgggttagaaaccattgttctgggactagtgtgtttgtttggaggtaagaagacactagcttttgaattgccagaattcttgcactgatttttctcatctgagagggcttttgttttattaactgtgacacaaaatgagtataatcagctcgcttcatttctgggtgctttcagaggtctaaggctctgtacaggatctttattygtgaacaaatttttgccttaggtttcaggcactgtatactggcaaaatatttttggtgttgtaatttggtctggtatccagtaaatggcacttaagagtgatggctggcagataggctctta

SEQ ID NO: 828397 - DNA, 616 bp, Homo sapiens
atgttattacttatatgtggaagctaaaaaaattgatatcatagaagtaaaaaataaaacagaggatactacaggctgggaaagctgcagcaaagggagactagagagagatttgttaaaggatacaaagttacagcttggtaggaggaataatttctggtgttctataccactgtaggacgactatagttaagaacattatattccatttagtttcaaatagctaaaaggagattttgtccccaacaaaaagaaatgataaatatttgaaaccatggatactctaatttctctgatctgaccactataaattatatgtattgaaacattattatgtatctcccaaatatgttcaattcttatgtcgctcaaaaaataaaatttaatttaaaaagtatctgatttttaaagtaaatattttttaaagttttgacatttaaattacttgaatctcattattttgacaataatttaattcttttattgttcaatctgttagtgagatgtgtcataggtattatgtcattagttcaaattcttgyggaaattatagctatattaaaagtgtaacatttttatttagttgtgtacttatttgttaataatacagacattg

SEQ ID NO: 828398 - DNA, 616 bp, Homo sapiens
atgttattacttatatgtggaagctaaaaaaattgatatcatagaagtaaaaaataaaacagaggatactacaggctgggaaagctgcagcaaagggagactagagagagatttgttaaaggatacaaagttacagcttggtaggaggaataatttctggtgttctataccactgtaggacgactatagttaagaacattatattccatttagtttcaaatagctaaaaggagattttgtccccaacaaaaagaaatgataaatatttgaaaccatggatactctaatttctctgatctgaccactataaattatatgtattgaaacattattatgtatctcccaaatatgttcaattcttatgtcgctcaaaaaataaaatttaatttaaaaagtatctgatttttaaagtaaatattttttaaagttttgacatttaaattacttgaatctcattattttgacaataatttaattcttttattgttcaatctgttagtgagatgtgtcataggtattatgtcattagttcaaattcttgcggaaattatagctayattaaaagtgtaacatttttatttagttgtgtacttatttgttaataatacagacattg

SEQ ID NO: 828399 - DNA, 574 bp, Homo sapiens
cttctgacaatactgggtttataattgcaaatatgtaaataaaacaaaatgtaatcctatatttgaataaaaagtaaacagattgttaaagtaggagtctatcacacaattttgtttttgctttaatgacactaaaaattaagaaaaataagatgataaggctttacctcaagtcaaataatattatttaagaaatacaaataaaaagttaaaaaaattgtgtcaatactgtacacaaggtatgatttcatatactacaattttaactaaaacattttaaagtgaagatttaaagagtgattaaacaacacatactatagataatgtatcaactttaagaataacactaaaataattaaaaagttggaaaaattaaggactgacccttgaatggcacatgagaattattttatttagcaaaaatttcaatgaacacatattcattgatatcatttttgtagacactgttctagatatagatactaggaataccacagttaacaaaatggaaaagygattcctgctcctttgtctcttttattgtaatactatcattactactccaacacattta

SEQ ID NO: 828400 - DNA, 637 bp, Homo sapiens
ctaatgcgaaaagcatacaacacgcaagaatgatgggtgacgtaagcagagatagaagctataagaaaaaatcaaaaggaagtgatagaagtaaaaaacatcgtcaggctggcgtggtggctcacacctgtaatcctagcactttgggaggccaaggcgggtggatcacctgaggtcaggagtttgagaccggcctggccaacatggcaaaaccccgtctctactaaaaatacaaaaattagccaggcatggtggtgcacacctaaaatcccagctactctggaggctgagacaggacaatcgcttgattgggggaggtggaggctacagtgagccgagacatgagtcactgcactccagcctggacgacagagctgagactccatctcaaaaaaaaaaaaaagcccagagttcaaggctgcagtgcccaatgattaagcctctgaatagccactgcattccagcctgggagcaaagtgagactgtctctaaaaaaagaaaaaatatatatatagtcttcttctgttttgttttgtttgtttaattcaaagttacatcacagttgtcctcractacagaaacagatccagctacaatgtttaattcttctccattacttaaattaaatgctgccacc

SEQ ID NO: 828401 - DNA, 534 bp, Homo sapiens
aaaaactctctgaggtaggttctactattattactattttataaactagtcacagagaagttaagtaaattgcctgggggcacacagccagtaaccggcagagccaggctggaaattctggctgtctgtctccagtgcctacctgcctaaaaatgactgaatacttttattgtgaatcaggcactgtgctaaagattttttaatgcattcatatattcttcacaccaacccttttatgagaaaaccgagacttgtaaagggtatgtttcttgaagcccatgaataataaatagcttaggtggggctcaactcaggtttatgaaatatgcaagacttagcaagatctgtaccagctcagccccagatcccgcgagaacctctgcaatgcccttaacatggtcatccattgcatggataatctgggcttcgtttagactactctgtcagaaaattctmcctcaggctgaacttgaaataatcgtggctgtaactttgtgtccacagctctggagccacatcagtcaggtctgatat

SEQ ID NO: 828402 - DNA, 481 bp, Homo sapiens
cacaagagaattaattatttgggggtgatgataacattttgtaacttgactgtggtggtagtgattacacagcagaatgtgtcaaaacttaaactatrcactaaaaagggtgagtttcattatatacaaagtgtacctcagtaaaactgacagatatataaacatgtttaaagcttacttttaagtaataataataataggtgccacgagagatgtaaagaggaaggagactatgaaaaatttatttcccagtgagaattagagaattgtcacggaagtgttcatatgcatgttgagcctcaaatatacatgaataatatctggggagtgaccatcttgaagaactaatttccaatttcaaattcatggaagaaagtatcagagaatcatatttctgtacttttgccatagcaccttccactgagccacaaaccaagtagatctaagagccacttagtctcatctgtcatggcacaccttt

SEQ ID NO: 828403 - DNA, 576 bp, Homo sapiens
atttctgcatctatgtctatattgaaaatcatgagtgcrcactaatacctccaataccaatcaacacctctgggtttattcaagctctcctttccatatttgtaacttctttctcctacagtgaaagcacggacttccattgtctctaacatatttactcattttctccactccctctgtataacaaatttcccatctctgctgcccacatctccaccatgtgggtgatggttgggtactaacagtgctgactgcctcgccctacttggatctaagacaaccttgctggtggccccagtgcatgtacctccctgccaccctctctggctttgacacatgctccaggctgcccattcaaggaagccctcttccacccttctggattgatgactctgccgggtaccccctcccctgtgtcctcctccccatgcctgagctcggccaccctgctctaggctaccagcccctcccaccatgggtccctgccttactctgttcaactaactgctaatgactttaaaactgaattattctggaaggaaagggaacaaggaaaggaagagcattttattgtgg

SEQ ID NO: 828404 - DNA, 576 bp, Homo sapiens
atttctgcatctatgtctatattgaaaatcatgagtgcgcactaatacctccaataccaatcaacacctctgggtttattcaagctctcctttccatatttgtaacttctttctcctacagtgaaagcayggacttccattgtctctaacatatttactcattttctccactccctctgtataacaaatttcccatctctgctgcccacatctccaccatgtgggtgatggttgggtactaacagtgctgactgcctcgccctacttggatctaagacaaccttgctggtggccccagtgcatgtacctccctgccaccctctctggctttgacacatgctccaggctgcccattcaaggaagccctcttccacccttctggattgatgactctgccgggtaccccctcccctgtgtcctcctccccatgcctgagctcggccaccctgctctaggctaccagcccctcccaccatgggtccctgccttactctgttcaactaactgctaatgactttaaaactgaattattctggaaggaaagggaacaaggaaaggaagagcattttattgtgg

SEQ ID NO: 828405 - DNA, 600 bp, Homo sapiens
ccagcagtttaggggtcagtatatcctccagttgttttggttcagttgggtttctgtccctgcagatcaaaatcatcttgacatatacagcagctattttgaatgaagcctagacagtacgggagtgcggagacagcagaagcagagatgagttatcttgaacctaatgaagcttgagcttcagggctactaccttatgtgagtccctctaaggccctagatgggagtcgtgttcatacactttgcagaatttttagaagatatattagttgcaattattaggaccacaactagccaggtacagtggtgtgtacctgtggtcccagctactcaggaggctgaggtgggaggaatgcttgagcccaggagtttgagaacagcctgggcaacatagtgataccccattccccaaatataaaatacaataaaataaaacaaaatattaagaccacatcagcctccttccatttcaatagaggggactctattaaatcttccccatacctagccctgaagtgaacatgygcatttaaaaaaacagctatgaagaaatcaagtcgaggacatgtttaatttgtgttaaataggatatatttatag

SEQ ID NO: 828406 - DNA, 473 bp, Homo sapiens
gggctggagccttgtacccactgcacagaggggagactgaggccggactcaccttggtggagagcaggcgggtcaggtagatttccgggagcaccttcttgcgatggctctgccggtgagacttcttgggctccgccagctcgtccgtaggcagcacctgggaggccgggcagtggtcagtgtccgcaccaggccccatcctcggccgcctgtgggaggtctggctctgccatgcttcttagcacacaagggctgtggttccctcctgattctgggccccatccctactcccccaccccccagccttttgcagggctgggagcacttttcccaagaggcccagggccacagaaagccaaggccacacccactgaggggctggatcccccggggccgaggttgggcactcaccaaatggaaatacttctctgtgtccaagtctttcactgygagaggaaaaacacaataaataa

SEQ ID NO: 828407 - DNA, 613 bp, Homo sapiens
cagccttggaaccaagcctctgcccccatagcccacagagccctccagccctgagcggagcccaccctccccagccacagaccatagaggcagcggccccaatccctgaccctgtcctctcctgatgcatgagattattttattaaaaaaactcaaagaaaaaaaaaatagaacaggtacctagaggaactggagtctgctggagggcagcctatggcgggctcccacacctcaggggcagctcctaggcactgcccagccaggaaccgcaaactgtgttaccggtgggtcccccaaaagaatatggaaacaccttataccctctcacacgtttaaaaattcatatttacaacattaaactggaagcaaaggatgtgatttcctggatatggtaaatattgagtttttattcacttattttaaatgttttttaacttttcttatttatttattcattttagagacaaggtctcactctrtctcccaggctggagtgcaacggcaccatcacagctcacttgcagccttgaacttgcagcccagccttgaactgggctcaagccatccaagaagctcggacaacagggtgttccatcatggccagctaatttct

SEQ ID NO: 828408 - DNA, 618 bp, Homo sapiens
ctatatctcacaaatgtttagacaatggacatgtttcaggatattagtgtctttcagaaatattactgaaatggattttatctgagggaagagggcatcttgaaaaaaatttgttttgatacagggtctcgctctgtcgcccaggctggagtgcagtggtgtaatcatggctccctgcagccttgagctcctgggctcaggtgatgctcacaccttagccttctgagtagctgggactacaggtgtgtgcaaaacacagtttgtttgttttttaaattttttatagacacaaggtctggctatgttgtccaggctggtctcaaactcctgagctcaagtgatacttccaccttagtgtcccaaaatgttgggattacaggcatgattcactgtgtccacccccagggtttcttcaccacaccagcacaatgtcagcagtgaaagggcctggaagctggtaaagcttaaaagatacagactggacccgaggcactgagttggtttaatactgtgagctgcaatgtgggtgctcacttragtgtgccatgaatgtgaaaatgcatttccaaggcatctaaactacccttacctgcctctgtgaaaaaatcagtcactatg

SEQ ID NO: 828409 - DNA, 618 bp, Homo sapiens
ctatatctcacaaatgtttagacaatggacatgtttcaggatattagtgtctttcagaaatattactgaaatggattttatctgagggaagagggcatcttgaaaaaaatttgttttgatacagggtctcgctctgtcgcccaggctggagtgcagtggtgtaatcatggctccctgcagccttgagctcctgggctcaggtgatgctcacaccttagccttctgagtagctgggactacaggtgtgtgcaaaacacagtttgtttgttttttaaattttttatagacacaaggtctggctatgttgtccaggctggtctcaaactcctgagctcaagtgatacttccaccttagtgtcccaaaatgttgggattacaggcatgattcactgtgtccacccccagggtttcttcaccacaccagcacaatgtcagcagtgaaagggcctggaagctggtaaagcttaaaagatacagactggacccgaggcactgagttggtttaatactgtgagctgcaatgtgggtgctcacttgagtgtgccatgaatrtgaaaatgcatttccaaggcatctaaactacccttacctgcctctgtgaaaaaatcagtcactatg

SEQ ID NO: 828410 - DNA, 624 bp, Homo sapiens
tcttttctccctttggaggataattgttagtttattgattatatacattatatatgcacacattcttatttaaycattttaaacaatatagaaatatactatgtacaacatgaaagtcctctttcatctcaccccaattctactcacgccccaaaaatactcagtgacttttttctatgcatttttatatacaggcacaagtacatcaattggatttttgtcccacagagatggaattgcacagtctgtatacctctgcaacttgcctttttttcttagctttgccatccccagtcccagacacctctgattccatgagtgatctggctgtgtgtgtgtgtgtgtttgtgtgtgtgttcctctgtgtcaagggctgagaagtacctagtctaagagggaaatccatctttcctgaggtgagcctgagtgattttttcatcaaatagatcatgaccagttccctcttctgcacacccccctccctgctgagcactgacaagcatgagggaaaagccaagggcatccaccccaacccaagcaaggacggggtgagagaaagcggacagaagtacaagttaaccggccagacactgactcacaagtgcaggagggaggtgggagcag

SEQ ID NO: 828411 - DNA, 619 bp, Homo sapiens
atcatacattttaaaataaaaaagtattgtccaggcgtggtggctcacgcctgtattctcagcactttgggaggccgaggtgggcagatcacaaggtcaggagtttgagaccagcctgaccaacatggtgaaaccttgtccttactaaaaatacaaaaattagccaggcgtggtgcgcacacctgtaatcccagctattcaggaggctgaggcaggggaatcgcttgaacccaggaggcagaggttgcagtgagccaagatcatgccattgcactctagcctgggtgacagagtgagactccatctcaaaataaataaataaataaaagagtataattggattgtttgtaagtcaaaggataaatgcttgaggggatggataccccattctccatgatgtgcttagttcacattacatgcctgtatcaaaacaggcatgtacatggggtacatctcatgtaccccatagatatatacacctgctatatacccacaaaaaaaattttttaaaccttacaaattaaaaaaaaaaagaagaagyagatggtggaaacacttggctatctcagccttaggtctacatggtacagaataaaagaaaaaaaaatcccctgataat

SEQ ID NO: 828412 - DNA, 583 bp, Homo sapiens
cttggagaatggttgtgtctagctaagggattgtaaatacaccaatcagcactctgtgtctagctcaaagtttgtaaacacaccaatcagctctctatgaaacagaccaatcagctctctgtaaaatggaccaatcagcaggatgcgggtggggccagataaggaaataaaagcaggctgccccagccaacagtggcaagctgctggggtctcttgctgcgctggggaagctttgtttttttgctctttgccgtaaatctttgggtccacactacctttatgagctgtagcactcaccgtgaaggtctgcagcttcactcctgaggtcagcaagaccacgagcccaccgggaggaatgaacaactccagacgagaggaacaaacaactccagacacgccgccttaagagcttgtaacactcaccacaaaggtttgcagcttcactcttgaagccagygagaccatgagcctgccagaaggaagaaactctgaacacgtccgaacatcagaaggaataaactctggacacaccatctttaagaactgtaacactcactgcgaggatccgcagcttcattctgga

SEQ ID NO: 828413 - DNA, 589 bp, Homo sapiens
atgtgtatgtttatgacagcactatacacaatagcaaagacatggaatcaacctaaatgcccatcagtgatggactggataaagaaactgtaggacatatayattgtggactactacacagccataaaaaataatgagattgtgtcttttgcagcaacatagttggagctggaggccatcatcctaagtgaacaaacacaggaacagaaaatcaaatgttgcatgttctcacttataagtgggagctaaacattaaatacatatggacacaagggaacaacaaacactggagcctattgtggggtggagggtggagtgtgggaggacctgggtgatgaactaatctgtacaccaacctccatggcacacaatttatataacaaacctgcacgcgtaccccgcacctaaaatgaaagttaataacataaaaatatgtctgaaagttttagacagaagattttctcaggaatagacggagtaacaaataaaacagaatagaaagtccagaagcagatccatgaatgtgtggaaacttgatgtagagctgaaccgacaccaaatatcactgggcaaagaatagactgtttga

SEQ ID NO: 828414 - DNA, 599 bp, Homo sapiens
gttggagagaaattacagggtgcatggggcaggagaggggtaggtatcagtagacrtaaggtttgcttttttctccccagtgaatattttactcaaaactgaggaaagtagagtgatacgctactgcagaataggttttttgttttttttttcaagccgggtgctgtgattcttgactatggctgagtagaatcaaccgtcagtgcatgcagatagctgggccagaatctggagggtggaactggccatttaaaaaagttctttagatttaataatgtggagctatcattggtgggagtagtattataactcagagcttcctaacttcctaagctggcagttcagtagtggctgataatgagtgaatcatgtatatggcaatcttacacttgttattgtatgtcttttttatagccatcctagtgggtttgaagtatctcgtgattttgatgtgtttacattctgactaatgatgttgagcatttttttatgtacttcttggccacttgtatttctttggaaaattatctattccagttctttgcccattttgaaatgggttatctcatttattacagtttcaggagttctgtatatat

SEQ ID NO: 828415 - DNA, 630 bp, Homo sapiens
tacaagtatactcaacacatggcaagctaccagggaggccaataataatatttagatagctgtgcatgttcattaatcgtaagataatttaagaccaaactaaagtttccaatatacttgattttcatgatcaatataagaaagtgcattttatacataatgatttactgtgaatattgttattagcttattcagcacttcctatgttgccagcactgggatgacttacatacacctttttcctcttcattttcaaaactacctcaggaggtaagtactaccattaactgccccatttgagaaatgaggtcgccaagtgatggattctcccaagctccctattaaaatgtagcatcaagattcaaatctagatttggcccacagccctgtgctattaatctctaagctcataaatgtatttgatttgtttttgctgtttattagccttgatcaagcattagctagaaaactctgtttatttaagctttactctttatcttcactttcagtactcccccattttcacacatttttggcttcatatttcttccygctctcatgaaaaaagtctaaattattatctgttcatcaaatcattttaaaaatccactaaagtttgctgaattaaag

SEQ ID NO: 828416 - DNA, 561 bp, Homo sapiens
ccctggtcaggagttcaagaatccagtttacctccgacagactatgtgaccttggaaaattcatttttctccaagcttcagattcctccatttttaaaatggattttcccttttaaatgattataagattcctttttaaaaacatttttcttatttcataaataatacacaatcactgttgacatttttaaaagtatggataaattaaaagaaaaaataacaataattcacaatcttaccacctaatgattgacactgttagcatttttatgtattccttttggtgagactgcttgggattttagcatcactgaatatatatctcccagtgagagttgcctcttcaaagcctttccaagccttgcacatgtaccaacaatgctgcccataaattaggaagttggggaactgctcttcggtaactcactccctgtagactgtgactctgtctttggaatgtccttggtaataataagtcatctgagggtcrtagtgattattggaagagtcatttgaagacaaatttacatgattggaagaatgatcaagctgagtacctcc

SEQ ID NO: 828417 - DNA, 650 bp, Homo sapiens
tgaattatcaaaatatttccacaatcaccatgaatgtaatgaaaatggaagtacaaataacagaaatgaggacatatttacctatgacttgggtttrtatatagaaagattcattcacagtactgcatttgagatacttctttaagaatgagtaagatgctgacagaggtggagtgaagaaaactatggtataagggatagttaattcattcaaaatgtatttgttgagcccctattaagtacccaacaccatgttaagcaggagcaggaacagtaaaaaacacagacacgaccccggatttcatggagctttctcttcagctataatgtttagactgaagaggggagagatgtgataattgtctttttcaagttatctaagactaataataagaggacaggatgtgaacaaacttattttctgaagttccatctgacgtaagtaggtccacaaagtcaagataataaaaaattagtttcactcaatttaatgaagagcatgccaataattaattaagctgaactaaatgactgccatagttctcaaaacttcatgtttctatgattataatgctcaaaagggtaaagaaaagagtaggcatcacttgatagaatttatacagatctcccgtagttcccctttgaaaatg

SEQ ID NO: 828418 - DNA, 601 bp, Homo sapiens
agggatgttgctttgacatctccttcctgttttcttaacatcagagtacgtgctccccgagttttttgttggtatgtcaacttgcttatagtataatttaagggctaattcagacccattcttcaaatgcaggaaaagatcacagttggaggccaactggagatcagatctcatgtgtagtgattccattagagattgtcatcaaaataacttcatcatatttaggatggcttaacaaactaagatgaaataatttttactcctgctttcttattttgaagcataacatagttcaacatcagagggacattaatggaagctcaccacccccttcccacatttgtaaaatgaatcagtgtctttccatcccatattcaacagctaagctatttatgtcccataaactcagggctcattcacttattcagcagctatttcctgagtgtctaccttgtgccagttgctgtgctagtgctgaggatacagccgcgaaacaaacaaactgttagtacatttgggaggaagaatcagataaacatcatatcaacacatcaacaattgccacagtattgggcagggatwaaagtcaccaagaagaatg

SEQ ID NO: 828419 - DNA, 528 bp, Homo sapiens
gcatgcaagcccatccccamtgactggccaaagcatagtcatgggggctattattgcccgcagttacgcactatagaaattctcctggccttgggggtctgatttccccttagatcttcaaggaagcttcttcagggagaatattaatgactgtctgaatcattagcttccctcccaccagcatcactagattttcaaccagccataaaatggtcctggaaaaggagacagcaagaccagatgtcagaaagaagaaggcttctgctatcattcccgagtctgatgacttgtttcccgggtcattctcttcataaagagaatctatttcctacaagagaaatctcctgtgtgagagttctttctaaagcctgctgccttcactcaagcctctgatatcaacccaagcctccccagtccccttgggataaagtccaagttcaaactcaacccaaggcccattgtgaccaagccctggtctctagccaaccctattccttccagcttcacctcccataatcaagccaaata

SEQ ID NO: 828420 - DNA, 604 bp, Homo sapiens
taagagaatgagcagaaacatgcaagaactcttgaggcttagactcagagttgtcacagggtcatttctgccacatcctaarggtcaaaaccagcccagagtcaaggggttaagggataggttccacttcttcatggagaattgttgtaaagccacatctcaaagggtgtgaatacagggaggggaaaaattagggtcctgttttgcaatcagtctatcatagatgcattcaaatgagttactgtagccactctattagttcctccttgatcatcatgcaaaatctaaaaatatttcagattttagtaccaatgattctgattcctagtcaaaaagcttctgttcccaagatgagtagagcaaatactttaggaaccttaaaatgctacttattgttccttaacatgactatgatcatatccaccaaggatttgaagctggtacttgagaaactgcctctgggaattaagggccagataaactcaaccatgagtacgagatccaagcccacagcctaacacctgccactcttgggtaaaaccaagcaataccccaaatctcttgatcttccaggaaacgggatgcactgagtacatctgcatgg

SEQ ID NO: 828421 - DNA, 604 bp, Homo sapiens
taagagaatgagcagaaacatgcaagaactcttgaggcttagactcagagttgtcacagggtcatttctgccacatcctaagggtcaaaaccagcccagagtcaaggggttaarggataggttccacttcttcatggagaattgttgtaaagccacatctcaaagggtgtgaatacagggaggggaaaaattagggtcctgttttgcaatcagtctatcatagatgcattcaaatgagttactgtagccactctattagttcctccttgatcatcatgcaaaatctaaaaatatttcagattttagtaccaatgattctgattcctagtcaaaaagcttctgttcccaagatgagtagagcaaatactttaggaaccttaaaatgctacttattgttccttaacatgactatgatcatatccaccaaggatttgaagctggtacttgagaaactgcctctgggaattaagggccagataaactcaaccatgagtacgagatccaagcccacagcctaacacctgccactcttgggtaaaaccaagcaataccccaaatctcttgatcttccaggaaacgggatgcactgagtacatctgcatgg

SEQ ID NO: 828422 - DNA, 604 bp, Homo sapiens
taagagaatgagcagaaacatgcaagaactcttgaggcttagactcagagttgtcacagggtcatttctgccacatcctaagggtcaaaaccagcccagagtcaaggggttaagggataggttccacttcttcatggagaattgttgtaaagccacatctcaaagggtgtgaatacagggaggggaaaaattagggtcctgttttgcaatcagtctatcatagatgcattcaaatgagttactgtagccactctattagttcctccttgatcatcatgcaaaatctaaaaatatttcagattttagtaccaatgattctgattcctagtcaaaaagcttctgttcccaagatgagtagagcaaatactttaggaaccttaaaatgctacttattgttccttaacatgactatgatcatatccaccaaggatttgaagctggtacttgagaaactgcctctgggaattaarggccagataaactcaaccatgagtacgagatccaagcccacagcctaacacctgccactcttgggtaaaaccaagcaataccccaaatctcttgatcttccaggaaacgggatgcactgagtacatctgcatgg

SEQ ID NO: 828423 - DNA, 585 bp, Homo sapiens
  misc_feature 313: n = A,T,C or G
gttcacaaataagggaccgaatcatcatgttcttagtaaactttatatcccagtagatttattttcatctgattggattcaggtatctaaaaactgtctctctgtcattctttttttttcgtttttttgagacggaatctcactctgtcgcccaggctggagtgcagtggctcaatctcggctcactgcaagctccgcttccagggttcacgccattctcctgcctcagcctctcgagtagctgggactacaggcgcccactgccacaccctgctaatttctttctttttttttttttttttttttttttggntttttagtagcgacggagtttcaccgtgttagccagggtggtctcaatctcctgatctcgtgatccacccacctcagcctcccaaagtgctgggattacaggcatgagccaccgcgcccaggcctctctgtcattcttattaacaaatttaaraatatacattatcctctctttttaagagttttataatgcccagcttctaatatctgaaatggttcactacaccttgtagacgaaagtgccaaacaggatgttatacctccctgtttatt

SEQ ID NO: 828424 - DNA, 633 bp, Homo sapiens
atgagtctcagggttgcccttggaaaaatggaggtgataatgatacctgcctcttaaaaggctattgagaagatttagtcagataatgtttctgaaattcatagcagtgcctgtcacatagtaagtgttcaacaatataaactactgttattaacagctgaataacagttcaagataaaggagccagcacgcaatggggatggacttcagtttcacataaaacagaaatggcaacaacattgggattatcaatcttattgctttatttgtgccatcttatataagaccgataggagaatttctattccttatcgtgagaactggtttatctcacattctaacagtaggaaattctatctacgatatttccgaatttaccagaattcatatccataatgatagcttcgtgccttagaaaattctgatgtgcctgattctgaacagaatttcctacagtatatcttgatgtaatcttattatttgtgaattggccatacattttggtataaaaataatgagaaccccattccctgaycattcaccataactcagttcaccaccttatggagctaacacaagaccaaatggtttaaactttcagcgttagttgataactattctaatatgaattgg

SEQ ID NO: 828425 - DNA, 530 bp, Homo sapiens
tgttgtgttttacagggtgaattcaatgagtgggatatccaaatctggggaatcatgagccatatgaagttggagtttttctttctttctttstttcttttaaaggcaattttatttctaagtacattcagttattcaaactaaagtgaaaagccctgccgaacggaggccttgctgactctgctccaaggactagaataaaggcacatctgtaattagcacattaattgctttagcacacatggttactactacagtatttgaaaacagctgcaaatagataaaacattcctaggatcttcatctgtcaatttgctcggcatatcccgtcttcataaataatgtaaaatctgaatcttagtaaaatgttcatagatttgcgttagtgaagttctatcacatgaaataattctataaaaatctggggaaatgacaatacttattaaggttgtgctgaaccataccaacaaatcagctgttttccagttgatttagtttataagtccatcttaacatggcacaatttactt

SEQ ID NO: 828426 - DNA, 627 bp, Homo sapiens
tattcaaacaaatattccagatgggtgaaggattcaaataaaaattatattattatacaattaayttaataaaggcagtgaatttattatttaataaatacaagttaataaacataatttattatataataaagacaatttaataaatatgtataatttgttgtataataaatacaacttatttattttacaataaaattataatcaagtttaagaaaacatttgtataaatttggttaaaggtaacattccctagcaaaactggaaatccagaagctatattaaaagaaagataaacttgtcagaggagataaggacagtcagtttaggtatgaaaaagctaccataaaaaagccaaaagactagtaataaactagggaaaaattacatctcatgtatgtaatattactaatattccaacagattttatatgtaagataagaaaatatcctacaatttattgggaaaatagaggctacaaattagcaattcacagatagggaaatgcaatggcacaaatatatgagagatgctcaccctcaaaattagttagaaaaattttaataaaagcaaaatgaaataacaatttcacccttcgcactggccatgatttaaaggaacaataaa

SEQ ID NO: 828427 - DNA, 664 bp, Homo sapiens
tcaaaatagtacttgactgccccatgcttgctctggggcagaaaggagagatgcctggacttaagctggaagagtggaataggcggagtgggcacaggtcccggaggtagagtacctgcattccaggcacagctctgtttctaaggggccaaatgatcttagagaagtaatttgatctctttgtgccccagctcttccaataatgaattggaccaaatctaaatcaaagactggtgccctatggccaaaattggtctaagtgcttattttgtttgggagtcaacttcctttctttctttctttctttttttttttttttgagacaggtctcccactgttgcccaggctggagtgcagtgttgtggtcatggctcactgcagccttgactgcctgggctcaagtaatcctcccacttcaacctctcaagtagctggtaccacaggcgcatgccaccatgcctggcgaatttttgtatttcttgtagagatagggttttgccatgtttcctaggctgctctcaaaatcctgagctcaarcaatccacccgcctcagcctcccaatgtgctgggagtgatacagagaggaggcagggagatactgcgtagaagagggtggttccctggcaaagtccccaccctgaagcttggaaacccacggcccta

SEQ ID NO: 828428 - DNA, 562 bp, Homo sapiens
agattgatctggggtctctataatatttctgtaggtaaaaatattttaaatttaatttaaaattgtatatgtatatgtgtgtatgtgcatttatttttcatttttcctcaaaaatttctaaggccatatgggagaaaaatgtgtgtgtgtgtgtgtgtgtacacatacatgtatgaattaggataaaatatagatataaggttgggaaactatagtccgcaggaaaaatctgatatagcctgtgcagaaggaataatggtttttataacttaaaaggattgttagaaaaaaaagaaaaatatgcaatagaacatatgtacactccagcgcctacatatttactaattagctttatatagaaaaagtttgttaaccctgactgctacagaagatacaatggagataatttggtaaatggttttttttgctgctttttttttttttttttttacagactgttacagtcctctgaatttaaggattgcttgaaratgtgtccaaaaaagcgagaaaaaaaaaacattttttttctaatttttaagttgataaaaaaatattaatc

SEQ ID NO: 828429 - DNA, 562 bp, Homo sapiens
agattgatctggggtctctataatatttctgtaggtaaaaatattttaaatttaatttaaaattgtatatgtatatgtgtgtatgtgcatttatttttcatttttcctcaaaaatttctaaggccatatgggagaaaaatgtgtgtgtgtgtgtgtgtgtacacatacatgtatgaattaggataaaatatagatataaggttgggaaactatagtccgcaggaaaaatctgatatagcctgtgcagaaggaataatggtttttataacttaaaaggattgttagaaaaaaaagaaaaatatgcaatagaacatatgtacactccagcgcctacatatttactaattagctttatatagaaaaagtttgttaaccctgactgctacagaagatacaatggagataatttggtaaatggttttttttgctgctttttttttttttttttttacagactgttacagtcctctgaatttaaggattgcttgaaaatgtgtccaaraaagcgagaaaaaaaaaacattttttttctaatttttaagttgataaaaaaatattaatc

SEQ ID NO: 828430 - DNA, 601 bp, Homo sapiens
tctggaaatccaagatttccagacttccacatttccaagtaatctggaagtccaagatcaaggtgtcagcagggctggtttcttccgaggcctctctccttggcttgcagatgtccatcttcttcctgtgttttctcatggtgttcactctgcatctgtctgtgtccacatctcctcttcttataaggacacactcatattggattggggcctgacttcattttaacttaattacctcgttaaagacctgtctccagacagtcatattcttagctactggcgtgaggacttcaaaatttgaattgtagaagcacacaggttagcccaaaacatagtgtcaatgaccaaaattgacttcctaaaacagacctaacgaggtagtaacagtggggtgtgtaaggatgcatcagcacacatgatgggaaaacagtgcttatgacgaaggcacggagtgagtggtgatgaagtgtatgccaatgaacattaactgaggggctcaacttgrccattctgattctgtgtctattgcattctgagagctactttaggagttcctgtattacttatgtgaatggatccttgtgtcacagaaaactaaaag

SEQ ID NO: 828431 - DNA, 238 bp, Homo sapiens
ctgtactttctttttcattaaacgtttactttaattttatagacttgaagcacaataactactaagaatcttgggaaaatatatyactcatgactacctggtgaatgaaaatatgaattacttaagagaatgtataaaatttatacatatatacaaatggattctactattataattactcaatgcaagtaacctcccatacatttaacttcattattaagtgggagaatgggttaat

SEQ ID NO: 828432 - DNA, 491 bp, Homo sapiens
atcctccctcctgcttggagataacgtgaagccacatccagttcctgaagtccactcaaagtctagggtttttgagagatgagtcctttctgtcaggttcaggtgtggatccctgtgatacagtgacacataaagtacagagataaattatctattcccacattgcaataccagcatgcaaaggagaagcatggatgggatggccacagtgacccacttggaaaatggaagtatggataataccacagtggctagtctgtagcagttctgaaatcctgcttgattagacattgtgaagagcttctaccctggtagaggggcaatgaactcccattctgtcctctgggaaaaattcccttgtccattgttctttgtgacctctgactctaycctcaatgaagctcagccttgcggccatttcgatggtcacatcagaaaaggagattgggatatatgttctccttgggggatgcaccgctttgtcagcctgt

SEQ ID NO: 828433 - DNA, 620 bp, Homo sapiens
gaatctcattagaaatgaatagtcggccaggcacggtggctcacgcctgtaatcccagcactctgggaggccaaggcgggtggatcacaaggtcaggagatcaagatcatcctggctaacacggtgaaaccccgtctctactaaaaataaaaaaattagccaggcatggtggcaggcgcctgtagtcccagctactcgggaggctgaggcaggagaatggcatgaacccggtaggcggaggttgcagtgagccgagatcgcaccactgcactccagcctgggtgacagagtaagactccgtcttgaaaaaaaaaaaaaaagaaatgaatagtcatggccgggcacagtggctcatgcctctaattccagcactttgggaggctgtggcgggtgatcagttgatgccagttcaagactagcttggctaacatggaaaaactccgtctctactaaaaatgcaaaaattagctgggcatagtggtgggcacctacartcccagctactcaggaggctgaggcatgagaattgcttgaacctgggaggcggaggttgcagtgagcctcaattgcactactgcactctagcctgggtgatggagtgagactctgtctcaaaaaaa

SEQ ID NO: 828434 - DNA, 580 bp, Homo sapiens
gtactggcaagaaacaaagtatgaaatataatctgaccatgtattggaagtccagagaaaaaaattggttaaacttgacttcacgatggctgaatagaggctcaccrcactcaccttctccacagataaggaccaaacagcgaacaggtaaccatactatgaatagagcttgtaagagagacagacactaaaattcagcatgcaagtgacagggaacctctgaggcacagatggagagggaagtaaagcagccaacctggctggaattgactcagagccaggaggaagcactattgtgacggacagaaaggtaagcaagagagccccagcagtctatagtttcaccatgaattctgcaattccagccaagggagagcccctcagcccatgtggaccctgagtttcctgcagtccatgtgatggcattgtttcagagagggagtttgtgctgggtcccacacattccccaaggtccaagaagctgaagcatggcaccattttgagaccctagaccccaccatattacattctgccctgaggccacacagtcccttatttccacattccacgagcctcactg

SEQ ID NO: 828435 - DNA, 621 bp, Homo sapiens
gagctgaggatatttgggattgtgtctgacttggatttttctagactttttacttgtgggtatccaacattttttcaaaatctcataaaatttatttctcagtgctcacttcttgtttcagggcccttattaattttttcttttttgtgacataaaatggctttacatttttatatcataaaataaatataataaaaataaaatagagaaataagagaatgaaaatcatttgcagcctgagtattgctgacttttggaatgtagcttcccaggtagactgatagatggatagaaatgattataataaaatctaataatatgagaatacaaagtgggaatcatatattacatgattatatgatgtgaaaataccttaattttcacttaactatgtactgtagctctttatatcattcatttaaaaggttgcataatactccattatatacaaattctatcatatactcagacaattctgtattactgtatattgaatttgctgacattttccttttttataaagagtactatagtcagcatctatctatctatctatctatctatctatctatctatctatctatctatmtatatatctttgcagactttcagattattttc

SEQ ID NO: 828436 - DNA, 619 bp, Homo sapiens
cttctcttcggttatgaatccctacttgtcctcagtggagtgagagttagtccaatctctcttctcctatagctgttgtcatggtccccccttaccacctttracaagtgtcatttttttttttctttcacacctgttgagatggacaagttacagaggctagaaatggtagacctctgagactggagtgaagaagccctggattcaagtcttggctctatatttatctgctgggtcgggttaggtaaattcataatccttctgagtctcatttattcttttcatttgcaattgtaggtaaggtctacttcaaaataacatctacttcaatggaagacaatgttggagaattaaatgcaataatttatgagaaagatttttataaattctctggtaccatgtaatgtttggcattagtattcacacattcgatagaaatagacaaaaaaaattatatttttacctctttctactactctgtggcaaacttaattccaggacccttctcccaaatccattctctctatttcccctacaataggtttctagctgagcatatcgccatccagatagacaccatatttcccagcctccttcgcagctaggtgtggccatgttc

SEQ ID NO: 828437 - DNA, 634 bp, Homo sapiens
tgacctcctgagacacccaagtacaagacagaggaggaagattgctggaatccccaaagctagtgtcatacccgggactaaaaattagaggccagcttaactcaccactatgcaaatcaccatcctggggtttgattctgaaacacagacacacaaagaattgttgaattaaaggaatgtcggcacagcctgctctggctctctatctctgtatctaagctgagtttttaagcatgtactagaggccaaggcaggtgggtcacgaggtcaggagttggagaccagcctgaccaacacagtgaaaccccatctctactaaaaataaaaaattagccaggcgtggtggcacgtggctgtaaccccagctacttaggaggctgaggcaggagaattgcatgaaaccgggaggcaagggttgcagtgagccaagatcgcaccactgcacttcagcctgggtgacagagcgagattccgtctcaaaaaaaaaaaaaaaagatttggtagcaactcttaataaaattaygtgagtgtttacatagtcaaagtagtccttttgtaagctgcacaaataaatactattccccctaccctgaacctctgctttgaagaaagaacacatgcttagctgtctttt

SEQ ID NO: 828438 - DNA, 537 bp, Homo sapiens
ccgccccttgtttagcatataatcaagcaataactaagtatccttagtctagcagcccatggcactgctctgcctatggagtagccattcttttgtttcttcacttcctaataaacttgctttcactttattctgtggacttgccctaaattctttcttgcatgagatctaagaacgctctcttgaggtctggatcaggactcctttctgttaacacttcaacccaagaagaatcagaagatcaaaggtaatttgggaaggccggaactgtcagggatggaggggagaggaaaaggcagggcttggtggggagctgtttggcagctggggtgaaaggattgctctcccactgctgagattctccagccccttcctgtctgttaggaatagggcagcatggaatccctgtgggcaggtctggggcttccagatgttccaggaagggggctcacaaaggstttccctccagggagataatggcactgcctcccagcttctctgcaaaggtgcggtcgttcttgacttccgcgtagcagt

SEQ ID NO: 828439 - DNA, 627 bp, Homo sapiens
actagagctaagttatggaaaatgtttcatatcaaaatggatgaaatatacaagccaaagttatggcatctactttcccattccatgcatactttcatagttttcattttggaagattttgaatatgttayaagaaaatccttgggaatttaaactgagtagactactattatagtgtacagtcactcagattactatgttttgttgcgtatgaatgttagggcacaaatggaaaaattcacctgttgctaaaagtggcacattttcagagacctctattgtggtaggctgttctttaataatgaccacagcaattgctcttatcccacatgtccttttgtaatgtggctgtgccattcctcccaccttgggtctatttcccctcattctgagctggtcctgtggtttgctttgaccagcagaatgtggtgacagtgatgctgtgtgttggctgggcccagagcttcagagatcacatggcttctgtttttgccttgagcctccatgtttttgccttgagccccgggtattctgttggagagaggccaatggaggagcactgaggcatacctgccaacagataggaccagggccccaaacatgtaggtgaggcccttttggatcctc

SEQ ID NO: 828440 - DNA, 473 bp, Homo sapiens
tcttttccatttagtataatgttaactatgtgtttgttatatatggcctttattatattttgtggtatgtttccttctatgcytagtttgttgatagttttttatcatgaagcaatgttgaatcttatcaaatgctttttctgcatttattgagtgatcatacagtttttgtccttcattctattgatgtaatatgtcaggtttattgagttacatatgtggagacattcttacatccctgagatgaaccccacttgttcatggtgtattatctttttgatgtgctgttgaattcagtttgttagtattttgttgaggatttttgcgtctgtgtctatcagggatattagcctgtagttttcttttttgttgttgtgtctttgtctggtttttgtatcagggtaattttggctttgtagaatgaattagagaaaatttcttctctcctcaactttttagaattgtttgagaag

SEQ ID NO: 828441 - DNA, 473 bp, Homo sapiens
tcttttccatttagtataatgttaactatgtgtttgttatatatggcctttattatattttgtggtatgtttccttctatgcctagtttgtkgatagttttttatcatgaagcaatgttgaatcttatcaaatgctttttctgcatttattgagtgatcatacagtttttgtccttcattctattgatgtaatatgtcaggtttattgagttacatatgtggagacattcttacatccctgagatgaaccccacttgttcatggtgtattatctttttgatgtgctgttgaattcagtttgttagtattttgttgaggatttttgcgtctgtgtctatcagggatattagcctgtagttttcttttttgttgttgtgtctttgtctggtttttgtatcagggtaattttggctttgtagaatgaattagagaaaatttcttctctcctcaactttttagaattgtttgagaag

SEQ ID NO: 828442 - DNA, 563 bp, Homo sapiens
agctcaagatgtccaactttttagagtcatttaacatcaatgtattcctaatattgccaaytgattcattaatgaatagatctctcctagaacacaaataatgatctgttattaactcttttgcaccatgtttttatttgctaatcactctcctttacatttgaaatgagaaaacaagcttttcttattttaggctagttctttttaatcaaatacaactaaatgtcattttatccccaatgttcttcaaatatggacagacacagacaccacatttcacaggtcaaagggacataacagactattccaatccctccttttacttatgaggaaaccaaggcctggagaggttacctggtcgctagttggggcaaagctaatagtaaaatgtagatcctatgtcctttccacatcatgttgtaaacttccccactgaaattacataatcacattgaaataaaaacaattgtttcttcaaaaagttttctctttcttaatatgaagatagatacatatggaaacattgttcctatacaaggattcctccaatacagttaaaaaca

SEQ ID NO: 828443 - DNA, 503 bp, Homo sapiens
agaactgattaaacctttcaaacctaatctgagcaggagtttaggactgcctgcccaagagatgtaccctgagaaatggcaggcctatagtttcctatatttraaattcaaagaagcgacattgggccctgggtttgctgagagtgtaaatttatcaaatattattcaatttatttttctaaattcctcagttgtctcaatgagtgtttccaattgcaaggcatctcagagatgttttcttgcctcagaattttctttattgactctcaatttgagaaatgcaaatatattttaaataaaatttaagtactgttttgttatagtgcttttttatataggcctttttgtatcgaaaataaatttctatgggaagcagataaattccaaagtcatataccagttcggttttgggtaatccatcagaaacagtgcaatgagataaaagagatgatcctacttacatgttctccttaatggatcctcagccactccttgcctatccc

SEQ ID NO: 828444 - DNA, 598 bp, Homo sapiens
agaaattaactggctaaagtcacacaactgaggaagcacatgccatgggatttgaactcagactgactgaatctaaaggccaaatacttaatcactactctccytgatgtaaatatataaccctcagaaattttcttatagaagttaaaaatatatatattgcttacttttttagaaattttaaaacatttaattggcaaagattgtataaaacgaagatgtacaatgtgatggtctcatattcttatacacaatggaatgattaccacaattaaattaatacgtctatcaccattgatgctgtacattaaatgccatgaacttatttatcttataacttaaagtgtaccctttgaccaaaatctccctatttcccccaaaactcagcttctggtaccactctcttatatttccttacttttgatagaaacctcagggcctggcacaggagctcttgaatgtgaaaataaaactgattatgatttctctgtacttgtcagatatcacagagtggccattctcaataagtatgctttaacaatgcttagattaggttgatatggtgataattattaataatgaacaacaatgcttttca

SEQ ID NO: 828445 - DNA, 601 bp, Homo sapiens
tattatgaggtcatctgtgtttgttaatgggtacccattgaagttaggctcctatcttccccatagaaactgagagatagaagtgttatcttcctcmaaagggatgattccctggtctttgagaaagacattcctggttgtaaaactaacaagatgcagggagaatatttatatgcatttcaaagaagcttaaaaagaatttgcaattagaagttttctgaagtaaatgttctaagaaaacggaggtactagagttagagctagagttagaaaggagcctatttaaagttcagtcaagtgaggagaacattaagattgtcttgacccgagtcaatcaactaaatttaaacttccataaccttgggagagttatttaaaagctttactatatatgtaacagcccatgtgtgagatttttatatttgtttcttgtttatgtaaacaaataaatagtgaagcaaataaatttctgtttatttttcacaacagttcattggttggtactatcatctccattttttaaagaaagaaatgagaaagagtaaggtacatatcaagactatagcactaataagtataaaaaatcaaaattttatcccac

SEQ ID NO: 828446 - DNA, 616 bp, Homo sapiens
tacaaaatttttggaatgtgctaaatgattaaaaacaaactggtgtgtaacagcttataaaaccagaaggaagtagaaacatggagtactcagagaagctaagggtagacagggagaggatacttgcctctattgaagaggtacattttgacttgtgtgttgtcagcagaaatgttctaggagaagttggctgcaaataccatgtagagagagatgacatgttgaaaagcccgtaggcaaaataggaagataagttggctggaaatactgtgtggagagaggtgacatgttaaagagcccataagaaaatcaggaatgttatgaaaatggaatatattggaaaatgggccccattctgctacataaatcattaggaaaaaatgcactaatttttagtattaaaaatcaatgaattatttaagtgtagtccaggacagtaatgtgtccaaagcagacattctccaaaatctccatgtcatcttcattttacactagttttcttaaatcaggagagagyggttcattctaatgctgagtgtcataatgaagactgtttctaaaaatggtccccttgtgatatatagggaggacttctggaccattgccttttccagtt

SEQ ID NO: 828447 - DNA, 593 bp, Homo sapiens
ctgaagttgcttatcagcttaaggagtttttgaccagaaacgatggggttttctaaatatagtcatattttctgcaaacagagacaatttgatttcctctcctcctatttgaatacgctttatttctttgtcttgccttattgccctggccagaacttccaatactatgttgaataggagtgatgagaaagggcatccttgtcttgtgctggttttcaaagggaatgcttccagcttttggccattcagtatgatattgtctatagatttgtcataaacagctcttattattttgatatatgttccgtcaatacctagtttattgagagttttttagcatgaagggaggttgaatttttcaaaggccttttctgcatctattgagataatcatgtggtttttgtcattggttctatttatgtgatggattatatttattgatttgtgtatgtggaaccagtgttgcatcccagggatgaagctgaattgatcatggtggataagcttttygatgtactgctagattcagtttcccagtattttattgaggatttttgcatcaacattcatcagggatattggcctgaaatttt

SEQ ID NO: 828448 - DNA, 615 bp, Homo sapiens
aaataaaataaaataaaaataaataaaataaaataagaagtgaaataactttgtcctcaaacaaaaaccaatgtttgcctcagttatttattaggtatcagcctcagtaatgaattgctgagtcgacattttctttcatatgttgctggaataattttgttacttacaaaacactaactttgttactttataagacattagtgatgtctaccaaaaattatgactatgagaattaagacaaggtttagtttagcagggccagagaagatttgactggaagtagatcttgaagtcctcttgaggcctgacaaatctctatttctagaacaaggcagtattacacagatgcattactcatcatttattaagtggcaatatatctataatacgctctctcaaatgagttatatttcataagttttaaaaaaggttttaaagcgaaaccctttacacttcatgacagtatttctagagattgtatttttgcatttcaactgtaaatgattcttttaaattattatttttttaattttagaaggtaaaaaagtacayaagactcatcatagccttcttgtacataacgacaacactttaatactgtgcttagggccatta

SEQ ID NO: 828449 - DNA, 584 bp, Homo sapiens
ttgaaaaaaggtcctataaagaaatggctatctgggaagtatgacagaccaaacttcactacctaccattaaaacttttccaatattagtttaccatatcaattactagccacctgtcaaggctcttaaaaagtgtggtatcaaaaagctcctgatgggtttctgataaagcaaagatgtcagaatcatagagtgggaggaagaatatttgccaaacagatatttaacaaaggattgatatacagcataaataataattctcacatttttaaaaaaggcaagtgagacaatttaatgaaacagacaatatactcaaaaagacacttttcaaacaatcaaatatcaaataaacataaaatgtgttcaacatcacttatcatcaagatgatgcaaattaaaaccataatgagatacatttacatactcaccagaagagacacattttaaaatgtccrcacagctaaatgttgataagaatgaggcaccactggaaattccatataatgctggtggaaataaatacatttgctcaatttgtttagaaaatttgtagttgtacctactgatggtaaaaatatatgcat

SEQ ID NO: 828450 - DNA, 618 bp, Homo sapiens
aaacaattgcaacaatagcaaaaattgacatatgggatctaattaaactaaggagcttctgcacagcaaaagaaactattatcagagtsaacagacaacctacagaatgggagaaaatttttgtaatctatccatctgacaaaggtctaatatccaaaaactacaaggaacttaaacaaatttataataaaaaacaatcccattaaaaagtgggcagaggacatgaacaaacacttctcaaaagaagacattcatgtgaccaacaaacatatgaaaaaaagctcaacatcaccggccattagagaaatgaagatcaaaaccacaatgaggtaccatctcatgccagtcagaatgaagattattaaaaagtcaagaaacaacagatactggtgaggctgtggagaaataggaacacttttacactgttggtgggaatgtaagttagtgcaaccattgtggaagacagtgtggtgattcctcaaagacctagaaccattaatagatttgacccagtaatcccattactgggtatatacccaaaggaatataaatcattctattataaagatacatgcaccagtatgtttactgcagcactattcacaatagcaaagacat

SEQ ID NO: 828451 - DNA, 597 bp, Homo sapiens
acagtgctatgattgggttcaccctagcttgattacagggaaattttacattgaaagaggcaggtgaagaggattagaggctattgcccacctagcactctgcctgtagagcagatatgtttctttgagagaaatgggctgctgtccttgcctccagctctggagctgcaacatagagcttccaccctggggagaggtaggccatgaaaacatatggcactttagctctccctaaggggactcactttactgggacaaatatgtaaaaaagagtgctgccagttttagtcaaacaatacaattttaaataatggatattttggcaataagaaattaagaggaggctgatagcttcttgagaacaacagctaaatttcaaaccagctaataatttatcagagagaataagggaaagagtcagaaataagaagagccctgctggggtcagagcaagcctcaaagactggcctccatgacaatctmtccaaaggggtctacattttattgtttgaaatgtggatcagtttataccttagtgtattgttaagaatagtagagaaataagattgcacttagtagatgctaagagctggatat

SEQ ID NO: 828452 - DNA, 529 bp, Homo sapiens
tgctaggagaattagcactctttatatgatttcactggtaaaggacaattggaagcttgcacctggtctctcccagagtctgcactgtgcatttttttccgttgcagatttcttttttttttttttagrttctcgctctgttgcccaggctggagtgcagtggtgcaatcttggctcactgcaacctccgcctcctgggttcaagcgattctcctgcctcagcctcctgaagagctgggactacaggcacctaccaccaggcccagctaatttttgtatttttagtagagacgggattttaccatattggccaggctggtctcgaactcttgaccttgtgatccacccgccttggccttccaaagtgttgggattgtaggcgtgagccaccgcgcccagcctctgttgcagattttaagttgtatccatttattgtagtaaaatataactttcagaatataagatctctgctgagttctgtgattctatctagtgaatcattgactatgaaatggtcttagatatcccc

SEQ ID NO: 828453 - DNA, 529 bp, Homo sapiens
tgctaggagaattagcactctttatatgatttcactggtaaaggacaattggaagcttgcacctggtctctcccagagtctgcactgtgcatttttttccgttgcagatttcttttttttttttttagattctcgctctgttgcccaggctggagtgcagtggtgcaatcttggctcactgcaacctccgcctcctgggttcaagcgattctcctgcctcagcctcctgaagagctgggactacaggcacctaccaccaggcccagctaatttttgtatttttagtagagacgggattttaccatattggccaggctggtctcgaactcttgaccttgtgatccacccgccttggccttccaaagtgttgggattgtaggcgtgagccaccgcgcccagcctctgttgcagattttaagttgtatccatttattgtagtaaaatataacttkcagaatataagatctctgctgagttctgtgattctatctagtgaatcattgactatgaaatggtcttagatatcccc

SEQ ID NO: 828454 - DNA, 611 bp, Homo sapiens
gggaaggttgctttaaatgacgtgtctcgtgatctgtaaataaaagaaaaataatttctggccacttcaattatggcataagttttggttatctgacaccyaccctcaccctctccccaacaaaaatgtgtagtcactactttatcctcaagagcctggcacagagtaggtgctcaaaaaatagtcattcactggaaagcaaacaagacaatggatgaagccagcaaaatggaccacgttcacaatttgatggaaattgggtattttattatgtaatcagaagaaagaaatgataaaatagactaattgccaattatagggaaaaaacagtcccaattgtcccctgttattaaagtttaattaataacttactcctgtgttgcagaagaagaggtacctatgaatttctgtagcaactaaggcagaattcaaattggctgtcacacagagacattgtaatggaacaaaactgaaagttctacaaggatttctaattctcaaccaaaatattcatggaaatctgggggtgatctggctcatttgacttttccaggttcatatcttttttctccacgtttcatccccgtctgcaccacgggattcccttttct

SEQ ID NO: 828455 - DNA, 624 bp, Homo sapiens
cagacagctccagaagagtggggagcaaatatccaactcacctgtggacttttccacctacacaagtggccccaatacagttctggtggaggagggtgacggtgcggtgaaggagtgggctctagcaaaatcttgttccaggaagagaagagaacgcatgctttggcaaaggcccatattcttttaaaaccctcagcccctacctcaccttccattgaacaatcactgttctagaaatcccgggcaacaaattttgagtcctaatactgactgccaaagttctttgactcattcacggagtttactaaacaatacattattcaggtgtaacactatttgcccagttctctgcaatttcatttgatgaaatttaattaagacttaaaaagaactccaggatttcaagcctgaagtgtaaaagctgttttggaagtgccgtctgcccaggacagaacattgcttttactctcaaccatggcaacagaggtaacattataggtaccgggcaagccaacacttgagagaaggatctcctcaaagagagaggtaacgggacacttcagtgrgtttccatgactgtcatggataaaaaaagagaaccagagaagtgagtcagatgatgtg

SEQ ID NO: 828456 - DNA, 646 bp, Homo sapiens
ctcggctcactacaacctctgcctcccgggttcaagagattctcctgcctcagcctcccaagtagctgggactacaggtgtctgccaccttgcctggctaatttttgtatttttagtagagatggagtttcaccrtattggccaggctggtctcgaactcctgtccttgtgatccgcctgccttggcctcccaaagtgctgggattacaggcttgagccactgtgcctggcctgaacagcattttcaaaagtgtggtaggcagtccattaataagtattgctttaaaaaagaatttcacatacagataagtttggaaagtattaggttaaaccaaatcaaataagttaatttattgcaggacttcttgaagcctttattatttgtttttctttttagaggcaggtctcgctctgtcatccaggtgggagtgcggtggcatgatgattgctcactgcagcctcaaactcctgggctcaagtgatcctcccacctctgcctcctgagcagctaggactacaggcacacactaacttattggctattttaaaaattttctgtaggcacagggtcttgctatgttgcccatgctgatcttgaacacctgccctcaagtgatcctcttactgggcctcccaaagtgttgcg

SEQ ID NO: 828457 - DNA, 646 bp, Homo sapiens
ctcggctcactacaacctctgcctcccgggttcaagagattctcctgcctcagcctcccaagtagctgggactacaggtgtctgccaccttgcctggctaatttttgtatttttagtagagatggagtttcaccatattggccaggctggtctcgaactcctgtccttgtgatccgcctgccttggcctcccaaagtgctgggattacaggcttgagccactgtgcctggcctgaacagcattttcaaaagtgtggtaggcagtccattaataagtattgctttaaaaaagaatttcacatacagataagtttggaaagtattaggttaaaccaaatcaaataagttaatttattgcaggacttcttgaagcctttattatttgtttttctttttagaggcaggtctcgctctgtcatccaggtgggagtgcggtggcatgatgattgctcactgcagcctcaaactcctgggctcaagtgatcctcccacctctgcctcctgagcagctaggactacaggcacacactaacttattggctattttaaaaattttctgtaggcacagggtcttgctatgttgsccatgctgatcttgaacacctgccctcaagtgatcctcttactgggcctcccaaagtgttgcg

SEQ ID NO: 828458 - DNA, 487 bp, Homo sapiens
atttctcaaaagactttgagttcattatattcgaaattgtgrctgtgtaaaaaaaaactaacaaacaaaaaaccattatacagtgattgcttcatttcttttgccttttggaaagaaaataacaagagggaagactgtttctccacaactagccatgtgagaggaagaacagggtgtagcatttattttattttattttttatttatttttgagacagaatctcgctctgttgcccaggctggagtgcagtgatgtgatctcagctcattgcaacctccaccttccaggttcaagcagtccttccgcctcagcctcctaagcagctgagactacaggtacacaccactactcccggctaatttttgttacttttagtagagattggttttgtcatgttggccaggttgttctcaaactcctgacctcaagtaatctgccagccttggcctcccaaagtgctgggattacaggcatgagccaccgtgc

SEQ ID NO: 828459 - DNA, 633 bp, Homo sapiens
ggggcagagccaagcaagaggsagaggggaaggagatgaggtcagggaaatgatggagggtagattgcgcagggccttggaaatgacaaagaagactttggcttatgccctgagatggaagcctcacgttctcactttagcatctccctgaggtagtcactaaaatggtgaagagtgtccactcctttttcccaacccattcaatggcagagattgtgggttggcctctaacatccattccccactttctcctttacaaatgaaacctgcccagctaaagactgtgttgcccggcctctcttgcaggtcagtgtgactgtctgacatattgtgaacaacgggacagaagcaggtgtaacctcagaagaaaagaacaggccttcttcttcctcttcccccactgccccccacctgtgtctggaaggtggccaccatcacaggggccggagtagccactgtggtccacaagatagaagttgggggctgaggaggcagagcaacaagaccgaaggagccctgggtccctggtgattgtggagcctctgctgcagcctgggttgatgcccaggttatgaggacaggagtgatgagtgtcacccttgtttaagccatggtcttatgggtttctggcaa

SEQ ID NO: 828460 - DNA, 638 bp, Homo sapiens
caagctgaagtggctcagctaaggttatagtggataagtgatcaagcggggatttgaacacaggtctgttggactccccataaggtgctctcactgctgtgtcatgccttcttgcccagcccttggtgcttaaggctgggagtgcctgagtctagctctttctctccctagcataggatccctccagagggctgggctctgcactgagccttagcagaatcccagcatccttggacccggggaggtgcgccagtcagcaaagtgcccaaagcaagctccagaatccaccttgccccctcctccagggcccatccgggaaggcagccagttaagcgcaaatcaattaaacaaactccatgctgcctgccgccctcatattctgacctcagccaagaggctcgcattccagcctggcggacttgggtccaagcaaatgcacttgtgggaggatctgagaaggggctgcaggatcaggaatccatacaaagaactccagcctggccccctgggagcctgtgatacttagtttgtataatctgatcccccttggggaacatggtggggaggtactgtgtgagcaaaygcggggaggggggaacctgtggaaacaagagcctgttctgcagaagatgagctgc

SEQ ID NO: 828461 - DNA, 533 bp, Homo sapiens
actcactattatgagaacagcagcatgagggtaacctctctcatgattcattacctcccaccggctctctcccatgacatatggggattatgggaactacaattcaagataagatttggrtgggaatacagccaaaccatatcaaagagtatattatgatccatgctgatatgaaggaaaattattctgccttggtatgagatggattgtgaaaaagaaggacaagatttgctgatttattcaaaacatatttactgcatgcttacaatatactggccctcttctaatcaatggctgtactgtagagagcaaagtagataaagttttgctctcaagagacttaaattctataagaggcagattgtgctaagcaggaaatggcccctcaaagacatccatatcctgggccaggtgcggtggctcatgcctgtaatcccagcactttgggaggccgaggcgggtggatcacaaggtcaggagttcaagatcagcctgccaacatggtgaaaccctgtctctactaaaaatacaaa

SEQ ID NO: 828462 - DNA, 631 bp, Homo sapiens
cagacaggcaagtggccatagtgccactgcagcctcatatgggatcccccactttgactatcaggccagaaggtcacagattcyctcactggcccccttgcatggctgctgagccccccaggctgagagaacctgggaagaccttcatctgggccctacatagaagaatggtcagtgccattttggctcccctggatgggcgagtgtcctctctgccctctccttcaaatactgggtgaatcagggaaaaaagcctccagctaggtggtcagtttaaagttccctgtaatctgaataccttgaatcacgtccttgtcacaccatccccagtccttttcctctgacaccatttattactctgtcagcctttaaatcttcagttctaaaatatatgttttatttgcaaggtttgttgttgttgttttggctgtctgttaactgtatttgggcaatttcttaaggcaggacacttggttatgagaggtcccccattgtgttgactcggtgttgcttgagtcatgttgttgtgtggccccaaccaagcctttcaagttcatagctggtcacttcatagatgctctgagttttcagtatttggtgtggggaccttagttggctgattcttgggtac

SEQ ID NO: 828463 - DNA, 552 bp, Homo sapiens
atgtatggtatcatcagtttatttctctttctttcttcccagaaagtaaaattycccacaaacttgtaaatatcatgagattaaagtacattaactcaataaatatgcatatttgtttcctagatcctcttggtaaatgaggtataaataccaaaacttaggaaaaaatgacttctgttgagctcctacatagaaaggtgaaccaagcaataatagacaaggcatactatgtggacaattatcaaagaatatttatagatgaatcagtaaaaatttctccactgtttataactttccgaagtttaaaacctttactcataagatagagtccttatatttatggattaagagtaaatgagcttgcttatttattgaaattagacattattttaaatccgctgattctcttccttgagtaaaacaaagtttaaaattccacattttacaggtgacttcatatggcactattctcaagtttcttctcttttccatgcaagccacactaagctacatgtcactctgcactggaactttgaacttttgtatctttgc

SEQ ID NO: 828464 - DNA, 619 bp, Homo sapiens
ctatttatcttttttatcttaacaatatattgacattttctcattactatagataatatttcagcatgattttatactagttttatagcactctgttatattggtatgctacaattatttaaccaactcatttttggccacttaggttttttttacttgttcacatatataaattcaaatatgatgaaagacttcattatacatctctgaaaatcctgtttaataattaaaattattatagctcagaaaaggctagtattcaggttttaagatttgtaagtaatgtctgaagggtgttgttctttccaaatctctaaattgacttgtactgcctagctatcacagtgatatgcaagtcaaaactactgtattgaatatttgagaatatggaatgctttctgaaataaactaatttacatttttaagactcctatctagtacccacagtaattcttaactaagtttagttcagttttgctcttacacaagacaatacaatggaaagcaacagattttaaaagctgaattataagcaaaaaaaacctgaaataytttatatgccgattttcttcattttgcatgacacaaaaatagttctttgtaatctcctctaaaatgg

SEQ ID NO: 828465 - DNA, 606 bp, Homo sapiens
attataagtagcatacaatgagcagtgaggaggaccagyggtcaccacttttctcaccatcttggttttggtcagttttggctggcttctttatgacatcctgttttatcagcaagatctttgtgacctgtatcttgtgtgaacctcctatctcatcctgtcacataacctcctgagaatgcagcccagtaggtctcagccttattttacccaacccctatccaagatggaatcactctggttcaaacacctctgacaaatactttcttcttcttctttttttaaaaattatattttaagttctgggatacatgtacagaacatgcaggtttgttacataggtatacacatgccatggtggtttgctgcacccatcaacccatcatctacattaggtatttctcctaatgctatccttttcctagcccccaccccctgacaggccccggtgtgtgatgttcccctccctgtgtccatgtgttctcattgttcagctcccacttatgagtgagaatatgcagtgtttggttttctgttcctgtgttagtttgctgagaatgatggtttccaactttatctgtgtccctgcaaaggacatgaactcat

SEQ ID NO: 828466 - DNA, 566 bp, Homo sapiens
gagttattctaaagataaaatgagttgtctttgtctctccagttaccctgaaaagctccttgagaataagaatcctttcttctgcttcttttttctgtacactgtgccaccaaggctcaccaggttcacaaaattgttttcaaccaattaaaactatactacaagtgtcttcctttctaagcatttcagtcctagaggttttagttggataaagcgaggtagatgtccagagcaaaagtgaagaggggttgcctcaatgaacagagcctaagcagagtgagaataacaacactgcagaagaaacatcatggtttggggagttcaaacagtgtggcaaggggcgttggagtgcacgaaggctgaggagacagcccatgcaattgtgaaggaaaacgtccaggaagggagcatcggcgtctgagcagggagaggacagcctccatgcagaagagaaagtcgaagcaggrgaaggagattggatatatacaaggtgattgattggatttaaaaaaaaaaaaaagccagagctccttggagaaatggattatttctagtttgagtcaggg

SEQ ID NO: 828467 - DNA, 528 bp, Homo sapiens
agggagggggaatgggtgtaggaactatggcaggggcwgaagaggaaacaagccacaggatggccaaggtcagggaacacctctccatgctgtggcacttagagaccagctgtctgaagtcaggttggagaggcctcaggcagagactgagagagactgggagagagctgctgggggagggggaaggcagagggagctgaagggaggggttttttgatgtggaggtgacagtgggatctcaaagagaagcctctgcaccgggtagataaaggtccagaattcagaagaggcactgtacgggggaaaactcatcaaggtcagaagcagggagctctccaagtggcagagaatgtggggcccctggaggagacctgggtattagacagttgaggtggtgggagtgtggggcagaaaaaggagggccagggcaggaggcaaagggaagagggggaaggaaggaggggagacaagcaagagcatgtcctgaacagcggctcaccctggcagagtaggatccacggctggtcc

SEQ ID NO: 828468 - DNA, 562 bp, Homo sapiens
atctgggagaacctgggccgctcacctgggtccttctgccagcagtcgagcattagtcggtgcagaaggttaggacagttcctggggggtggcagccggaagccatcctccacagccttgatcacctgggccacaggggtggggagcagagaggaggctctgggtttccccagcatatggtgcgtgcacacacacatgcacacacacagacacagacacacacacacacatgcgcacacacagacacagacacacacacacacacccaaggaagcctggggcagtggccaggcagaaccagaagcaagcagacagagaagaggggcctgaggcaggaagattgagggccaacgggcagaggtcaggaagctggggcctgagctgagagggtcagaaggcatgcagctggagccacgggttactcacgtcttggccagacatgtcccagtaaggccgctccccaaaggccatcacctcccacatgatgatgccraagctccacacgtcactggcagagctgaagtggccaaactgaagtgtctcgggagcggcccatagcgct

SEQ ID NO: 828469 - DNA, 603 bp, Homo sapiens
tgatggagctgcacccactttcctccatcttggtctggatccagggccccatgacattggcctggctggagaactggtggtggaggtgctcgttggactgctgcttgctctgctcctccagaagtgcataatcctgctttgacaccaactgctgcacctttgcccactgggagtggatgaactgtgtggggtcgggggaggtgacagtggtgtaggggttgctgcctgacagcttggtatgtttgctatctgtgatcctctgggcttccttgtgggtggccaggatagcctctttctccctatcattatctggcagggtcaacttttggctgtgggctgagatcaggccctcaatcttctcagtattgtagatgaggaacatgtcctggagctcctccacggcactctccatccagttgtagaaggctctgcccacttggcatactccaggtacagatgatcagtggcctccagctgcttcttcattttctccagggcttccctgtgactgtgggtcagagagtacagggtttcccactscttgtaaatcttctggcactgggcattgacaactgtgggagtcacagtaatccagctcgttga

SEQ ID NO: 828470 - DNA, 637 bp, Homo sapiens
atgggaaatgtctgttacagtgccaaaatgaagataatcagtataaatattagatttgtcttaatattaagtttatgaaatgtaagtccttcagaagaactatctcaggatatatttattaggtcaatgaaatattttatccatgtgactggtatacacacttcaaaggagaacccaaaatggcaggcaggggagggtggctaatgaaaggtatggcatagtagttaagaatatgaattttggaataaaactgtttgggtaaatcctaattcagaaggttacttaatctctttatgcctcttttttctcatctgtaaaatggggatggtaatagtacctagctcactgagatgttacgagatttaaagagctaatacctataatggactttgcataatggcagcccgattgaaagttttcagttaatatgtttttattgctactatgtcaggttgctggagggaaggaagaaaaatggaaatgatccccatttatagtttttgtaaagtacagcattagagtgtggctctrgcaacacaggcaaactaatctttgggcaagggacaactttacaagtaaaaccaggtaggtctggatgtttccaagtgaagtgcagttatccactctgttcattttt

SEQ ID NO: 828471 - DNA, 637 bp, Homo sapiens
atgggaaatgtctgttacagtgccaaaatgaagataatcagtataaatattagatttgtcttaatattaagtttatgaaatgtaagtccttcagaagaactatctcaggatatatttattaggtcaatgaaatattttatccatgtgactggtatacacacttcaaaggagaacccaaaatggcaggcaggggagggtggctaatgaaaggtatggcatagtagttaagaatatgaattttggaataaaactgtttgggtaaatcctaattcagaaggttacttaatctctttatgcctcttttttctcatctgtaaaatggggatggtaatagtacctagctcactgagatgttacgagatttaaagagctaatacctataatggactttgcataatggcagcccgattgaaagttttcagttaatatgtttttattgctactatgtcaggttgctggagggaaggaagaaaaatggaaatgatccccatttatagtttttgtaaagtacagcattagagtgtggctctggcaacacaggcaaactaatctttgggcaagggacaactttacaagtaaaaccaggtaggtctggatgtttcyaagtgaagtgcagttatccactctgttcattttt

SEQ ID NO: 828472 - DNA, 585 bp, Homo sapiens
gtgtgaagttgagagcttacagtaaatggtctctgaagtttcccaccattccaaagagtgcgtgagcttaaaatttttcgtgagtttagctaaatatgtgcttagtgttagattaggtttcaaccaagcaaaagaaccctgggagaagtactctgcttggaaatgaagcatcctttggtttttgtggtacaatagatcactgtgggttttcagatggccagaagctgctctttgcaagggggaccatgttaaaggtggatcttagtaagtattattactaatgaattcttaattgattagtttttgagacaagtaataagcttttttggaaatctaagtggactgccaaatgttctcgatttatccatatttcatggggagcagagcattcttcatgccttctccatcctcacttctgccaggtagcagtttgcattgttaacagggaagcagaagggaagcttaacagagaagcagtatggaagacgtctccttagcccagtggtcagttgcatcagagaagtctgctctgaaatgcgaacactttctcttkcagctggcagccccctgcaacctcagtgccct

SEQ ID NO: 828473 - DNA, 578 bp, Homo sapiens
aaatcatggcattatgtgttagatttatattacaatatatatctctggtaacgtggatttatggtgtatgtgtgagtttttaaaatttgttggccagacatggtggctcacatctgtaatcccagcactttgggaggctgaggtgggtagatcatgagatcaagagatcgagaccatcctggacagcatggtaaaaccctgtctctactaaaaatacaaaaattagctgggtgtggtggtgtgtgcctgtagtcccagctacttgggaggctgaggcaggagaatcgcttgaacccaggaggcggaggttgcagtgagctgagattgtgctactgtactccagcctgagtgacagagtgagactctgtctcaaaaaaaaaaaaaaaaaaaaagttgtcatggatcaggccaatcattctcttcccaaggtctcctgctaagcaaaatagccctagatgattgcataagtstaagtggctactgtgatatctcatgaccatgttcccttggccatagcagagataagggatgggtggacaccctacccaagtttccctaatgtatagacttgtcaaggg

SEQ ID NO: 828474 - DNA, 621 bp, Homo sapiens
tcttgtaggagagagtcatgctgccaatgacttacattatctgttttattttcatctctattgaggggcattcaaatctctcttcctctgtgcaaatgtaggggatcsaaaactatcctctgtgatcatttggattgttaatctctccagggtttcttcaacattctcaaggcagtttctggcaccaaagggaaaatggagaagttgagatgcaattttatttcccaattgaacttgattaaatggggactgttctaatcaaaagtttgaatcctgggggagtgcgatgttgttaacaggtttgagaatattgcagaagaacagggaggaagtatactaaagtcaaggcagagaacgaatcaggcaagaaaataattgtagtaaagcttattaaggcataaaattaggtgaacaaattgcttcacagatagtgttaagctcattgctagaccggcaaaggaagtggaagaaagctctttgaaaacattatttttattattttaataatttgtgtgggaatcatagtagctgctatatgttagggagaaacaattgccagctggtgtcatcatggagtaactatagtagactgaatgcaagtatgttttgcctttttacctg

SEQ ID NO: 828475 - DNA, 621 bp, Homo sapiens
tcttgtaggagagagtcatgctgccaatgacttacattatctgttttattttcatctctattgaggggcattcaaatctctcttcctctgtgcaaatgtaggggatccaaaactatcctctgtgatcatttggattgttaatctctccagggtttcttcaacattctcaaggcagtttctggcaccaaagggaaaatggagaagttgagatgcaattttatttcccaattgaacttgattaaatggggactgttctaatcaaaagtttgaatcctgggggagtgcgatgttgttaacaggtttgagaatattgcagaagaacagggaggaagtatactaaagtcaaggcagagaacgaatcaggcaagaaaataattgtagtaaagcttattaaggcataaaattaggtgaacaaattgcttcacagatagtgttaagctcattgctagaccggcaaaggaagtggaagaaagctctttgaaaacattatttttattattttaataatttgtgtgggaatcatagtagctgctatatgttagggagaaacaattgccagctggtgtcatcrtggagtaactatagtagactgaatgcaagtatgttttgcctttttacctg

SEQ ID NO: 828476 - DNA, 614 bp, Homo sapiens
agtattcaggaactgttgactgaatgaatggttgcctggcaggatggtgacacttttagtaacattcaggaattcaggagattgagctaattttgaagactgttggtttagatgaagtgagctgaaaatatgggttggctcattatgggtgaaatatgggtgaagttgtccagtaggtgactggaattagggtctgggagcacaggtaggggctggctgtagcagcagcagggagggtgatctgtgagaggatgtacaggggagtggaggcaacgagaggctggcactccctgactctgggtgtcctttccagtaaggagcaggcttccatcttgtatctgatgcagggaaacatggtggtccttgtgcacgacagtggagatgcggaggatgaggagaatgacatcctgctgaatggcctcagtcatcagagccatctgatactgcgggctgagggcctggccactggcttctgcagggatgtgcacgggcaggtatgcaggggcctcctgggcaacrggcttcttgcccgtgtacctgtgattcttgactacataggggagagtcaggcctgagggactgtctggttgggacatgacttcaggtggaaggga

SEQ ID NO: 828477 - DNA, 491 bp, Homo sapiens
acaaagctattatattaatgtctttgaaaagttcttcargaaagaaatatgtttaactttatttatcatcatttcccacacttgtttaaaccaccaaattcttctttcaaggagtagctatcaagttggttatgaaaatctgcttaaagttcaattaacagtattgttcagctgagcgcagtggctcacacctgtaatcccagcactttgggaggccaaagtgggtggatcacgaggtcaggagttcaagaccagcctggccaagatggtgaaaccctgtttctactaaaaataaaacaattagccgggcgtggtgtcgggcacctgtaatcccaggtactcaggaggctgaggcaggataatcacttgaactcagcaggcagagattgcagtcagctgagatcatgccccactgcactctagcccgggcaacagagcgaaactccgtctcaaaaaaaaaaaaataaagaaaaagtccgggcgtggtggct

SEQ ID NO: 828478 - DNA, 625 bp, Homo sapiens
aactggatcctcatctctcactttatacaaaaaacaactcaagatggattaaggacttaaatctaagacctgaaactgtaaaaattctagaagataacattggaaaaacccttctagacaytggcttaggcaaggatttcatgagcaaagacccaaaagcaaatgcaataaaaacaaagataaatagctgggacttaattaaactaaagagcttttgcagggcaaaaggaacagttagtaaacagacaacccacagagtgggagaaaaatcttctcaatttatacatctgacatgggactaatatccagaatctacagcgaactcaaacaaatcagtaagaaaaaaacaatcccatcgaaaagtgggctaaggacatgaatagacaattctcaaaagaagatatacaaatggccaacaaacatattaaaaaatgctcaacatcactaatgatcagggaaatgcaaatcaaaaccacaatgtgataccaccttactcctccaagaatggccataataaaaaaaatcaaaaaacagtagatgttggtgtggatgtggtgatcagggaacacttacactgctggtgggaatgtaaactggtacagccactatggaaaacactgtggag

SEQ ID NO: 828479 - DNA, 498 bp, Homo sapiens
ttttaaaacggacaatattatgtactgtacaaaatagtcagatttaaatgatactgagtgtgccagcaatgtagagtttaatactcattttatcacctctgataagaatgtttaaccatttycgatctcaatctgtatgcataaaacaaaggggattgaatgagacagcttttctttaactgtcctatgatcaaaacaagttttccatgctatttaaatgatactttaggccgggggccgtggctcgtgcctgtaatcccagcacttttggaggctgaggtgggtggatcacctggggttaggagttctagaccagcctggccaacgtgtcaaaaccccacctctactaaaaatacaaaaattagctgagcgtagtggcagacgcctgtaatcccagctacttgggaagctgaggtgggagaattgcttgaacccgggagacgcaggttttagtgagccgaggtggtgccactgtacttcagcctcggcaacagagtc

SEQ ID NO: 828480 - DNA, 590 bp, Homo sapiens
aacattatgaggacaccatakaacaaacctgtttcagaagtcagaccggattggattcttaagagaatggcattggagtttcctgttattgacggatctttgcctgaggacaggttcccgttggcagaggaattagagaattgttcagaactaacattgcactgcagagtaatggggtccagcacaggaaaggaggaaatccaggaagaagatacccatagaggtggagtaccaaatgtggtttataaactctcctaaaatatggggttgacccccaaactggtaacagttcaagtatctataaaccaagaaaaaggattatcaagttgctgtatgtgtacaatggaatactcctaagcaataggaaggaaccaaggcatcgatgtctgcagcaacttggattaatctctgaaacattatgctgactgaattagtcttcacaaaacaagccatcatatgtgattctacatatatcctaaaaccagacagacctcatctattgtgcatgtggggtgggacagccaaaacgaagttatgaaagggaaagaagaagaggttggtaggtggtaggaatgagtggtgaggacagg

SEQ ID NO: 828481 - DNA, 491 bp, Homo sapiens
caaattgttgcctaaactgtagaagggcttaagtcattagacattctattttagtgacatttttctgtttttctgtatcatgtgtcttggaaaaactttgaagttctttgatgttaattttgtaagaatgtgtgtctgaaaatattttgactgaatagactctgggttacagttaagaatttctttgatttggcacatcttctctttagcatttcatagcttttatcatggcctgcatatacaacatgtcaattataatgcctgataggtctcctaggagttgtagcttcacaatatataggaggcatcaggcacaaatcgatactgcagagaaaaaattagagtaactaaaacataaatgaygtattttgtgaataaggaagtgttctaggtatgccttccagtagtaagcggacaacaccaagatataaggcacgtcttcatacatcattgtctgtacacagaacatcgagcatacaggaagcttcctg

SEQ ID NO: 828482 - DNA, 598 bp, Homo sapiens
ttacttcttttctcagtctctcatctccacctgatgagaaatacccacacgtgtggaggggcaggcccccttcaaagaaaggtgggtaaacaggtgcaggactgctamatcggtgagcataactaatccgataagcagaggtccatgggtggttacacaccctggaaagaaataagcattaggaccatacaggacgctctatgactaatgcttaccagaaaatgactaggggtgctggcatccctgtgttcttttttcagatgggaaatgttccccccaaggcaaaaatgcccctaagatgtattctggagaatcgggaccaatttggccctcagacgctaacaaagaaacagcttatattcttctgcactaccacctggccgcgatatcctcttcaagggggagaaacctggcctcctaagaaagtataaattataacaccatcttacagctagacctcttttgtggaaaagaagggaaatggagtgaagtgccatatgtacaaactttcttttcattaagagacaactcgcaattatgtaaaaaagtgtgatttatgccctacaggaagccctcagagtctatctccctacccctg

SEQ ID NO: 828483 - DNA, 620 bp, Homo sapiens
tttccagggcacggctcatccattacactccagatgtgctgacccctgccatttccccaaatgtgggaaacccaactgcacagtttgtagtagtgggtgactgtgttcatgcgctcccctgaaaacaacaacaacaacaaagaatcagaagagatactaggctatctaattcctaaatccaaacctgatatttctaagtaagattataagaatttttattgcattttctgaatttgcttttgcataagttatgttatttttacagggtctatattactattatttcttagaataatactaattataaaacaaaattctgtatatcacatttaaatgtaatttaatagaattataatcacaagacaagaccaaactttgttgataatcctcagtaattgcgaaaggggtatatacatgtaggccagcatacatgcataaactacttcttattgctagtctaattgttccatatgtagcaaatacagcagttcagcaatatcttgtgcttacagggtcctaagcagaggtgatgagtcaagtgtaaatatatatatatwttttttttatttttcatggcaattgtatattagtaacctggggagaaaaggtttattgacaac

SEQ ID NO: 828484 - DNA, 470 bp, Homo sapiens
ctcattgcctcagaggtagagaacatcaaggccagaatataatatgctgcttgtatttctctggcttttgtcttccaaaagcccagatccttagggaaacagtgaaataaacaaaagcatgaagggttgaagaagttacaactctccctcttttgtctcctgacctcagcctaaggggagaaggaaggaaggatgatgcgagggagagataaagatgtggacactgctttttatttagtgcaaacagtaccttgacaatgtgattaaggtcagcaccatccgtgatgccatgtagataccatgtgccccatgctctgatgggataaaaagggcacttaagttttgttgtctcctctccaaaaatccatagkcccagtctaatcatgagaaaatctcacacaaaccatgactgaggtgcattctacaacatacctgatgagtcctcctcaaagttgtcaaggtcacgaaaa

SEQ ID NO: 828485 - DNA, 564 bp, Homo sapiens
agtttttttgtttttgtttttgtttgctttcttccttgtatctttgtgtgtgtccattgattsaggcattcattcattctgaagatatttaacttcctcatttacagctcacgtaaatctcagaagtgacagaggacatcgctctgctttaaatctttagatgtctttttgtcttggacagtgtcttcaaatgttggaatttcacataaaagtcaagatttgtctttggcagcacctggcctgtgtgccgcgtcgatgaggccaggactctgcagttttgagttttcaacgttagtgtattttgtgctttctaattaatgacaggctgagctttgcttctagggattttaatgttctattaatccaccagttactgaaaactgttctcatcattttccctcagtgcagtggaggccacacccccatgcttccgcattcttggcttttccctgtgggggtgtggagaccccccatttcttctgtgaaccaattcctcttctctttggtctcctcgaactgttctctacttccttatgtccgtttagagcccttgtaatgcctcac

SEQ ID NO: 828486 - DNA, 458 bp, Homo sapiens
atgaactgtaactgtatcaatatcacaaacataatatcgagcaaaaagatgaaattacaggtagatgcgtacartaggatagcctttatgtaaatgttgaaaacttgcaaaacaattatatataaaatcagatatggatatatgtgtgcattgtgcattgacaatgtatttgtatctgtataagtggcaggtttaggatagaaaataccttagagcgggcagagaggtgtgtgagggaagcaaacaccatgcaagttatatggaggtttcagttctatttgcaatattttgtattctatttcctctgagtattaggtatatgggtgattattctgtatatacacatacacacacacacacatacataaacatacacacacacgtacacatagacacacacaaacacacatatacacacatgcacacacatacatacacatatacaaacatacaaatac

SEQ ID NO: 828487 - DNA, 458 bp, Homo sapiens
atgaactgtaactgtatcaatatcacaaacataatatcgagcaaaaagatgaaattacaggtagatgcgtacagtaggatarcctttatgtaaatgttgaaaacttgcaaaacaattatatataaaatcagatatggatatatgtgtgcattgtgcattgacaatgtatttgtatctgtataagtggcaggtttaggatagaaaataccttagagcgggcagagaggtgtgtgagggaagcaaacaccatgcaagttatatggaggtttcagttctatttgcaatattttgtattctatttcctctgagtattaggtatatgggtgattattctgtatatacacatacacacacacacacatacataaacatacacacacacgtacacatagacacacacaaacacacatatacacacatgcacacacatacatacacatatacaaacatacaaatac

SEQ ID NO: 828488 - DNA, 656 bp, Homo sapiens
tggttggatgagtggttcagactgtttatcccaagttagggatagttagtctggttagactcaggatgataaggtcatagactcttacagacatgtttttacgttccaccttaagtatcatctctcagagaggcattccctgaatctcgcaaaccaaattaagtccccaattttctttctcatggcacctttaacttttccttccttccttcattgcactctccattatctgtcatccagtaattatctgtttaatgcctgtctccctgcagtctgttgccaccattcactaatatctactgggcagagaagtagttcatacttctccatcactgtgaagctagaaattctcatataattttctctaaggaaggaaaaataaatgtgaaagtgacgcgtggcttacagggagacacaagtagaactaacatgaaagtttcatcttctccaatggaggtgtctggcagcattcccggtggcagagccactcttgactctccctgaagaaggttgtcacccacccttggtgagcaagtacctgaatgggagataaacttttgttgtttgttttataggtggtatttgttaccacagcataagctaccttcacctgcctratttattcctacctgggtgttaagctctttgagagtatg

SEQ ID NO: 828489 - DNA, 592 bp, Homo sapiens
tggggggtcattcgcccagaccttctcacctttcatttctgactaacttgkttggtggtggcttagttaatattctctttattcctggcggaccttcctaagtgatctaccttgactcttccttatgcactttccagattcatgtcccattctccatgcacaatgatactcgagccaaaaggaaccacctgtgggaatttctctaatgctacctccacgttctttcatttcttactctgtcccttctctctaggagtgatctttatttttttccctgattgacactttctgtcatgagcccacaaatcctgggttatatcctaactgtatgctctcaaaatcagtccttagattgctccatgataactaactgtcacataaggcaatgaatgcagaagatttacatgaataaaaataattcatttttgttaagtgcttcctataggcatagcactgaactgaggcatttacattgattttctcatttgatacaatatgtccctcaggaaagcactattattacctttatttgaagatgaggaaactgagctacagaaacccaaggtcaaaaagctaattaagtggcagagca

SEQ ID NO: 828490 - DNA, 576 bp, Homo sapiens
tcactttgtcgcccagcagtggtgcgatcgtggctcactgcaacctccacctcccaggttcaagcgatccttccacctcagcctccctagtagctgggatyacaggtgccggctgccatgcctggctactttctgtatttttttgtaaagacggggttttgccgtggttgcccaggctagtctcaaactcctgcactcaagcaatctgcccacctcagcctcccaaaacgccaggattacaggccagcatgaatttaacattgcaaccctttcccaataactgttgataatacagtccaaaacctaactgtcagtctgcattaagcccaggagcatgtaaaggtgatataatcaattgaaaaatccaggggccaccattccccaacttccacctctaccatctattgaattaaatatgcctgtggacgtaggactgagatactttactaacatttgaaatgagaataaagtaaagtcttcatctgctaggcagaggttcctatgtttcttagctgagacactttaactccccacacttacttagactgccaaccttccattccttgcctgagtctc

SEQ ID NO: 828491 - DNA, 552 bp, Homo sapiens
gtaattgtctcagaaatgcttcctctagattttacttgaaaactgaacagattttttttctttttttctatgtcttttcctgaatattaaaatgcacaactaaaagaaatccgctgacatttttaagacagactttactaatagtctccttaacctactttcagcttccaccctcaactggtcctaaagggaatgcggtgtgtgtgtgtgtgtgtgtgtgtgtgtgtgtgtgtgtgtgtgtgtgtacattatcccacttccaaattgactggactcagctggacagctgtcatgaatttgcagttgcagttagatagtgtttgggctggagatacaaaataagttctttcacatgtctggtaccttgtctggaatgtctggaagagcacagtgctgtctgggctctctctctctctttctttctctgtctctcgtcacataactagcctgaacttcctcacatcacagtggtctcacagtagtcatccttyttacatggtgtttagcttcccctagaatgagcattccatgagatccatttgaaaaatgcaa

SEQ ID NO: 828492 - DNA, 640 bp, Homo sapiens
acatgtcagatcctttatatcgattttttaaataattggtttgctaactataatattattagctattctgataattatttttaggagatctggatttcacagaatttaactacctgaactgtcatctatcagtaaagccatgttacaaggcttttagtagactagtaggcagtaaattaaccaattaataaattagtatggagtctaagttgctggcactgttatttataaaggtgtctaaaacaccatttttgctctagccatgaggtcagaaacaagttctagtattttgaattggtgtcctttccacacagaccctaataaaactgactgtaaatgagttgacactccatcactatttcagggaattcctttgattatttcaaaatggcacaaaatcataaccatttagactatgagccataaaggaatctcagaatataacttgctgcctgtttattatgattattactatatgttaactcatttaccattatatgagaaatgttccaaatgtcatattttacatgatgtgtgtgtgtatrtattcattttaatctgaaatatgttaacataattaaggaatccttaaaaatacactgtcacttcattcttcagattatattatcaggtaaagtac

SEQ ID NO: 828493 - DNA, 612 bp, Homo sapiens
tatatatgaattccgtgtgtgtgtgtgtgtgtgtgtgtgtgtgtgtrtatatatctatatatatatacatatattctccatatagtcttcccaatctacgttttgagaggccaggcagaaaaaagatgagaaaataaaggatgtgtatttaattagtctctaatccaatgctggacatttgcccagtaacttcccatgcctcctctacccttaatccagcctctctctcttctagaatgacccttatcttctggagacattcgcaccagcatggccctgtgaaatctcaaatgtgccttggtttgggtaaaggaaagcagccttgctaggctgcctaacactttttccaggataaagacagaatcagatgtcccacaaggggccagcccaaaatccatttaagtacctcaataaattctacggcacatcagtctgtgaagctatataaaacatatttaactctgttttatgacctattttactacttttgagagcctttccaaactttagaatcactgttttctccaggaggaaggcgctgattggccccctgcagtcctggaaggccattatggagactggaattggtgtgctaaagtcattatgattatc

SEQ ID NO: 828494 - DNA, 603 bp, Homo sapiens
tactataagaaaacattggggaaactctctaggacattttactgggcaaagattttctcgagtaacatcccacaagcacaagcaacaaagcaaaaatgaacaaatgagatcacgtcaagttaaaaagcttttgcacagcaaaggatacaatcaacagagtgaagagacaactaacataatgggagaaagtatttgcaaacttcccaactgacaagagatgaataaccagaatatgtaaggagctcaaacaactctataggaaaataaatccaataatctgattttaaaatgggcaaaagatccgaatagacatttctcaaaagaagataaacaaatggtaaaccgatctatgaaaaggtgctcagcatcacgatcatcagagaaatgcaaatcaaaactacaatgagatatcatttcacccatgtaaaatacgcgtttatccaaaagacaggcaatgataaatgctggtgagattatgaagaaaaaagaacccttgtatactgttggtgggaatgtaaattagtacaactactatggagaagcacagcagggtgatkaaagtcaataataattcaattgtacaatttattttattttattttt

SEQ ID NO: 828495 - DNA, 608 bp, Homo sapiens
agcattgacccaaccacttagaacagtaatttggcagaacttattaaccttaaaatatgcacatatatkttgaccagcaaccttgtttttgatcattagaggataataagagcacacgaggttgtttgtaaggaatgtttagtgcagccttgtttgtgatgacaaaaaaagtaaaaaaaaaactaaatgtttaagaaagaaatggttgactgtaaattatttttataccttcatgaaatattatgtagccattgaaaagaatgacttagagctaagtctacggataaggagatttagttctgacatatcgttagtaagaaaaaaaggttaccaaatagcattcatagtatgattctattttttcaaacaaatagaaaaagcctattacacaggtttatgtgtgtgtctaggcttgattgagatggcaaaagatgttgaaatgcacacaactggaagttgatatcaatttgtcttaggtattgatggtgagaagcaagtgaggatggaggagggtatttaaaaatctttatctcattttcttggctgtggtgagtataactcacttctggaatctttaaagggtcattaatgaaaagaaaacaaaaatg

SEQ ID NO: 828496 - DNA, 608 bp, Homo sapiens
agcattgacccaaccacttagaacagtaatttggcagaacttattaaccttaaaatatgcacatatattttgaccagmaaccttgtttttgatcattagaggataataagagcacacgaggttgtttgtaaggaatgtttagtgcagccttgtttgtgatgacaaaaaaagtaaaaaaaaaactaaatgtttaagaaagaaatggttgactgtaaattatttttataccttcatgaaatattatgtagccattgaaaagaatgacttagagctaagtctacggataaggagatttagttctgacatatcgttagtaagaaaaaaaggttaccaaatagcattcatagtatgattctattttttcaaacaaatagaaaaagcctattacacaggtttatgtgtgtgtctaggcttgattgagatggcaaaagatgttgaaatgcacacaactggaagttgatatcaatttgtcttaggtattgatggtgagaagcaagtgaggatggaggagggtatttaaaaatctttatctcattttcttggctgtggtgagtataactcacttctggaatctttaaagggtcattaatgaaaagaaaacaaaaatg

SEQ ID NO: 828497 - DNA, 624 bp, Homo sapiens
aattctctatgtctttaagcctctgtttccacatctggaaaatggagatgatgcttgtaatgtttaaccattgctttgtaaaaacctccstaaatgtagtggcttaaaacaaaactcacttaaaaaaaattctcaaatatccgtgtgtcagatgaactagtctgctcttagtcaggagactgcagatctttgctggactcccctacgtgactgcaggctgctgggaggcagctactctacatgccccttatcctcttggagcagcgggctagctgaagcatgtccctctcatggtgacggcagagggaaaagagcatgagcccaatcaaccaagcgttcatcaagccctttttcaatcctgctaacatttcattggccaaagtaagctacatggacaaccccacagtcaaggggcaaggattatgcttctcccatagggctggttactggggtggtaaacaatcaccaacctgttacctggtaaataccaggctcatgaggttgttgttaggattgaatgaaataacaaactaaagtattttgcagagttaatggagcttcctgagtgctaaaacaggacagctattaattctacctactattgctaccataacaaggtatatt

SEQ ID NO: 828498 - DNA, 633 bp, Homo sapiens
agtcaagaggaacagggtggggagagccattttcccctcctcactcctggcctcacaatcctgcaaaggccsagacaaggcaagcaaacagaaaccaactctctgaaagcaacgggccaggctggcctggggctgcagacggcttcagggcagcgagaaaaccctggagtatgagaggtgtggcttccaatccaacccagtgcagaggtgagcaggtgggaagatgccacagaatgaccacatcttctcagtcccaaagaggcagccttggggcagagccaaaccctgtgtttgaatcctagctctgccatgtagaagatacggagccttgggggatttattaacctctctgcacctcggttttttcatcaccaaaactgggataataatacctgccatgttaggttgttatgaagattaaatgagttaatatctttaagtgcttacaagaatgcctggcatatagggcatgctatctatataaaatataaacaatgaagtgagataattcactaaaacatcagggaacagataagcctagaccttccagtttacctggactttggatgttaggccctgtccacacaacacaagatgaagcgaagagttagaagccactactagttaacctgg

SEQ ID NO: 828499 - DNA, 553 bp, Homo sapiens
tctaaaacccctctaaataaaaataaggtcactttttaaaaatggtgaatcttatgtgaataacatctctgtaaagttgttatttttttaaaaaaatgcataaagtgctggagcttgtctgactccaaaatacccagactccttcccatacactaggctgctctattaggcagtagcgcctcttcaggggccacgtgcctgcttcttccacccaaatctctcctgggagctgggaagtaaatgggggacaaataccccctcccaattcctgccacacattcattcggaaggtttcattctaggaagttcaactttgaatacgttcataatgaataattttaggttactgcctcagaagtaattgtaatgcacctttagcaaagtctgttttccaacttgtagagctgttccacactacagctgttgcagtaaatacattttttaatgatagaatcatgccttgctgttctagttcatcyctgatttcttcttgtttaggccaaagagcacaaagcttatttctcactaaaaaatgcatcccaaactttatcca

SEQ ID NO: 828500 - DNA, 640 bp, Homo sapiens
caaggtgataacagtgggccaccatgcggatgtttgggatttccaaccaataagamgtccaatatcagtggccctcctctgaagctgaatgcccagcatggattctccagagcccccagtgatcacgagaaagtaggtttcttactggacctgaagatactaggcccaatgcacagctgcttgataaaaatgagctcttccctgccttttctatactcggcactttaaaaaatcttcctttgctggtgatcatgattgctgaggtgagaagtaaatgaaatggtttccattcataaggctagaatggcagaatgatgagggggacaacttaaagaccagaggtaatgtttaaaaaaaaatagcaaaatcagcctaagcaaactaaaaagcaaatgacaaacaggggcaaatatttgcaacctatatcacaacaaagttaataacccaaagatgtaaaagactcctataaataaagaaaagcacaatgattttatagcaaaaggaacaagagatacaggagttcacagaaaaaccataatggttcttaaatgtgtaaaaagtcattcatctttgctaaaaaaaaaaaaagtaaaactacagctaaacagaatttctcacctattatattggaaaagaaaac

SEQ ID NO: 828501 - DNA, 569 bp, Homo sapiens
tatgatcttgtgggaccatcatcatgtacgccatccattgttgactgaaatgttgctctgtggtgcgtgaaggtatcatttctaatgttttgttctgttttccctcttttctgcctccttgagtgttagtgctctttgcattcagagctcctcttccttggcgctggttttcctctgatgtttggcgacttctagttctgtgcacatcatatctcatgatgccggtggtctgcgaatggggcttctgaaacccacctctgagggcaatggggctcaggtggggctgcaacagtctctttgcgggaagacgcgtggcctctggctctgtggcatgagtgatgaggagctatccagagcctttcccccttcttcagagagtcccccttggctgcattctgggctgtggtctccttcactctgatcttatctgtcctctgccttcygtatttcggggagttgtcttcgtttctgatctgccaagcttgccccttcttggtctccaggcctgttacacattaattattagttttaccagtgctatttttgttttgttttattttgtttgagac

SEQ ID NO: 828502 - DNA, 637 bp, Homo sapiens
attttccagacctgatactttgtgcatgtttcatgtgagagtttctcttttttgcttactgttaccagaagagacaactggaatgatgccccagcttctattctagggtgtgatgattaggtactttgtgatgccaaatggccagctgccatgaggatgccatagatagggagggccaagagacatcttcacagtccagtaggtaggctgggcaaggtggcccatgcctataatcctggcactgggggaggcggaggtgggatgatcgtttgagctcaggagttcgagaccagcctgggcaacatagtgagaccttgtctctacaaaaaataaaaaaattagctgggcctggtagcacatacctgtagtcccagctgttcaggaggctgaggcgggaggattgcttgagcccaggaattggagggtgcagtgagctatgatctgccctctagcctgggtgacagagtgagaccttgtctcaagaaatcaaaatagtccagtaaagcacagtttctcaggtgacatggaggtgcactgytacaatacagcagcaggtggcacagtgagaaaaagtgtggcttcttttggacagtgcagagtaagttataggtgtcagagaagcagaaatgatccaagt

SEQ ID NO: 828503 - DNA, 474 bp, Homo sapiens
acaaccaaaaatgtctctagacattgccatgtggcccctggggaaaacctcctggttgagaaccactggtctaaaattctttttttttttttttttttttttgagacagagtctcgctctgtcacccakgctggagtgcactggtgccatctgggttcactgcaacctccgcctcacgggttcaagtgattctcctgcctcagcctcctgagtagctgggattacaggctcctgccaccatgcctggctaattttggtatttttagtagagacggggtttcaccgtgttggccaggctggtctcaaactcctgacctcatgatccgcctgcctcggcctcccaaagtgctgggtttgcaggcatgagccaccatgcctggccttaaaattcttttaatccttcatttttatgagcacttgagtcaatttctattattccagggagatttaggttgaaagaaattctttttttgt

SEQ ID NO: 828504 - DNA, 560 bp, Homo sapiens
gggatccacttttgtgtgtgtgtggctatggctgtcctgtttatctcaacataatttatggaaaaaacccaatgactggagatgctgcctttatcatatgctgcatttgtctatgcaattgtgtttctttctggattttgtattgtgttgtgttagtctattggtctgttcataatagcagcaccacacagttttaattaggctctttagaatgatttcatttctaatggtgccggcttcccctgcccatctaattcctttttagggctttcccatgtgttttcgattgttgttcctccaagtgatctttgtaatcagtttctctagttccgggagagaaagcctgatggcatttttattgggattttattaaacttaaaaattaatttaatgaacatcatcatctttataatactgagtcttcccatcaaagaacatggtttatctctccattagttcaaktctattttgtgtcttttaggaatattgtggtgtttctgcaggtagatttcttgttaactttatgtatttgatttttttttgctatcataaatggtgcc

SEQ ID NO: 828505 - DNA, 435 bp, Homo sapiens
cccttcacagccctccctccccaagaaygtcacagctccagaagcaggtttgcacccacagtgacacgccatggctttgcatttcccccagcactaaggagctgcttcatggagcacctctgattgacaaatctaaaatagagaatgaaagaaagtgtcaacctggaggagtttaataacgctgtaattaaaagaaggaagaaggggccacatcccagtgaggaagcagctcctttaaactattgaagaatatattgttctgggggtgccaacagcagaagaaattttaataacaaaaataaattgacaaaaaaaaaggcaggagaggtattagttggaacaaaaccaagtatcttaaaactgctcattttaaactgagtgttttatggtaggataaggaagctccaatattttcaaacacaatttatgtttaga

SEQ ID NO: 828506 - DNA, 654 bp, Homo sapiens
atccactccacggctgctggtatgaggaagtaaggcgggcctgatggtcagagggaggaggaggatgggcagagggaggagagtctgatgccagagggaagaggktgatggtcaaagggcgcacagtgatgatcagagggaggaggatgatggccagagggggaagggtctgataattcgagggaggggtctcgaggctccatgtgaagtaggtctgatgaccagcgctcaaagttcataagtcagtctaataacctaaagaactatggacagtagaaagaatacagcgacatacaagagggctattacatactggacattataatctgtgcttcaagatattgttgccaattattacagcaaattgctaaagtgagtattattatgacttctattacccacatgaagaaacacaagctcacagagactaggaaacaggctcaaagtcactcagctagtaagtgatagggaatttaactcccatctctttctagtaacttaggtttattttatataatagatgggaggtatgcttgttaaaataagtcatttcaagatcatatcacaggtttgtaggccacttcttctttccttgactatatttggttctctttccagtgtgatttttaactggatcctcagtacccgaaattc

SEQ ID NO: 828507 - DNA, 654 bp, Homo sapiens
atccactccacggctgctggtatgaggaagtaaggcgggcctgatggtcagagggaggaggaggatgggcagagggaggagagtctgatgccagagggaagaggttgatggtcaaagggmgcacagtgatgatcagagggaggaggatgatggccagagggggaagggtctgataattcgagggaggggtctcgaggctccatgtgaagtaggtctgatgaccagcgctcaaagttcataagtcagtctaataacctaaagaactatggacagtagaaagaatacagcgacatacaagagggctattacatactggacattataatctgtgcttcaagatattgttgccaattattacagcaaattgctaaagtgagtattattatgacttctattacccacatgaagaaacacaagctcacagagactaggaaacaggctcaaagtcactcagctagtaagtgatagggaatttaactcccatctctttctagtaacttaggtttattttatataatagatgggaggtatgcttgttaaaataagtcatttcaagatcatatcacaggtttgtaggccacttcttctttccttgactatatttggttctctttccagtgtgatttttaactggatcctcagtacccgaaattc

SEQ ID NO: 828508 - DNA, 500 bp, Homo sapiens
gagggggaagggtctgataattcgagggaggggtctcgaggctccatgtgaagtaggtctgatgaccagcgctcaaagttcataagtcagtctaataacctaaagaactatggacagtagaaagaatacagcgacatacaagagggctattacatactggacattataatctgtgcttcaagatattgttgccaattattacagcaaattgctaaagtgagtattattatgacttctattacccacatgaagaaacacaagctcacagagactaggaaacaggctcaaagtcactcagctagtaagtgatagggaatttaactcccatctctttctagtaacttaggtttattttatataatagatgggaggtatgcttgttaaaataagtcatttcaagatcatatcacaggtttgtaggccacttcttctttccttgactatatktggttctctttccagtgtgatttttaactggatcctcagtacccgaaattctt

SEQ ID NO: 828509 - DNA, 571 bp, Homo sapiens
cttgcccttctacatgagactctcactttcttcgctcctactcttgtctctgccaaactctagcacccttgaaggtcctgctcaggagccccttcccacrcacccctcccaccacttaagctgcctcactcactccattcgcaatggcagtttcccatgtgaatgcctgcagggctgaccgctgcatgcccctcagcttggtgggtgttcttcgtggcatagagcacatgcgtgttaacctggctccagggcacaacagcagagggctctgttcagtagggacaagtccatttaattgcaatgtggcatcattgtaaaaaaatctgaggctgggcacagtgactcacacctgtaatcccaacactttgggaggccaaggcaggcagatcacctgaggccaggagttcaacaccagcctggccaacatagtgaaaccccatctctactaagaatacaaaaattagccaggcatgctagtgtgtgcctgtaatcccagctactcaggaggctgaggcaggagaatcacttgaacccgagaggcagaggttacagtgagctgagattgtatcac

SEQ ID NO: 828510 - DNA, 521 bp, Homo sapiens
tttcaagtaaatgacttatactttatgtccacagcaaagaggcccacatttgtggcaatcttggtcagtacagtcaggaaggaagtgtagctgaagatcactgaggaaccagagaaattagtgtatayctggatttaatgatcaatttgcttatgttaaaaatacatttgaatatgatttactgcccttcagttaatgctagttccttgcttgcagcaggaccaatcaaaaggagctaaaccttaaaacccggatggagatgttgaaggattctagctaaagtttatgcaattaattaggcatcccctattcagaatacactttctattagtggcttagaattgaaagatatcgtactcccaggaaaagtacaaagaggaccacgagatacattgataatgaccttatccttaattcattccacacatactcagttaagtggcttaaataagtgatagagattttaatttaaatgcgagaatataagtgggcaaatatttgaatttaagtgaaattaacac

SEQ ID NO: 828511 - DNA, 588 bp, Homo sapiens
tccaggggcccaccccatccctcctcccagccttctgctacctgtctctccacttcttctacaagcaccctctccaaaactgccacatgttctcctgactttgtgtctctgtgggattgcctctatgatgtatcaggaggacgtgtggttcaggggccaactgaaacaccatgtcctttggtttttcgtgaagccatcccccatttcctggaaccaaaatagatcccacagcacttcctgtgtaccctgatacctaacaaaatgttttaaagattgctttagctggagattcttacatatgtgtgtcctcctgggacagtgagtctggcaaccaaccctcgctgattctttccctccctccccccgtctcgcagcagctggccaactgccccttctccagcaggtgctccctgcaggcttgtgaaatacactggagggcaattgtctggctcagactcatgttgccatcagcaaatgaccacgtttaagaatgttatgycacctctatatttggcctgcattattcatataaatatgcttggtagacaagggacagaaggcacttgtgtcggagaaagacagtttaaa

SEQ ID NO: 828512 - DNA, 460 bp, Homo sapiens
atacatatatatctagatatatacataaacgatacatatatatcgtgtgtatatatatgtgtgtgtgtatatatactcatatatatgtgtgtgtgtatatatacatatatgtgwgtgaatatatatacacatatatatgtgtgtgtatatacatatgtgtgtgtgtgtgtatatatatatatacatatatatatatttcatttgttttattggcatcacttgtcattgaagtccataggtaagatcaggaacaagacaaagatgcatactttcgctacttgtattcaacatagaatgaaattttattgctagagcaatgaaagcagatgaaagaaataagacacccaaattggaaagaagatgtgaaattgtctctgcaggtgacacaatcttatatgtaaaaaatcctaaagactccaccaaaatgctgtcagaactagtaaatgaattcagtagtcac

SEQ ID NO: 828513 - DNA, 619 bp, Homo sapiens
taccttccatcctatatgctgttgttttggttaattttaattatatatacatataaatgtacatatatattaaaatatgttattattttctataccaaacgtttaattacttttctttttttttwaatttatttatttattttttttttttggagacagtcttgctttgtcacccaggctggagtgcagtggcaaaatctcggctcactgcaatggctacctcccagattcaagcaattctcctacctcagcctccccagtagctgggactataggcacacaccaccatgcccggctaattgttgtatttttagtagagacgggggtttcactgtgttggccaggctggtcttgaactcctgacctcaggtgatccacctgccttggcctcccaaattgctaggattacaggcatgagccaccatgcccaaccttttcatttcctttcattcttctccacctctgcaattttttatttggggacattttccttctctctagaaaactttctttagaatactctgtcctgttagaggtaaaacttcacaatttttatttgcctaaaaataacttcattcttaaaaatggttttttgtgggaatagaattctaggttagac

SEQ ID NO: 828514 - DNA, 611 bp, Homo sapiens
ctaatgcccagtcagctttcacgaaacgtcggatgtatttattttttttaatatctggggtacacgtgcaggatgtgcaggcttgttgcataggtaaacgtgtgccatggtggtttgctgcacctatcaacccgtcacgtaggtatgaagccggacatgcattagctatttttcttaatgccctcctgcccccgccctcccccaacaggcccgagtgtgctttgttcccctccctgtgtccatgtgctcatgttgttcagctcccacttataagtgagaacatgccgtgtttactttcctgttcctgcgttagtttgctgaggataatggcttgcagctccacccatgtgcctgcaaaggacatgatctcgcttcttttttatggctgcatagtattccatggtgtatatgtacatgtaacacattttctttatccagtctatcactgatggaccctggggtcaattccatgtctttgctattgtgaatagtgctgcaatgatcaaatcacaaaaagcaattgcaacaaaagcaaaaaatgaccaataggatctmattaaactaaagatctaattaaacttttgcacagcaaaagaaactatcatcagagc

SEQ ID NO: 828515 - DNA, 580 bp, Homo sapiens
ctgcggcctgcgtggctctctcctagcacaccacgtgcctgagcaggatatgccttttccttatttcccctctatcatctttctgaggcattatatggaaaactgggtgaataaatccccaagtatgagctgacattcttaagagaaaaaacaaacttgatacttcatggtgtaaaaatctatttatgggccctacagaattacttctcactatagtcctcattaaaattaaatactaaatactctaaggaaacacacaattgcatgttaaaacatgaaaaacattattacagaataaccaaacttttgttccctcagagtgcctttctgtgatcgtttatgcccaactggcaaaggagtgggaaagggacggaggtgaatgaaaagaaggctcatatcccagagcccaaaacaggcatcatttacatgcttcataattccgaatttgggatgcacaaaccaataaagactatgtactcatgtctgtttgcaaatataagcgctttttaaatttttatttgagacgsagtcttgctgttgtcacccaggctggagtgcagtggtgcgatctcggctcact

SEQ ID NO: 828516 - DNA, 663 bp, Homo sapiens
gaccacttaccagggcctgtccctcattcacccgacccaactttgctggggggtgtgaggtggggtaatttattcagttctaaccaggaaaggtraaattataacaggattaataacacaagtgtcatggccttccaagggccccaagacgatcccatcccccttccctgctcagaacctgcctgtcctgcaccctggcctgtcctctggaggttatctgatgagggcctattctgagggtaaggcctgtgctgattctctatgggatgggaccctggtgccaggatagtggggggagtagagtcggggggtggagggtggcatgtggcaagctggtggaagttctggaccaagggaatgagcctccttcttgtgcagggagaactcatgggcccgcaccccatggttgactgcagtcaaagcacctgcatttcaccgacctcctgttggaggtgtggaccaccctagtgtgggcaaccactcccggctgacagcataggcccacctcccaatgtttggtccatggaatgttctacctgcagaggcacctcccagtgcacccccttcccccactacccccactggctgccctctgagaccccagcagtctgggcagagcaggtctcaagttctaggaaaggatcctaagcaaatgctgccaag

SEQ ID NO: 828517 - DNA, 512 bp, Homo sapiens
tggcagtgggtgggagtgctgcattctctgtcacttataggccttgatgcctgcacccasgtcaggctggctgtggctggaaagaacctgctgtggatgaagttgacctgggacccacgtgacctgagtgaaaagagctatgggtttgcaggggacaccggtgccctgctgcaggtggttctagagctaggtatcctgcatcgtgacttgagcaagtcatgaacccactctgagcctcagtttcccactctgtttttggtgtttggtttggtttggttttgagacagggtctcaccctgttgcccaggctggagtccagtggcacaatctcggctcactgcagcctctacctcctgagctcaagcgatcctcccacctcagtctcccaagtagctgagactacaggtgtgtgccaccacaccccactaattttttgtacagatctagtttcaccatgttgcccaggctggtctgaactcctgggctcaagcaattctcctccctcggcctcc

SEQ ID NO: 828518 - DNA, 643 bp, Homo sapiens
cttcccattaacctgaggtctctttctttactctgggtcagacctgaggttggggaaggcgactgagccatgctcagaatgtctggtcctggcttgggcctgagtagggcagagagggcctttcmtggctgatcagagcttaccagccccaccccaccatggtagccttagggtgctgagtgcctgatactgcctgacaagtgcctgacacgcagcctagttccttcctggcccctctctcactggctgggaaaccctagaccatgtcagataggacaacactgctgggttttacatccagatagtaataaacaccatttcatcattttctcttggctcctgggtttactctttgtctacaggggtggacaaaggtggcccaagggcagcttctcagacccactagtgatttcaccccagctggagggggtgcctcaggcctgataagcatgccatgctaactccaaggccagagtcctcgccaggcctagaaaggtcagaagagctgagggatggcagctgccacatgcccccagctctgtgctgcccctgtgcagtgtgtgtgacacctacccccggtcctgtgtgtgccagcatctgcccagagtggccacccccagctgtgtgccagcctgctgaaggg

SEQ ID NO: 828519 - DNA, 492 bp, Homo sapiens
ctggggactcattaaggagtggaggagacagggagcagcctctcctctcatctcccctgggtccccttgggaaatgggagctaggagacaaaggccagttagactgcctgcagggtgactgccctggccactgycaggcgagggctctggggagggtggcacaggtgcatcagccatgagagatgtgtaaacaagaaatgccaactccaaatcgcaagtggagaatacccacggagagagagctgtggactactcctggggtcagtgtcttgagatgaggaaactagtagtcagagaagtcagggctggttctcccaggaagaaggtacagtgagtgcaaaggcaccaaggcatgactgggaggcacgtgttcctgacacacagaactgaagagggcttgctctgtgcagtggggcagggcaattgaatcggggtaggggccagtgagctggcagagtctgacctggggcggaggtgtccgggttctagtcc

SEQ ID NO: 828520 - DNA, 654 bp, Homo sapiens
cctctcacccctaccagaggtcctccttctccaggaacgaggatggcctgccctagtctgggaattatcccccacccctaccccttctgagaagaaggcagtatggggcctgcagttaagtccctggagmagggccatcgcctgtcttgctcccctcctccgtgccaagcccccagcatagagcctggctggaacaggtggtctgatatgtttggtgactgaagacatgagagaagaaatgaatgtctcagccccacttggcttctactgaatgcagccccagacgctaatgggctcctcattcagaagcacctggacttcaaaggaggctctggaggaggccaggcattactaaaggaattgcaggcacagaagagttgggactccactagaactggctgccttcccctgctaccggctctcgcagcagccccagacgactcaggctcctggtactacccccctgtgtacccgacgtgttctccccacccccgtgccctgtcccccgtccctgcgtccctgcgccccgatgttggcaccctgcgggcccgggggcggccgtgccggcgccgcagagtagggcagggccacctggacgggtgcacatgcgcggagcagccgcccggccccgccgcagcagccggcgccccccgc

SEQ ID NO: 828521 - DNA, 509 bp, Homo sapiens
agaaacttgtacatgaatgtccatagcataattattcatagcgatgaaaaatgaaaaagtagamacaatccaactatccattgtggtaaatggacaaatatagtatatccatataatagaatattattcagccataaaaaggaatgacgtattgatatatgctaaaacatggataagccttaaaaacatactcagtgaaagcagccacacacaaaaggtcacataatacatgattccatttatatgaaatgcatagaataggcaaatcttagagacaaaaagccaattagggggtgcccgggtgggggagagagaatgagtagtgactgctaatgggtataggatttcttttgggggtaatgaagctgttctggaattagatactggtgatggaggcacaactcctacaaatatactaaaaataatgggatagtacactttaaagacttaactatatggtatgtgaattatacctcgacacccctgctatttttaaaagataaaaaaag

SEQ ID NO: 828522 - DNA, 534 bp, Homo sapiens
atttaaggaattttatttctgtattggactatttttttctttttctttctttttttttttttttagacagagtcttgccgtgatgcccaggttggagtgcaatggggtgatctcggctcactgcaaccttcgcttcctgggttcaagcgattcttctgtctcagccttctgagtagctgggattacaggtgtgcgccgccacacctggctaattcttttctatttttagtagagacggggtttcaccatattggccaggccggtctcgagctcctgacctcaagtgatctgcccgtcttgacctctcaaagtgctgggattacaggcatgagccaccgtgccctgcttttttttttttttttttttttttaagacgaggtcttgctatgtcacccaggcttgtgtgctatggcatgatcgtagctcatggtaaccttgaactcctgggctcaagccatcctctccagtagctaggacaacaggtccatgccaccatgcccagmgaatttttaattttttttttttatagagact

SEQ ID NO: 828523 - DNA, 559 bp, Homo sapiens
ctgacagagcaaagatacaaaagttcaaagttccagtgcagagtgacatgtagcttagtgtggcttgcatggaaaagagaagaaacttgagaatagtgccatatgaagtcacctgtaaaatgtggaattttaaactttgttttactcaaggaagagaatcagcggatttaaaataatgtctaatttcaataaataagcaagctcatttactcttaatccataaatataaggactctatcttatgagtaaaggttttaaacttcggaaagttataaacagtggagaaatttttactgattcatctataaatattctttgataattgtccacatagtatgccttgtctattattgcttggttcacctttctatgtaggagctcaacagaagtcattttttcctaagttttggtatttatacctcatttaccaagaggatctaggaaacaaatatgcatatttattgagttaatgtactttaatctcatgatatttacaagtttgtgggraattttactttctgggaagaaagaaagagaaataaactgatgataccataca

SEQ ID NO: 828524 - DNA, 629 bp, Homo sapiens
acccaagaatcagccaactaaggtccccacaccaaatactgaaaactcagagcatctatgaagtgaccagctatgaacttgaaaggcttggttggggccacacaacaacatgactcaagcaacaccgagtcaacacaatgggggacctctcataaccaagtgtcctgccttaagaaattgcccaaatacagttaacagacagccaaaacaacaacaacaaaccttgcaaataaaacatatattttagaactgaagatttaaaggctgacagagtaataaatggtgtcagaggaaaaggactggggatggtgtgacaaggacgtgattcaaggtattcagattacagggaactttaaactgaccacctagctggaggcttttttccctgattcacccagtatttgaaggagagggcagagaggacactcgcccatccaggggagccaaaatggcactgaccattcttctatgtagggcccagatgaaggtcttcccaggttctctcagcctggggggctcagcagccatgcaagggggccagtgagrgaatctgtgaccttctggcctgatagtcaaagtgggggatcccatatgaggctgcagtggcactatggccacttgcctgtctg

SEQ ID NO: 828525 - DNA, 622 bp, Homo sapiens
taaccattttagaggagattacaaagaactatttttgtgtcatgcaaaatgaagaaaatcggcatataaartatttcaggttttttttgcttataattcagcttttaaaatctgttgctttccattgtattgtcttgtgtaagagcaaaactgaactaaacttagttaagaattactgtgggtactagataggagtcttaaaaatgtaaattagtttatttcagaaagcattccatattctcaaatattcaatacagtagttttgacttgcatatcactgtgatagctaggcagtacaagtcaatttagagatttggaaagaacaacacccttcagacattacttacaaatcttaaaacctgaatactagccttttctgagctataataattttaattattaaacaggattttcagagatgtataatgaagtctttcatcatatttgaatttatatatgtgaacaagtaaaaaaaacctaagtggccaaaaatgagttggttaaataattgtagcataccaatataacagagtgctataaaactagtataaaatcatgctgaaatattatctatagtaatgagaaaatgtcaatatattgttaagataaaaaagataaatag

SEQ ID NO: 828526 - DNA, 562 bp, Homo sapiens
gataatgtcatccccaaagaaacgcatctactatggatttatcctttgcgcctttttctctgtatcctttttgcagtctttgtcactttgattattatgtggggattggggcttcctatctcctgaccgtcttttgtgaactaaacattattttagggaattcgtactaaaattctgaaagcactgcttggggatggcagtcttatttgggattgtgtcacatgttgtttgttttgtgcttaattggttcatgataacttggacaatatataaatgatcttggtttcatcatgtaactcacaaaatgttttcttttacattttttttctttagtgctttctccttttcctaccaaatatctaggctcacttttaccatcagatagagatttagttgggcttttagaactctctcatcaagcagatgctttktgtgtgtgtgtgtgtgtgtgtgtgtgtgtgtgtgtgtgtgtctgtagtttgtgggctgttagaagccatttgctcatcttgtcaaagccatagcagtcttttcattctcagttgcttcgctttctcctcac

SEQ ID NO: 828527 - DNA, 603 bp, Homo sapiens
gtagaagctgcttctttccaactctaactctgcctatttcttctatcatgtcatcagaattccttaaacatcttatttaacagaatatacaaatttaagccagttctacagtgaaaaacctgagagtgagtcacgacaaactttaactgtaatcttgtataatggaaatggagagagacaaatattggggaaagatcttaagaaaactgatgaatccaataggtaggtcagataagtgtttcttggctttctgctttccatttgtaagcatgtctctgtgtgtgtatgtatgtgtatgtttatacccatgccccttatttagagctctaaatctcctaaggacgggaaccatctgccacctgacaagagagaagtaaactccatgcattcgttcttctacactcaagagggatcctcttcagcctaggatggtatgggcatagaatattttggaaacaaagggatagattctgtggctttctgtccccttttttccttttctctttccacattcctggctctaacttggttctttctgttgycatggtaaccaacagtctcagaacacagacttctgacagctggacttttagccacggagac

SEQ ID NO: 828528 - DNA, 623 bp, Homo sapiens
aaacatataaaaactatataccaatagattgaataatatcaatgaactccaagcacaataaaaatgaagaaaactagagaaaggcatattgtggtcaaatggcttagaaacaaagataaaggtaaatatttaaaaatatccagagaaggcagaaaaattatgtacagagaaacaaacataagaatgatagcagacttcttgcccaaaacaatgcaagccagaagaaggcaaagcgtcactaaagaactataaaaaacaaacaaaaacaatgaaagtctaattagaattctactacaacaaaagtaacttttaaaaaggattgtgaaatactgttttgaaacatacaatagctgtaaaagttcaaaaccagcaaacatatactacatgaattacaaaatcaagttctgcaggctaagtaggaaaatgataccagaaggaaatatggaagggcactggaaatagtaactgtgagtataaatacaattactttttctcttattgtttaaaactcctgaaaaaayacttgactgtttaaagcaaaaataataatactttttgagtttataacttatgtaaaaataaaagatgtaagagcacttcaataaatgcttagaagggagaaa

SEQ ID NO: 828529 - DNA, 590 bp, Homo sapiens
aaatcatcacaaaggtccatttgtattatatgaattctctctctctttctttctctctctctctctctctctctctctcwcacacacacacacacacacacacacacattcattcatcctgtcatatgtatacaaaataatttacattagcttggaccgttgagtttggtaaatgcacctatactgaaggggaaaaaagcaatttcagttatggatttcatagactttctcattaaagttacatgtttgaagaaggtttatatatatgcatatgtgtgtatatataattttacaaacattaaatgaaatcactgttttttataaaatattcaaaccatgcctagtatacaatgaaaacaaaaacagaaaaactcactttcattcataaccacctccccaccactccactgccaccctggggaagacaagactaggtttgtacacaaccacagacttgctggcatagcttccatatgcctatgtaaaaggctccttaaagtgctcaggggaaagggatgactaggatggaacttgaaggagtctgggaactgcaaatttcaaactggccttccagatttctatttaattat

SEQ ID NO: 828530 - DNA, 572 bp, Homo sapiens
gcaggggagcttctgtcacaagtgggtcctctttcctcagggaagcctcaccctggctctgaaggcctcccagctgatccacgcgggcccacccaggtcatctagaacagtcttccttaytgagagggcaaaatcccctcccagcagccccagaggccagtatgatggagcaacccaccccgtgctggcccagcccaccaggcttcccttccagcctcccacccggcctcctccttgtctctcctgccggctcctctgagtgcggctgcagcccggcctcgggcccttccactttgcccacctcacccccttagggcttggggggcctgggtcaggtgcctgaggccagcctgcatcagaagctggctccgcctctttactgtatgtggccctgggcctcagtttcttcctctatacaatggggacaataacataccagcctcctgggaactggctgggttacaggagagcaagtctttggagctgggccggcaggcatgggggcccaaagagggtcctcagctttggatctggacgcctcttctggagatctcacttccggagcacccgcc

SEQ ID NO: 828531 - DNA, 530 bp, Homo sapiens
ggggaaggcgtcttggccttgggtgcagatggtgggggcggggcctgtccagtgyccctcacaccctggctgctgggcagtttcggctccagctggcagggctgtctcctagctgctggcctggagccccatgacagtctagggtccctgaagtcacaggggcaggatgctctgaacagctaaatgtcaggagaacagggctcacccacttttcctgaccagcctgaatcatctcttccttccaagcaagctccaggtgcaccccaggaagccggcactgctgatcttgagtaaaacacacgtaggcctgagtccaagctgccactcacctgctggcgtgactaggagaaaccaagcgagccacaactgctctggctctcagctgatgtctccggaaagtgggctagtaacccctgccttacttgtcccgagtacctactatgtgccaggtgccagctgagcacctgccatcggcagcccatttaatcatcccagcaaccccacctgaattctcagaggctcagaagtca

SEQ ID NO: 828532 - DNA, 590 bp, Homo sapiens
ttgctcacctgcctggctgctttatcttgacaacagattgcacaaaccccagagctaatattgaacttgcctggctttwaaatagcacctgtaaacaccactactcccagcccctggtccacacatccctgcccaaggaggcattgaggtgaggctggccccaggcactgcctcgcaagcactgaagtggagcagagtcagctccccaggaaccagatcctcatcatttgccccacccctgatgagcgaaaccttctctgctcaccttttgtgctggaaatggtcaggggaacccttctctgcagggaaggggcaaacgcccagccaagctggagagccatttccagacctgcatggacgtcctccctgagtggcaaggccaggccctgggtcaggctccagccggagatgtccaatggcctcacccatcgctgcctcgggggctccacccagctgctgctctgccgtggcctcattctgctgcacctgagatccctggagggcttcggaagtcacccccagccagagtcccagctgctgttcccatccagctggtctggggtggcagggtttggcttgcttaaagctgg

SEQ ID NO: 828533 - DNA, 286 bp, Homo sapiens
agctgggcagcaccagtgctggtggggtgcagggcagccggatgccaagaccctgagacccccaagcctgcctggggccatgcagggcttaagcggtgggtttgctggtgttcaascaggtataggggaagctggggtggagactggagtttggacacctctgactctgtcttccctcgccgggcacctcccaggcagcacccagagcgccatgagcccaggctgggccagcacaggcgagggaaccacacaggcctgcctgtctctcccgggggcagctccgtag

SEQ ID NO: 828534 - DNA, 590 bp, Homo sapiens
agaagccaggcacaaaagttcccatagtgtaccattatatgttctatttatatgaaatttatatgaaatgtccagaacaggcaaatccagagagacagaaagcggatgaggggtggcccagggctgggggaggagggaatggggagtgactgctaacgggtgtgagttttcttaaggggatgatgaaaaatgtcttggaactagacatgatgaatgtactatgacatgacatgacatcgtccaccttaaaatggttggtggttaattttttgttgtgggaattttagctcaattaaaaatggtggccggcagtcacggtggctcacgcctgtaatcccagtactttgggaggccgaggcgggtggatcacaaggtcaggagttcaagaccagcctggccaagatgctgaaacaccgtctccactaaaactacaaaaatcagccgggcgtgtgtggggaaaagcaagagagatcagattgttactgtgtctgtgtagraagaagtagacataggagactccattttgttatgtactaagaaaaattcttctgccttgagattctgttaatctataaccttacccccaaccc

SEQ ID NO: 828535 - DNA, 638 bp, Homo sapiens
gtaggtgggatgtttcctgttgttactatgtctagctttgcagactcaattttcaaacagtttatttacttctcaaagtgtgatcctataattgkgctttgctgtccccaagtcaaagtaagtattaggatgtgtactcagtttttctatttaatatatatttttgaaacaaaaatcaaacccttcgttaacctggtataatttaaacagtaacatcaaaaaccaaattaaaaaaatacaatggacagtaagataaaatcacctaacttccttacaaatctttatccgttagtttagtcaaaaccttacatgtgattgatgggatatgctttctaacttattataaactcttttattatcagatacagtgaagattaattcacagtaagaagattacaaactggtgttacatcaaaaccatcccaggaaaaaaaaatgtgtccttaatttccccaatcctcaagttttctttttcttttccttttttttttttttgtcagcaatcataagactgtacttattaaattcaaggtaattaaagaaaacaaccttctttaccgagaaaaaagaaaaaagatacaaccctgaaaagtttttgtagagatgagatttaggaaccatagtaccaacatagtttg

SEQ ID NO: 828536 - DNA, 592 bp, Homo sapiens
caaacagttaccatggccttttttggtgcaagtttggctttgggaagtgctttggagcttcttcgcggtccagccactgagctggtcattgcttgtcatataaaatctagtttttgttgcacctcacagtccgattgagaaatggttcgttgttgtggagaataagagaagacaacacttcaaaacggtgtttttttaaatttttgctcagctggtgaggcacccacttatcgagctttttcaccttttcaatttgcttcaaatactgaacaactgtggaatggttgacgttgagttcttacgttgagttcttcagcaacttctcatgtaattgtaagaggatcaatctgcttcaatgattgctctcaattggttgttgtcaacttccagtggcctgccactacactcctcatcctcaaggctctggtatcttttgcaaaacttcttgaaccaccactgcactgtacgttcattagcagttcctgggccaaatgcrttgttgatattgcaagttgtctctgctgttttacgacccactttgaacttaaataagaaaatcactcaactttgctttttgtctagcatcatttcc

SEQ ID NO: 828537 - DNA, 596 bp, Homo sapiens
aagaacacacaaaaaaatttaatcaktcataagatacattagttttactctcttctagtatccttgcattggccttcaaaactgtacccatttctcgaataactcccagtaagtccttcctttgtaaatggtcctatataaggtaaacaaagtctgactatgtagttggagttactgcctgagttttacatatatcctagacttggtctcagtcacagattaatgagcattcactaagagttgatgtagaccatgatctctaagagcacaataattctaactgtcttttcttggtcagctctgcctagccatcactagcacaatgcccagcacaaagtcaccactcagtagatatttgtcaaatcaataaataatgacagaatccaaaatcgtaataatttatcccagtgctcagcctcgactatatgtttaataaatatttattgaatttcattgaatattgtgcttaaagagagaatcatgccatgcattccaaattaagtaggcattacatttgaattatcagctgtttgggattatctgtgtggctcctccccactgttagggtggtaaattgagatcttactccatcagca

SEQ ID NO: 828538 - DNA, 456 bp, Homo sapiens
aataaaatccagcaaataatgtgctcttcacaaagctattttactgtttcttaattattgaaactttttcttatttttgttcttcttaaatggattagttatcctgggtagattactaaatagttttaagtagttgaataaatttgttatgagagctaaaattcctgacataccactgccctgacatatcagcaaaatgataatgatgatgttcaattaaatgtatcaaataaaagcctgcaaaattcaacagactgaagtctatattctggaatttgacagcaaaaaaagttgtgtaggttatcattttttggcaaaaaggcccctaagtacacttgcaatcaatggctacatgcgtagttccaaatgtcrtctttattacttctgtttaaatctgtctctagaatagtctccaagaatgtagcttttttactttggaaactcttactcagacag

SEQ ID NO: 828539 - DNA, 527 bp, Homo sapiens
tctgcaaacacagacaatttgacttcctcttttactaattgaataccctttatttctttcccctacctgattgccctggccagaactttgaacactatgttgaataggagtggtgagagagggcatccctgtcttgtgccagaaaaactggaaactctaaaaatcagagtgcctctccccctccaaaggaacgcagctcctcaccagcaatggaacaaagctggacagagaatgactttgacaagttgagagaagaaggcttcagatgatccaactactctgagctaaaggaggaagttcgaacccatggcaaagaagttaaaaaccttgagaaaaaattagacgaatggctagctagaataaccagtgaagagaggtccttaaaggacctgatggagctgaaaaccatggcamgagaactacgagacgaacgcacaagcctcagtagccgatttgatcaactggaagaaagggtatcagtgatggaagatcaaatgaatgcaatgaagtgaaaagagaagtttaga

SEQ ID NO: 828540 - DNA, 509 bp, Homo sapiens
ttgattatagtatgacttaatgtagtttgttcatatttattgtgctttggctgcactgagcttcttacttctgcagtgttaataattttcataraattagaaaattttaggacattatgctttaaaatatatttttctttctctctttcagagtctccaattatacaactattaggttcttgaaaactgtgcctcaggttaatgatgctctgttaattatttctattctttttacatcactgtacgtttcaatgtaatttttttatcactttgtctttaaattcactaattccacattttacatatataatctgctattattcaatcccgggcattttgtttcacagaatatagtttcaacattttaagtttgacttgtatctttaaaataacttccatgttactatttaaatttttgaaagtaagcaataaagttataataacaagcttaatgtctttgctaattttaacatcctgtcaattctgggtagtttgtgatttttttaaat

SEQ ID NO: 828541 - DNA, 509 bp, Homo sapiens
ttgattatagtatgacttaatgtagtttgttcatatttattgtgctttggctgcactgagcttcttacttctgcagtgttaataattttcatagaattagaaaattttaggacattatgctttaaaatatatttttctttctctctttcagagtctccaattatacaactattaggttcttgaaaactgtgcctcaggttaatgatgctctgttaattatttctattctttttacatcactgtacgtttcaatgtaatttttttatcactttgtctttaaattcactaattccacattttacatatataatctgctattattcaatcccgggcattttgtttcacagaatatagtttcaacattttaagtttgacttgtatctttaaaataacttccatgttactatttaaatttttgaaagtaagcaataaagttataataacaagyttaatgtctttgctaattttaacatcctgtcaattctgggtagtttgtgatttttttaaat

SEQ ID NO: 828542 - DNA, 570 bp, Homo sapiens
taagtgtcaccaagcattctgtaaaggccattaacattgaagtagttctgttggatataactttaatttgtgaactcgaaggataatttataaaaatcttgtgccttccaaagttattcattaggctcactgaatttaatgagaatgtggttaactgaaaacagggatttacaacccatcagtccagtgatttacattccattaggcgtggggaatatatcccactcctattgttattaatgactcaacagctctggattgtgaattagagacatgggacagaaggtaaagggagaagataaaatggaagaagtttagcttgccacgaggggagagtggagaaagtaaagatgatgttcccaccttttacttgcattcacctagctgtgtgaacatcactggttggaagaggaaaatcatttcaaattgtatgctgtaagaactttctgtttggatttgtcttctaacaaatwtattgaaagaatattcttcttttggtaatcacattaaaaatgtagggcaaatgaactatgtcacatgaaaatctcacaaataaacctagtaactagg

SEQ ID NO: 828543 - DNA, 505 bp, Homo sapiens
agtatctaataaattgattcaattttttttttcaaatatgtttttaaaaatcactcaagaaggaaacaaagtgatttctataaaggacagatttaytaatttaaaaaattaatatcaagttgtttttatactcatgattcattaatttattttgcatcagattaatttgtaaatacatcaaattgaaaagaaaaagtgagggtttataattgtccctgggaaaatgttaaactgaatctaacataccttacccaaagaactgtggcaaattacaataaacagtttcagtgtaatgtattttgaccgtaaaactaagtacacatttgtaattaggatagaactttagaattattgcacactatattgatcaaatacaacagtcattgtaaaattgaaacccaccaaaagcagccttcagtagtaggccacttctgaacttatggagaaaaagcagtgggatacatcgaacttagaattttcagctgtggcaagtggttcattatgg

SEQ ID NO: 828544 - DNA, 621 bp, Homo sapiens
ttctttgtcactttttactgcaaattcatttcctattatatggttatcatgatactggaaaaaggtgtcctgatccagacactaagagagggttcttggatctcatgcaagaaaaaattcaaggtgagtcacagagtgcagtgaaagaaagaaagtttattgaaagctactccattacagagtaggacatcctcagaaagcctgagagggaactcaccatcttcggttttagtttttcttatataggggtctagtttatgtaaaaactatccttgacattttagtttgtgagtttatcaaagtagaactataattatattaaaagcatatattgttataaatattgggacacctggaatttccacttttgtaggagtgtgtccttgtagatgtctttaggctatttcctcaactataaacatcttagaaccatggattgtgattggcaaggaatgttctttgctggttttaagatggggttgactttaaaatgttgtcagcctggctttcctaggttcttgctttcataaaaaaataccacagtttactcatcatccattaaagacatttgagttgtttccagtttctrcatattagaaataaaggtgaaacaaacattta

SEQ ID NO: 828545 - DNA, 388 bp, Homo sapiens
tctagaaattcaaggccatttatctatctatctttttttttttttaagatagagtctcactctcttgcccaggctggagtgcagtggcatgatatcagctcactgcaacctccgcctcccaggttcaagcgatttctcctgcctcagcctcctgagcagctgggattacaggcgtatgacaccacacctggctcatttttgtatttttggtagagacagggtttcaccatgtttgccaggctgatcttgaactcctgacctcaggtgatccacctgccttggcctcccaaagtgctgggtaacaggcgtgagccaccgtgcctggccaaggccatctatcttttgacctagacycttgagatctgtaaaggccaggtaagacaggttt

SEQ ID NO: 828546 - DNA, 598 bp, Homo sapiens
tatgtttagaacatgaagtctgattaaccactctgtatctgtgcataagcaaatacayacatatatatatatatagtttgtttttctttattctttttttctttttgttgcataagcaaatatagagttgatcatattttctaaagccaaatgagtaactaatacatgagtatttaagtggaaattttctagtttggtacagagtcaaattccttgctgtgtgactctgagcaaccacctctctgtaatgccagttttgctgtctgtaaaatgggtatcataattccttatgtattaggttgctgtgagtctgaaatgagctaacacatgtgaagtccttagcacagccctgttactcagtaagcactcaatggtatcagccttcctatagctgggataccagtgagatcccaacgctgtccttaaagatgatctataagaaatcccctattccatttcagctatcatgagcaaaaagggccacaaaagcacagcagaggggagtgtgaaataaccctcaaaatatcaagaaagtatcctgtccagaaagctggagtgttacggtcatatgcctttctgatcatgagacctcattaca

SEQ ID NO: 828547 - DNA, 634 bp, Homo sapiens
tagcatatagaatgataaaaaataatacaatttaaaacagtagaaaaaaaaacaaaaaagaaaaagaattttttttctttttttttttctgagacagagtctcactctgtcacccaggctagagtgcartcatgcaatcttggctcactgcaatctccacctcctgggttcaagggattctcctgtgtcagcctcctgagtagctgggattacaggtgccagccaccacgccctgctaatttttgtattttgggtagagacagggtttcaccatgttggtcaggctggtcttgaactcctgatctcaagaaatccaccccctctcagcctcccaaagtgctgggattacaggtgtgagccaccgcacccagccaagaaaaagcaattaaaaacaaaacttgacatatgaaaaagtgaattacaggaatagattatgggcaattgcatggatatagtccataagagttagccaactttcatgattattaactatattttgaagtctggcatcacaataaatagctgcttttttcttttaaggctctccttggagaatacatttacattcattttctatatggtgctgctccttgggaaattcttctgtgattctacatatacattgacatgaaca

SEQ ID NO: 828548 - DNA, 565 bp, Homo sapiens
cttcaaactaagtatggaacatttttactgaataaattaaactcttctttctgaatataattttgaaaaaaaaatccattaaaaagaaaaactgcacttggggacaacctcatgtcctcacaaaatgaaacaaaacctctgttcttctaagagcacacgtggacacaccaaggtacagctcaagcgagctcaggaaatgtttcagtgatattccattatcccttgagacacttaacttcagctcatgaaaatgccagtgtctaagggatgaaaattacaatggcttcctgtaaaaaccccctctaggctatggggctaatttaaacgacatggcaaaactccaaccaaacctcatgcataggttaaaatgtctattatttaaaagctgatctctgcatttatctgtcaacagtacatcttttccatttcaagttccacatgttttacatgttccacaaaaataaaaagaaactawaatgtattctaatgtaatattaatttttactatctctcagttttcttgttttctttgtaagaaggagaaggttgggcataacaccttaca

SEQ ID NO: 828549 - DNA, 628 bp, Homo sapiens
gttccttaacctttgggttatgatagctgcgagtataaagaaagaaacaaataagttagccaagggaaaaacttctgtgatttgaggaagacaagaaggacatggacaatagcatyggacaaaagaaaaaaaattcctttaaaagtctgagttttgcataaacatcatcagtgttaaaatacctgggaccttgtgctcttaaccaacatctaaatctcttccacactaaaagctctcaatttaggaccccaaggtgtttttttcctttaggatattgttgacacttttattatcagggacagtgtcaaaactgattcacttaactacatatctttgggttatggtcaatactgctgaaattcatctatcctatcttgttagcctctctgcctgactttatcactaagatgggtaaaatttctttctcctctgattagtctattactagactgatggcatgactacttctggcttccccacttttcttatttattgggaaccatgactatcagagccaaagtttcaggattaagctaaaataacacaagccacaagttttgttcagtttattttataacagcagggtccaagtcatattttgagcaccttaatgcaagttacaagtacc

SEQ ID NO: 828550 - DNA, 628 bp, Homo sapiens
gttccttaacctttgggttatgatagctgcgagtataaagaaagaaacaaataagttagccaagggaaaaacttctgtgatttgaggaagacaagaaggacatggacaatagcattggacaaaagaaaaaaamttcctttaaaagtctgagttttgcataaacatcatcagtgttaaaatacctgggaccttgtgctcttaaccaacatctaaatctcttccacactaaaagctctcaatttaggaccccaaggtgtttttttcctttaggatattgttgacacttttattatcagggacagtgtcaaaactgattcacttaactacatatctttgggttatggtcaatactgctgaaattcatctatcctatcttgttagcctctctgcctgactttatcactaagatgggtaaaatttctttctcctctgattagtctattactagactgatggcatgactacttctggcttccccacttttcttatttattgggaaccatgactatcagagccaaagtttcaggattaagctaaaataacacaagccacaagttttgttcagtttattttataacagcagggtccaagtcatattttgagcaccttaatgcaagttacaagtacc

SEQ ID NO: 828551 - DNA, 631 bp, Homo sapiens
tcttagccaagctgaaatgtctgaaatgayagatattgaattcagaatatggataggaatgaagattattgacattcatgagaaagttgaaacctaatccaaggaatctaaggattaggataaaacaatacgtgagctgatgaacaaatgaccattacaagaaagaaccaaactcatctgatagatttaaaactcactttgagaatttcagaatacaattgctagcattaacagcagaattgaccagctaaggaaagaatctcagggctcaaacaccggctctctgaaataacacagtcagacaaatataaagaaaaagcagtaaagaagaataaacaaaacctctaagaaataagggattatgtaaaaatgccaaaagagaggcctattggtgtccctgaaagaaagagaaagcaaacaacttggaaaacatatttcaggatatcgccatgaaaattccccaaaccttgctagaaagaccaacattcaaattcagaaaacacagagaacccttacaaaatactacacaagaataccttctccaagacacacagtcatcagattcttcaaagttgaaagaaaaatactgggtgggccaagatggccaattagaagcagctacagtctgcag

SEQ ID NO: 828552 - DNA, 633 bp, Homo sapiens
ttttataagggtaagcacaatttgatattctctactttacaattaaaaacgttttccctactttgtcacatgggctttctaatcatgttagatcacatgcaattgtagtaagtgaaataccaaatattctgaagaattttgctattggtaggccttttcaccgctatcaacaatttgcaataaacatcttcgtgtataaaatttgaaaaaataatcattcccttataataaagcttctggaagagaaattaagcttgattgtggtagagattaagtggggccacagttaatgagctgacttcaacccaagaagttagaagaacaatagaggtaactcaaataaatgagaaataaatataacagaagttgaaaatagaaataattatacaatagagtggatcaaacccaaagctagttctttaaagactcatgaggagtacatgttctctcccaaaataattacaaagttgcaaagaaagcacaaagaaacatcaggaatgaagccagagatataactatagctwcagtttagaactatactactttttagtagaattatattattttccccttaaagataaccatatattggggaagaaacatttataacctttaaagcacttttgaaacctt

SEQ ID NO: 828553 - DNA, 563 bp, Homo sapiens
gatgactgagcaaattgatctagaggtattcaaaacagtttagttgactgtcccaaactttctcagacctcttctgccactgacttccctgaaaagaccctttgcagccaggcacggtggctcatgcctgtaatcccagcatgttgggaggctgaggtgggcggatcacgaggtcaagagattgagaccatcctggccaacgtggtgaaacctcgtctctactaaaagtacaaaaattagctgggtgtggtggcacgtgcttgtagtcccagctagttgggaggctgaggcaggagaatcgcttgaactggggaggcggaggttgtagtgaaccaagatcatgtcactgcactccagcctggcaatagagcgagactctgtctcaaaaaaaaaccaaaaaaacaaaatcaacccttttgcatttttgtcctatcctgttttccgtccccttgagaccgtatcacacrttctttttcctctttggtgaccttctttgtctttcttgctgctcctgtacactgttgtttactcacactgcttttattctgagctctcatatctct

SEQ ID NO: 828554 - DNA, 559 bp, Homo sapiens
atttggtaaaaggaggattataaattacctcagcccattaactgtttacatgtttcactgcatagagtatggcctaatactttcatgacatctgtaggcattattgacctgcttctgttgtaattctttaaaaataactattaacagaaacgggaagaaaagaaatgaaagcaatatggaatgctgtgtggttgggtaaaacaaagtagagtggttttaagttcactgcactctgtttatcttctgttaaaagactagcttgcttattactgcaggtttttcctcaaaaaaggggggctgtattacaaaggagggaagcatataataaaagccttttatagagtgtagaatgagtaaaagcagctttagttccggaggtggtaaatggagaacagcattttctctgggaaagcactctcttgtgcctggctgggtgagctttgtccagttgacatcagcaaatacrtatggccatcctttcattcatggccccaaaccagagtgcagttaaatcgttcagggacagcaaattaaagtaagactccttttgccatggtta

SEQ ID NO: 828555 - DNA, 618 bp, Homo sapiens
atgatgagatctacatacaaagacctgataaagaatggcattcctcgtgctctggtatgcaaacagctcaacagatactaactaaaggaaagatcctgacaccaggatctgaatacgatctgacagatgataagccagatataaatagtattcttctgcaactgataaactgtaaggcaataactattttaagaaagaattctttatcatgaaaaatcttgattttttttttcttactgatttccactaagataaactatcactcaacttattactggagggggcttggggaaagctttctgtacttttttacaaagcatctcctatagatcatgaacctttggtcatcatgatttaaagaggcatattgactctttcaggctactgaggagtagtatagatccttgcacacctctgagtggtgaacctgcaacttgagatttattcactccacaaatatgcactaaaagtctcataggtgccaggcaagtcctggagttcttacttaacagagtgggctgctaggaagtgctagctttcacttgctgctgccatagggcacagtgcagagtaaataagatgcycccaaataacaaccttccagcactttctaggtct

SEQ ID NO: 828556 - DNA, 664 bp, Homo sapiens
cgcccccacccttgggctacagaattgaaggaggggacacatgaaagatgttcctagactcgggctggaggctggggacatccgagggcaaggacracgctgtccctgctcttgtttgcagaggagtgcacagggctcaccagcttcttgttgctgtttaagtgatagctttatggagatagaattcacatactgtgacgttgacctttttaaaatctacagttcaatggttttgctgtattcacaaagtgattgtattagggtcatccagagaaacagaaccaatagaaggtgtgtacatgtgtttagataaagagatttattattatgaggagttggctcacctcattacagaggttggcaagtgccaagattggcagagtaaatcagcaggctggagacacgggagagcccatgttgcggctctggtgtccccctgaaggcccaagacccaggagagccaatggcatcgttccagtcccgagacccaggaaaagcgcatgtgtcagtttgagtctgaagcaggaaaaatctgatgttccaggttgaaggcggttaagcgggaagaattctctctcactcaggccttgtgtcctcctattcagaccttcaggcctttgtcacaaaattacaaagacctgatcagaacaaaatctgagaaaaa

SEQ ID NO: 828557 - DNA, 659 bp, Homo sapiens
cggatttcaagagcactcctccattgggaaggccctgccctcgtctgtccctgcatttcctccacctggacttgcttaggccctcaggactgtcagcccagcccacggacctctccacgtgagctggactcccacctgcacaggtccctgtccgtgggcggccgggtctgggatgctgatggttttctcccatgccccggctccaacgtgtacatcctattccatggagaaagccaccgtccccccagagcgccaggttcctggcagctctgaacgctgctgcctccacgtggcctgcctttctctccccttcctggcctgatgaaattgtacttccactgctggggaagctccctggacactccttgtgtcccagccatcctgctcacggctcggtgagctccagaaagcagagcccgcaggttgtgtccctgggcctggctcccggcacagtctctggcacaatttaggggctaaactgtgtctgcccctggaggagaatgttcttgtacatccccatggacatccccctacctgtcccccagagccaggaccacgtccctgtgyatccagcaccagccatcaccgagatttagattgctcggtgacaaccgcctccccagccacatcctgtttgactcagctgagtgtgaacacat

SEQ ID NO: 828558 - DNA, 570 bp, Homo sapiens
tggccggctagtttttgtatttttagcagggaccggttttcaccatgttggccaggctggtcttgaactcctgacctcaagtgatctgcccacctcggcttcccaaagtgctgggattacaggtgtgagccgccacgcccagcctccagctctgccttgattttctcttaaggccgtgaggatgtccacgcctcctcctttcctcacggcccattgatgtctccagatgctctgcaaagccaccctcccctcgggagctccccagctggtgacgggggaccttttggggatcactgcccaggtagtcatgtaggtctgtgggccgtgcttccaggctggaccgagacccggtgcatggggtgcttctggtctgagctgaggcccctggaagccacagccaggaggcagcaagggacggctgtcatgtcccctctcccctgtctcccagggtccctgygggacagatttccctgcctgagcctcctggttgcccataccctggcctcccaaagcccagcctgaagccttaggcaccctacaacctgcttcctctagcagcctgccctgtct

SEQ ID NO: 828559 - DNA, 547 bp, Homo sapiens
atgaagcagctaggggaggcggatgctttggcacgagggtggcgtttctggtaatccgtagtgctgttgtctgtggctgcctttggctggcatctcacctcctcctggctgtcctgcagccacctgagggaggtcagcatgtcgccttcatcccaggacagtgtgaatgcagcagcgcaagcttgccagcgccgcactgcgggatctggaggcctttgctcctgagccctgcctctgtgtaatccctaaagcacggacytcttaggggcttccattcctccacctggaaaaaccttacaccgtttagggcttgaggcagggctagagcatggagacgttgctggaggaccaagggagaactgagcgcgtgttctcttggcctcagcctcgtgtgtgtgtttatgcatgggtactttgccatccacactggcttccacggctgggtgggagttgagttgagctcggcggctgcctttccaccctgcgggcctggttggggagtgtgaggatgcctgctggaagccaacgtgcacgaaagagttaatgg

SEQ ID NO: 828560 - DNA, 547 bp, Homo sapiens
atgaagcagctaggggaggcggatgctttggcacgagggtggcgtttctggtaatccgtagtgctgttgtctgtggctgcctttggctggcatctcacctcctcctggctgtcctgcagccacctgagggaggtcagcatgtcgccttcatcccaggacagtgtgaatgcagcagcgcaagcttgccagcgccgcactgcgggatctggaggcctttgctcctgagccctgcctctgtgtaatccctaaagcacggacctcttaggggcttccattcctccacctggaaaaaccttacaccgtttagggcttgaggcagggctagagcatggagacgttgctggaggaccaagggagaactgagcgcgtgttctcttggcctcagcctcgtgtgtgtgtttatgcatgggtactttgccatccacwctggcttccacggctgggtgggagttgagttgagctcggcggctgcctttccaccctgcgggcctggttggggagtgtgaggatgcctgctggaagccaacgtgcacgaaagagttaatgg

SEQ ID NO: 828561 - DNA, 634 bp, Homo sapiens
ccaatcacgcccactgacttcacatggcctatttccgtgtctccacccagagcctttcctagtgcccaagccctcggaaggctggaaggagtgarcagtgcagtccttggccaagaactgaagtataaaaaccccagctcccttacccaaccccaggtgggacaaggctgggggcacggtctgcagtctccccatgctgcccggtatgggggctgggcagccacctgtggtcacaatgagctgatgaggcaccctttattggctggattccctgcctggcccattcccacactcaggcatcccctggtgtcccctcccactgaaatccctgtctcaggacctgcttctggagggacacaaattagccctccagaattggcctgggctgcttggtggaggagggaggtggctcctggggcaggtggagcaggctccggatagggaggaggacacagttggggtgatggggaggggtgtgttctcaggaagcaaaaccgtccaaaaggaaaggcttaaaaataggcgcagtgaagctgagcggagcctgcaaagggaagccaggaaacagcagtgtcagtggagggcggcccccaggctccccacagagagccacatttgtttagggacagggaca

SEQ ID NO: 828562 - DNA, 571 bp, Homo sapiens
gaatgagcaggtctgcctagtgccagagcctgtggttggattttcagctgaggccaagagaaataaacaagcctcctccttccctctgcacgctacaggaagagcagctcgctggctgcaaggggaccctccaccctgcctatggggcacagcagcccacagcattccttccagaaatggagcactggcaggcctgggtccctgtaagatggaacacaaaggggtgggcagctgacctcaatagccagcccttgggattccaaaccttctcttatcccccaactttgtgatgttaatttctccctggataaagctctctaacaacctggcaagccagcaccagctgaaccagccccagcttgaaccagcagctttccccagcccagctacagtctcatccctccagaagggaaaagaagtcctacggattcctttacaaggaacctccagaatctgctatggtgtccgcaggggacaytggcaccaactctgggtttattaaatgtagtgggttcaacagtgtcccccaaaacgatatgtcttaagtcctaactcctggaacctgcgaaca

SEQ ID NO: 828563 - DNA, 626 bp, Homo sapiens
cccataatttctggttcagtaggtccagggtagagccttggtgtttctaacaagttcttcaggtgattgtcatgcatactaatggttgagacccacttacatatggctttccttatggtaaggcttacacagccagcatagagtagcccttctcattagatgcttaatcttgaaaatactaataaacacattaaactagatgccatacacagaacaaagcccacaaaagtctatcctctttttttaaaaaaaagaaaaaagtctttatcttctgtgtcagtggcatgggactaacacgtacagaaatgaaaaatatgccttctgcttttctacttttctttagcactgggaatttgctccaaatagtgtgcactatcttctgagcctgtggcagcggctggcagcctctgtgccgtatgtcaaagccacagcaggccccacatgctgggaaacttacactcctgaggtcaccaaagcctacatcacatcccggytggaatctgcgcacatcatactgaggtaaggaaacttagcctcattcattcccgcaccagtggcctgttggcacacttcctagagatcagacaccccattggcaaagaggtactcgaagcgtgtctcattgg

SEQ ID NO: 828564 - DNA, 615 bp, Homo sapiens
catttgagtgtgtgacaagctgtgcttagagatatggcccggccccagagcattccaggcttgtacaggcaaggatttaattttgttcttgcagaatctcctctttagcctctggaatcacagktgaaactctgtcatgtcattagcaaaacagacctccaccccagtaattgctgctcagcccctcacccagttgctgtgctccagggatgcccagcataggcattcactttctgttgctgatttcctctcgttatcccctcgaaggggaaagccccacttaaaaatgggcttattcctcccaggaaacatcacaccctttaagagtgttgagtctccaaaatctagtgctgctgtttgaactgtcttcagagttggagctcctaattggcccttttttatttttttttttacgttatacccctttggttacatttttccctttttaggagctcaatttatcaaagcacacactaggagccaaatatattacccagggctgtgtgcagagtgacattttgcctcctaccaactgtcccaaccctaaacactcatatccatgagctggtttaataatttaagatggaaaaagcaaagggggtctaaaggactctg

SEQ ID NO: 828565 - DNA, 622 bp, Homo sapiens
acacttagaagaaccaatagccgtgtaggtgtgttgtcaactgttttgttattgtctcccaactattgctaaggtttttcagaacctcacgttctcagcccagtattttggaaaattctttatgaagagtatgtatggtactggaatttacataaagtcttacattaattacgagtcttacagctgtcgatcctaatgctgtctctacagtgtgaatccctagaagtgatgaagagacacagcagttaatcaagataggagggattggtgataaccagcccagtctcagcaatttcagtaaaaatccagtaccatccccacattgtgcaaaaatgtggcgttaatgacctgttcagcaggtgttacttctctcctttcctaggatggcctgctttcttcctttgtgaaactttggctcaaaaaacatgccactttaggatgtgagggatggtaaaataactatagtcatttcctgcaacaagcttgtaaatgaaaactattaggaatattcaaaaataaatgtattgctatgctgcacactgacttttttgttacacagtttgctaggtakataggtagcaacaaatctacaatttagtatcaaccctgttcttcaggtgaa

SEQ ID NO: 828566 - DNA, 477 bp, Homo sapiens
tagtcatcctcatgttgcttgtggcatctagcatagtgtcttgtacatagtgggcacttagaatgaacaaatgatttcatgagtggctactcagttctgtggtgcagtaaagtgtgaggtcagagaggtgtgggcaggcagggacactggagagggcttggtggagctgctggggactgaacctcactggggactttcacgatccagacagttagtgggatacagagcaccttgggcagaggagtggccccagcaaagacctagaggcagaaatgcacagctgtggggagggatgattagaattctttttttcctgaaaacatttactctgcaagaaaagcgaaggaatggtkttgttgttgttgttgttgttgtttttgagaagttttcagggaaagtgattgttctcagtgcaaggccagtatcagccatggtgtagagatggagagagcactcatggaaaagggggaggttagg

SEQ ID NO: 828567 - DNA, 554 bp, Homo sapiens
ctcccaagtagctgggactataggcasacaccaccacgtcctgctagtttttaaattgtttatagagacagagcttcatcatgttgccgaggctggtttaaactcctggactcgagccgtctgcccacctttgcctcacaaactgttgggcttacaggcgtgagccactgcacctgacctttgccacattttcgatctgtatcattttgcttttctttgggggactgcgctcccgtgttcctctatgtgcctctactgtagcgtaaccatgctgtgttgaaataatctgtgtctgtttcccccagcaacattcttagcacctccaggacagagacaggacaggattgtgacatacagcaagaaaacagcatttccaggagggaggggtatctagggagaagtgcctgtcaggagatccttggcaagatgacagtgtgtcctggaggaaatgtgttattcctccctttgaaagccagggagcagggtgcctcctcatgaggaggcctagcatgaacctgacactcagaatatctgttcccatgcgggcaggggct

SEQ ID NO: 828568 - DNA, 566 bp, Homo sapiens
catctcctctaacaatgtatgagagttccagtttgtctaacttcatgacaactcttgctactctccgactttttaatcctagccatcatagtgtgtgtgaagtggtgtttcattgtgatttgaattggcatctctctgatgagtaatgatgttgagtatttttaatgtgtttgtcggccatatgtatatcttatttggagacatgtctattcagattcttaaaattgggttgtctttttactatcgagttgtaagcattctctaaatacatattctaaatataagtcccttgtcagatatgttatttgaatttttttttcttccattttgtatttttatctttcttgattgggcaaaaatgttttaaattttgatgaagttcagtttgtcaatttttttctttggttgcttgtacttttggtgtcacatctaagaaaccattatcaactccaagttcattaagacttaagcctattttcttctaarggttttatagttttagcctttatattttggtctgatacccattttgagttagttttgtgtatggtatgaggtaggggctc

SEQ ID NO: 828569 - DNA, 609 bp, Homo sapiens
ctccaagacctgccgcagtcttcccctcccttgcgcttcggcctcctctcctgctactctcttccccactctccgcacttcaggtgccctggtgttctttctgttcctcacacagtttaagctcgctcccacctcaggtcctttacctctgagttccctctgcaagggacagtgttccctcagagcttccaaaggctagctctgtcatattcaaatctcagcttatcctcacctcagaagtcaccaaatctaaaatcattcccccatttccacatcagaccaatttatttaatttgcctgttttgttttggagtttcttttggaaactttattatattgataatttatgtgttttcttgttgtctatttgttgtctataatataaaatccatgagggtcggggtttgactgtctcgtttactgcttttttttttttttttttttttttaaacatccctggacactgaaatactgccctctaaagaccacatttataattatcaaacttaatttagtagtcttgccttatccgkgggggatgtgtcccaagaccctcagtggatgcctgaaaccatcaatagtactaacccctatatacactatgctttt

SEQ ID NO: 828570 - DNA, 567 bp, Homo sapiens
ggccatttggagatgagctatatacggtgggccatcattctgctacatggatrtgggcagccatcttgtaaatatgtacttttggtcctaagtgaaaaaatttttaaatatgatagatgtgttcacagaaacttacctccactactggaaaatcaactcaaaaactatgaatgatagaccatcagagtgatagctgagctaatttttcattccccacctcccaaggccctctgcatcatcttagggaccatcccctcaaacagttcatcaattttccaaacctttttgtctctagaacctgtcttttgctttttcttctcttttgaatcttatacattaactcataaattatatgatactgaattccactatccttctcaatatttcatatcaggtacattcaaatgtattagaataagttttttaaaaagtaatatttccttttttggggggggggggacggggtctcactttgtcacccaggctggagtgcagtggcgcgatcttggctccctacagcctctatgtcctgggctcaagcgatcctcacacctcagccacccaagt

SEQ ID NO: 828571 - DNA, 624 bp, Homo sapiens
gatccttacaagtaggattcctgatctttttgaattttgggcgttgctctcctccaaatttgaaaaagttcatactcccagtattgagatttcrtcacactcttgacaatattaagtgttaccaaatttttaaaattttcactgaggacatctgcttccaggaaactgaagtagatgtatttttctctattctgactgctaagtaccactaaaaaccctggacataatatatattaagcaaacataagactctgaaaccagccagggactttggaatctgaggaacacatggaatgattccatttcagtgtcagtgaagaccaagtgaggaaactgaactcccatccagcagtaataaggtggcccttcctctcccggctagggtggtattaaatgaggtctaagggagagtcaagaccatcacctagcagtaacaaggcccccttcactgcactgtcagtggagacgatacagaaaacagaattcctacccttgtctaccccaccctcaggtgtcactggaggacaagcagggcacctggacttttacctcggcctggaagtaataaggtggctaccactggaccctgccagaggagtgtttgagaaagctagctaaaacaga

SEQ ID NO: 828572 - DNA, 593 bp, Homo sapiens
tcttattggcaccaaaactcatcagaggactttttattatctgagagtgacagggaacattatggggcttgcctgatgggatcagatggggcaataaaggagcaaattaacttgtcttctgctcacagcctatcaagcccagtttgcctaataaaaaacagccagaagttcttactgtgggcttttacaaacatttttacaacctcatctcatttgatcctcacaaacccctacaaggtgggaactattaccatacctcttttatcaaagaggaaactgaggcttagaagagttacttgccaaggtcacagagcacttaagtgacaaacgtggcattatccctagtagtctctggaattcatgcttttttgtcattgtgctttattgatagtgactcaataaatatttattaattaataaatacatgtcaagtgtaagcatctttgattcagtggaaagaaggcctttggccctgccccrgctcaggctcactgttggctgattcactgtgtttcagaagaccagctctgatttatcaaccaattacataattttatcccagaagaggggatgggaagaagaaactagaagcc

SEQ ID NO: 828573 - DNA, 613 bp, Homo sapiens
tgcctaattaatcttttgaaatcctatgtaaaagaagagttcttgtacacagasgagaggacagagaagagtttttattacactctcaaaaatatttgtgacacaaaatggttactacttactattccacccctccatttcaactttctatatctcattatttacaactattgagcactagcctcaaccaagatcaattacaatttaaattctgcaatttttgaatgcagatattgttggtggtgataatattaaaaacaatgatgagaatgataataacagtataagtgggtacttaccatgccaggttatctattaagtccttacacaaccttcaaaataatccttataaatataatttctattatacaagtaagaaaactgaaacattgaaaaattaagtaacttattcaatattttatagctagtaaatggtgaagccaggatctggaccgaaaaagtccaactttataggtttattctcagcattaggttatgcaacctcccaggattccttattttttagtacacaaacatctaaattttgggaatttttggttaccataggataaagacggcagcctatagctaaatttccccaaataatctccaa

SEQ ID NO: 828574 - DNA, 612 bp, Homo sapiens
catactatatgattccatttatatgacattctagaaaagaaaaaatctatagtggatgctaaggtttggttatgggctagggaggtaattataaaaaggcmtgagggaacttttttgcattacggaatggtttacatttgattgtagtggtggacccattactgtacactttgaattaactgcgtacatctgaattgattgtgtacaaaattttttataactacacacccaaagagtgaaaaatttactttatgtaaatttcccatcaataaacttgataaatccctaatcacattcttctgtttaatcacagacttctacaatctatttctagcttttcatacattttattttctcaaagcactatatatgcaataaaaggtctttcattatggctagtgagtcactgttttcagtacatttattatttctttctttgtgtaattatagaacatatgatattaaagcttttaccactgatgttaagactctcacttcctgagatggtttggctgtgtcaccacccaaaatctcatcttgaattgtaatccccataatcaccacatgtcaaggtgggaccaggtggaagtaactggatggtggggggtggtt

SEQ ID NO: 828575 - DNA, 598 bp, Homo sapiens
gaaaaaggaaaaagctacttgtttctttgagttaggcaccaaggcaaaatcataatttatgatgtaggtgtgttgaaaatttttggattgttgtatttatatagcatatttatgctctagagcattcgtgttgtggtttacaatttaagcatgtgattaagacagaatagccactgaacttacaatagggcacagcagtattacaaaataactacacaaggttataaattaaaacctttgtttacgtaatttatatgctctttagagttaaactttaaaaaaaaagcttctaagtttctgcccagttttatgtcttgtaaaaaaaaaaaagctatatgtatccattttgatcagtaaagtcaatatatgatcaagtgggaggtggtcttctgttatccatatcactacttcatgtaattgggattataaattattttaatgtgttcttataccgtaatatcaatatacttaattatgttagaaaaacattattttatgcaagattgggtgcattacagaatraggatttctctttattagcagtagctctaaaaatagctttaagcccaaaaataatttctttacaaattctcagaat

SEQ ID NO: 828576 - DNA, 616 bp, Homo sapiens
gtggagatcaacaaaatagtatctatcacacaaatttgatttgaattttactygctcactgtttattatatctatgtgtgtgggtgtgtgttggtaagttgaaattggcatgctcaggatatagatatgtctgtgtatgtatatatgtatgttattcttttagattacacagtttatatcaaaatcaagcatcagttaaattataacccccaattactgtgtaagaaagcctgccaaatctactctgacattatacttatatatggccttcaaggagtagggccagtgctgatcctcaagggtgctagcaaattcttcatagtagtctaaagtctagtagtatggaaggatatgatagacacaaagacatatttcatgctgttcttttaaataaaataccatttgatctcggagcagaaatataagttttcttaagttttcatatttcccaattaacagggttacaaggggaagtagaagaaatattaaacaaaattttccaaagtggcattaattattaaagtaaatgacacaaatgactacataaataagtaaaatacataggaatatctcatccttcttccatttccaattctaccataaggattaaagtcca

SEQ ID NO: 828577 - DNA, 566 bp, Homo sapiens
ctttattgtttgcttgtttaatatttgatrtaactgtctatactctttcatgcccacttactttgctctctcaatcttctagcacatttatacttagtttctttcagttccttgaatactctttgctttatctttcttttgtgacttccgcatgtgagtttctaggcctcttgccttcactcattgccattcacccttcaggtttccattgagcctcccttcccctagaaaccttactggcaccatttccaacctctcagggcccaagttaggtaattctctaatatactttgacttcccttattggaggaattatcaccaatacgaatactggacttttaattgtctctcttcatctcaatatcgtaagctctaataagacaaaaaaatttgccttgtcaataattaagcccaaagatcacaataaaagttaaatacgtgttaatggaagtgaatattttaaaaattatatattaaacttaaaaaaaattaaaacatacaaagatatcccaattctgactctttgtattcattataatgtatgtcttaatttacataaattataa

SEQ ID NO: 828578 - DNA, 589 bp, Homo sapiens
atcgtatatgtgccatggtagtgatttatccaatggatctgggcaaagtaaactaaaaaccttttgggaaggattcagcattctagatgccattaagaacatttgtgattcatggcagaaggtcagaagakctatataaacaggagtttggaaggagttccaactctcattgataactttgaggggttcaagatgttgtcactagaggaagtaactacagatgtggtagaaatattaatagaaagcaaactagaattagaaatggagcctgaagatgtgactgaattgctgcaatctcatgataaaccttgaaaagatgaggagttgcttcttatggatgagcaaagaatgtgatttcttaagatgaagtctactcctggtgcagatgctgtgaacattgttgaaatgacaacaaaggattttaaattgtgcataaacgtagctgataaagcagcaacggggtttgagaaggttgaccccaatttcaaagaagttctactgtgggtaaaatgctaccaaacagcatcacatgctacagagaaattttttatgtgtgtgaaaggaagagtcaattgctgcagcatacttt

SEQ ID NO: 828579 - DNA, 573 bp, Homo sapiens
gcaaatgcccatgctaggatgtgagtcccatgtcagcaaggaaccttgtctatccctagtctctggctcattgtaggcactcaatacatttttggtggaagaataaatgaattatgccatctctggcacccacacttggtgcagtaacaacagcttctaaaatcctacactcttttgacaccctttgctatgtagacctattttccatttcatctcctctatcatccttcaatcttaccacccattaagcagacagtctctcctctctgtatattctgatgagccttcgtctccctccatgttcttttcccgttctcctccttctcccttggcaggattatcactgtcatatgtctaaagtctgatgccactcaaataccagcacccccaccgcccaaggatgacttgatgtctcagctcacactgacttgtaggttttctgggttcttctggtctagcagttggctgtctgtgctttcatgttgctaattccagacttgcctgctatttytttttcttttttttttttttgagacagagtcttgctctcttgcccgggctggagtgcagtgc

SEQ ID NO: 828580 - DNA, 565 bp, Homo sapiens
gctctgagcgtgttccagcttggccaggaggttgaacttgtctgaagtaccagagaggagatcctgtgggcaaagcacaaactcacatttggccccagctggaggctgtggcagtgtgagcttgggaaaccataaggtattgaggaagaaaccagtcaggcctgagttcagactgagctcccgaggcagagcgtcagacctgggccgaaccctcttctggaagttcagaacagggtctggcatgtgcttttttcacagctgtttcccacacagattttgagaatacgaagttttgacacaacattttttttaatgtaaaatgcattagggagccccctataattaacgcactgggagtctttgagtgaagtgaagaacctgtgaggcagttgacctcatccctcacactttacctggatgtccatgagtcaggtgtgctttyaacagaactcacctccggcgagtcctgggatggagagaaaactctcctgtgcccctgccctgcccaatattctgtgattccaaatgttctgctttggggtttatgtaaagcaaggggcccctg

SEQ ID NO: 828581 - DNA, 369 bp, Homo sapiens
acacttatatttactttcacactgtgggtctgttggatttccattctcctgggggagctcaggctggacacaagggaatactgattggctgatgcccgggtaggggggcatcgcatckggcactgccagcacagactggaggtgcctggcgatgtctctgatcttatctagtcaggacctcagacttgcttcttgcaggtggtctctccctgagaggacaggctttgcctctcccccttgaaatcttgccaggacctagacagatctccttgttctcctcacacagagcagaaagccagctgaagactatgggagaggagaaaggaaacaggaaggggagcctccgtaaaaggggaaggagctagttct

SEQ ID NO: 828582 - DNA, 608 bp, Homo sapiens
aatggctgtgcatcctccacacatgtataagtaggcattctcctttcttgaagccccttctttcctcgcctccaggacaacyccctctcctgattttctaccctgtctctggccactccactgtgggatactctttgtcccagtaccctgcgaatgtcaatgctcctggctcagtccttggcctctcctctgcatctctaccctccttcttttttttttttttttttttgagacggagtttcactcttgtcacccaggctggtgtgcaatgatgtgatctcggctcactgcaacctccacctctggggttcaagcaattctcctgcctcagcctcctgagtagctgggattacaggcgtgtgccaacacacccggctaattattgtatttttagtagagacggtgttttgccatgttggccaagctggtctcgaactcctgattgcaggtgatccacctgcctcggcctcccaaaatgctggaattacaggtgtgagccaccacgcctggcctctatactttttaagagatcccccctcacctaggcatccccctttccccccatcctgaaagccccagaatccctggatccagccctctcctgagct

SEQ ID NO: 828583 - DNA, 536 bp, Homo sapiens
gacaggctttgtagtggcaagtgagttaatgtacttcagttgtacagctgcatgtggtggcaggctttaagtcaaaatccgccacttattttagtccgcatgtgrcacacccattattttatttacttccatcaatgcgtctttcccacactgcacacttgtctcagtcacagttttggtaagcccacaagctaagcctagccaaaatgagtaaaaatcaaatgtcatcggagagcttctttgaaaagggttaaagacccaatgatgagacagcagaagaccctaagattgccaacaaaaagaaagctgcatttaaagagaataccaagagtcctacttaaattacaggttcattgcaacagatagttcacattctccaagaccactctgtacaatgtgtggtgaccagttatccaaggaagtcatgaaaccaacaaaactgctttgccacatagtgaccaagcaccctgcattaaaagacacaacttcagcgttatttaaaagaaaacaaaaacataatgaacagaagcaattgt

SEQ ID NO: 828584 - DNA, 536 bp, Homo sapiens
gacaggctttgtagtggcaagtgagttaatgtacttcagttgtacagctgcatgtggtggcaggctttaagtcaaaatccgccacttattttagtccgcatgtgacacacccattattttatttacttccatcaatgcgtctttcccacactgcacacttgtctcagtcacagttttggtaagcccacaagctaagcctagccaaaatgagtaaaaatcaaatgtcatcggagagcttctttgaaaagggttaaagacccaatgatgagacagcagaagaccctaagattgccaacaaaaagaaagctgcatttaaagagaataccaagagtcctacttaaattacaggttcattgcaacagatagttcacattctccaagaccactctgtacaatgtgtggtgaccagttatccaaggaagycatgaaaccaacaaaactgctttgccacatagtgaccaagcaccctgcattaaaagacacaacttcagcgttatttaaaagaaaacaaaaacataatgaacagaagcaattgt

SEQ ID NO: 828585 - DNA, 607 bp, Homo sapiens
cacacacacacacacacacacatatatacacacacacaaacaatggaatacagccatccctcagtatccttgggggactggttccaggacgacaatcctcagatgctcaagtcccacagtcagccccgcagaacctaaggatgtgaacagttggtcctccgtatccacaagttgtgcattgcttaaacactgttattttccatccaaggttggttgaatctgtagatgcgaaagctaactgtactactcagcccttagaaagatggaaatcctgccaattacaacaacatggatggtcctgcagaactttatgctacatgaaataagccagacacagaaagacacatgctacgtgatctcacttacatgtggaatctaaataggcaaacacatgaagcacagagtagaatggtggttgccaggcgttaggggagacagtaatggggaggtgttggttaaagggtaccaagtttcagttatatgaaataaatatctggaggtctaccgtacagtatagagcmtatgattaacaatactgcgttgtacacttaaaaattaaccaacagggaagatctcatgtaaagtgctcttaccacaaaaggaaaaa

SEQ ID NO: 828586 - DNA, 607 bp, Homo sapiens
cacacacacacacacacacacatatatacacacacacaaacaatggaatacagccatccctcagtatccttgggggactggttccaggacgacaatcctcagatgctcaagtcccacagtcagccccgcagaacctaaggatgtgaacagttggtcctccgtatccacaagttgtgcattgcttaaacactgttattttccatccaaggttggttgaatctgtagatgcgaaagctaactgtactactcagcccttagaaagatggaaatcctgccaattacaacaacatggatggtcctgcagaactttatgctacatgaaataagccagacacagaaagacacatgctacgtgatctcacttacatgtggaatctaaataggcaaacacatgaagcacagagtagaatggtggttgccaggcgttaggggagacagtaatggggaggtgttggttaaagggtaccaagtttcagttatatgaaataaatatctggaggtctaccgtacagtatagagcatatgattaacaatactgcgttgtayacttaaaaattaaccaacagggaagatctcatgtaaagtgctcttaccacaaaaggaaaaa

SEQ ID NO: 828587 - DNA, 641 bp, Homo sapiens
caaagtaatcttttaaaatgcaaactgtgtaggccgggcgcggtggctcacgcctgtaatcccagcactttgggaggccgaggygggcggatcacgaggtcaggagatcgagaccatcctggctaacgctgtgtatttttttatactgcagaagattatacctagcacttagcccaacacctgacatatatcaagtactcaatttgttgaaagactgcaatttctaagcattttaatttactgtcatgctcagatactgtatttctgagaaaagaaatccaaaaatatattaagtaacactatgaattgagaacactggtgtctcaacttttaatcatgcattcttttccataaaaatgagagcaggtgctcccgatttgtgcgtgtctgtgtgtgttttaaaacactacaaaatccacagaaattgaaaacacacaaaaaacaatgaaaaataataaatattaagccaaaatataagttctggttttgtctttctgcacccctagcgtacgtcttgagcattttctagatgtccaccccccgccaccttggaagactatgcatgtagtgaatattttctaattttagagcataggctccagggtcaggctgcctgcgttcaaatcctggctcacctttta

SEQ ID NO: 828588 - DNA, 628 bp, Homo sapiens
cagaagattatacctagcacttagcccaacacctgacatayatcaagtactcaatttgttgaaagactgcaatttctaagcattttaatttactgtcatgctcagatactgtatttctgagaaaagaaatccaaaaatatattaagtaacactatgaattgagaacactggtgtctcaacttttaatcatgcattcttttccataaaaatgagagcaggtgctcccgatttgtgcgtgtctgtgtgtgttttaaaacactacaaaatccacagaaattgaaaacacacaaaaaacaatgaaaaataataaatattaagccaaaatataagttctggttttgtctttctgcacccctagcgtacgtcttgagcattttctagatgtccaccccccgccaccttggaagactatgcatgtagtgaatattttctaattttagagcataggctccagggtcaggctgcctgcgttcaaatcctggctcaccttttaacatggtgtgacctgggacaaatcattcatctatcatggtcctaagtttctgcatttgtgaaatggagacaacaacagtttgtgcctcacagatgggtggcgattaaaattatgtaatgtgtgaaatgtgtttag

SEQ ID NO: 828589 - DNA, 620 bp, Homo sapiens
gtgtaactagcaaatccaggttctcctgtgacagcttctccatggaaacctgagtcccctgaggcaatggaaaggagggtgaggaggtgaatgagccccaracagggtaacaggagccctgggttctgcttctacctctgccaccatgtggccaggtgacaggctaggtgagccaaaacccccctgggccacagggttgtcacctgcagccctggcgtcccacctgttccctccctgtgttggtgttgaggggcctctctgtgccaggcgcttttccagtatcattaagtttgttgttgttgttgttgtgttgttgttgttgttttgcctttcctccttgaatttcctcactagactgggacctctgagaagcactgtcatttacaggctgggttcccagtaacccactggatcacaaggggagagctgctgaggccaggaggaggatgtggaaggctgggtcagccagcacaggcgtcactcccaacagggtcctgggagaaggggctcagcatttcctgaaggcagatgactctataaatagaccaggggatgggaaaaggattcgatcatcccattcctcctgtcagctcagctcctccttctgctcatccggactc

SEQ ID NO: 828590 - DNA, 652 bp, Homo sapiens
atgttccatgttagaaactaactaacaaaacagagyatcactcacactctcctctggcctttccaagctgctctctgaggcaccttcataggcgtccacctctggatgtggaacactgagagtagtgtctaagaagaaaagcaaaaacatatgcatgaattcagtcctcgattaagtcagaattcctatcaggaaataaggaactgacttcaaaaaccattcctataaatagtttgttttattgtcctggaaattcggtgcattctaacctcaggacatatttgtatggagccttctcagaacaagaaataattgtggtacgttcaacaagcatatattgagcacctactatatgccagactctgcacaagacactaggaacacaaagacaatattcctctacttaaggagctatctagtaaaggggacacatactaaaagaagtaactcctctaccagagaggagaagtgggtaaaggttggaaattggttgtgaattgacaagtgttaaaactggaccttatcatgttattctatttttgtagatgtttgaaatttctaacacagagaagtttgtggggttttttaattaaaaataaagaaatgaattaccaatttacaagaaatatactgggcaaaggaacatgttaaa

SEQ ID NO: 828591 - DNA, 623 bp, Homo sapiens
gatgcatttttttacctcctgttgcagctattcagcatctctctttaaatttgcatgctaaagatattcaactaccatccctctccctctttttcctattctaaagagaaattgattaggagaacaaaactccacatgtcttgagaaattatttttgaaagccacagaaggggtggtataacaagatacttattagaaacgtaaaattgaaatcaataattttgtactaacattcaaattataacttctactaggatgtatactaattaagagtataaactctgaaataagatccaattttaacttttagcgtttgtaaccttgggcaattgttatttgcctctctaagtcttaatttcttcactggtaaaatgagaatagcaataatattttataggtttgctatatgatttaaatgtcatagtgtgtgtaggtgctacgaactaagtaatcaaaaaagctatgctattataaataacaaagcacatgcytgccaaagatgccctctgtgccataaactgtcacataataggccctcagaaattttatcagtggcctagaaatgtgctccctgggaagcctgggtaaagtaaaaatgtcattaattattgtcagatgagttt

SEQ ID NO: 828592 - DNA, 504 bp, Homo sapiens
ttaactgcctaagtaggggaattagagcattaatgagtttgatacatactgctacttaacagtagtacctatttaggtttagactttggtgtgatggattgcttaraaattttgttgccaaatcaaaggaaaacagaagacaaacttgctacagctttcagatattaagttgttccaaaaacaagcaagcgtgcaacacacacacattcacacactcacacacttagtgtgtagcagctagttgttttcactctgtctcaagatttttatttcaaaaattgaaattgcagactgtcttattcaataagaatatcatacttttttttaaatgacaaaagctgatcagacacactcttaacatcatggttagatggactgtttgaatggtagaatgtgactgccaacaaaggaagtatacaaataaacaaatatgttcttgcaaaaaacaaaaagtccagagaatcgaatgatcagtgcctcagtcgttacttccttttcacttat

SEQ ID NO: 828593 - DNA, 634 bp, Homo sapiens
catcatcttttctcacttggcatacagaaaccttcaaagtcaccacctttccattatcatcactgaacatagtcacaggccagaggttgtgtgtgtgtttcaaatattggcaagagcatatccgacattcttcatgctaaactttttttgaaaacctaacacatcttcacttctcttcacttctgttcaatgctcctcaagaaggtgattttatatttactctacatttatctaaaaataccctgattatatggttgaattaatgaagtcacatttgggggaaagaacgtggcataaacgttcttttttgtgagaatttaagctggaagattagcagaacaactatcaaggaatgataaaatcttgcagttattattcattccagtttccctgtagtgagcatgagccactggcacaaaatgtttgtgaaaccaattagaaaacatgatcctggtgattcatgcttttttgttagcatagcaatggattggtaagaaattcactccttgaaaacagcaacgacgcgagcttatgcctatcgcagcaagtttatatttatgcatgcctgctgcattagcrcatcccaacacagttattctgtccttggcattcttaattcctccagggtctgtct

SEQ ID NO: 828594 - DNA, 630 bp, Homo sapiens
ctattgctgcagtcaaggtaataaacatatcaatcaccttgaaaagtttctttgtgtcccccttttgcatggaaagtgcrtttaacatgaaatctacacaaatttttagatgcacaataccattttgttaaccattggtactgttgtatagcacgtgtccagaacttactcattgtccatcacttttaatgtgtaaatctctaaccattgcatctttcctgcttcttgcctttcctttatttcaaattatcacagcctccttacacatctgaaattatttccaaacaaacttattcgtttcgtatatcatctcagattaggccaaactgacgtctattaaattctttgggctaatgctaactaaattttgtttgcaatatttaacccactatttagagttaatatttgcttctaatgaacccaaagacacagatgctgaagggaccataacctagttgaatagtgcaaagtttacttgacttgaaattctaacatcagcactcaaatgcaatctctgctgcataagatatatgaacttgggttcataagatgaccccacaaaattgtttcttatttataccagggagataatattatttccttcacaatgaagcatttttaaggatcaga

SEQ ID NO: 828595 - DNA, 351 bp, Homo sapiens
tatacaaggtgtgtgtatattattcatgaagacactaatgtgctacgttgacmtgcatgatttagatgcattaaaattaatatgtaatggaaaactcttaaaaatatttttgtacaatttattttatttttgagacagggtctagctctgttgcctaggctggagggtagtggcgtgatctctgctcactgcaacctccaactcctgggttcaagccattcttccacttcagcctcccaagtagctgggaccacaggcacataccaccacacccagttaatttttgtatttttagtagagacaaggtttctccacgtcgttcaagctgggcttgaactcttgggctcaagt

SEQ ID NO: 828596 - DNA, 635 bp, Homo sapiens
ttatatgcactaaatcggaagacaaatggccgtgctggatactctcccatttgcacttacaggccacgccatgctccatcctccccatcctgcctgggaacctgaccaatgtggctaaaccagcaggctccctggctgccagcttctggctggttgagccaatgggaagcatgagaggagagccgagggtggggagacagtcagatcagggtttctgtcctcagggctccctccctggcaggtggtggcaggagtggctgcattcccctctgaaggctccttcaagcctctcagcaaacagctcccatctccaagtccagccacctgttccatcctctcctctgtaggcccagcagtgggaatgacccaccactattgccagcctcagcatactgaagcaccccttactggattccctaaattctatgcacatgtttattaaatgctcctcaattacccagtttcaatgagccagcggtgtcttgctgttatcttgactgatacaatagtgttktgtggctaacgacacaggtcttggaggaaaaccatgtatgggtttgaatctagctctgcatccttgcaggggtgtctgatcctgggtgactcagttaaccttctgggcttcaatattcctc

SEQ ID NO: 828597 - DNA, 545 bp, Homo sapiens
cccatcacaggctggggaaggggagggggaactagttctgatgcccacacatggaagagggcccctaaattctgtcctatggtcacacagccatgctgctccctgccccactcattcttcatcccactccttacaccccctgcactctttccctccatgtcacctgaggccaggagcagcagcagcacaggtggaagcagcaggtgtggaccccaccccaggccattccagcccaaatctgtttctgacagcggaggagaggagaaaaaagggagccctctcaggagaaggagtcagacgctgggtctgattctgccccaggttcccagcgtctctcagctggtaaaattgaggaagtcaatgtcttgctggggaaatggtcggcctgggagggcgggctctgcagaccaggggaggaggggcagccaggccttgaaaggggccaccagctacagggtctgtctctgggcctgggcacctcagccytgctgtgttgctctgccgcctttcactgaacttctccccatgtctgctgctttatgcct

SEQ ID NO: 828598 - DNA, 534 bp, Homo sapiens
agatgttagccccatgcttcctgtgtagcctgcagcaaacatctagccaattaaacctcttttctttataaattatccagtctcaggtrtttctttatagcaatgcaagaatgacctaatacattggccactacaaaaatgcacttaagtacatataccattgacactattgagcagccacacaaacaaatctgcataataaccagctaacactgtgataacacgatcaaatccacacatatcaatattaactctgaatgtgaaagggctaaatatcccaattaaaagtcacagagtggcaaattggataaagaagcaacactcaatggtgtgctatcttcaagagacttatctcacacgcactgagacctatcagctcaaagtaaaaagatggagaaaaggtggccacgcacacacaaaacagaaaaagcagaggttgctatctaatttcagacaaaacagaacttaagccaacacagatcaaaaaagacacagaacattacatattggggaaaagttcaattcaacacgaag

SEQ ID NO: 828599 - DNA, 653 bp, Homo sapiens
tgtctttaaaaagtaaccttgtgtaggccgggcgtggtgactcacacctgtaatcccagcactttggaatgccgaggtgggcggaatgcttgaggtcaggagttcaagmccagcctggccaacgtggtgaaaccccgtctctactaaaaacacacaaaaaattacccgggtgtggtggggagcgcctgtaatcccagctactcacaggaggctgaggcacgagaatcgcttgagccaaaaaggcggaggttgcagcgagccgagaccttgccacctcactccagcctgggtgacggagtgagactctgtctcgaaaaaaaaaagcaactttgctttctttttttttttttttgtaatagtgcacttactgttgaatgaatggcattttccccctacaaaacttaaatggctaagggtttatgatagaattctttcataatttaaaagtaccatgattgaactgattattgtgtaagtagctgatgtctgtataattgggtcttgttggctgggtgtggtggctcaggcctgtaatcagcactttgggaggccgaggtgggcggatcacatgaggtcaggagttggagaacatcctggccaacatggcgaaaccccgtctctactaaaaatacaaaaattagctgggcgtggtg

SEQ ID NO: 828600 - DNA, 569 bp, Homo sapiens
agtccatgtttaagtgaacaaaggcctaaagcaatcagggtactttaggcatagaattaacattttatgaattgtatgaacatttggaattgttatttaataatcatggaaattactaaaatggattaggaaggtcaagtatgtttttaaaattgaatacttccgcttccttaaaaaaaacccaaaacaatcaagaataaaacttgtttttctgcatctattcttattaaatataatttaatatcttttatctgagaataacatttaattttgtatatttaggaagaactcgatctgaattaatattgactcaatagcttgtacctttctacaccttactgtttatgctctatcagcctgtcatttattctgcttatcaccatcaccatgccatttatttcaccaaaatttattgagcactggattagtcagcttgagctgccataataaaatgycatagactggatgacttaaccagcagaaatgtattttctcatattgtggaagctagaagtctaagatcaaggtgccatcagcgttggtttttgatgagacctctcttcctggtg

SEQ ID NO: 828601 - DNA, 558 bp, Homo sapiens
tgtgaaaaatttggcaaattaattaacctcttcacatattagtttcctatttgtaaaatgaagatgataaccacagcacctgtcttatggggttgttaataagttaaacacatggagtgttcagatcacagcctggcccaagataggtgcctaactaatacaataactaagtgtttactgttattattactatgggaactgggatttaaaaagttatccctgccctcatggcacttaaaataaaaggaaaggcaggcatgagccacaatctgtaaagaaggaattaactagatacgagagtgagagtgcttggaaggagaatgaccagttgttattaggttgtatgaaaacgtggttctaacaaggatctgtcaggacagagtgatccaggacggcaggaatcacttagcaaaagccatagagtagcaagaaccwggtgcaggagtctcaacatcgagattctagccccatccctgcctccaaactaaactatggtatgccaaggcaggtccttctcctctctgaacctcagttgccccacatgaaaaataagaggct

SEQ ID NO: 828602 - DNA, 564 bp, Homo sapiens
cagcatttgcttggcttctggtgaggactcaggaagcttacaatcatggcggaaggttaacrgggagcaggcatgtcacacggcaagagagagaaagcaagagagattccaagctcttttaaacaaccagctctcacatgaactcagagtgagaactcaattattaccatggggagggcaccaagccgttcatgagggatccacccacttgagccaaacacctcccaccaggcctacctccaacatcggaggtcacatttcaagagtaatttggagcagatgaagcatccaaactatatcattttgaccctgggtctccaaatctcatgttcttttcacattgcaaaattcattaatctcttcccaatagtcaccaaaagtcacaacttattccagcatcactcaaaaatccaaagtctgaaagcaagttccttctacctattaacttgtaaaattaaaacaagttatttactcccaagatacaatggcagtacagacattgggtaaacatttccattccaaaagggataaatcagctaaaagataggggcaataggccccaag

SEQ ID NO: 828603 - DNA, 560 bp, Homo sapiens
ttggaaacaggtagcctgaatttgaaacaagctttgggaacacagcccactcgtaaatgagagacacctaactctcccatacccacaactctggaaaatgaagactttgggtttccttagcatttttggrtctgccctatattaatgtctaagaaacaccacttgtgtttctccacctttctgccaccactcttgccaagccaacatcgtctcccacttggactattgcatggcccccgaagtaatcaccttgttcatgctctttgcatatttcagtcctttgtccatacaatcagccagagtcattttttaaaagctattttctgatcctattactacccttcttaaatttttctaatggcttcccaaagcacttagagtgaaatctaagcttcttatcacagcccttctggcttcctttccagctcatctcgtattgcttgtttcctctgctccaagcatcctggcttgcttcgtttttctagcaagccaagtcctttcttacctcctgctctttgtagttagccagagtaatcacaggaccaccctaatttgttttt

SEQ ID NO: 828604 - DNA, 558 bp, Homo sapiens
gcatcatttgagccactaaatctaggtatgaccgcatccttctccaaccctgttcttcccagctggattttcaagtttctagagmcattcattctcttctcacttaagccagtataactcaggcttctgtcacttacacagaaagaatcctgacaaacacagatagaatgtctaacaaaaacagaaaacgtactccattagaatatgaaccatatctgtcttgttgttgctatatctccagtgtgagaaataaaaatgaaatcccaagccccccagctggctgaatggaccccttcttggccaaaggaaccccagagtaaccttgaacactgagttattggccatgatgggatgggaagtcagacacgcctcatcatatcttctctcttgctaagcagcattaggctttcttctctaagggctcaacagaaaccaaccctgtcaacagactccaacaccactaatatcaacctaccacctgactcttgtccctcccttttgtagtttcaacaaaataatacacagcatttctttctggtaagagaccaccaaccatgg

SEQ ID NO: 828605 - DNA, 527 bp, Homo sapiens
gatcaactggaagaaagggtgtcagtgacagaagatcaaatgaatgaaatgaagcaagaagagaagttgagagaaaaaagaatacaaagawatgaacaaagcctccaagaaatatgggactatgtgaaaagacaaaacctacatctgattgctgtacccgaaagtgacagggagaatggaaccaagttggaaaacactctgcaggatattatccaggagaacttcccaaacctagcaaggcaggccaacattcaaattcaggaaatacagagaacaccacaaagatactcctcgagaagagcaactccaagacacataattgtcagattcaccaaagatgaaatgaaggaaaaaacgttaagggcagccagagagaaaggtcgggttacccataaaggaagccgatcagactaaaagctgatctcttggcagaaactctacaagccagaagagattgggggccgatattcaagattcttaaagaaaagaattttcaacccagaatctcatatccagccaaactaagc

SEQ ID NO: 828606 - DNA, 587 bp, Homo sapiens
catattttctcaattggtttgcatgcttccagtgctttrgttttttactctgttttgtagaccatgacaacttgactcctcttaaaccttgctttcatcattatacttttcagcttaagaatttatcaaggttgtattataaggccaagagatttcattgcaggagaggattgtaaggatcaaaacaggtgagagagggagctgtaagaggtggaaatagctgttatcccatactgcatgttttctgcctataaagagagaattagctgggaagaatctcagactgtagcagaaatttaataaaatttgtgtcagactgatacagattcctagagtgaaagttgctctgttagattatagggaatggacctgcctcagtatagccatggatctcaggcttttgctgagagaagcctatgggaagtgtagccttatgcaaacatggtggtagatttatagcataacactgggggtattccatcaatcacacacacacttgggttgattttatgtcattactattgtgaatagtgttttgatgaacatatgtacacagtctatgctttttacatgaaatcaggtgttat

SEQ ID NO: 828607 - DNA, 623 bp, Homo sapiens
tctatcatctcaagcaattattctttctttgtgttgcaaamaatccaattatactctgttattttttaatgtgcaataaaatattgttgactataatcaccctattatgtggtcaaatactagaattatttttatctaactatatttttgtaccatttaaccttccccactttccatttcattatggcagtcccagcttactaatacacaatcctttccaatttaatggtaaacagatgagacttctgcaaggagacacaaagaatattatcaaacaaatttagctggcaaagtgttttgggcttcaattctttgtttacagtcggaatatttgagatacattaaatattatccttgcttctacattttttaatcccggttttacttaaagatagatcatatgggctttttttctagatgctaattttacttaatgattattggtatgacattttaaaagtccatatatgacttgcggcaaattatctgaaaagattaccaaactttcatattcatatatctcaatagaatcttactgaatcacaatttctgtggtagatttttgggatctacactctacaattgtaagcatttccattttgttcaaggcaccctaaaattga

SEQ ID NO: 828608 - DNA, 608 bp, Homo sapiens
aacatatgagacagcataaagtgacaaaatattcaattttttgatgtcycagaagttgaagagaaaacaaaagaaataggaaatctatttaataaaataatagctgaaaacttcccaatctaacaaaacatttagacatccaaatgtagaaggctcaaagatctccaataagatacaattcaaaaagatcttcacagcacattatagttaaactatcaaaagtcaatatcaaagagataattataaaaccagtaatgaaaaaaaaattactagtcacttttaagtgtatctccatcataccaacactagacatatcagcagaaacattataggccaggacagaatagaataatacagtcaaagtgctgaaaaaaaaatagctgctaggcaaacaatactatggacaacaaagttatcatttataaataaagaagaaatgaagactttcccaaagaaagtaatcttggttggaagctttttttttctttcagcactttgactgtgttatggaattcatcaccacaagatgggtccacaagaaatgcttaagggatcctacatgtggaagcaaaaggacgatatttatgatcatgaaaatacacaaaagt

SEQ ID NO: 828609 - DNA, 533 bp, Homo sapiens
caggcatgcaatgtgtaataatcacatgatcgaaaatggggtatccacaccctcaaggatttatcctttgtgtttcaaaaaatccagtaatactcttttagttatttttaaatgcacaaattattattgactatagtctttctgttgtgctagcaaacactagattttttttttcaataacatttaaaatacacttcatgaatttgcatgacatccttgctcaggagccatgctaatcttctctgtgtcattccaattttagtatacgtgttactgtgagcatgcaaatgctagctcttattcattctattatttctaactatttctttgtacccattaaccataacccctgtctccccagttctccttcccagcctctggtaaccatcattctattccctatctctatgagttcaatacttttaatttttagctcccacaaataagtragaaaatatgaaatctgtctttctgtgcctagcttatttcacttaacataatgacctccagttccattcatattcttgcaaatg

SEQ ID NO: 828610 - DNA, 589 bp, Homo sapiens
caagcagatttttagcagcccagtatggatttgacattcatcactgtctacattctacattctacaattagtcacttgccaatacccagacgcaaaaggaccgrtacatattgtctttttgtatgtataggtggataggaaaatggtgtagaaactgaattttcagcacattacgttaagacatggtttacgtgaaatttaattatgtccatgggggaaggcacaaaacattcctgattaaagaggaagattccgataaaacaactgaggatctaggattgcactatttttgcataaaaagagtcatgaattgattcctgtcatatatttcagcctgtgtgattgtggcatggtccagtaaaaacactaggagtttaaatacttactgtcttgacctcattacttgttatgtgacctttgatacagtccataactatttcagtcttatcattggtggtcagaaaccgataacccagattatggcattttgctgaactgaaggagaagccacaaggtctctctgaccttccctccacgaccctcccaccactgcctcctatctctcaatccaatgtgtctcctaaaacac

SEQ ID NO: 828611 - DNA, 580 bp, Homo sapiens
gcacaaatgaatctagcctgcagagrtcagaagagaacattccatggttgaggcccaataagaattagtcactggggggttccactttataaaatactatgttgtaaaagtttttgaaaacttactggaaacactaatctttgctggcaacaacagttacttgttctccatttataatccctgagataaaaggtgtgtcatataggagagaatgtttatttttcatttattcaggacttattctctgttaaacacttaacatatattaaatctaatcttcatatatacccccattttacaaatgagaaaaccaagaccagagaggcaaggcccatgctctagtattaattagtaattgatgggcctgggattccagccaaggtaggtctgactacaaattaccatactgtttttagtttgccatgatacattgaaataaatggtggaatggtagagaatggtccagacctacaattactgcagaaatgtgaatgactgatctttgctgaatatttcaatgcctttatctcccctttcttggcagatttatttacaataataggaattgtctagttttaag

SEQ ID NO: 828612 - DNA, 580 bp, Homo sapiens
gcacaaatgaatctagcctgcagagatcagaagagaacattccatggttgaggcccaataagaattagtcactgrggggttccactttataaaatactatgttgtaaaagtttttgaaaacttactggaaacactaatctttgctggcaacaacagttacttgttctccatttataatccctgagataaaaggtgtgtcatataggagagaatgtttatttttcatttattcaggacttattctctgttaaacacttaacatatattaaatctaatcttcatatatacccccattttacaaatgagaaaaccaagaccagagaggcaaggcccatgctctagtattaattagtaattgatgggcctgggattccagccaaggtaggtctgactacaaattaccatactgtttttagtttgccatgatacattgaaataaatggtggaatggtagagaatggtccagacctacaattactgcagaaatgtgaatgactgatctttgctgaatatttcaatgcctttatctcccctttcttggcagatttatttacaataataggaattgtctagttttaag

SEQ ID NO: 828613 - DNA, 613 bp, Homo sapiens
tattaggacaagcatctgattttttaaagataactaaaggtctcctctacatttaatgattgcaaaaaggaytaaatgaaacagcatccatgaaaactgccagaccaagccaagcagataggaagcactcgataaacagcataaaaaattaaatatctagaaatggctcgtatgaactataaaacaaaaaataaaattttatcacttaagaattggtacaaggttgggcacaatggctcatgcctagaatcccaagactttgggacaccaaggcaagaggattgttttaggccaggggtttgagaccagcctcggtaacttggcaagatgccatctctccaataaagaaagaaaaaaatgggctgggtgcggtgcggtggctcacgcctgtaatctcagcactttgggaggctgaggtgggcagatcacaaggtcaggagttcaagacaagcctggccaatatggtgaaaccccgcctctactaaaaatacaaaaattagccgggcatggtggcgggcgcctgtagtaccagctactcgggaggctgaggcaggagaattgcttgaacccgggaggcggaggttgcagtgagccaagatcgtaccactgcact

SEQ ID NO: 828614 - DNA, 547 bp, Homo sapiens
ggaggctgaagtgggaggcaggtttgagcccaggagtttcaggctgcagtgagctatagttgcaccactgcattctaacctggtgtcaaagtgagatcctgcctctaaaaaagataaataaaataaaattataaaataaaattattccaaaagaaaaagtttacttattaaagggtatgtcacagcccatatgtatatagtatgccaccatatttgtaaggagagaaaggaatatgcctgtatatgtaatgtttgtgaaccataaaatatcactggaaaaatgtggaagaaactgataacagtggttacctctcaggaaggaacttaagtactttgggggaagcaaagtgggagaattttcaccatgtctcctgttgtattttttatccatccaaaaacaaatttttaaaaatgtgtttccaataatggagaacatagctcttccgtaatatgatctaattctgattaacttcgttaactaaataattaaataagtatttattgaatgcctactatgsgctaggccctggaggcatatcagtgaaca

SEQ ID NO: 828615 - DNA, 609 bp, Homo sapiens
atagttaatttggggtcaacttgggtggactaagggatgcccagatagctggtaaaacattatttctggatgtgtctgtgagggtgtttctggaagagaccagcatttgtatcagttgactgagtaaagagggtctgccctcataaatgtggatgggcatcattcaattcattgggaacccaaatagaataaaaaggtggaagaagaggctgggcgcggtggcttacgcctgtaatcccagcactttgggaggctgaggcaggtggatcacttgaggtcaggagttcgagaccaggctgaccaacatggtgaaaccctatctctactaaaaatacaaaaattaactgggtgtggtgatgcacacctgtagtccctgctactcagtaggctgagacaggagaattgcttgaatccaggaggcaaaggttgcagggagccgagattgcgccattgcactccagcttgggtgacagagtgagactccgtcatgcgcgcgcgcgcgcgcrcacacacacacacacacacacgtggaataagggcaaattcactctctctctttttgagctggggcattcatcttctcccatgcttagacattggagctcctgg

SEQ ID NO: 828616 - DNA, 506 bp, Homo sapiens
gtactccgtgtgggccttgagtgagactcagagacacactgacttcagatatgacccagcatattccctgacgtggtgactrcggggagaggctcctactgctcaaggaagcgggagggaagagtaaaggggcctttgtctggcagcttagttaccagctcggccacagtggagtagagcaccaagttggctcttgggggtccctgattccaggccttggctcttggatgtcatttctggacctacctttggccagaggggagcccactgccctgaagggagagacccaggcctggcagccttcacacaagctgactgaagagaccttggtccttaaatgaacaccggcagtagccaagcagtagctgccatggtcctggggcagtggtggccacagggagaggctcccctgcttgcagaaaaaagagtggggaagattttgtcttgtggcttgtgtgccagctcagccacagtagaacagagtaccaggtagagtccctaaggtt

SEQ ID NO: 828617 - DNA, 506 bp, Homo sapiens
gtactccgtgtgggccttgagtgagactcagagacacactgacttcagatatgacccagcatattccctgacgtggtgactgcggggagaggctcctactgctcraggaagcgggagggaagagtaaaggggcctttgtctggcagcttagttaccagctcggccacagtggagtagagcaccaagttggctcttgggggtccctgattccaggccttggctcttggatgtcatttctggacctacctttggccagaggggagcccactgccctgaagggagagacccaggcctggcagccttcacacaagctgactgaagagaccttggtccttaaatgaacaccggcagtagccaagcagtagctgccatggtcctggggcagtggtggccacagggagaggctcccctgcttgcagaaaaaagagtggggaagattttgtcttgtggcttgtgtgccagctcagccacagtagaacagagtaccaggtagagtccctaaggtt

SEQ ID NO: 828618 - DNA, 535 bp, Homo sapiens
tgaatctgcaggctcactcaacaaccaataacagccctgagctgagaatccacgggctgtctgactcatacccacagccacaatagcagctggcatttgtggagtgcttcctaggtgccagccttcgcctgaatcgagtaagccttggaggcactcaagcggtcacccctattttccagggcaggaaactgaggctcagaaagggagaactggttgtctgaggacacaaggcaaaccagctggccatgtcagcattggaacccaggactgtggagcccctggcacctcactgtagattgtagtgaccaaggaacagaggtggtaggcatttcattagactccaaattggagttctggcccatagtgatgatgcggggtggtctctgtgagggagggatctgcaagatgaggaagggacagatataaatctctctgatggtgtgtgtgtgkgggggggtctgtcggaggtgagggaaacagggggaaggggaacagggacctggcagaaggatttggagaaagccacaaagatccc

SEQ ID NO: 828619 - DNA, 607 bp, Homo sapiens
agcattaaaataactctacagctaagcattcaggtatgaactaccattcttgatacaaatgtcagcagcagaaacaaccttacatttctacacctaaaaatggctgttgaatggcggagggcgggtggctggtttctgagggacgtctgaatatttccaccataaatccatttctaggtctgataaggcagccaccaaaacaaaaaacaaaaagcacctgcactcccctcttgctgttgatgcaagcctgctgctagctctccacatcaccggtgagggaatcctagcttcaggcctctaaccctgactagtgactcatctgggagtaaaggggtcacatatttctatctgtgtgcctacaaactagagatcagcaaggtttgcaaagttttagccccaggaagaatgaaaaccggaagcagtcatgttctttctctcctctctgccaagctcctgaaggagagagggtgccttytgctcacctcaactttttttacctatcacattactttgtgctccattttttacggctaggcatttgctaaagtatgagcaaatgaacattttattagtattttatttgtatttttggagaagatatagagtt

SEQ ID NO: 828620 - DNA, 607 bp, Homo sapiens
agcattaaaataactctacagctaagcattcaggtatgaactaccattcttgatacaaatgtcagcagcagaaacaaccttacatttctacacctaaaaatggctgttgaatggcggagggcgggtggctggtttctgagggacgtctgaatatttccaccataaatccatttctaggtctgataaggcagccaccaaaacaaaaaacaaaaagcacctgcactcccctcttgctgttgatgcaagcctgctgctagctctccacatcaccggtgagggaatcctagcttcaggcctctaaccctgactagtgactcatctgggagtaaaggggtcacatatttctatctgtgtgcctacaaactagagatcagcaaggtttgcaaagttttagccccaggaagaatgaaaaccggaagcagtcatgttctttctctcctctctgccaagctcctgaaggagagagggtgccttttgctcacctcaacttttyttacctatcacattactttgtgctccattttttacggctaggcatttgctaaagtatgagcaaatgaacattttattagtattttatttgtatttttggagaagatatagagtt

SEQ ID NO: 828621 - DNA, 607 bp, Homo sapiens
agcattaaaataactctacagctaagcattcaggtatgaactaccattcttgatacaaatgtcagcagcagaaacaaccttacatttctacacctaaaaatggctgttgaatggcggagggcgggtggctggtttctgagggacgtctgaatatttccaccataaatccatttctaggtctgataaggcagccaccaaaacaaaaaacaaaaagcacctgcactcccctcttgctgttgatgcaagcctgctgctagctctccacatcaccggtgagggaatcctagcttcaggcctctaaccctgactagtgactcatctgggagtaaaggggtcacatatttctatctgtgtgcctacaaactagagatcagcaaggtttgcaaagttttagccccaggaagaatgaaaaccggaagcagtcatgttctttctctcctctctgccaagctcctgaaggagagagggtgccttttgctcacctcaactttttttacctatcacattactttgtgctccattttytacggctaggcatttgctaaagtatgagcaaatgaacattttattagtattttatttgtatttttggagaagatatagagtt

SEQ ID NO: 828622 - DNA, 635 bp, Homo sapiens
ttctctttctgtgcctccaaccgacttataaatatatgggttcctcacagcctttaactttttctatcctcctaatcaagtctctggagttctcaaaccagacatggcggtttggcagatttgggtacacagatgccagaaatcaatggaaaggtctgaagagttggagagactctgaaattactcagggcctctgcttccttccacagctccatgttaagccataagaaggcatcagatcagtccccaaacatatactgcatgatggagtgagtgcccagagtcaaaggagaaatcagtacatgacacctgaaaatataaaatgatcaactccaagttgcccaatacatcacatttatccaagttagtttatagttctacctcacacaggagattacaaatactcgagtgtgcaaagttcaactctctaactctttttgttcactacctgtattcattctacggtttaaaaagtcatgctgaacacccactcctgtgaatagactcattccaaagcaacaacctgagtgggacccatgttaatccactcatgcaaactttccttcccagctccatcatatgcaatcccccarcagaagaccaattatatcattaggctctcaaggttggttgac

SEQ ID NO: 828623 - DNA, 624 bp, Homo sapiens
agctacaaccagttgctgaaatattttcatacaagtttttaagaatctgtcaaataatacaamgtgattatgtacctgattttcttgttattgatgtcttccattgtgaaattggaaacttctgagagctcttccacctcagatcctgagattcttaagagagtaccatatgagggcagataatttaactgaatccagatctctgggtcgggggaagaatcatcctaatgaggcaaacatgaggcaggacatgaacgcacatttgcaggaataaacacttccagtagctaaagatctatgggtgcttctctctctgctaattggaaaagtctctttctctttgtcttaaagtctctttctctttgtatttcaaactacaataaaaatcccagtgtttattcttccccaaattcctctttgataacatatttttctaagagtagctcaaggtaagagaagggaaatgcactttaggtatgtggcataaaacaaagagattccctgttgttatcaataccataaaagccatacaagatttcatttttaagcttttagtaaaaataaaacttgatcatctataagtcatcaacctgtaaacacagatgtaggatttttctagagttt

SEQ ID NO: 828624 - DNA, 671 bp, Homo sapiens
ctctgtaaagggaaccactttgtaagtaataatgttcattcaactggatgtcttcatccagtgagttttttttaaatcattattttttgktattttattttttatttatttatttttattttttatttttttccatatatggccaatttgttttcaatgaaagtgccaaataactccaatggacagggtagtctttttaataataataataatcataaagtattttttattatttttaaatctttatttgccttatttactcagtaaccaaattacaaaagcaatcaaatattattttgagcagctacttagattccccttccagggaagtgctccatattgataacattctccttcctcaccctacgaaggcaaaggcagatctgaggattctagtttgcagaggtgacttcttttgattgaggtctttgccttcattctgactcattctttgatgactgctgcaatccccaggtgctaaaaatgaaaagttaacttgggcaaagggcacccaatgtttgctcactcattggaaattcagtgtgctcaggataatctcattttaatggtttccaaatttatctcaacccgctctctggaaaagcacatcttttacacaatataaattagtcaggcgatgaagatgtacatgccaggcatcagaagcagaa

SEQ ID NO: 828625 - DNA, 582 bp, Homo sapiens
tgggactaccagtgtgcccaccacatccagctaatttaaaatgtggatattggatctcactatgttgtcctggtcggtcttaatctcctggcctcaagccatcttcccaccttagcctcccaaagtgctgtgatttcaggcatgagccaccgcatccagccttattctttattttacagtattcatatttatattttattattttatgtttcctctttctcttctttaacttaaaatatctatgtatgttagtttatattaatctactttattctttttaatggatgtataatattttattgaattaatgtaacatgattgatatgtcaaattggtggaaagaatattaaatgtagcagaggataactttatataaatcaaagcttccataaacaacaaaagtgtttgaatatagtagaaataatgaatatggtggatttagaaacaagcctaggataaaaataagattaaagaggaacaggtaaaatatgtaagatgtttgctgcaaaaagtaaactgttaagaaagagactcacagaagcatgagaagagctgctaacygctgtataaacatcatgaggt

SEQ ID NO: 828626 - DNA, 614 bp, Homo sapiens
gtccttcatgatctgtccttccaatctctctctgatatcaactcctactactctctcctttccttttttttcaatctaytcagaaaaacctgggttcttcactattctccaattatgccaggcatgcttctgcttcagggcctggttactatctgtttcctctgcatacagtgctcttcctccagatatccacatggctaactccatgactcctttaagtttctactcagataaaaccttctcagaaggcccaccataatcatcctatttaaaactgccaaatcaaagcactcctgatctttcttatcatactctaaggtttctgtcataacacatcacttttatacattatgtatttataataaattatttgctagactataagttccaggaggtaaaagaacttcatcttctctgttcattgatgtatattgagcatttaggtaagtgccttatactcagtatttgctgattgaatgaatgaatgagttaaaacaaatcttgaaggatctttatcaacttatttaaggtggcctgggttataacacggtgcatgtcacataaagagagtctcatgctttgatatgaaaccaagctactttaacatagactac

SEQ ID NO: 828627 - DNA, 339 bp, Homo sapiens
cacataagcatagacaagaacatgggtgagacttataacacctattggttgtagggaagaccagaaagccttcctggcatttcctgcagaaacagcctttcagatgtcttcttggtgggagacamagggcattgccaactagctaataggcagacctatcttttaaaaagaatactggataatgctctgaaagcagaaaatatttatccttagttgcatgttaaggtcagcatgttatctctgaattttccccttcccttcctctctccacaataacagatggatacagctatttggataatgcctcattttagtgaagttccttaattaaactagata

SEQ ID NO: 828628 - DNA, 633 bp, Homo sapiens
tgtctcaaaggaagaaaattatactggagtggctatgctaacatcaggcaaaactgatttaaatttttaaataaattttaaattaaaaaattataaaatgttaaagataaaacatattgtagaatgaaaagagggtcatcagaaagttataacaactacaaccatatatgtaataaaagattgtaaactagtagtcactttggaaaaaagtctggcagtgacataaaataataaccatgaagttatcatttgacccagcaattccactccccaggcaaataacaacaataaatacttaaaaatgtatacgttcattttcatagcagcattattcataatagaaaaaaatggatacagcacagatctctatcaactaatgaatggataaagaaaatggtggaaacacacaattgaatattatttattgacaaaaagaaataagtactgatgaatactccaacatgatgaaccttgaaaaaattatgctaagtgaatgaaaccacttacaaaggaccacrtatggaatatatccatctgtatgaaatgttcggaataggcaaatgtatacggagtaaagtagattagcggttttccacagctgtagaagacggaaggattgagggaaatggatga

SEQ ID NO: 828629 - DNA, 299 bp, Homo sapiens
ttctgcatttagagtaccttttatgatatgcagatcttggccaaaaggcacagattctattataccatttcatccaatattctggtgcccagaatgggcacatcgtggrgaatgttaccttaaaaagctcagccatctggagctcttaaacatctgcagacatatctgcatgtagaaagtgtatggacttctcagcatctatcccgacattcccatgcaatactcttttaccgtggagaattcaacttcacaaatggcattaaaaattgcatctttgagagtcttataatagcgctgtt

SEQ ID NO: 828630 - DNA, 487 bp, Homo sapiens
cttctctagtacttgattttctgcagcagtacttggtctcatctatgtccccttttgctggatttcagatacatatctcaatacccttccttaccgatmtatctatggtatatccctactgagtagaaaccaactgtccccatatattctggtggtcataattcctcaaactggtataacacctagattgctacttttccatgaggaggcctctatctgttcatcaatccaacagacattctactaggtttcttctatgtatcatagtttcagcaattgtgaaagacatagaatgttaccacggagctgcaacgatcatggaatctacactatgtattttgaattgtgaaggtttcctgttgctgttgtaacaaattgacacaaatttagtagctgaaacatcattagtttattacattacaattctgtagtctgggagtttggcatgagtctccttggctaaaaatcaaggtgtaagcattactct

SEQ ID NO: 828631 - DNA, 536 bp, Homo sapiens
ttagtaacactgcaagctaagtaataataaaaatgcttctgggccaggtgtggtggctcacacctgtaatcccagcagtttgggaggcagaggtgggcagatcacaaggtcaggagatygagaccatcctggctaacatggtgaaaccccgtctctactaaaaatacaaaaaattagccagacatgacggcacacaccggtagtcccagctactctggaggctgaggcaggagaatggcatgaacctgggaggcggagcttgcagtgagccgagatcatgccactgcactccagcctcggccacagagcaagactccatctcaaaaaaaaaaaaaaaaaaatgcttctatgaaatacttcaagataatctgtaatttattgccagatgaacaatatcaacattctggactaatataatcagagaaacttctagagaaggtaagggcgaagaaagaaaactaatatttattgaacagatattacatacacagccctatgctaggtgaattacatacattcttttgtgtaatcactac

SEQ ID NO: 828632 - DNA, 592 bp, Homo sapiens
ctgtatctaaccaaatgagctaaaatggtcctcaagtgactcaacggtcacccaaggaaggaagcagaagaggggtgccttagcagccctgctttctttaaagccacatcaccaagttgccccacatttgcatggtctcaaacttccaagaccctgcctcaaggctttatcaatggccttttagcagggggctggactgggagggccgagtgggaggattttaattgcctgcttagtcaaggcctataactgtacatcaaggggaagtgaacctcgttacactgtctgtcaccaccatgattctattcttcatttctgtcccattatctgctataaaatcccacgacagtctcctgggaggactgcacggagctcaactttaaaatgttgatgaacatttgagggaagtggggccctgttagcttgctcacgcatatgctctcctttgcagtataccagtagagcccgaaaatgaattcatagcagatgctgctgcacactgrgggaggacggagcatatacttaatacaggatgtgattagcagaggaagatgacctttctagcaggctagagttaacacccagagtctga

SEQ ID NO: 828633 - DNA, 562 bp, Homo sapiens
gcgtccacatcctcatccccagaacctgtgaatatgttacctaacatggtagaatgggcctttgcagctgtgattcagctaagggtcttsagatggggagggtatcctgtgctatcagaacaggcccagtgttatcacaaggggaaggccagaagatccagcaggagaggtaatgctgcaagtgaaggctggagggatgtgaggaaggggccccaagccaaggaatgcaggcagctcctagaaactgaaaaaggcacggaaacagattctcccgaggccttcagatagagctcacccctgctgccatcctgatttttgacctctgacctccagaaccattaagagaatgcaatccatgaatatcagcttaatccactgaggggagtggtcatttgtttcagcagcaacagaaaaccgatacacctgccaaggctgagtggccacacgatttgacccaggcccaagggtccttgtcccagctctgtgggtgccagcagttactgaccctgtttaatgagcatctgctctgtgtcaggcacaggcgacacgatctgtgctgcac

SEQ ID NO: 828634 - DNA, 586 bp, Homo sapiens
cactgctctaatctagatcatcagctccttgagcaaagggactgttatttgccattgtgttctakcatacaatgcctgcactcaggaaatctttaatgggtaaatgaatgacttttttcttttgaagattactgtttagggaagattatctatacactttagtagccttcaagtgaaagcaagcctagaaagacttgctgagtggtagagcatcaaggctcattggccagaaggccaggccatacccaagctgataaggcttcccacagtcagacacatgggaccagtacaggagttgggagatgggcattaggacttaaagaaaataggggcaatttcctgatagaaggttaaacacttcagttcttgctggaaggagtgattagcctggtccttttcttatcagaattcagctgtttccaccacagtaagtaatggacaaattgggcatctggcttacttgatttcccatcgctaaggccgatttctgaagtgcaatatgctatttgatgtaccacagtgaatttgtcttgggcttgagagcctctcaatggcaacaagcaaaaataactcttggagaagttcc

SEQ ID NO: 828635 - DNA, 586 bp, Homo sapiens
cactgctctaatctagatcatcagctccttgagcaaagggactgttatttgccattgtgttctagcatacaatgcctgcactcargaaatctttaatgggtaaatgaatgacttttttcttttgaagattactgtttagggaagattatctatacactttagtagccttcaagtgaaagcaagcctagaaagacttgctgagtggtagagcatcaaggctcattggccagaaggccaggccatacccaagctgataaggcttcccacagtcagacacatgggaccagtacaggagttgggagatgggcattaggacttaaagaaaataggggcaatttcctgatagaaggttaaacacttcagttcttgctggaaggagtgattagcctggtccttttcttatcagaattcagctgtttccaccacagtaagtaatggacaaattgggcatctggcttacttgatttcccatcgctaaggccgatttctgaagtgcaatatgctatttgatgtaccacagtgaatttgtcttgggcttgagagcctctcaatggcaacaagcaaaaataactcttggagaagttcc

SEQ ID NO: 828636 - DNA, 583 bp, Homo sapiens
gcctgaggaaggagcctgccccgaattatctatcctgccattagcctggcctggaaggctgcctatctgctcccaggcctaggttccagcccyatggcaaggaaggaggctttagaaactgccagagcccacagagcagcctgtctggggagaagaactcagtgctgctcctgtgaccatcaaggtgacaacatcttatgttggcccaagccgcctgtatctcagatctgtatctcatcacttttcagcttttcttcacttctctggcaggaatccactggctactttccaggtgccagcctgcatggccattgcccaggcagcccagtgtagtgagaggaggctgctacctgcctggactactctctagctgtgtggccaggggcaagtcactcgttctttctggtcctctgcccttcttcttcatagtgagggtgtttaactcggtgatctcacaggctgtgcagttctgatggcctctgtgagtctcctgtaagtcagaggcacccttactgctttgtaaagacaaaagagcagtttaatatgtccaagacatattaagacaccatttgtgaagataggg

SEQ ID NO: 828637 - DNA, 411 bp, Homo sapiens
taataataatttaaaagtttgaaatattgcaagaattaccaaatgtgacacagagacacaaagcragtccatgttgttgaaacacttgctcaatatggagttgccacaaaccttcaatttgtaaaaaaaaaaaaaaaaatgcaatatctgtgaagcacaataaagcaaagctacaataaaaaaaaatgcctataactgacaaagtatagtatccagaatatgaagaaacgcctccaaataacaaggaaaaccaggagtaaaactggtgaaaagacttgaacaaacacttctcaaaagagaaaatcccaacaaccaataccatatttttaaatcttcaatgtcattatttttcagggaaatgtattttaaaaccacaacgaaataccactactcatccatcagatgagcaaa

SEQ ID NO: 828638 - DNA, 503 bp, Homo sapiens
aaatgatctaaatcaggatcctaaatattaaatatctcttatctaactcayatattcaaatttctagttgtcccaataatgtctttttcttcctagcctagtattccactatcatgatttgtttttagtttccccatatctttagtctcccttagcctaggacatttcctcagtcttttttgtctttcttgagctttaaatattttaagaggacaggcaattaatttctagaatgtccttcaatttgggtttatctacagctttctcatgcttagattcatttatgtattttcagcagggaaactagaataataatatgtttttctcagtatatcatatcagaaggcatgtgataaagtgttgcctactattggtgatattaactttgatttctatattaaggtgtccaccagcttggtccactgtaaagttactatatttccctttgtcagatactcagaggttatgtaaataccctgttcctcatcaaacactccactggt

SEQ ID NO: 828639 - DNA, 348 bp, Homo sapiens
tccttttccatttgcaatatggtactttggggttctcttattctgaacaatccatcactgttctacaaggatgctgtatagctcttccctttcaaatyactgttttgtcattcattgtcagctggaaagtgtcacctggatttaaatatttaaagatatttcttcagaaagaaatatctttaaattctgccttatggattgattaaaaacaatatttggcacaaaattagataaataaaacaaatgtatgccaaaaatgaggtataagatttgattgcttttcttctgtcttatgctccttgggaggttgatttcaaaggtattattatggtattacattcaacagta

SEQ ID NO: 828640 - DNA, 643 bp, Homo sapiens
tgattaaaagcagacaataagtctatttgaaaccattttgcccctactttataatttgccccatttttaattgcattcccttttgtagtttattatttaaaaatgtgaacaaatatccaatttgggtagtaaagagacttaagataccttggagcaagaagattcatcaaaatattatttgatatagctccttcctgaaggcagctaatggtgtataattcctttatattaaaaattcttcaaatattcattaaatatcttctatatacgtgacactaaattagctactaaaaggatgtagtggtcttcacaatatttgtgtgtaccctttgcacaattagatttttcatcataagttttaagcggttgtaaaagatgtctattgtactatcttgtcaatttttacattttaagtaaatagtgttacttatacccagtagaactgaaacattataacaactttccctgtactattattcacttaaaattactttaacagttagacattgcatcattactttttctctttaaacttctatttccataataccacctcacacaaactcattacaacgtactatatttttatccccattatagttctttgcaacmaactacatatacttaacacatttacatatct

SEQ ID NO: 828641 - DNA, 482 bp, Homo sapiens
cactagccatatgtggctattgagtacttgaaattcatgtaatgccactaagggactgcatttttagttttaattattaattaaaaaccgatacktggttccattattggacaatttttaaatatattaggaataacttagatatatgatctactttttcaactgtaaatttcatgaaatctaaatatgatctaaatcagtctaaatctaattaaggtcaagtatttcctatgaaaatttagtgcctgaattgagatgtgctgtagtgtaaaatattctacttcctatagccactagccacatgtaaccattgagcatttaaaatgtggccaatctcaattgaaatgagctgtagtataaaatacacactggattttaatgacttagaatggaaagaaaaaagaatgtaaacatcttgtttgtttatactgattaatattgaagtgataatattttgaatacattaggttaaataaactata

SEQ ID NO: 828642 - DNA, 632 bp, Homo sapiens
catgggcctaaggcagactggatcccagcaggctgggacacagggtttccaggtcaacttttatcttcccacatggtatttgttcctttgatccttgagcagwtcaaacaaagctcactaatcaatggcttccctccctgcctttcagagcagatcctcaaacacagcctgcatctctccctgctcccctcccaccctccagttttccagccagaggcatttgctctaaggcccaggctgtggcccacctatcaccgctacccaagtagtacaggtatgattgtctgtttactttctttaattcaaatcgcactagagaaatttcaggactcactcactgataaatcatggttacttacctcttgtctaggcccttgggcaagggtgcattgatgcatctactatgattgcctggttatcttggtcttggaagcacctagtaatgaaagaacccagagaaagataaacagagctgagggagtcaaggttaatctttctgagcctatttcttcctttatgtaactgggatattgtttcctgccccaactacttcacaaggctgaaatgaggattaagcaagttaatggctgtcaaggtccaccaggaaggatggagttctagatacatattgg

SEQ ID NO: 828643 - DNA, 522 bp, Homo sapiens
  misc_feature 7: n = A,T,C or G
aactttntaaacactgtaagtagtagctgtcatgaacactgtgaatcctattacaaatatgtatttctgaacaatttcacatttaggggtgcattctttcgactattttttgctacttttyccccctgttttttaaaaaagcatttgaattggaaactgtgatcccccttttttgttaaggaaataattttattatgcaataggaaaatggcatcagccccctcctacaccctctcaaaaattaaagacccaggagtgttcccatctgccccaggagtcaggaatgagcagaggctaatggcctctggaaaggcaaattggaatcaggccataaaatccatcccagagttccaggaaaaacacattcctcaataccattgctgtcggatcaaaactgcatctctgttttctatcagaaagttatctcatgtagagtgtccacgagcaaggtgcttcttgaagaattctttgggtctcaagctccccttctgaaagatggagctaaatcacccacatctcaaa

SEQ ID NO: 828644 - DNA, 440 bp, Homo sapiens
acaaaacttttagttttctaactttcattttatgcaaacagggttggctgctcaaaccwagcttttgagagagtacagcaaacaaagcaatttcttaaaagtttaagcccctcctctacaaaaggaaagaaaggggtgagaattaaaagcgagagaggtagaaaaggaaggctaggttgttagaaaaagaggcaagagaggcaagggaggggtgaaggaggaggagcaggagtgagagaagcaaagtaatctggacaattattttgcctaaaagtttgagattgaattgaaaagtttctgcttgaattgatgtaggaaattaagcagtttgatctttgttctgatatttgtcttgcaataagaccattttatgtatcaaatgttatgtagagaaagactaggtattatttttctgagactccagagaacctagacacctg

SEQ ID NO: 828645 - DNA, 430 bp, Homo sapiens
atgcctttgagggtgagggtagaaagttttcattgtctattaacctatataataacacatttaattcactgtccactattgacacagcactgtactagatactctataaattatagattttatagattattatagatttttcacataccagaagttctataaaacacagttatttttataatttatgtttattgagcacttacaaatgccagattttgcataagggttcacatgaattatatcattcaatcccacattaacccaaaaaagtattattttttcctcattttctagatgaggaaatgargctgagagaagctgagcaacttttcctctcacagttagcaagtagcagagaagagatccttctgcccccggagcctatgcactaatactctgctgtagatccagtccctcttctcaaagatac

SEQ ID NO: 828646 - DNA, 601 bp, Homo sapiens
gcaggatttctcatgacaaatgyagatgtgaccagcaaggggttgtgcctacaggaagaatacagaagcaggtccttggggatgcatccatcatacccacaaatacttccttaaaagctacctttaaataatggaaaatgcatttcaatgtatggagacagtgggagcccgggataggcctagcgtatgtagagtagtgagtgagcctcagtgtctgttgagaggccagatgtcttcacaggctgaagctgactgtgaaatccgggcctgcttctcactttgtccatcacagcaactctgatagtaaataatttccctttcccctttcagagcttgccaattctacactctttatactttcaaccagtagtgggtttcagcattctaataagtgctccatgtgagtcaatccagcatgccctgggatccaggctgtgggaggcaaatcaggtttcagcgaagggatatagcagtagatggggtggtatcatctgaaatgcaaacccttgtgcagcatactctagtagcatttatactgatattttactaaattaagttgagcaatttagtccatccagaaatctgaaattcagaacaaaat

SEQ ID NO: 828647 - DNA, 529 bp, Homo sapiens
tctggtccatggatttgacttgtagcttagttttcaggctttgaactatcttaggcttgaaggtcaggtttcaccagggagttgctcctgtctgccttggatttgtctacctcctgtcactatcagtacaggagacgcaaaagcccaacacaggccttgaggtccccaagcaattccagagattcctggggaaagggtatgattctctgtgaataaaaatggcaaggatcctctgtcctacaggcagcagagtaaatgaaagtctgcaatttgttttctacacagattgccaaattgaatgcttattaaattcaagcatttagacattgacctgtatacatcaccacaaaactatgttctggacctggaagtacaaaagaagcactgaccatttttccacaattttatagctgagtcaggtttagagaaggtgctcaaatgttttcaattagctaaataaatattggttaagatgagctaaaaaygacaggccgtaatgcaattatgggaactcagaataggatggtgt

SEQ ID NO: 828648 - DNA, 616 bp, Homo sapiens
aacccacacattgtctgtaaaattaataagtgatgtgttactcttttcaaatataagtagagactgctgtaaataacacaaactcctattaagtgacattactgaatccattaggcgtgtaggcagatactttattactacaaatttagctatcttatgagtaattcaatgtttctgatgttttaaaagggccctcatgaggcaatttgaaaatatgtctctaaagccttaatattaggcaggaccctgggcattgaataaagacttgttttgaggtccacagagaggagacacaaggtcacaagatggtcccatggccagcaagtggcagagtccagatccaaaggacgtctgtctgactccagacctcaggatcttaacccccacacaataaaacaaaatgtgtagatgcagctaaagaagagctcagatggaaatttatagcatttgatgcttattttagaaaagaaggaaggctcgagtcaacaatctaaacctcagctttaayaaactaaagaaaaaaaagggcaaaataaacctaaaacaagcagaaggaaggaagttttggtaagttaaagaagccactctcaaaaggttacatattgtatgaacacat

SEQ ID NO: 828649 - DNA, 608 bp, Homo sapiens
agttaatgactaagttttatgtatttaaaacatatataatctgataggcctgtaaatcaattatttgctttattacaagttataattttcagcatagattcaagtygatggctttataaaatatatatgaaaataatatagatcaccactataaacacaacagaattgcttggtaacatgaaaatgggtcaactattttttattttttatttatttatttatttagagacagagtcttgctctgtcgcccaggctggagtgcagtggttgggatctgggctcattgcaacctctatctctcaggttcaagcgattctcctgcctcaacctcccgagtagctgggattacaggcgtgtgccaccacccccagctaatttttgtatttttagtagagacgaggtttcaccatgttggccaggctggtctcaaactcctgacctcaagtgatctgcccgcctcagcctcccaaagtgctaggattatagatatgagccaccaagcctagcctggtcaactatttttatctcatttaaaataagatcttcagtagtaggttctgtaggcttttttttttttaattaaactattgttactttttaaaataaca

SEQ ID NO: 828650 - DNA, 554 bp, Homo sapiens
aactagattttcctgggcttggcatcactaaaatgtccaaaaaatatcttattcccatgaacataaacttcaaaatgtcaactgcatttacaattacgaataatagcgagctgccattcccaagggaaataatgaaagaaatgtttcatagatttttttagcaaaaacaaatgatttgcatgtttccaccaaaagggaataaaacccttaatatggaatatccctcaggtctcctttttggaaacaaaattcataaccacctgccatttgatgaaatctaataaattcctaatatagcatacactcctccaaagttttcattgttcaaagaaactcaagtgaaaataaggtatgaaatcctcatgtgcacagagagataaagataaatgcggcatttttaaaatatctgttttttttctagtacaaagaaaatatatcggaartattaaagtgagcataatttcatcccacagcaatagtttcaactatactttaattctaccaggtagactcacacacttccttaatgggtgtaaaatttattaacaacattt

SEQ ID NO: 828651 - DNA, 566 bp, Homo sapiens
tagtttttgaccaacatctccccaaacctttccctctctgcccagcagtttgttaactactctctttttttwaaaaaaaaaaaaaaaagaaacagggtctcgctcccttgcccagtatggagtgtggtggcatgatcatggctcacttcagcctcaatctcctggacttgagcagtcctcttgcctcagcctcccaagtagatgggacttcagacacacagaaccatgccctgctagttaaaaaaattatttgtagagatgaggacttgctgttgcccaggctggtctggaagtcctggcctcagccgatcctcccacgtgggcctcccgaagtgttggcattacaggcatgagccatcatgcccggccttacaactttgttattttttatttattattattttttagactagtcaagtgtagtagtgagaaggtgggaaagagtagaacaaagagttttatctgtaactgactgtgaacaatcaattaagataagttactacctttgaaccagcctcagctttttaatattccccatatgagtgaggtcatgtggtatatgtctt

SEQ ID NO: 828652 - DNA, 469 bp, Homo sapiens
aaagacagtaaacaataaacataataaataaataaattacattgcatgtaggaaggtgataaatgttatgaaaaaagagaccagggaaagtaggaagattatgtgtatatgrggagagaggggctgaaaccttaatttggacagtgtggacctcactgagaaggtgatatttgagcaaagagataaagtccttgagcaagtaaactgtgggaatacctggagtacgaacaggttgaccagcagaagcaatcaacataaaggccctgagtcaagaatgcttgttgacttcgaggaacagtaaaaaggtcagtgtggctgggtgtgggggcgcggggaggggatcctatagggcctttgaccattataaggactttggcttttactcacagtgaaatggaaagccattgcaggattttgagcagagcagtgttactgctgacttttttaaaaaaaaggatcactagcgccg

SEQ ID NO: 828653 - DNA, 469 bp, Homo sapiens
aaagacagtaaacaataaacataataaataaataaattacattgcatgtaggaaggtgataaatgttatgaaaaaagagaccagggaaagtaggaagattatgtgtatatgaggagagaggggctgaaaccttaatttggacagtgtggacctcactgagaaggtgatatttgagcaaagagataaagtccttgagcaagtaaactgtgggaatacctggagtacgaacaggttgaccagcagaagcaatcaacataaaggccctgagtcaagaatgcttgttgacttcgaggaacagtaaaaaggtcagtgtggctgggtgtgggggcgcggggaggggatcctatagggcctttgaccattataaggactttggcttttactcacagtgaaatggaaagccattgcaggattttgagcagagcagtgttactgctgacttttttwaaaaaaaggatcactagcgccg

SEQ ID NO: 828654 - DNA, 579 bp, Homo sapiens
aatcagaagaaaagtgagtgttgctatggaaaccagtgagcttgctctgatcttaaaaggtcacactaraccttaggaaggcaaattgaaggaaatacttcgattcacccttacagggtgaatgtaagaaagaggatggcgaggaaaggtacattcactcagaaacccaaagacaagaatgaactgaggattacagaaatcattcagacaacaaaattaggctttaggaatgggctcgttaaaataccatgaatatttttctatatagcaaatcaaggatggagtatttctggtgcttggggttaaggaaacttccattcagcttctttaaagaaaattttctttagatagaaaggaagaaatgaacattggtaaggcagaacgaaagtccaagattaatcaaaagattataaaagagcactgggctggttcaaaatgggttcatgtcacctggcatggttttatgcttcttttcaacaacttggaaattttattactgatccactgttggtgaaatttaaggaaggaattagggagaactgggcatcactaaggcctctgtgaaggttctcatgatat

SEQ ID NO: 828655 - DNA, 514 bp, Homo sapiens
agttcacatatcataaaattcactcttttcaaatctggtttaatgggttttagtatatttacagagttatgtgaccatcaccactatctaatgttagcacatttttatcactccaaataggagccccacatccattagcagacattccccattcccttctccccttggccctggcaatggctaatctactttctatttctgtggaattgcctctcttggacattttacattatttgaattatactatatgtgattgacttcttttgtttagcatagtgttctcaagatttttccatatagcactgtcatgtattagttcattcctttttattgctaaaataatataccactgcatgggataccacctaagcatcagtggattgacatataggctgtttcactttttggctattatgaataacrctgctgtgaacatttatgtacaggttttgggtggccatgttctttcagtttccttcagtttatgtctaggagtgtaactgctgggttatgc

SEQ ID NO: 828656 - DNA, 513 bp, Homo sapiens
ggacttgttcccttagctgaccttctgatcttgcactcattataaccatcatgccccctcacttctgacagcaaaatgtaaccacctgatccctattctttggggatcttatcatccctgttgtcatcagagatcccagttctataatgaccatcagtgctggtctattgagaacagctgaaccagtgagactcgccaaacttttcaacaatgctggtgtccctctccccagttcattcctgatcacttcaggaagtggcatgtacttcagactctcctgcagactatctggtgaattttccagcctcacatagtgcgagtatactctagtatacccacttctctggcctttgtgatcttttcttccagcgcttgccacaatagttctggcacactgacttggtttagcacgaatcattgctttctccrgcctcccagaagccccactagcaacacaggagttcttcctcctgggatccttgccagagtattaaatcttgtatccttggagaa

SEQ ID NO: 828657 - DNA, 513 bp, Homo sapiens
ggacttgttcccttagctgaccttctgatcttgcactcattataaccatcatgccccctcacttctgacagcaaaatgtaaccacctgatccctattctttggggatcttatcatccctgttgtcatcagagatcccagttctataatgaccatcagtgctggtctattgagaacagctgaaccagtgagactcgccaaacttttcaacaatgctggtgtccctctccccagttcattcctgatcacttcaggaagtggcatgtacttcagactctcctgcagactatctggtgaattttccagcctcacatagtgcgagtatactctagtatacccacttctctggcctttgtgatcttttcttccagcgcttgccacaatagttctggcacactgacttggtttagcacgaatcattgctttctccggcctcccagaagccmcactagcaacacaggagttcttcctcctgggatccttgccagagtattaaatcttgtatccttggagaa

SEQ ID NO: 828658 - DNA, 542 bp, Homo sapiens
ctttcacaaatcttttcatgacttacacagaacatctatgaaaagcttggactttctcacttgtcctaagcatccctctttttaaacaatcagttatttttctttaggaygcaaatttacgacaaaagatcctttctcatataaaatttcttttctttataatcttccttaacaaaaatacctctttacctttataacctttgaattagagaaaagttattttccttctgttaggaatttatggtttgtactgcatgttgttgtgtgtgtcctgtgaaggggaagcaaatgaggaggttatctacatactgtagaagttgtttcccctcaagagattgctcggttagatttttgctagggctcatccaaataagtgtgggctatttttaaacccctgaagtaggatggtacaggttgaagttatcggttaaagatttaggtagctttttgggagaaatagggctattagagaggaaggtgaattcagaggttgggtacatattaagcagccacccattttggaaagtatatttttgtcctaa

SEQ ID NO: 828659 - DNA, 604 bp, Homo sapiens
ggcataaatgaacatactcaagaagcagagcgaacccaaaaaggataagcacaaagaaatttacaaagacacataataattaaacttctgaaaaccaaaggcaaagaaaaaaacttgaaagcagtaagagaaaaatggcatctaaccaagagagaaaagactatttaaatgacagaggatttctcatcagaaagcaggaaagcaagaaagaagtagcccaatacttttcaagtgctgaaagaaaagaactgtcaactcacagctaacgaaaatatcctccagaaaaaagagaggaaatcaaggcattgagagatgatggaaagctcagaaaatctgttgccaatagactaccgtaaaagtagtcccagctactcgggaggctgaggcaggcgaatggcgtgtaccccggaggcggagcttgcagtgagccgagatcgcgccactgcactccagcctgggcgacacagcgagactccgtctcaaaaaaaaaaaaaaaaaaaaaaaaaaatggctgaaggaaattattaaaacagaaaggaaagtwtaaaagaaggaatcttggaacctcgggaagtaaaaaacaccaaataaaagcaaaaatatg

SEQ ID NO: 828660 - DNA, 428 bp, Homo sapiens
cactgcaaccttcacctcctgggttcaagtgatactcctgcctcagcctcccgcagttgctgggattacaggcatgcgtcaccaggtccagctaattttgtatttttagtrgagacaaggtttcgccatgttggccaggctggtctcaaacttctggcctcaagtgatccgcctgccttggcctcccaaagtgctgctgggattacagacgtgagccactgcgcctggccagccttttcactctcttaatggtacaatttgatgatcagaagttcttaattttaatatattccaatttaatatttccctttaatggttagtgttatttttgcctcccatttaaaaatatttgttattccaaaaatcatgaatatgctttattatgttatgctctagaagctttactattttgcctctcacatttagat

SEQ ID NO: 828661 - DNA, 592 bp, Homo sapiens
aacttgaattgcattacaattctgttgtcaaatcatcatgcatgtttttccccattctctttcacaatcacccatctcatactcctctaataaagaaaatgggccacgcgcggtggytcacgcctgtaatcccagcactttgggaggctgaggcgggcggatcacaaggtcagaagatcgagaccatcctggctaacatggtgaaacgccgtctctactaaaaaagtacaaaaaattagccgggtgtggtggcgggcgcctgtaatcccagctactcgggaggctgaggcaggagaatggcgtgaacccgggggacggagcttgcagtgagccgagatcccgccactgcactccagcctgggagacagagcaagactcagtctcaaaaaaaaaaaaaaggaaaatgtacctttcattcgtcctaaatattactatagtacatggctctggaatgttaatcaaacctcagggtgccaaacaacagtgaaattcaaaatgaaaatattcaattggtgagctgtcaaaaatcaaggcatctatatttgtttagggattcttctcattctctgcattatatatttttgtgtaaaga

SEQ ID NO: 828662 - DNA, 524 bp, Homo sapiens
gtccaagtgtcaccaataatttagaagacgttccaaaaatatagcctgaagagacaaagcaatcatcaaaaccaaactcagatatgacacagatgttggrattatcagacagagaatttaaaaataactaacaattaaaaagttaaaggctctaatagaaaaggtagacaacatgtgtaagagaaatggctgcacctcagtcaggagtaggccaaagcagccttccaaggcagcgtgactcagcgggtttggagtgcaggcacacgaccctgcacagtatgtaaccatgccatgcaaggcacatgagatgaccactcacatgagctcatgcttggcttggagcccctatagtctgtaaaaggtataactaccctgctgatgctgtacaggcagtttggctcacgaccagagagagaataaagccatgtcaagactgcctatgattccacaagtgtttttccagctacaccccacctgcccaccaactcccctcagacctcactttgggctataatctgacaaca

SEQ ID NO: 828663 - DNA, 524 bp, Homo sapiens
gtccaagtgtcaccaataatttagaagacgttccaaaaatatagcctgaagagacaaagcaatcatcaaaaccaaactcagatatgacacagatgttggaattatcagacagagaatttaaaaataactaacaattaaaaagttaaaggctctaatagaaaaggtagacaacatgtgtaagagaaatggctgcacctcagtcaggagtaggccaaagcagccttccaaggcagcgtgactcagcgggtttggagtgcaggcacacgaccctgcacagtatgtaaccatgccatgcaaggcacatgagatgaccactcacatgagctcatgcttggcttggagcccctatagtctgtaaaaggtataactaccctgctgatgctgtacaggcagtttggctcacgaccagagagagaataaagccatgtcaagactgcctatgattccacaagtgtttttmcagctacaccccacctgcccaccaactcccctcagacctcactttgggctataatctgacaaca

SEQ ID NO: 828664 - DNA, 518 bp, Homo sapiens
tgtgcctcgtagcacgttacggagctaggtatggggggaagagtttgtcaccaagcttctttgggtcaaaaaatatccacatactgtacaacagtatggtttctaaagcaaaacaacatataatgcatgagaaytgagaagtatcttagatacacatgaaaggcttcaaacataattcacatacagtcattttagtcatttgacaaataaaagatccttctatgtagcagggccctggccttggccctggggctacagtagtgaataaaacaaatagttcccgctttctgctcctgataattagctccaacatttgaatgggaatattccaatcccttaaatcccaccaattaaaaccatcaaaaaatatccagaagaaaaagccattctaattacatggcttaatcacaggaaaaattcggacaaataagatgagcgattctttattcgagtaaggcaagactgaaaaaccacctctgtattgaggccacaaataaaatggattggacccagaaaat

SEQ ID NO: 828665 - DNA, 518 bp, Homo sapiens
tgtgcctcgtagcacgttacggagctaggtatggggggaagagtttgtcaccaagcttctttgggtcaaaaaatatccacatactgtacaacagtatggtttctaaagcaaaacaacatataatgcatgagaattgagaagtatcttagatacacatgaaaggcttcaaacataattcacatacagtcattttagtcatttgacaaataaaagatccttctatgtagcagggccctggccttggccctggggctacagtagtgaataaaacaaatagttcccgctttctgctcctgataattagctccaacatttgaatgggaatattccaatcccttaaatcccaccaattaaaaccatcaaaaaatatccagaagaaaaagccattctaattacatggcttaatcasaggaaaaattcggacaaataagatgagcgattctttattcgagtaaggcaagactgaaaaaccacctctgtattgaggccacaaataaaatggattggacccagaaaat

SEQ ID NO: 828666 - DNA, 451 bp, Homo sapiens
tttctcatgattgcagctcctaaattactgaatttaagtcaactactagaatctttctaggcacaaagtttgttattcakctatgtcatatggtgatctgctgagttcacgaggaaaaaaaattttagtattttcaccaaacccaccgtagatgcaagacatgagatgaacgactgtcataattatttgacacatatgtattcagttaaacagaacttaaagatgtttatccaacatgtatattactcaggagcctggttttgtcttttttttttttttttgagacagagtctcacttttttgcccaggctggagcgcaatgacgcgatctcggctcactgctgcaacctccacctccttggtttgagcaattctccttcctcctcccaagtagctgggattacaggcgtgtaccaccacacccagctaattttgtatttttttttctttt

SEQ ID NO: 828667 - DNA, 483 bp, Homo sapiens
aaatatctgtatatacacacaatcacatcatatgtgaaacttcaaataaaagtttaatgtgtaaatgtatataatcagatcaatctaaaagaagagattttctataagcgattgtcctggactctttgagtaatcagtatcatattaaaaataaaggcagggggtggaattctaggtcacagtttagtaaactttttccataaagggctgggtactaaatctcttaggctttatgggccacacagtctcgatcgcaactactcaactctctcattgtagcgtgaaaacaaccatagacattacataaataaaagagcctggctgtgttccagcaaaaatgtatttacaaaaacaggtggtaggccagatttggcccatgggacatagtttgcctgttttacactaatggagacaaaatggacagagcaaccaaacgcaatttgagaatctacattggatcckagcttgaggaaaaaacagtga

SEQ ID NO: 828668 - DNA, 578 bp, Homo sapiens
ataaatatgctgtcaacttttgccaatcattaaattggctctctggtacacttcattcttatatgggattcagaataagccatgagccgggtgctgtggttcacgcctgtactcccagcactttggaaggctgaggcgggcggatcccttgaggtcaggagttcgagaccagctgggctgatatgatgaaaccccatctctactaaaagtacaaaaattagctgggcacgtgactgtaattccagctactcaggaggctgaggcaggagaatcgctcgaatctgggaggtggaggttacagtgagccaagatcatgacactgcactccagagcctgggcaacagagcgagactctgtctcaaaaaataaaaaagaaaagaaatcgagactaaaataagcctatgctagaacaagcctgtgtcaggatttggacaccccaaataggcagataatttaaatttttacttgcaaaactcagcaggcagagcaaaagttataagcctttttcacctgaatttaagtctatgagacctaggttggaaaagrcccattagcgttacccagtcttgttacacatt

SEQ ID NO: 828669 - DNA, 528 bp, Homo sapiens
ccagtacaatagaagcattctaagcttgaattttaaaagctcttattatcaattggcctggaaatawtgaaggccctcaaattaattcttttttcaaggtaaagaccccaaactttcaagtctaatggaattaagagcaacatcaaatgatcttgccctgattagttaaaagcaatttaagtctaaaactcacccttgtctgattttttattctgctgtcgaggggctcttctttgcagagtggacaggggcagctggaattctttcagcagatgccgcctgggctgagtatctctccctgcagtgggcagagttcctttaggacctatgaatctgacccagttcaatgccaattctgtaaattgctctcctatgaaaagaattcaaagacaggcaagttaatcacagtaggggcctcatacccaccatattcaggaaacaaagtaattcctagcccttatcagttattccaggtagaattatgttgctagagccaagtaccaatggccgtctaagagaaggaatgtt

SEQ ID NO: 828670 - DNA, 599 bp, Homo sapiens
ccctcagtctcccaagtagctgggattacaggcatgcgccaccacacccagctaatttttgtatttttagtagagatggggtttcacataytggccaggctggtctcgaattcctgacttcaggtgatccacccacctcggcctcccaaagtgctgggattacagtcatgagccactgcacccggccacaagggcaattcttacaggatctcttcttttgccaggttcttcagctctggttgttaagtaaagacaagtagggctgcatgggttgtggcctctagagtctccagcagagctggagctgtggtcatgttcctaagttagcattgccacatagtgtacaattgaagacaggcagtaagaaacaagcccaggttaggctgaggctcaagaaagtgcttggtccgttattatttaaaaattcagctaatatggaacatactggcttgaatgcagtacggaacatactggcttgaatgcagttcattttgaacagttagaatcttctaggagtgaagtctgttaaccctatcagccagtactgcaaacgtgtgggggtccacattggcacatcaaaattcagttccaagaacttc

SEQ ID NO: 828671 - DNA, 519 bp, Homo sapiens
tcaatgtaccctgcatctcaatgatatttattcctgtcyatattctgaattctatttctgtcatttcagccatctcagcctggttcagaacccttcctggagaggtggtgtggccatttgcaggaaagaaggcagtctggatgtttgagttgtcagaattctgctgattgtttctcctcttacgggcttatgttccttcaattttgaagttgctgacctttggatttttttcttttatcctacttgataaccttgggggttcgattatggtataaggtgcatttggccaactggcttcatttctggactattttaggggactgacactcagtttccaactcctggactgtgtactctaactctgggggacttgtcttcggccgcaactttgttctctggctcctcaaggtttggaatccattgtgccaggggtgctgaagtgctcctggaccactggtcactacactctaatgggtggtgtcagctacaatgttttatagtatggtgacaatgggatcc

SEQ ID NO: 828672 - DNA, 538 bp, Homo sapiens
aaagaggccagtgccttcccaggatatgcgcccccaaaaacactctttatgcaaacccaggcccacaggaagcctggaggaggcaggaagaaatggaaagacaagggaaataaccccaaaatcaggagtacaacaagacttccccatctgcctaaagagtttgctcattcagccttggaagtaatcgctttcttactcacccagtgacattttattctgggtgagcacacaagaatgtgaatttcattcatgctctcttctgtgtgttattatgaggaaggggggatagctttccttttctttttttagatgggggccttgtgagtagggcaggcaagctgctgtccacagggtaggatttgagatggttctgggcaaggcccctgggctccctcctacagccaatgcctgtgatcccaccttcaaagcttcatccctctaggggttgaaagcacatacaagaaaggagtttcacagactgcatctttaaaccttttcaaaaatgtrttataaaaataacatgcgtatggggaaacac

SEQ ID NO: 828673 - DNA, 521 bp, Homo sapiens
atagaaagctctttgaatatattggatcctgaatcaacagcaaccattattatcatcctcagctttttcctattgtctttatagatttatctcattagatatctgtgtgttttctttttctttctttttttttttttttttttttgagatggagtctcgcttagttgcccaggctggagtgcagtggcgtgatctcggctcacggcaagctctgcctcccgggttcacgccattctcctgcctaagcctcccgagtatctgggactacaggcgcccaccactatgcccagctgatttttttttgtatttttagtagagacggggtttcaccgtgctggccaggatgtctgtgtcttttctttatgcaacttagacactgccttggctcccaagtctagttttccagccccaacaactatctacgcttaacamagaagacaaagtagagaataggaagcagaaaactgtgcaaagggtaaaccaaagacaggaagtcctagctagagcaatcactcaagaga

SEQ ID NO: 828674 - DNA, 553 bp, Homo sapiens
ctttcttttttcacctcatattgtatgattttctataaaccatctttatgttcactatttctttattctgcttgatctagtcattgttaaagccttctaytgaatttttgaattcagttattcttcagcttgatgatttcggtttgtttgctgcttcttcttcctttttttttttttttattaaactttattctatctctctgttgaagttgacagttttttcatgcattgttcttaccttggtgaacatctttacaactgtccttttgaattccctgtcaagtaaatcacctgtcttcattccattgagtcagtttctggagatttatcttgttcttttattcagaagatgttttcttcattttcctgttttttcattttccttcactctctgtgttggtctctgcacattagatttaaaaaactaccttccctaatcttgttatactgctcccttttgggagctgctcctgcccaatttgcctgaccagacattccaggtgcctctaaactgtttgtgcatgtccccaacctgctatttttgttcttagtg

SEQ ID NO: 828675 - DNA, 516 bp, Homo sapiens
aatagctatgtactactttatgaatcctttctatggcatcttgcgttgccaattagatgtcttattgcacggaactcgcacaatctgtctcatctccccaygtagtgagctcacagcacttcaccaagagtgctgcccaccaagaactcacagcacttcaccaagagtgcagtcaatagtgttttatgaacgttgggaagaatatggttaatgcctgagaacaaagaccagaaatgtcatcttttcgtgtgaccatcatgatacagagaagttaacagagctgccccattgtccatggggcatgttctgagtttttccagtagtggtgatagattttggctgatttctctgaacttttccctgagttatttttgtgactttggccaggatgaagggtggggaacccctcatctttaaatctctgagcagagacttgctaggcatctgcagcagtggtggggaagaggtcattaagctcagtgcagtccacgtggggccttggcctgcgatcttcag

SEQ ID NO: 828676 - DNA, 548 bp, Homo sapiens
atgaccggctgcttgcctgctccatcacaggaaggtgcagcagagcccttttcttcccagggttgtgggcaccttgaactatcctggcttgctagctaagaaactgccccaagtgacgcacactcaagctgttcggggacttccagaataaaccaaaccagctgtattactggtctttgacatcctctctggtcagggccaagtcactgtccctgtcttggagagggcttctgagcaagcttatcaactcccaggtgggcatgtgtaggcagggcggatggacgttggcagagagacctgggaacccatatctgccccaccaaggcctggggatctgcatttcagccaaaccccatcacagttagaatgtggctcctgaacactggtatttgcacagtgcttactggtggtgatacagacggaaagacaaccctggccctctctccagccttcaccagcccgcaatgcccgacccacttcttagggttgctgatcagacacgtsaacacatgcctctgtgttgacagcactgcctgcagctctccaag

SEQ ID NO: 828677 - DNA, 594 bp, Homo sapiens
agtctattttcaaacgcctacagctagtagtaaaatagccagactcccccagcaggttaggatcacacatcatcatcatgtctattagatgctgagctggaaatattgagccagagcaataagcaaaaataaataaatacataaagattggaaaggaataaatacaactgtcaggattcacaaaggacaattgcatagatagaaaattcaaataatcaacaaattagaattaacagatgaatttagaagggtcactggaaacatggttaatatagcaagtccactttgtttctatgtaatagcaacaaaaattagaaaaataaataaattctgattcatatagcatcaaaaaattcaatacttatggatacatttatttttttcaaatgcaagacctcttcatgaaaaactatgaaacattactgaaataaattaaagaagacatgagtaagtggggagatggtccttgtttgcggattagaaaatccattatttttaaaatgtcaaccctttccacattgatcaccagatttaatgcgattccaatcawaatcccagcaggaatttttgtgcacgctgacaagccaattataa

SEQ ID NO: 828678 - DNA, 555 bp, Homo sapiens
gtttccattgctcaaggagctggctgaggccctgcagtggccccttcagccgacatggcctcccactccatgctgggggagccaaagggaggaacagcaggccaggcgtccagcccaggaggawgcgccacatccaggtgacatggaactcactcagcaaaagtgcagccaccttttcctgtaaaggccaggtggtaaatcgtgtccacttcacagcccctggggtatctgctgcagctcttcaactcaactcaggcatcaccaaagcagccgtagaccacccggaaacaaaggggtgccactgtgccccaataattgttttttaatgtaaaaacaggtgttgagccagaatttgacctgtgacctggtttgctgactgtgctttagaaagactgggaaggatagtgatgatgggttttgaccacagagatatgggtgtgtgtgtgtgtgtgtgtgtgtgcccgtgtgtgtggctctgtgtacgtgtctgtatctgtactgggagtggggatgcccattgattttcttaccgggggatccttgttcttagagctc

SEQ ID NO: 828679 - DNA, 553 bp, Homo sapiens
taaccatcagacattatcatgtctggtgctaataaaagtgtgggttctcccactatcaaccacacaaatgtcctttggcaggcaaatgatttttagcctcttagcctaaaaagatgccttagggagtggggagcccatgtttcagggggacagggtttccgtctgggaagacgaaagggcggtggggatggatggtgctgcacaacagcgtgagtgtgcttcatgccgcagaactgtgtgcttaaacaaggttaaggggcgaaattctgtgatgtgtattttaccacaataaaataaaaaagaaattaaagatgaattactctgaatcctggatcccaggactagcgaagtgaaatcagctctagaatcaagtgtccataaaatgtcagcagggcaccacctagggaaccaggaagtgtctcagcacccaggattgctcaagaagaacaaacacatctgcttttgaaatatataatacacaataygaaatttcttaaaactaaaggagaatagagcagaaaggctgcattgctataaaatacaatccattcct

SEQ ID NO: 828680 - DNA, 488 bp, Homo sapiens
tgctttagatatttttagttgtatttttaaaaccaaattatttgactcctgtatcatatctgcatcttaaattattcacatcaacttaaaaatatctgtgaaatgtttttatatctaaaaataaccttagcaagatttttctggtctgctttatgagtctgtgagtattgtgatttcttccaacgttggtgaaagcctgtggttaattcccccaaaaagttgagtgagtgtgggcctggaacttaggaacaagggtatatctgtgggaagatggccttggatccattctgacacaattgctgagaatatttaacaaagacaattcaatattctcatcatttggatcctcttctctacaccatgtctctttttatcagsggacttttagatatatattttttgacactttgatatctcctacctctcctggaaattggtgttgacatttttctataaagatattgaactttgatgctccttatacaaaa

SEQ ID NO: 828681 - DNA, 546 bp, Homo sapiens
cacgggaatcttccccacttttttttttttttttttgagacagagtctggctggagtgcagtagtgtgatcttggctcactgcaacctccaccttccgggttcaagtgattcttctgcctcagcctcctgagtagctgggactacaggggttcgccatcatgcccgggtaatgtttgtatttttagtagagatggggtttcaccatattggccaggctggtcttgaactcctgacctggtgatccacccaccttggcctcccaaagtgctaggattacaggcgtgagccaccgcgcctggggtgggagcagacacccatcaggtgacagcgcaggctctggctgcttcccttcaggttggagggtgggttcctgtcaccctcatgagagacctttatccttcctctgtgcctgctgcctccctggctggctgtgtaccaaccacagggragatctctcttcccaggcagatgcccaaggtcagtggacgctgatgaggctgggagcctgactcctgaattatctctgaggcaccttcactgtacgt

SEQ ID NO: 828682 - DNA, 580 bp, Homo sapiens
tctccactgataggttccagctgacctcgaaaacatcaggatagggaaacaaaaccaactagctagcatttgaattagaactagaaatatagaggtatatacacaggtcagtttgaatactgagctcccgttccttttataaatattaaattaatatttacctaaaattacaaaaataaggcgaccatttgaaatgtgtattcatgctcgaaaagggggtgggactcacctttctcctctggggacctgctttcatattatccctaattgcgtggggcacacacgagcttttttctttcaagagatttctttctttaccactttcttcattgctgcttcaagggcaaaccccacacccacgttgagtcaactgttgtatgccctccagccacagtctgtgagacctgggaagcactcccacccacactgtcagtgcgcttacacctttccatgacaccttctgtgcastatctgtggcgaaagagcaccctgaacacagctgtgggttgtgaggctgtctgggctctacgtttaccaaaccaccacatcggtgtgtggctgatgccactgtcagctctac

SEQ ID NO: 828683 - DNA, 506 bp, Homo sapiens
ttcaagtgtgttcgtatgtttccctgaagccccttttgttcatggctgctttgaatttttgtcagacaattttaacatttatgacacctctagtttatggtatcgtgagtgatttttaatggaaatcataatatttttatattctattttgagactcagggtcttctttatactgtttaatttagctgatattttctgacacacttcaacagtggaaggatgtggggctgaatgtccaagttcccaataacctcctttgccatcacaagggaggggttgttcttcctgcaagcctgggtgggcactctggcttctcctgggggctccattgtcccactggtggggtggcctcactgctgctgggcaggtgtgaaattcctgattctctaccaggcctccccatccagaagcaagggggaggtgtgtacctcatgactggtgcttggggtggaagttcaggctcctcatgyggtcccccgatcttgggtagggggcctggttactcc

SEQ ID NO: 828684 - DNA, 557 bp, Homo sapiens
tgaccctttgtatttctgtagcatcagttgcaatgtttccctttcatttctggttatatttatttgagtctcccctcttttttttcttagtttgtctagytaagggtttgtcaattttgtttatcttctcaagaaatcaacttttagttttcttgattttctattctctttttcatttgtttctgctctgatctttattatttctttccttctattaaattcgggctttgctttcctttttctacttccttaaagtctaatgctaagttatttatttaatatctttctcttttttgatatagatgcttactgctataaaccctccccttagaactatatttctgcattccataagttttagtatgttgtgtttttattcaagacatttttatttttcttgatttcttctttgacccattggttgttcagaaacatgtcatttaactttcaaacatttgtgaattttccaagattcttcctgttattgatgtttagttacatattattgtggtcagaaaagaaactcgataggatttccatcttcttaaatttgttaa

SEQ ID NO: 828685 - DNA, 651 bp, Homo sapiens
catttaaaaaatggactgcagacctgaatagacatttctccaaagaagatatacaaaaagccagcaggtacaggaggtcctcacttagtgtcatcaatagattcttagaaaatgcaactttaaaaaacratgcctaatgaagccaatcttaccacaggctaattgatgtaaagcagggttaagttcctacagcatatttcctgtcactaaaaccatcatcaaactgctaaagaccaaaacacttataatattaagcattgaaataaacgtgagctgtacatacatttgagaaatattaataaaaacaggataatgatttacccaattatttcagttcagggttgcagggagacagagtatatcccaacagctcagggcacaaggcaaaaacgaacccagaaccatgagggaatctttctcatgtttttcttgtgagaacctaatgtggtttgggtccgtgtccccacccaaatcccacattgaattgtgattcccagtattggaggagggacctggtgggaggtggctgggtcatgggggtggatatctcccttgctgttctcacaatagtgagcaagttctcaccccctctctctcttcctcctgcctgaccgtgtaaaatgtgcctgcttccccttcgtcttccaccat

SEQ ID NO: 828686 - DNA, 562 bp, Homo sapiens
acagaagtcattgattgtggaagtcaagggtcactccctggggcaatgcttgttcaactggggtccccggggccaggagcacagaagtcaccacagggccaggagcacggaagtcaccatggggccagaagcacrgaagtcaccacggtgccaggagcacggaagtcaccacggggccaggagcacagaagtcaccatggggccaggagcatggaagtcaccacagggccaggagcatggaagtcaccaggacttgttggagatgcagattctgggccctccacagacctaactccgccgccctgggctggggccctgtctgggggagacccggagaggcaggacctggggcgggctgggaggctggggaaaccctgagaggcaggacttggggccagctgggaggctgggaccagtcgtggtcgggtttagtcttccctcgtaaaccttgagaaaagatttgactttgtacatgtgtttttcttttctgatgaaaacaaatgctcaatttttcagagaaatataaacacatggaaaaattaaaaccataaaatgctgcccc

SEQ ID NO: 828687 - DNA, 529 bp, Homo sapiens
aattttgcggtagcttttgaatattgaaagaatgcttccttagttttctgtgccattcacaatgtaatagctgtagaaayaccacatcttaaagttatatctgcgttattgccatttatccgttactctttcaagtctagatgatcaaaaaacaataaatccagcctgatgcgtagcacttgtcaattttggtagcatgaatgctcccaccatggcggatttcaagacattgcgtggcgtccagtttggagttagctgcatggacccactgttaagcttccttccactctgtagctgtgagatgcaaataacctcaatttaattttaagttatcctattggtagcccttatgaaaaattatacaaaattgtgatgcaaataaaataattatgcacttggatattaagaaaaactttattttccttccataagcaatgtattttaaatatagttgagatctttattataactgtaactaatgcattttcctccaacttgcatacttttctctttcttggtcatttgaata

SEQ ID NO: 828688 - DNA, 469 bp, Homo sapiens
caaggggtgagactgggttctgccacgtggcggcctcaggggaccatgagggtgaccagggaagctgccaggcctcaggagacctgggctaggaacacacacwacctcacgcctgccacttctgttggtcaaagcccagccctggttaagagagtggagacgtaagcttcaccttttgctgggaagggccatgacagtgtgtggctatttgaaatctaccacacttcctaatcgggggcagacccagatgtgtgtgttctgttctttaattaatagactttattttttgagtagttttgggtttacaggaaaatgaatgagaagcacagaaagttctcatagagcccccgcccccagcacctccacctcacctcccagttcccctgttgttaacatcttgcaagagtttggtatatttgttacaattggggagtcaatatccgcagatgactattaactaaagttcaca

SEQ ID NO: 828689 - DNA, 529 bp, Homo sapiens
atgtggaagatgaatcctgcagtggctgtgaaaaccactgtgcccagatgagctgcagttacgacgagagctatcagtggaaattttcaacaggagggatcacgatcctgacgcatccctctgacaaattgtaagcggcagttggaacatggcttcaccaatatgatcgccaaggcaaagcatcatgaaagcgatggctaccaagaggtggcagtggtccagtcaaaggaaaaggaagccagtcaggagcccacatcatggcatcagtgttttgggacactcaaggcattttgcttgttgactttctgaaaggccaaacatctgcttattaggagagtgttctgagaagcttagataaagctttggtagaaacatgctgggagagtctcactagatccttgttcaccacatcaatgctctgctcattcctctcatcaaacaagggcaattttgtcagtttcaatgggcagtccttakgaattcaccttacgggctgctttcattccttttaaatactttttgtttccta

SEQ ID NO: 828690 - DNA, 610 bp, Homo sapiens
atgtgatgaggacatgtctaaaatctactcttatagcaattttcaagtatacaatacatasttatacactgtagatgccaggctgttcaatagatctctagaaccattcctctctgaaattttgtatcatgagactatcatctctccagtccctccctgacccctgcctcgggtaaccaccgttctgctctctacagctatgagttgcattgtttgagattgcacatataagtgagatcatgcagtatttgtctttttgtgcttgctttttaaatctttattatgtaattatttattttttgagacagggtctcagtctgtcacccaggctggagtacagtgacacaaacacggctcactcaccacggcctccacctcccggggtcgagagttcctcccgcttcagcctcctgaatagctaggactacaggcttccaacgccacacttggctaatttttgtgtttcttttagagatggggtttcaccatgttgcccaggttcatctccaactcctgggttcaacgcttccacctgccttggcctcccaaagtactgggattacaggcatgagccaccgtgcctggcctttgctttctttcactcagtgta

SEQ ID NO: 828691 - DNA, 549 bp, Homo sapiens
gagacagggtctcagtctgtcacccaggctggagtacagtgacacaaacacggctcactcaccacggcctccacctcccggggtcgagagttcctcccgcttcagcctcctgaatagctaggactacaggcttccaacgccacacttggctaatttttgtgtttcttttagagatggggtttcaccatgttgcccaggttcatctccaactcctgggttcaacgcttccacctgccttggcctcccaaagtactgggattacaggcatgagccaccgtgcctggcctttgctttctttcactcagtgtaccatcctctaggctcattcgtgttgccaatgagatgatttctttcttttttaaggctgaattgtgttctattgggcatatgtaccgcttttctttttatgtttaattttttttggttttttgagacagagtttcgctcgcgtcgcccaggctggagtgcagtggcgtgatttckagtcactacaacctctgcctcccaggttgaagtgattctcctgcctcacctgagattagaggcatg

SEQ ID NO: 828692 - DNA, 617 bp, Homo sapiens
aaaatgaaataacatacactacaaaagacgtttatttattaaatccccayagaaggggtctaagtgataaaggaaaataaaattccgggaacggtaaaatcaatcagaaatgccctacttcagtgctttccgaaatttgtctgacagagtggaaatccagtttttcactaagtcactgttctggaacagtttgtgtgtgtgtatgtacgtgtgtgagggctcacatacacaaattgaactaatggaagtgtaagcattcaaattatcagtttaatttagttctatacatatacacacacacacactcacacaccgaaaacattgataaaatcagccattccagcaaaactagctacttagtgtctatctctccttgaagattcaaactagaaatgaggatttagagaggcatgatggttcgttctctcttggagcccagttcgaagttgactgactgattcagtcattgtaattggttggtcttggggaagaatccactttgactcttgggaagtcagctaggtcagcggacagagcaggggctctggagccagactgcctgcacccgacttctagctatgataccttggataaactacttatcacctgggcttcag

SEQ ID NO: 828693 - DNA, 608 bp, Homo sapiens
aagcacaacgtgctaggactggaatgactttaaaaccacacataaatttctgagagatttttgccrtaaggtaccatccaccttactgtaaaccacatcctaaaattgtctgcagtgcaaatggattatgtgcatccaacaggaaacagcataggttgagaagctgttacttaatagcttcattgtcaccacgagtgtaaagtgtggggtctcatcacttttgcacccacgttttgcctgttggtttctccacactgtcaggagcatttgaccaactcactgtggctcagggtcccttacgcagcctgttggggaaaccagtgggtattgaagacctgcctctggtgtgccaggaggttgtgcctgccggccactctgacttgcgatcttccgcctcagtgtatggcttcctacacctgggtaattaacattgccagcatgataaggaggtcctttcatcactattgccactagtccttccgactcctgtgccctgtttctcctttattggaacccaagaacgagtaaacatagcattttcaaacatcccgcccccttccctggtaacaccaatattccaccatcctaattccctcacaagcattcag

SEQ ID NO: 828694 - DNA, 586 bp, Homo sapiens
tactgtaaaccacatcctaaaattgtctgcagtgcaaatggattatgtgcatccaacaggaaacagcataggttgagaagctgttacttaatagcttcattgtcaccacgagtgtaaagtgtggggtctcatcacttttgcacccacgttttgcctgttggtttctccacactgtcaggagcatttgaccaactcactgtggctcagggtcccttacgcagcctgttggggaaaccagtgggtattgaagacctgcctctggtgtgccaggaggttgtgcctgccggccactctgacttgcgatcttccgcctcagtgtatggcttcctacacctgggtaattaacattgccagcatgataaggaggtcctttcatcactattgccactagtccttccgactcctgtgccctgtttctcctttattggaacccaagaacgagtaaacatagyattttcaaacatcccgcccccttccctggtaacaccaatattccaccatcctaattccctcacaagcattcagtctctccaccctgaggtggtgaaatccctgcaggcatttataagtatacctggacagaaga

SEQ ID NO: 828695 - DNA, 467 bp, Homo sapiens
tatgatggaattacatcctccttccctgcactcagcaaccgagatcttcccgctacgggcactcaaaggtttcattgtctgaaatatcagcctaaacgtagtttatgtttaggaagcaacaaccgtaaatagkcccacatccaaacggagtggatttaggtttcactttttcaaggaaaaaccatcaaagaatttttccacatacttataaaccatcccacgtatagaatccatttttactgacacaaatttagtaccaataaacgactcttcttctcaatttgttttatttcacaataagtcttgaacgtcattcccagttaacattttgaagagtttcctctctttcgttgtgttagagctgcagagtattcttccgtaaggatgaacgtactataatttattagccagccacttagtgatgtacaattaagcagttttaaatctttgactcttggaaatattgt

SEQ ID NO: 828696 - DNA, 358 bp, Homo sapiens
catcaatgctctgctcattccactcatcaaacaagggcaattttgtcagtttcaatkggcagtccttaggaattcaccttacgggctgctttcattccttctaaattctttttgtttcctaatgataaaaagtctccttgccttgcttggaaagatgagagaaagtctccttgccttgtttggacagatgagagatgagatcctcctcttctctcccaggacagaatggtgagacttgagtttcctttctcctcactcttctcctccttgagggagctgctgtgccggacagacctgcccccgtgtctagacactggtagactcgtttaagttcctcacaggcaatcctccatggggt

SEQ ID NO: 828697 - DNA, 365 bp, Homo sapiens
catcaatgctctgctcattcctctcatcaaacaagggcaattttgtcagtttcaatkggcagtccttaggaattcaccttacgggctgctttcattccttttaaattctttttgtttcctaatgataaaaagtctccttgccttgcttggaaagatgagagaaagtctccttgccttgtttggacagatgagagatgagatcctcctcttctctcccaggacagaatggtgagacttgagtttcctttctcctcactcttctcctccttgagggagctgctgtgccggacagacctgcccccgtgtctagacactggtagactcgtttaagttcctcacaggcaatcctccatggggtcaaagtg

SEQ ID NO: 828698 - DNA, 556 bp, Homo sapiens
agccgtgtttgtgtcactgtactccagcctgggtgacagactgagaccctgtctcaaaaaataaataattacataataaagatttaaaaagcaagcacaaaaagacaaatactgcatgatctcacttatatgtgyaatctcaaacaatgcaactcatagctgtagagagcagaacggtggttacccgaggcaggggtcagggagggactggagagatgatagtctcatgatacaaaatttcagagaggaatggttctagagatctattgaacagcctggcatctacagtgtataagtatgtattgtatacttgaaaattgctataagagtagattttagacatgtcctcatcacattaaaatcagtatgtgaggaaacgagtgtgttaattagcttgattttgtcattccacaatgtatacacgtatgaaacatcatgttgtatgccataaatatatataatttttatttgtcaagttaaaattaaaattcatataaattataaaaataaaatgaaataacatacactacaaaagacgtttagttattaaatcccc

SEQ ID NO: 828699 - DNA, 571 bp, Homo sapiens
gagatgatagtctcatgatacaaaatttcagagaggaatggttctagagatctattgaacagcctggcatctamagtgtataagtatgtattgtatacttgaaaattgctataagagtagattttagacatgtcctcatcacattaaaatcagtatgtgaggaaacgagtgtgttaattagcttgattttgtcattccacaatgtatacacgtatgaaacatcatgttgtatgccataaatatatataatttttatttgtcaagttaaaattaaaattcatataaattataaaaataaaatgaaataacatacactacaaaagacgtttagttattaaatccccacagaaggggtctaagtgataaaggaaaataaaattccgggaacggtaaaatcaatcagaaatgccctacttcagtgctttccgaaatttgtctgacagagtggaaatccagtttttcactaagtcactgttctggaacagtttgtgtgtgtgtatgtatgtgtgtgagggctcacatacacaaattgaactaatggaagtgtaagcattcaaattatcagtttaat

SEQ ID NO: 828700 - DNA, 611 bp, Homo sapiens
ctgaatgcttgtgagggaattaggatggtggaatattggtgttaccaggaaagggggcgggatgtttgaaaatgctatgtttactcgttcttgggttccaataaaggagaaacagggcacaggagtcggaaggactagtggcaatagtgatgaaaggacctccttatcatgctggcaatgttaattacccaggtgtaggaagccatacactgaggcggaagatcgcaagtcagagtggccggcaggcacaacctcctggcacaccagaggcaggtcttcaatacccactggtttccccaacaggctgcgtaagggaccctgagccacagtgagttggtcaaatgctcctgacagtgtggagaaaccaacaggcaaaacgtgggtgcaaaagtgatgagaccccacactttacactcgtggtgacaatgaagctattaagtaacagcttctcaacctatgctgtttcctgttggatgcacataatccatttgcactgcagacaattttaggatgtggtttacagtaaggtggatggtaccttayggcaaaaatctctcagaaatttatgtgtggttttaaagtcattccagtcctagcacgttgtgcttttc

SEQ ID NO: 828701 - DNA, 542 bp, Homo sapiens
taattttttttgtattttttagaagagacggggtttcaccatggtctcgawctcccgacctcgtgatccgcccgtctcggcctcccaaagtgctgggattacaggcgtgagccaccgcgccgggcctgtttccctatttaaataataaacccttctctttctttgctttcacaaacttcttgaaataatattcatcccctacatgattttcattcataaaataaatcaaaaaagggaatttcaaaacttacttctcatttctggttcataactcagtgaacttggtttgtggaccctatattgttttagcagttttttgtcccaggcaccacaatttaaaggacttgccaaacgtaaaaactccctaagaaagagacaaagcaaagttattccttgattgagattattatataattcattaaccaaatattcagaaaaagaatttaataaattccaacagactaattacaataaaaaaatgcaaagtataataaaacaatatagtgttagttttacatttaatcaccatatagctatatatc

SEQ ID NO: 828702 - DNA, 524 bp, Homo sapiens
agtgtatgattgtgagcatattgtcagaaacttgtcaatgtctttttaggttgccaagagyaggcatagaagggaagaggtgggtgtttgaatttaggtttctcagatctatcattcagtcaaacagaagcacgctttccacattcacaggattcatatcataaatcaaatactttcatttacttctcctttaatacttgcttaatcatgactgcttcttcctttgtagatttccatgtggtttccaagccctatcactacactggtgtaaaatatgcattccatctctatgaaagctgtaatgaatgagctaaggttgaatttacttctctgttcatgcacattacaacggtcattctcaaaaggtgttcaaaacatttatccccacagtgatttgagaataaattaatattgcccttttggtaaacatggaaaacaggatcaatggcattaaaatattcatttaggattacaggtactgatgactattcataatcataaatgtatatatttgaataattcta

SEQ ID NO: 828703 - DNA, 601 bp, Homo sapiens
atgatgattggttgcctaaaagctattatgaaaataaagcaataaaagaattcatatgaaagtctatgaatcaagattacagacaaaaggaattgcttcacaaaattattttcagagtatatcaaaatatgccaggatctagttttcaaagatgtgataagactgttaagcatttgaataaaaaaattaaatttttacagtaaaatttactttttatatgacttctcattgttgatttctagatatgtaatatagtccataactattagaattaattactaagattatacttgaaaaataacaattaagaaaagacaccaaataaggaaatagaaaaaaataaaagtaatttctaaataaattatctcgatgtttggaagtacattgtactagttcgttttctcactgctgataaagacatacccaagattgggcaatttacaaaagaaagaggtttaatggactcacagttccacgtggctggggaggtctcacaaccatgacagaaggtgaaaggcacatctcacgtggtggcagacaagagaagagcttgtgcagtgaaactcccccttayaaaaccatcagatctcatgagacatat

SEQ ID NO: 828704 - DNA, 517 bp, Homo sapiens
cttaagtgtgcaatgtttataaagtctacagtgtttcacattcactcacygctcactcactgactcacccagagcaacttccagtcctgcaagtttcatttatccaattgccctgtacaggtgcagaacttcgtatcttttataccatatttttactgcatttctctatgtgtagatatgttagaaacacacatacttgccattgtgttccaactgcctacaggattcagcacagtataacatgctatataggtgtgaatcctaggagcaataggctagaccacacagcctggggtgggtttgttgcctagcagcagtaggctagaccatctaggtttgtgtaaatgcactctatgatgttcacacagccatgaaattgactagcaatgcatttctcagaacgtatctttgtccttaattgacacatgtctatacataccaggtatacttgaacacaatttttgcgaatccatcttttacaaactgagttcaaagttaaaaagcattagtacatagt

SEQ ID NO: 828705 - DNA, 482 bp, Homo sapiens
cgaagagccccagacatcagatagttaatttttcagggttcttaaactgtccaaattcttatatttaaggtttcatttagtaaggaaggaggttgtaattgtttctatkcataagcttgattttcccttagtggatagaaattgacttgaaaattgaacaattttctttgtggaatttttagaaaatagtattcatcacaaaaacaaaagacaaatggataatgagattgaaagagttgtataatataatctatttgttttaccccaattagcatgcttatttgtagaaaattatgtttggcttccatagagtctgtatggatctgtgctgaagttgcgaacatttgcctcaagcccagatctctagtatcacagacttacttattacaagaattcacacagaaaacaaaatactatatacttacttaatgtgtttccactccccttttcccctttctggccttttggtccagaatttcctt

SEQ ID NO: 828706 - DNA, 442 bp, Homo sapiens
gaccaggctgggaaacatagcaagamcctttctatacaaaaaataataaattggccaggcatggtagtgcacacctgtagctccagccactctgaaggatgagggaggatagttggagcccaggagttcgaggctgcagtaagctataccatgctaccgtactctagcctggagtgagactctgttgcttaaaaaaaagaaagaagaaatatttggatatgtaacaccttttctcatttcagttatttcctgcattagtcacttcttgcattgctataaagaaatacctgagactgagtaagaaaagaggtttaattgactcacagttctgcaggctatacaagaagtatagtggcatctgcttctggagaggcctcagggggcttttactcatggcagaaggcaaagcaggagtaggcacatcacatggcaagaacagggc

SEQ ID NO: 828707 - DNA, 578 bp, Homo sapiens
gtgtggtgacctgtgcctgtagttccagctacctgggaggctgaggtgggaagatcacttgaggacaggagrcagagattacagtgacccaagatcatgccactgcactccagcctgggtcacagaaagagactatcccctcaacacgccctaaaaaagatttacatcttaagggcaggacatttccagagacgatcggctgaagggggcaaataataggctgtgagcccatacaagtccagtgcttgaatttgagcaaaataaataatcttgtgtgagtatcaggctaaatttcttactgcagaataggaagcctggagttgtttcttcaaagggcaggaaaggtacttggtactcaggctatggaggaaagggaagtggagtgttgggcctctgcttcatctgcattcctgcacataattgcatgaatttccacttttgctgctgtgaaaaatggggctgatgtttttccttctaattggttctggtgagagtgaggctgtgagagtcagctgggatagggactaagcaggacaagtgctaactgctggatccataattgatttaaatctctattt

SEQ ID NO: 828708 - DNA, 621 bp, Homo sapiens
aataatgtttccagtgttaagcaaaaatgtcttttacattatttgttagatttattcrtaagttcttaattttttaatgttatgaatgatttcattttatagtttcttttctctttgcttattactaacatatagaaattccattgatttttggtatattgacttatactctattatcatgttaaatttatcttttctaatattgtgtctgcagttctttgggatgtttcatgtactctgtcatttcatccatgcgtaggtactatcttatttcttccttttcaattctaatgcccatgatttaatttttttttgccttattgtcctgactgaaatttctagtataacacaaaatagaagtggcgatagtgagcattttgtcatatttcttatttcatttgaaatttttaaatgctttataattgattatcttgttcactgaagatttttcatggatagttttgttaaattaagaaagttcatttatatttcaagtttgttgaaattttatcacaagtgcgtggtgaatgttgtcaaataagtcgtctatattaatctagctatttagtttttcccttcattgtataaacttgaataattacattatttgattttcttatc

SEQ ID NO: 828709 - DNA, 485 bp, Homo sapiens
cttctgctgggtactgagcacgcaaaggggagaaatcatggattctagcctcaagtataattcattcctacaaaaagtgcccacatctgcttgagggactcagaaaagtcttcccagaggtggcaggctttgatggagactgggtagatgaggagaatgaacaggtctggaagcagacagtgactaaaaaaagaatgaaatacggataatgtctgggtacagtaagaattgatacaaaagcaaccaattctgcagttcagcaagttctgcccaagctcttacttaatgccttttaatgacaaaaagaaattttaacggaaagaagaggaaactcggaaagcatttaagaacatagttttgctctgagaccattctaatagatggttgctgtcattatggaatcactttggtagaaaggatctctgyacttcaattgccaggaaccagggtaagaaaattctttgtgggatcctttaaaatcaaga

SEQ ID NO: 828710 - DNA, 568 bp, Homo sapiens
agccatttttcttggtttctataatastacatttgcctaattttccttctatctttctgaacactcctttttagtccagtttcttctttcaatagacctctaaaggttcctagtgttaagtcttggatcctctttatttccctacatgtactttcctcctaggtgatctcaccactttcatagctttaaaaaccatatatatgctaaagattcttacatttctccatcccagccctttcttttgactccagactggtatagacaacttgccaataacatcttgacttaaatgtttcacaggcaacttatacttaattttttccaaagttaagttttaatttatttctcaaaagctgatcctgtctgcaatcctcctcgttataataagtaaatctgttctggcctcctttcatttctttgagtaggcagctctttgcttcagtctggaatgctttctccttaactcattagatggttggctcctactcatctttcaaatcttaacttaaatcttactatgaagacagacttttcttgtccttcctccatttctatcagagcaacatgt

SEQ ID NO: 828711 - DNA, 672 bp, Homo sapiens
tatctacctcgtgtgtgtgtgtgtgtgtgtgtgtgtgtgtgtgtgtgtgtggtaagagcacctaaaatctactctcctagcaaattttcaatayacaatatcataccccatttttcttaatcctgtatcttttaaactgcagtgttacataaccaatatttatgaaatgaccaagaggtcctaagaggtactgaaatgccatacgaatcataaaagaaagattaaattgacattcaaaatggtgttcgagtaaattgtatttgtgccctcaccaatctactgaaatttctcttctaaaagtcacaaatgtttacgatttcagccaatccttttttcacatgttgtccccttgttatcagcatttatcactccttctttgaaattcccttctccatgagtttcctctcttcccagtcatctactcttcatttgctcccatcgtcctgactgctcctcatctggcccctcttcctcctctgaactgtcccaaatgagttctcctcccactcctgttatatactttctctacaatattagggtttcaaccatcaagactacatgaagaatcccctaaacaacatcttcaaatactgacctttctcccaatctctttctagatgtcaactggcatctcttgatgtctaatatggaacttcccccaccctaacctcc

SEQ ID NO: 828712 - DNA, 579 bp, Homo sapiens
caccactatactccatcctgggggacacagcgagactccgtctcaaataataataataacaataagataattgaaagtgaggctgtaaaagaatatgctkaaatatttgaattattttccccaagagttgatattcttcttttccttatgggttacagagatgaagaggggaggagctctaatttatttcagtacacaaagataacatgatgtttttaaagaactgctgttggccaggtgcagtggctcacatttgtaacctcagcactttgggaagttgaggcaggtagatcacttgagtccaggaaaaaaatatgcaaaaaattagccaggcatagtggcatgcacttatagtcccagacactcaggtggctgaggtgggaggatcgcttgagcctggaagacagagagttgtagtgagcctagatggcaccacagcactccagcctgggtgacagagccagaccctgtcttaaggcaggggtgggtggggggagcactgctgttattacaataataaaaatattaaggggccagtggctgtcgaacatgaattaatggaactattgggaaaaaaat

SEQ ID NO: 828713 - DNA, 579 bp, Homo sapiens
caccactatactccatcctgggggacacagcgagactccgtctcaaataataataataacaataagataattgaaagtgaggctgtaaaagaatatgctgaaatatttgmattattttccccaagagttgatattcttcttttccttatgggttacagagatgaagaggggaggagctctaatttatttcagtacacaaagataacatgatgtttttaaagaactgctgttggccaggtgcagtggctcacatttgtaacctcagcactttgggaagttgaggcaggtagatcacttgagtccaggaaaaaaatatgcaaaaaattagccaggcatagtggcatgcacttatagtcccagacactcaggtggctgaggtgggaggatcgcttgagcctggaagacagagagttgtagtgagcctagatggcaccacagcactccagcctgggtgacagagccagaccctgtcttaaggcaggggtgggtggggggagcactgctgttattacaataataaaaatattaaggggccagtggctgtcgaacatgaattaatggaactattgggaaaaaaat

SEQ ID NO: 828714 - DNA, 549 bp, Homo sapiens
  misc_feature 247: n = A,T,C or G
aaacacagaggtcacacagaccctggtgtgggcccaggggcgccattgtgtgacctctgatatctgtctcctcamtgaatcacacaaccacccatggggggcaggcaatgaccatgctcattctacagatgacaaaactgaggctgagagaggcaaagttgcttgtctaagatcccacagatgacgaatggcagagctgggaatttgaactggatcagtttggttcttgagcctgggctctttctanaacaatatgccctccttaccaggatggaaattgacggatgaagagaaaggggcagctgaggagtctgggagaccaaggcaggtgttccagacagagacagtgacacagaaggaggggcagagtgacagaggagaaggggcgggcaggtactgggacagggaagcagaggttgtccccagagtgacctgggtaggagattggcttgggtccccccagctgggcctaagcacagctacgctgggccctgcatcccagcccctgggaccggtgccaggtggacagtctgacctggaagctgatgt

SEQ ID NO: 828715 - DNA, 549 bp, Homo sapiens
  misc_feature 247: n = A,T,C or G
aaacacagaggtcacacagaccctggtgtgggcccaggggcgccattgtgtgacctctgatatctgtctcctcaatgaaycacacaaccacccatggggggcaggcaatgaccatgctcattctacagatgacaaaactgaggctgagagaggcaaagttgcttgtctaagatcccacagatgacgaatggcagagctgggaatttgaactggatcagtttggttcttgagcctgggctctttctanaacaatatgccctccttaccaggatggaaattgacggatgaagagaaaggggcagctgaggagtctgggagaccaaggcaggtgttccagacagagacagtgacacagaaggaggggcagagtgacagaggagaaggggcgggcaggtactgggacagggaagcagaggttgtccccagagtgacctgggtaggagattggcttgggtccccccagctgggcctaagcacagctacgctgggccctgcatcccagcccctgggaccggtgccaggtggacagtctgacctggaagctgatgt

SEQ ID NO: 828716 - DNA, 549 bp, Homo sapiens
  misc_feature 247: n = A,T,C or G
aaacacagaggtcacacagaccctggtgtgggcccaggggcgccattgtgtgacctctgatatctgtctcctcaatgaatcacacaaccacccatggggggcaggcaatgaccatgctcattctacagatgamaaaactgaggctgagagaggcaaagttgcttgtctaagatcccacagatgacgaatggcagagctgggaatttgaactggatcagtttggttcttgagcctgggctctttctanaacaatatgccctccttaccaggatggaaattgacggatgaagagaaaggggcagctgaggagtctgggagaccaaggcaggtgttccagacagagacagtgacacagaaggaggggcagagtgacagaggagaaggggcgggcaggtactgggacagggaagcagaggttgtccccagagtgacctgggtaggagattggcttgggtccccccagctgggcctaagcacagctacgctgggccctgcatcccagcccctgggaccggtgccaggtggacagtctgacctggaagctgatgt

SEQ ID NO: 828717 - DNA, 588 bp, Homo sapiens
cgctatgcacactgggtagtcagccagccaccagacacgtacctgaagtcattaatgacagagttgctaaaaggcatcctggatagcaacaagagagtaccagaagctgcctgcagtgcctttgctaccctagaagaggaggcttgtacagaacttgttgcttaccttgcttatatacttgataccctggtctttgcatttagtaaataccagcataagaacctgctcattctttacaatgccagagggacattagcagattcagtaggacatcatttaaacaaaccagaatatattcaaatgctaatgcctctactgatccagaaacggaacatgttaaaggatgaagataaagatcttttccctttacctgagtgtccattttcagttgccacggtgctgcagtctggcttccttccatactgtgaacctatgtatcagcattgggtaaacctagtacagaagactcttgcacaagccatactaagcaatgctcaaccagatcaatatgragctccagataaagattttatgatagtggctcttgatttactgagtggcctggctgaaggacttggaggcaatatt

SEQ ID NO: 828718 - DNA, 605 bp, Homo sapiens
ttttcttttttcatagaatatttttcttccatctccctttctctgacagaaaaaaccatctcaaaggccatctcttccaggaggaggmtatgccagagtcctctttcatggtgctacctccatcatcgcaccaaccatgtggtaatgtcattgtgcagataggataatgttttaatattttaattgatgagattttctttaggattccctgacacctcaaagttcttctctttgaggagctagactttaggaacataggaaagcataagtgactcattcttggcttttgcattccaaaaaaccatttgggaaacataaacctggattttcgagctttcatatactgagaaaaaagaaagcagccctgacttttgggagctatcaactaggttgatattattggcacattatgaaacctgaccttggttttgctaggagctggcctggaacccacacgcaggtctgggtgtcctcctattaaacagaaataatttcatagcacatcaacataaggctactctgatgaccacgttgcatccagacaaaaacaagaccattccataaggatgtctgaacacagacaaaacatgaacatgtcaaagcca

SEQ ID NO: 828719 - DNA, 605 bp, Homo sapiens
ttttcttttttcatagaatatttttcttccatctccctttctctgacagaaaaaaccatctcaaaggccatctcttccaggaggaggatatgccagagtcctcyttcatggtgctacctccatcatcgcaccaaccatgtggtaatgtcattgtgcagataggataatgttttaatattttaattgatgagattttctttaggattccctgacacctcaaagttcttctctttgaggagctagactttaggaacataggaaagcataagtgactcattcttggcttttgcattccaaaaaaccatttgggaaacataaacctggattttcgagctttcatatactgagaaaaaagaaagcagccctgacttttgggagctatcaactaggttgatattattggcacattatgaaacctgaccttggttttgctaggagctggcctggaacccacacgcaggtctgggtgtcctcctattaaacagaaataatttcatagcacatcaacataaggctactctgatgaccacgttgcatccagacaaaaacaagaccattccataaggatgtctgaacacagacaaaacatgaacatgtcaaagcca

SEQ ID NO: 828720 - DNA, 599 bp, Homo sapiens
cctctcaggtcctggggaaaggcgaggacacacgatagaagcttgctcggggtgtggagagctggcagacaaagctgcactcytcagcccgggtgctaagctcacaccaccctctgtctccttgttcaccccagaggcatcaagctctatgttttcagctttttttcatgaaaatgaatcctgttgttctatcctgaatacaagctttctgaagacagggggcctcttttgtaccttgcaaagtagcttgtacttagcaggtgctcattaaatatttgttgctgacaagcgtttgaggaaagtgatgaagatgggctaattcgcatgatccctttaatgatttgatctgatggcctacagttttatcttttaggttgctgtcctcctctctctctccccgtttggtgggaacatctcaaggtagcaagattgaaaggcagttgccacagaagacgttaaaacatactttaagagatgaatgtgtcacttctcccaggagcagttgcttttaaagagaagatagaagaaagccactggtgctggctccccaccccctctgcccccagcctctctttctctctctttgttattctgagaca

SEQ ID NO: 828721 - DNA, 389 bp, Homo sapiens
gaacatattcaggtgcagacctcrgccctctgcatgcagtagaggtgaaataagtcatcgtggaaggaatgagtgaatggagagaatctgcgctcagaatcccaacgatggaattggaggaatgtggaccctggagtctggataatttggtattatgttctggctcgaactcatactagctgtatgattttaggtacatttctcaaccttctgaatctccattttctcatttgcaaacagaggttggataggaacactcactgtacaggtttatggagcggcatttagggaaactatgggcagcccctggcctggtgctagggcctgtgttaaaagtcgctttccgtttatagtcctggagtcacccttattaactggattctacggtt

SEQ ID NO: 828722 - DNA, 530 bp, Homo sapiens
tctatctactgggagactgcctgtgccctggcaccagctgtgaccaattattatttcagcgacacactgtaacaaccacctgaccatctgatggtcacctgacattcctgggttggggactctcctgccctgctcatgcctgcccgactacctactgtaacacaactatgtgccaggcgctgtgctaagtgatacatacagtggtgagcaagacgttccaaggtgctcatagtagatgggagtgtttccacacacacattatcctgctcccagccttccctccagtcccagggttcccaagctgtgcaccaagctggaattggcattagacacagcaagtcctactgggaaatggctaggaggctgacaaatcctgctgttttggatcttgcaccagattcttggcactatggtgcacagaaacagagaaaagggtgcttttagsacagttcgcccacctggagttgctggaattttctaacaccccaccatacttcctccaactcatagatcagcctacaaagtgaaaa

SEQ ID NO: 828723 - DNA, 811 bp, Homo sapiens
cctgacccctggctcttattccacaaaggatcctatctctctgacaacctgatttccagagacaccaaagatcaggctwctcttgagcctggccctggccctaaaagcctggcttttaggaagcatgagggttccgacatgcatgttttactgtgctcctgcaccctggggatgtttctccttgtcctacctggcttcaccacctccacatttgagcactggtatggtggcttggactggcctagtgtcccccaccctgctcacatagcctgggcccagtttgcagggcctcacaggacaggcacagggcttggtgtgagatggcaggagctcatcttcaggtccccagtataggaatagtgtcatctcttgcaactcacctaccaatgccactcctcagtttgctcaactgtaaatggatgaaatgataccaacctgagagttgttccaagaccagcaatggaagcaaacgtaagagcccttgaaaagagaaagctgtttcataaaaacagtgtgtggttcagacagccccgcctgccaccacggcagaaagccagaaagcacccggatgtgtcacccacaccactgtttggctaagactgactctacatgctctctccaccccagaggacacctccgtccaggcagggggattgctggcagggtgccgtctacactgacatcctcagactgcagagattcccacaagtgggctggtctgggaggagaggaagatgtaggtgtttcttaggtattgtcaaataagaggatcagcagaataggaagtggcagagagcagagactgtctgtg

SEQ ID NO: 828724 - DNA, 625 bp, Homo sapiens
caaagcactccagccaaaaaaaaaaaaaaaaaaaaaaaaggttcctggcttyttccccttccctagcccagcccacctgcagatgggccacccccaagcagagggtggggtcctccactcctttgctggggatggggaatcccgactgtgggtgtgcccagcccccacctcgtgcctctccctgccccaggtgcaatcctgtctcgtgctccgtttcagcctcacaagctccttctccttctcaaagaggagtgaagctttcctggtgttgtcagctcagccgagcagagcttgtcttcccactgtctccctccctcccccacacaggtgggggattctgaaatcaccgcctcgctgcagaatcaagacctggatgttgtcaggagcctctgcaaaggctgactgccagcatcccacgtctcaggaagtgggtggccactgctcaggagaagctgcctggagacagcctccctccctcgccatcacctctggccagaggcgatgcgcaagtggaaacagcagtgcccagtccagggcggggaggacacagcttcctcttgggcttccattcactgcatgtgtcctgtgcactaggtatgggacgatgtacgacacacacatgatc

SEQ ID NO: 828725 - DNA, 620 bp, Homo sapiens
ccattctcctacctcagcctccaaagtagctgggattacaggcatgcaccaccatgcccaactaattttgtatttttagtagagatggggtttctccatgttggtcaggctggtctcgaactcctgacctcaggtgatccgcccgccttggcctcccaaagtgctgggattacaggcgtgagccaccgtgcccagccagaaacctatttactttgttgaaagtgtccctctcactccaatttctctgactacagattctgtttacaggtaacacatggaacatactttgggctataccactgtaacattttagtatgtttcaagaagctttgaaaccccactttgttttttggcatccatacatgtgttctggaagggtgcttggccctgccacttgtgagccactttcagagctgctttcattgcccacacctactttactggagttctaggtacttacgtagcttctaagccctgtcctagttccagtgcatcctcctaattcgtcttccctctactmccatcccagaagaaagaaaaagagaagttactttgcacaataaagctattttgattatgcttttcactgtctcagaccagcccttgtttctcatgagtgc

SEQ ID NO: 828726 - DNA, 522 bp, Homo sapiens
ttaagagcgagagtctagagagtaagaccaaacaagatatacactagcctttgtaaagactgaacccagctataaatcagcttgatcccagataaggaattaagatgaacttcctctacctcagctgcccaccagaaacaaaagtaaattctctctggagaatgataacattatctggagtttcaaataatctctacaatttttattacacaccatctggtatttgattttaaaaatttttccagcatgccagaattcaaaatccaatgactaaaaaataagagaaacaaatggcttcggttaccataatggtagttttaaattttcaatagttttttgtggaacaggtggtgtttggttacatggataagtgctttcgaggtgatttctgagattttggtgcatccatcacccaagcagtgtgcrctgttgctgctacacctgagcagtgtagtagactacccaatgtgtagtattttacccctcaccctcactcccaccctttcccctgagttcccaaag

SEQ ID NO: 828727 - DNA, 622 bp, Homo sapiens
agaaagggaggagttcccaatattcgcattggcagtactctcctcagtaaaagacaaaggctaaatctttgtccaacattactagagatgctgccaaaccactgtggtggyccacgctgcaaaactgcattgtcacacatgaaaagggctctgtattccctcgctgtgtcatcatggagattaatatcatttataagcttttctcaggcttgtcgatttatgggcagtaagctctgagaagcccttgacattgacttctgagcccttggcaaaataattctaggacccaagtatgtcatctcattttctatgccatgtttcttctgctttcttttcattgccatatattgttttctctgccagaatacgtttctctccagctagacagatttgctgatcaaagaagtctcctgaagtgttacatacatcaattgctatttatttaacaggtttcaccgatactaagatcatagggatttaaaattctgatctgggttactttcattttgcagaaagatgtttaacttatttttgcaaatatagtaattttaggttctgcaaagacataatttaagcatttgagcaaaacacattgtacaacttgtttgagaaccttacaaag

SEQ ID NO: 828728 - DNA, 590 bp, Homo sapiens
attttataaagataaaatagtcagtctatcagaaagatacaataatcatatattcagcaagcttttgataatttaatcagtgatcaaagaacaacagtgtaccatttctaaaatattcagaggtgttgataatacatattaattccaacaattattcatcactattttggtccaggaattatgacaggccccggggacgcaaagctatatagactgctagtcttgaagaattcaggagatatagatattttaaaaacttactagtttaataatctaatgtgataagggattttatagagtatttggagaaagtattttaacaaaaaagactaatacaataatagaataaagctaatttaccctgtagatgaagtcttacaaagtgcatttataacattatttcatttgattgtcacaagtacttgctcttatgcagctgaaacacttgaagttcagaaaagccaagtccaaaaaactgatctgcaaatatgtttacaatatatcaaagaaaaaaacctgtctacacaactatgtgcattatgtaatcccactaaaatgtatacatgcrtacctatacatatatacacaaa

SEQ ID NO: 828729 - DNA, 218 bp, Homo sapiens
ggatcccgagatagttacctytgaggactactcagagttctgaaacatattttagccacaggacctttttgtcaagtgaaaaatctgtgagaaacctgagaatagcagaactgctccagtacgagatgggttggagacttgaagaactgatgtttcagtagggcatggtggctcacacctgtaatcgcagcactctgggaggctgacacaggaggatc

SEQ ID NO: 828730 - DNA, 610 bp, Homo sapiens
gtcagaagagttccacggtactatccaggacctaacccatcactgccttgcccaccccacacagayacagacactgaagtttaaacacaagaggggctgcatggattccttagggactggatggattcccttctttgttttcaaagaatgtgcaaataatggctctgaaatctatttctgatgaaattcacattagggctaattgcttcacagcatcttggttacacatttactaatccttcctctttgctcatttgcaaaggatgcctcacaaacatgcctcatcagatgggacatcatacagcatgatgtaagcccagtgtctccagagatgtaaacaactcaaattggcaagtatcctgggaagtaaatatagacggaaggtatggggacatacatggaacatccagtccagaaaagagggcccatgtttggtttaaaatataaatatagagcttgaatgggagaaaaaccaaaatgttccatttcctcgtatattgtcataaatgtggttaacggtgaacccaaatgtactgagaggcttggctgtgagcagatggtgcagcttccttatcagttcatcagctgggctaacatgaccctgtagaaa

SEQ ID NO: 828731 - DNA, 610 bp, Homo sapiens
gtcagaagagttccacggtactatccaggacctaacccatcactgccttgcccaccccacacagacacagacactgaagtttaaacacaagaggggctgcatggattccttagggactggatggattcccttctttgttttcaaagaatgtgcaaataatggctctgaaatctatttctgatgaaattcacattagggctaattgcttcacagcatcttggttacacatttactaatccttcctctttgctcatttgcaaaggatgcctcacaaacatgcctcatcagatgggacatcatacagcatgatgtaagcccagtgtctccagagatgtaaacaactcaaattggcaagtatcctgggaagtaaatatagacggaaggtatggggacatacatggaacatccagtccagaaaagagggcccatgtttggtttaaaatataaatatagagcttgaatgggagaaaaaccaaaatgttccatttcctcgtrtattgtcataaatgtggttaacggtgaacccaaatgtactgagaggcttggctgtgagcagatggtgcagcttccttatcagttcatcagctgggctaacatgaccctgtagaaa

SEQ ID NO: 828732 - DNA, 610 bp, Homo sapiens
gtcagaagagttccacggtactatccaggacctaacccatcactgccttgcccaccccacacagacacagacactgaagtttaaacacaagaggggctgcatggattccttagggactggatggattcccttctttgttttcaaagaatgtgcaaataatggctctgaaatctatttctgatgaaattcacattagggctaattgcttcacagcatcttggttacacatttactaatccttcctctttgctcatttgcaaaggatgcctcacaaacatgcctcatcagatgggacatcatacagcatgatgtaagcccagtgtctccagagatgtaaacaactcaaattggcaagtatcctgggaagtaaatatagacggaaggtatggggacatacatggaacatccagtccagaaaagagggcccatgtttggtttaaaatataaatatagagcttgaatgggagaaaaaccaaaatgttccatttcctcgtatattgtcataaatgtggttaacggtgaacccaaatgtactsagaggcttggctgtgagcagatggtgcagcttccttatcagttcatcagctgggctaacatgaccctgtagaaa

SEQ ID NO: 828733 - DNA, 612 bp, Homo sapiens
tttttctctctgtatccccaccactggcaaccaacccaccagagtgggataatcgatttctagttttgtaatcagaaggccaaaaagaggaacttccaggaaacagaaaatattaaaggcrtgaaataaagtagaactcaagaaaacaaacccataaatgtgtgtatgaacatttgggctcattctcttacagtgcatgtacagatctgatcctactcagcctactacatagatacattgttcaatgaacaaactaccttccaggatccagactggccactagatggagcacatgcagggcagatccaaatagcactgaatagtgtttgaaaactggacaaatgttggaatcataacccatagaatgtcaggtagaacttggggcctggcctcagacagcccaactgactgctaaaagaaaaatatcaacatccttcacaggattttagaaagacccagagtctattatcactacatttaaaatgttcaggatacaatctaaaattactccaacaaatgaaaaatcaagaaaggctaaactcaaatggtaagagataatcaatggacatcaacacaaatataatacaaatgttgaaattatctgagaaagcc

SEQ ID NO: 828734 - DNA, 632 bp, Homo sapiens
atttcaggcaaatggacacaaaaagcaagcagaagtagctattcttatgtcagatgaaacaaacttcaaagcaacagcagttaaaaaaaaaaaagrgggagggatggatggctggtaagatggccgaataggaacagctccggtctgtagctcccagcgagatcaacgcaggaggggtgtgatttctgcatttccaactgaggtacccagctcatctcattgggactggttaaacagtgggtgcaacccacaaaggacaagctgaagcagggaaatgcaaggggtcagggaactctctcctcttgccaagggaagctgtgaggaactgtgccatgaggaatggtacactccggctccgatactatgcttttcccgtggtcttcacaacccacaaaacaggagattccctcaggtgcctacaccaccagggccctggcttttcaagcacaaaactgggcagctgtttggacactgagctagtggcaggagtgtttttttcatttttattttatctttatttttatttttttaataccccaatggcacctggaatgccaacaagacacaactgttcactcttctggaaatggggctgaagccaggaagccaagtggtctatctcagtggatcct

SEQ ID NO: 828735 - DNA, 486 bp, Homo sapiens
aactgttttttttttcttccccttctctaccccgtcagcagttaacctttaactttttttttccttttagaagacgtttttaytagaccaggcaacccaactatcactgtttgtactctctgtaaagttttggtcatgaaaaaggatttgtggggctagtctttggctatggcccatctggtgtgctttgcctgtctgcatggtttgtgctccaagcctccatcttgctttacatcctgggggcatagctggtaagtgcttggcaaggctttgtttagcaaccctgccttaggggatgagctctctctggttcaatatctgcaggttttcctagccctgtctcttaaaggacaccacaaccactgggttttcttctgcctgtctgtgtgtgtactgtgatgtctgtacaaggagctctgattcatgtggcctaaagaaagggtcttggatcaagtattttttaaaaagggaagataaaagctgtgg

SEQ ID NO: 828736 - DNA, 548 bp, Homo sapiens
ttactcatttaaacatcacatttgttattaatcaaagtattacaatttggctttcttttttctatgcttctcatactagtcaggcaaggtggtaggtaagaactacaccatcatcttttaggaagtgtcagaatgcctgctgggcctacattccccttctgaaggatttcctacagataagctatcccagactgactggtgattgctgagcacctgacctgagactagtcaattgctagatgggccagtaggtatgaaatggcctggtataagaactctgccttacacaggtggtgataggctaatccaattggatactctcacttgaaaagttaaaaaaaaaaaaaaaaaaacagtcagttagttgataatttcagaggaatagaagccaaaacagagagctgcacattcagcgtaatagtagagatgagatttgggagaatggctgttgaggatataggagaataacctggtggctaayaacaacagcagctacaacaataacaagaacaatcataataaaggcttacttttattgagctcttact

SEQ ID NO: 828737 - DNA, 553 bp, Homo sapiens
tggggctggggactcagctcagggctcccctcccagctctattgccctgcctggcagctgggaccctggacacrtcccttggggtttgtggggggtgggtgagaggacacccagggagctcccagcacacatgaatgctcagctcagagtctctgcctccattgggtcctggccttggcttcacttgtttccttccctgtaacccccatcctgtcctgtctgacccctgctgagcctccctccaagatccccctcagcctccacctcagacatagccctgtcagtgcctccaggactgtccaaggtcctctggtcacacaagggagcattcccatcctagacccagatccagggccctcaccaagcagcctccagagcccggttctctcgaagccccttcaatgggatgttggaaaaaagtcccctcctcaggctctcccagcccagcagtgacagctgagtgacaggctggtgccttctcctgccccctcgaaggggatgagcccattaatatggatcctcgtttgtggtcacggaattttaaactctgctt

SEQ ID NO: 828738 - DNA, 553 bp, Homo sapiens
tggggctggggactcagctcagggctcccctcccagctctattgccctgcctggcagctgggaccctggacacatccctyggggtttgtggggggtgggtgagaggacacccagggagctcccagcacacatgaatgctcagctcagagtctctgcctccattgggtcctggccttggcttcacttgtttccttccctgtaacccccatcctgtcctgtctgacccctgctgagcctccctccaagatccccctcagcctccacctcagacatagccctgtcagtgcctccaggactgtccaaggtcctctggtcacacaagggagcattcccatcctagacccagatccagggccctcaccaagcagcctccagagcccggttctctcgaagccccttcaatgggatgttggaaaaaagtcccctcctcaggctctcccagcccagcagtgacagctgagtgacaggctggtgccttctcctgccccctcgaaggggatgagcccattaatatggatcctcgtttgtggtcacggaattttaaactctgctt

SEQ ID NO: 828739 - DNA, 602 bp, Homo sapiens
ctgaacacatttactagctctgggagatattttctagattctttgagattttctatgtagataactgtgtcatctgcaaatagagatagttttatttcttcttttacaaactatataccttttatctgtttttcttaccttaatgcagtggctataaattctagtacaatgtcaaataagataaatgagagcaggcatatccttgcatttttcctaatcttttgtattttttgttgctaatcatacagcatttgaccactaaataatttgtcacctgtggttttgtatagatgttatttattttcctgaagaaattgtataatattggtgtttattcctcttcaaaaatttggtagaagtctccagtgaaaccacttaggctgaaaaatttctttttcagaaattttaaacattatgaatttaatttgtttgatggctatagggttattcagattacccattttatcttggcttgcctttagtagtttatggtttttgagaatttggtccaattcttctattttatgagcataaggttgttcatacaatctcttattatccttttaatagctgcatgrtctatagtgatattccctatttca

SEQ ID NO: 828740 - DNA, 561 bp, Homo sapiens
gctcatcaaccactgtgagaaagcagtgagggacagacacaggatgggccctgaaagagacagggacagtgggtgctggagggccactcagggcattcagggagggcatctcaggaaggggatatcggatctggggactggacaccaggcaggagccaagtatgtgggactggagaagggtatccaggcaaagagctcggagtgatgggggaagagaaaaagctggagcatgcaggagcatgcaggagggatgtggccagagacggcagagccagggcaggcaggcctcagagttcatggtcaggagcacagtgctcatgggcagagcagtaggaggccctggagggtttgagcaggggaatgatggggtctggcctgttttttcaaaggatcacactggttgctgctgtttatatgaccttgttggctctctgacctggggcaagttgtttaagctctcaaagcctcagtctcttcrtctgtaaaatggggatgatcacagtacccacctcacaggcatcattggaggctgatgtgtgaaaatctggagagcacttagca

SEQ ID NO: 828741 - DNA, 546 bp, Homo sapiens
tctcctccccacccccctactgccccacagagcaaggggacagagtttggaaaggaagaggccagcgtgggctggaggcatcagggagggcttsctggaggagggagaccccaatctgggccctgaaggacacactggagaggaagagcatgcagggagggaggcatagcctgcagtttgctgctcccaaatctttaggactctggatttctccacaaagagagtcaaggtcttcctggatctccccaagaccctctccccagaacaggtggagctacatccaggcaggatgggagggaggcagctcccaggtagaggtggtgggttgggtagagcaggagctactgggaacttcctgttcacttggtttccggaccaggtgcacctgaatgggagcagcgcctttgcccatctgctgtgagggggaccatggtctcacaagtgcttctgatgaggccattagaccacattccatcagccagtcagccccaccagccacacagacaattgctgcaaagcacctcatcagctgagaactgcacagcc

SEQ ID NO: 828742 - DNA, 647 bp, Homo sapiens
ataaacatcccaattcatatattgccttttcttaatctattcttccctcaacatttccctcaacttttatggggaatatacgcgygtgtgtgtgtgtgtgtgtggatacacatacatatataaatataataatctctcctttacttcttctcctgtcctagatttctcttactaactttccacttatgcaccttccttcccctctatttttcctaaaatgtagtcatagaaaatgtctaaatgaaaggagaggggagacagagacgaataaggaagcaggaaaatgctggcgcagggaccaacttcctctcctgcccactgtggtgcctttcgtagtttgggttcttccaaaagcaaagcttgagatagtggtgcgggttgtttatttgggaaggaatcccagtgaggcagggaacctgaggacttcctagaactaaatcaaatggaaacacttcagctatacaggaaatatcctctccatttacacagggcatacaccgagtaaatgactttgtaactttacttcatcctcttcatttacatagggcatacaccaagtaaccatggaaacctctagaaggtatttaaaccccagaaaattctgtaactgggctcttgagcccctatgcccgggcccgctcccactc

SEQ ID NO: 828743 - DNA, 563 bp, Homo sapiens
tttcccttcttcaagttaactatgaattcaactcaattcagtgattgttggaaacttactggacactgactttggtgccaggtattgtgaaaggtccaaaaagcagtgggacatggctgatctcaaagtgtttacacttgtgctgaggaagaaaagtccaaacactgatagctactaacaggactaaactatgtgggctggattttagatggagagttttagatagtggagaaatgacttactgcaggcctcatggcatcaactttaagccttctttggtgttcatattaaagtactgtacactattgtccactttggtctgatcaaatgaggcagccccttttggctttggtttcaaactttgagccacgaaattacaaaaacacctattccctacacctaccaaatttactcagtattcttgcagggggaaaaaggctttaaaaagaggatgctatttgagacatgaccaattttctgttttgactttatcagtcaaaaatttgctcagtwaaatcaaaaccacaatgagatatcatctcacaacagatgctggtgaggtt

SEQ ID NO: 828744 - DNA, 630 bp, Homo sapiens
ttctgtttcaatgaaatgaaagactaggtaatcttaaaatgaatgaggattaaggaaagtgaagacaattttgaaacattaccaagtaagaaggaagccttaggcaaaagttggatgaatttgttgaggaaatggtccacatgttctgttctcattcttagcaatgttctctgcctaggactaggttctaagaaaggtggagctgatgaggcataaatgatcaaaggtcaaaacaagagtagggcattttacagtggtaatgaatggctaggacaggggttcctagccagctgctcattggtttttcctgctgtgtctggctagacaatagagggttttatgaaggccacaaatacttggtcccccttcctcatttctctttctctgtaaaggcccagtaggagtcagctccatcctctctccttacttttccctgggacctaaactggttatatacttggtcctctcaaatcttacctcacagaatagaaaagacctgtgactccttgattmcatacacttacagctctattgcctgatatgatgatgtgttcaggaattcatttcatacttgagctcttccatgagggtagaataaagggaggcaaagtgccttaaccaaaatggata

SEQ ID NO: 828745 - DNA, 537 bp, Homo sapiens
ttctgaaagggcaacatgcacgccccgcctagtggcctgacccagggaagggaccccgtggctgtggggcccatctgggctcaagtctctttgacgcggccgcccagggtgagcttgtcgaacaggtactcagccaggccggcttccggggaacaaatcttgcgcaggttgctcacgtagccacccagctctttgatggtcttgacttgctcgtgcaggtagtggctctccaggaagtggcacagctgggggtcgcccttctccacggccagctggtacagatccagcaggctctggttgacgttcttctccaggtggaaggcggactccatggccacgagcccgctctcccagccttggcactctggcttcctgatatcgtgaaggcagatgtggccaccgcgcaggttytgcagcctcatcagcttctgggcatgctccattttgtcgtccgacaggcgcaggaagtagcggaagaagttctccagggctacgtcgtcccggttgaagtagaaggccatagacaggtacaggtag

SEQ ID NO: 828746 - DNA, 537 bp, Homo sapiens
ttctgaaagggcaacatgcacgccccgcctagtggcctgacccagggaagggaccccgtggctgtggggcccatctgggctcaagtctctttgacgcggccgcccagggtgagcttgtcgaacaggtactcagccaggccggcttccggggaacaaatcttgcgcaggttgctcacgtagccacccagctctttgatggtcttgacttgctcgtgcaggtagtggctctccaggaagtggcacagctgggggtcgcccttctccacggccagctggtacagatccagcaggctctggttgacgttcttctccaggtggaaggcggactccatggccacgagcccgctctcccagccttggcactctggcttcctgatatcgtgaaggcagatgtggccaccgcgcaggttctgcagcctcatcagcttctgggcatgctccattttgtcgtccgacaggcgcaggaagtagcggaagaagttctccagggcyacgtcgtcccggttgaagtagaaggccatagacaggtacaggtag

SEQ ID NO: 828747 - DNA, 604 bp, Homo sapiens
attcaatcaagcccttgagttctgagtcatccacaagaaaatgttctgtaaaaaagtgactcgtgattcacagttcacgagaaagggctcacttaaaataataactytaagaaaggtgtccagaacctgtggaaaaatgaaacccctttgtaggcatttattctgttaaagagtagtattttagagaaaaacatatctgaaagatatcgtgtttgtaggcaggaccctggagagatgatgtaaccagtaagaggtggtgttaggacttatttttccattagtagtaataggttatagagagctagagacatgcttgtccatgcttctttatggctaatatgacagaatttgtcttgtgatcacaatttgggtgtagttggtggctaaaaaagattttctctgcatgaagctaactgacccacctgggcttaagctcagtcttagctttattaggtccactctccaagcacctgagcaatctcctggcctaaggctgcataatatgccagtcattttcaatgagatgaggtatctgaagattaggagcaatgggaaattactttgatttttctgaaagctcatcatgattaggtgattcctaaga

SEQ ID NO: 828748 - DNA, 604 bp, Homo sapiens
attcaatcaagcccttgagttctgagtcatccacaagaaaatgttctgtaaaaaagtgactcgtgattcacagttcacgagaaagggctcacttaaaataataactctaagaarggtgtccagaacctgtggaaaaatgaaacccctttgtaggcatttattctgttaaagagtagtattttagagaaaaacatatctgaaagatatcgtgtttgtaggcaggaccctggagagatgatgtaaccagtaagaggtggtgttaggacttatttttccattagtagtaataggttatagagagctagagacatgcttgtccatgcttctttatggctaatatgacagaatttgtcttgtgatcacaatttgggtgtagttggtggctaaaaaagattttctctgcatgaagctaactgacccacctgggcttaagctcagtcttagctttattaggtccactctccaagcacctgagcaatctcctggcctaaggctgcataatatgccagtcattttcaatgagatgaggtatctgaagattaggagcaatgggaaattactttgatttttctgaaagctcatcatgattaggtgattcctaaga

SEQ ID NO: 828749 - DNA, 622 bp, Homo sapiens
tcctttactcctctgctgcactcaaaccgcttgtgggaggaggagcacgcaggtgaactggtgcaggagctggggcaagtggctttgggtgctggcatgaaccctgtactggcctgtggcagcgtttaggggttgcccgtgacctctggagccccagagggcatgtgttacaaacaatgttcttttagctttgccatctgtggatggattaagtgctaaacagctcagtgaagtcatcatgacagtctttttgggttcctgcacccagtgtgtcgcaaattcttgtctggcatccaagaagaatcaggtcacatgaagtgattgaagggtagtgtatgtggaggattttattgagcaatggaagtggctctcagtgggatggggagctggaaaggagatggagtgggaagataatctttccctggagttcagttgtctccagccaaactcctctctgacagtaatctctgatgtccagctgcctcgtctcctctcaatgttcagacgcttctgctcttctctccttcttggtgtgctaccctgmtcctctgccagtggagcttgcggtttttatgggcacaggatagggagtgtggcaggcagggtggttttggaaaaggca

SEQ ID NO: 828750 - DNA, 601 bp, Homo sapiens
caaaccggggcacaagtggcctctgccttgggacttggccttcagaggatcccactttggtcctcttttcatcacagctctctctaggggacgaggagtccatgggatcaaggagatatgcccactgagaagcttggtccactgaaagcttgtttccactgagactgttctcccatccctttagatgaaattctagctcagggttagcttcatgagtgtgccacctgtgcactcacacagggccctgtgctcagaaaggcccatcctttgagtctcactaaactcacacacatgtaggtccaccagaactctgttcatggggcattgcagatgctgtgggctagaaaagtgacaataagcagcagagatatagtgtataggaaatacagtgtatctcttctgctcatgtgaatgtacactgtcctgttgaacttcacttacaaaacacaagttcaaagataaaattatttaacatgtcaacagcacagctcctcaggtgattctaagatgaacctgtggttctcggctgggtcaggaaaamttagtagaagcttatataaatggtgggagttgggaggagtagggaaagccagggtgggga

SEQ ID NO: 828751 - DNA, 554 bp, Homo sapiens
taacttatgttatgccaaggcatggatgaaaaaccacctctacaccatagaacatcctcacattctcccaaaaagaaactttttgtgcactctagactcttggtattcctctagtagaattgagcacattctatcttatttgtaggcatggcttctacacacacacacagatttccccaggtttacatcaattctccttgaggacagattacaagtcctccagatcgaagtatcccctgtaacacacagcacaacatcttgcctttggcatgcatccaatgaatgtggattaactgagtcattttccccgctacttaagaagagaacccacaaaaaaaggctgtagtccagctcctggaaggaaaggttctacccagagacgatggccttatttcaaggcaagtcccctctgaacttccatcagcttcaggactatcttaactcaaacaggctgtgaaatgcacaagcaacaaagctgctaggtaarcaacaattgttgggggaagggaatacggcaaaggaggtgaagttaaaaacccaaacatggtataaag

SEQ ID NO: 828752 - DNA, 615 bp, Homo sapiens
catctcttcaatgatagtctctatttaataaaatactgtcattccatcttttgattcttagaacatggttttctttagttgtctgaatatccttaaatatcctcattgtattatttgtcttctaagtccaagataaaagaatgattctattgcctgattttgtttttgttgtcattgttttttttgttaatttcaacttttattatatattaaatggtatacatcatgtagatttgttacttgagtaaattgtatgatgctgtggcttgaggttctagtgatcctatcttccaggtcataaacatagtacccaacatgtggttgttcaggtggtttcttttttgcacgttgatttgttaagttttttgtaggttctggatagtaggcctttgttggatgtatagtttgcaaatattttctcccattctgttactgtttgttgattctattggtaatttattttattgcacagaagccctttactttaattaggwctcatttgtcaatttttttttttttttttttttgcaattgctattaggaacttggccataaattatttgccaaaacccatgtcaagaaaagtatttactaggttttctttctttttaaaat

SEQ ID NO: 828753 - DNA, 598 bp, Homo sapiens
caatgccttgtgtaaggaaaaggcaaagtcctacaaactaaattattgcaaggagctgaagagtcctgctcctgaggtacgatattgtattgcttgctttgttagctgaaacaaactgcttccggctgtctttactaacagacatatgaaaaaaaaaacattcttttagtcaatagctctctaccagataccaggggatgtgttaatttgctctagcagtgaacccacatttggcacaacagctgtttggagttatcatctcatcaagctcacaataatccattgtcattctccaggatccatctgttttctgcacaggccaaataggagatatgtgagttaaatggggatgtgatgggaattaccacccctgcatcctttaagttcttgatggaactggtctttgcaatccctccaggaaggcagtactgattttggtttactattttcctagataggagcagttttagttgyttctatttatcctctaccatgacaacagcactcactccataggtcagggaagtgatgtgggaattctgccagttgctgagtatatctattcaaattatgcactgcagagctgaggaaataatcg

SEQ ID NO: 828754 - DNA, 580 bp, Homo sapiens
agatcacttgaggtcaggagttcaagaccaacctggccaacatggtgaaaccccatctctaataaaaatacaaaaattagtctggcatggtggcgcacaaccgtaatcccagctacttgggaggctgaggcaggagaattgcttgaacccaggaggcggaggttgcagtgagccaagatcacgccactgcactccagcctgggcaacagagtgagactccgtctcaaaaaacaaacaaacaaacaaacaaacaaacatcaaatatcttggaaagagatctacaagacctctgcatagaaaattataaagcattaagacaaattagaaaagatttaaataaataaaggtatataccatgtttgtggttcggaagactcaacattataaaagctgtcaattcactccaaactgagttataggttcattaccaacctaatcatattctcaagatattcttcttgtcaaaaatgaacaaggtgattctaaaatctatatggaaatgccatggaccaagaagasccaaaataaacctgaaaaagaacaagaataaggtaaggtgacttaacataaatccatacta

SEQ ID NO: 828755 - DNA, 583 bp, Homo sapiens
attggttcaaatatggtaaacaatgagatatggrtaaatgatgcatctgaagccactaacagcaacaggttaaaagtagaaagatggacaaaggtatatcagaaaaatgctaataaaaagaaagttatatagcattgttaatatcacataaaataaaaataaaagtaaattgcattaaataggggcaaggatggttttgatcaattttccagtacatccctataagtttgtttcttactctccttatctcgtctatttcatccacttctctaaacatatcttcattgcttaaatgcctcttatgtacatctttatattctggagagatggaattagctttctctaaaagttccttctgcattttcctcctcctctggcttttcctcaaaatttggttcactattttctggccttccttccatttttggacagggtttcatctcatgtctgtggggcttctctttcttccttctattctttctttctttttccttccttccttttgttttcctttcttccctctttcctttcttttttcctgcttattcccctttgagtgcaataacttctggcactgatcagg

SEQ ID NO: 828756 - DNA, 637 bp, Homo sapiens
gagttgtgatcctctggagaagaagaggcgttcttgtttttggaattttcagcctttttgcgctggtttttctttatcttcgtggatttatctacctttggtctttgatgttggtgacctttggatggggtttctgtatggacgtcctttttgttgatggtgatcctattcctttctgtttgttagtttttgttctaacaggcccctctgctgcaggtctgctggagtttgctggaggtccactccagaccctatttgcctgggtatcaccactggaggctgcagatcagcaaagattaccacctgttccttcctctggaagcttcatcccagaggggtatccaccagatgtcagctggagctctcctgtatgagctgtctgtcgacccctgatgggaggtgtctcctagtcaggaggcacgggggtcagggacccacttgaggaggcagtctgtcccttagcagagctcgagtggtgtgctgggagatctgctgctctcttcagagccggcaggcaggaatgtttaagtcagctgaagctgtgcccacagatgcccattcccccaggtgctctgtcccargaagatgggagttttatctataagcccctgactggggatgctgcctttctttcaga

SEQ ID NO: 828757 - DNA, 507 bp, Homo sapiens
gctgcaggaggatcccttaagcccaggagtcccagaccagtctgatcaacatggtgaaacctcgtctctacaaaaaaaattttttwaattagccaggctggagtgcagtggcgtgatctcagctacaacctccacctcccagccgcctgccttggccccccaaagtgccgagattgcagcctctgcccggccgctaccccatctgggaagtgaggtgcgtatctgcctggccgcccatcgtctgggatgtgaggagcccctctgcctggctgcccagtctggaaagtgaggagcgtctctgcccggccgccatcccacataggaagtgaggagcgcctcttcccggccgccatcccatctgggaagtgaggagcgtctctgcccggccgcccatcgtctgagatgtggggagcgcctctgccccgccgccccgtctgggaggtgaggagcgtctctgcccggccgccccgtctgagaagtgaggagaccctccgcccggctgccacc

SEQ ID NO: 828758 - DNA, 466 bp, Homo sapiens
aaatttaatatagacaattattgagatattttttccttttttgttataagtgttgggaacccagtgtgcaatttacatgtagaacacatctcaatttggaccagctgcactgcaagtgctgcaccatggatagtggctactgtattcaatagtacagatctaccctctcattgagaggccagcattaggggggatctcagaatgtggaaagaccttcttgttgggttggccagttccatggcctgcctgtgtgtgctcttgttgcccccaaatgcacttgcacttggaccattgactcatgtcctagctgccattgttttctttggactgagggacttaattttagccaggtttcctggcactgtgccaacttttctctgygtttcagttcttccccctctagtccttgcctgtcattgtaatataattcaaagctttgatgggctaggatccaatggacccaacc

SEQ ID NO: 828759 - DNA, 625 bp, Homo sapiens
gatttaggcaaacttttcttgcattcgtattttctgaaatgtaattacctgkgacaaaaatgtctctttcacagtttactttgtaacttttcatattccttgtatttgaattattatcaggcttcctttaaacccagtattcaagcatttaggaaataagctggtgcctgttttcaaaaacagaatcttcacatgttcaatttcatacccttatgtttatgaacagttatatcttaaagactagacatgccagggagaaagccatttcttctggaaagagtattaatgttaaaaaaaaaaaaagactaaaaatctgtggttaatctcagttctactgtttgaccttgacctttgaaaatgagaacctccacttgccagagtcctcctccacagaacgaaagtaaagatgttatcttactgtgcctcacggtagttaacctattagatgaggtcatgtgtcaaacaaaagacagtctaatctacagaaacagggaggttaaacagcaatttaatgaaataccaaatgacaatcttatttggtccctgagtgaccacaaacatgaattctcagtgtaagaaccaccgaatgtgggagactcttgcctatctctgtcctggacaggat

SEQ ID NO: 828760 - DNA, 616 bp, Homo sapiens
cctccacagaacgaaagtaaagatgttatcttactgtgcctcacggtagttaacctattagatgaggtcatgtgtcaaacaaaagacagtctaatctacagaaacagggaggttaaayagcaatttaatgaaataccaaatgacaatcttatttggtccctgagtgaccacaaacatgaattctcagtgtaagaaccaccgaatgtgggagactcttgcctatctctgtcctggacaggatctggacaccatggaggagagctctgagataaaagtggaaacaaacatttccaagacatcctggattcggagttccatggctgccagtgggaaaagggtcagcaaagccctcagctacatcacaggagagatgaaggagtgtggagagggacttaaaggtaaaattctatgagaacaacactgaccctgaccctaaaaactcacctccacccatccccaggaaacccattgccatgggggttccctatagactagacttagactagactgcactctgttactgtggtctttcctggaagctgggagttttgctgttaaaacagacatacagcctcttgaactataaatagcaatacatgcaagagtgtgagctcat

SEQ ID NO: 828761 - DNA, 618 bp, Homo sapiens
attaatcccagtaaagaaatcaatatgggtaactgatttattggtagcaattacatttcaattgtattacctcactgcccaactaaccattctgctttttaaacaatgccaaactattaatcwttacacaaaaaagcagctttttatacaatgcattccagaccaaggtcattttatctcggtaaaacaatgttagataccaacatctgtgtgacttgcaatgaatcttggaggtcaggaaccaaaattaagtccatatggagctgagttggctccatagttaaagataaaaaaccgtatgaataattaagcacttatgaaaaagtacttctatttcataatctaagtggtggctgtcatttattttcagattatctccctcttcaaatttcatagctgaacatattgcttgataagcccatgcctctgctgtagtgacccattttcaaagccataccaacttatgggaggcatcaggcttcagctcaggcaaggacaagcagcccaaagagataaatgccttgagtttctggaactgaatctataaaaccctaaggtggcagcatcaaatgaaaacactcaagtggcattttccatcaactcccaaagcaggaacat

SEQ ID NO: 828762 - DNA, 564 bp, Homo sapiens
tcatttctggaagattttaggggggcaagtctccgctcagcaatcctgggctgtgtgcactaactctgggggcctggtaccaggccattgccttggttctctggcccttcaaggttatgaacctgcttcactagagagactgatgtgttctcagtctgctaaccacaacattccaatgggtgatgccagccaaagcacattgtcaggtaagtggcagcaggattcatgcttgcttgtgagtacagcagctgtggcagtatgacaagatgcacacaagttggctggggtggagtactggtaagagcaggactgctgcatttctgcatggattcatgccagtgctgtcagtggcatagaggggcagggtactggtaggcatggggttgctggtgtgtatgctcactgtcacactggtggcaacagttggggcagggtgctggctgatgtaaggctacctccatgcacacatttgcagcaacagcaatggtaacrtaggggagtggggatgctggcccacatccatgtgtgtgtttgtatcagcagcagtgtcagcacaagagggag

SEQ ID NO: 828763 - DNA, 564 bp, Homo sapiens
tcatttctggaagattttaggggggcaagtctccgctcagcaatcctgggctgtgtgcactaactctgggggcctggtaccaggccattgccttggttctctggcccttcaaggttatgaacctgcttcactagagagactgatgtgttctcagtctgctaaccacaacattccaatgggtgatgccagccaaagcacattgtcaggtaagtggcagcaggattcatgcttgcttgtgagtacagcagctgtggcagtatgacaagatgcacacaagttggctggggtggagtactggtaagagcaggactgctgcatttctgcatggattcatgccagtgctgtcagtggcatagaggggcagggtactggtaggcatggggttgctggtgtgtatgctcactgtcacactggtggcaacagttggggcagggtgctggctgatgtaaggctacctccatgcacacatttgcagcaacagcaatggtaacgtaggggagtgkggatgctggcccacatccatgtgtgtgtttgtatcagcagcagtgtcagcacaagagggag

SEQ ID NO: 828764 - DNA, 502 bp, Homo sapiens
acatatactgctaagtaaaagaaaccagtctggaaaagctacatgttatataattccaattatatgaaattctggagaaggcaaacctacagagaaaaaaaatcagtggttggcagggactcaggggtccagaaggagagacaaataggtgaagcacagagaatttttagggcaatgaagctattctgtttgacactgcaatggtggatacatgacattatgcatttgtcaaaacccatagttaaacaacataaagaatgaaccttaataaattatggattttagtttaaaaatactgtgtcaatattggcttatcaattataatgaatgtaccacacttattctagatgttaacaatcggagaaagagagaggagaagagggactatatgggaactctatgctttctgtgtaatttttmtctaaacctaaaactgctctaaaaatgaagtcaatttgaaaaaagatatgagcgcataatcaaagatgatcaaaaatataat

SEQ ID NO: 828765 - DNA, 613 bp, Homo sapiens
tctagtagttcatagccccaactggggagccagagaacaatggtcttcttcctacatttacttctgaccatcaagaaagtaaaaatctccaggattcacgggaaatatgatcctcagtgaacagtatcatcwgaagatgatgactgttggcaacacaaacaatgaactttccaaaatacagacacagacacaagagagtaatccagataatttcaagtattctgtggcttctgggcctgtctttgtggacttcaggtgtagaaaattccagaataagtgtttgagatgttagctggttttctgaccacattaagtgtgctggtctgggacattggggcccttgctacatcacttattggctgtgggatcctaggacccttggctctaacctgcatcatctgttaaattaaattaaaatcccagttgagccaggtgagcttttgaggtctgtatcctgattctctgatctccttctctcttatggatttagattcttaatgggactacaaagcatataaattccttttcagaaatattggaggtagacttaaactgcaaaaataaaaatttaattaaatgcctaccatgtgccaggagctgaaccagttactga

SEQ ID NO: 828766 - DNA, 577 bp, Homo sapiens
aagagtagacaatgaaccagaaagataccagatggtgatataagctacgcagtgaataagaatagatcstggtgaaagacagttactagaggctattagagattggttgatctggagggttttctggggagcaatttagactagatctaagtcaaaaatcaaaagccagcaggataccatgggggtggggggtttgcaggggaacatcccagtggcttgaaagtggcaatgaacttggcatatttaaaggaacaaaagaaggcctgggtagcttgaacctacccccagccagctattagtacttgactattacactaatcacctacagttcacctcaggcttatttattataagatagtctttcaacaacatttattgaacacctcttatgtcaggcattgtgctagtttctaagatggaaagatgactaaaaatgcaatcaagaagctcacaatgaagtgtatataaaaggaagagcgagagagataaatcattataattgaatgtgtttgtcttaacatggaggttatgtacaagatctacttcccctaggagtcaagagagcttcttggaagag

SEQ ID NO: 828767 - DNA, 577 bp, Homo sapiens
aagagtagacaatgaaccagaaagataccagatggtgatataagctacgcagtgaataagaatagatcctggtgaaagacagttactagaggctattagagattggttgatctggagggttttctggggagcaatttagactagatctaagtcaaaaatcaaaagccagcaggataccatgggggtggggggtttgcaggggaacatcccagtggcttgaaagtggcaatgaacttggcatatttaaaggaacaaaagaaggcctgggtagcttgaacctacccccagccagctattagtacttgactattacactaatcacctacagttcacctcaggcttatttattataagatagtctttcaacaacatttattgaacacctcttatgtcaggcattgtgctagtttctaagatggaaagatgactaaaaatgcaatcaagaagctcacaatgwagtgtatataaaaggaagagcgagagagataaatcattataattgaatgtgtttgtcttaacatggaggttatgtacaagatctacttcccctaggagtcaagagagcttcttggaagag

SEQ ID NO: 828768 - DNA, 435 bp, Homo sapiens
ctcctcccgggttcacgcagttctcctgcctcagcctccggagtagctgggactacaggcaccggccaccacgcccggctaatttttttwtaatcctttaatctctttaattcacgcatctgtcctttgtataaagaggtgttttggtgaacccacgttgctacaccaatgacattccacagtattaacactagaatgactgaagtcacattcatcaaatatacaggaaatatcaatggctcacgaactgattattcttctggcaagttagggttgggtctcatattatcaaactaatttttaatgcctactaaaactcatacttaataggaagacaacctataattaaaactgtcccttgttaggtggagagcaaagacttattcacactgaatctcccatgccttgtatagcactaggcacagaatggcattc

SEQ ID NO: 828769 - DNA, 620 bp, Homo sapiens
ctgtcatgatgattaaatgagataagagttgtgagctgctcagcacagtgcctagtgcacagcaagcactcaaaagatggaagctattattactgaggattgaatggaaattaaattaaaataagtgcggccaggcacggtggctcacgcctgtaaccccagcactttgggagactgaggtgggcagatcacgaagtcaagagatcgagaccatcctggctaacatggtaaaaccctgtctctactaaaaattagctgggcatggtggcatgcgcctatagtcccagctactcgggaggctgaggcaggggaatcacttgaacccaggaggcagaggttgcagtgaaccgagatggctccattgcactccagcctggcgacagagcaagactctgtctcaaaaaaaaaaaaaagtgctcagaacaatgcccaggcccatagtaaacactaaactttactgaaaatgtacgaattgtaaatgaagttctaaagcaaaacaatttttttatcttcatgtagaggatacratagtattttggggaaaaaaattcatcactagttatgtcattttgggtaagtcactgaaacctctgaatttctgtttcttctctgcaaaatgt

SEQ ID NO: 828770 - DNA, 647 bp, Homo sapiens
tttgtgtctggcttctttcacatagcataatgttttaaaggtttgtctatatggtagcatgagtcagaatttcattccttttcatggctgagtaayattccattgtatgcatatagcacattgtatttatccatttctttcttgtttttgttcttgttttcgttttgagacagagtcttgctctgttgccaggctggagtacagtggcacagtcttggctcactgcaacctccacctcctgggttcaagcgattctcctgcctcagtctcccaagtagctgggactacaggcatgcgccaccacgcccagctaatttttgtatttttgtagagacagggtttcaccatgctggccaggatggtctcaatctcaaccttgtgatccgcctgcctcggcctcccagagtgctgggattaaaggcgtgaaccatcacgcccggccccattttcttgttgatggacacttaggttgtttccattttgaggctattgtgaatactgctgccatgaacatgtgcatacaagtatctgttgagtcatttctcttaagttcactacagttaggctttcactctcactggtcaacacaaattgttcttgtcaaggtcatcagtgacctctgagttgctgcagccaattatcaattc

SEQ ID NO: 828771 - DNA, 594 bp, Homo sapiens
aagatttaactttatcataaataaaggagcatctgcacttaagaaaatgaattcctttggacaatcacaattcagtgaatatgtaattcttttcaattaacaaggactaccttgattttaaaaacttagcatcatagtatagacaagatcaggattcttccagtgtgtaagattagcagaatataggtcataaaacttcagaacgctgagtttaggcagagataatggtttggatttttagtttcattttatcatttgctatatccatggttggaaggcttgaaagttaacatcaaaagataactctctggcacttctagattctttgttcataattatgcatatcataagtgtataattattctataaattttttttttctgagatggagtctttctctgtcgcccaggctggagtgcagtggggtgatcttggctcactgcaatctccacctcccgggttcaagcaattytcatgcctcagcctcctaagtagctgggattacaggcacgcaccaccatgcccagcgattttttttttgtatttttagtagagacggggttccaccatgttggccatgctggtctcgaactc

SEQ ID NO: 828772 - DNA, 634 bp, Homo sapiens
atatttgatagaagtctgttgaaaaatcaaattataagatttcatagcttttagacaataaaattccctggcctttgttacctcctgccttaargaagtttaggtctttaatgtacttttcttatataatttatttattttactattgtgttatgccattcttgcattgctataaagaattacctgagactgggtagtttttaaagaaaggaggtttaattggctcatggttctgcagggtgcacaagtatggcaggcatctacttggcttctggggaggcctcagagagcttttactcatggcagaaggcaaagccaaagcaggcacctcacatggcaaaagcaggagcaacagaaagagtcgtggggggaggttggtagggagaagactccacacacttttgaacaaccagattgcaagagaactcattcacgatcgctaggacagtaccaagctattaagggatccacctcatgacccaaatactttccaccaggtagcaactccaacattggggattatatttcaatatgagatgtagaggagacagcacccaaactatatcaattatcattcaaattctactctagaatgaaaggtggatattttgatttcaaaaaggggtaattatgg

SEQ ID NO: 828773 - DNA, 481 bp, Homo sapiens
tgttacatcttatcttctctcaattgtacttctccaccgttgaagtttatgtatttatttattcttcaaatattaatgaggagtcatatttattatggactctgtgttaggtatagaaggtataagttgaaacatattattttcatcttgcaatcacaacctagtctcccataccttgacagtagattggctctcttacctataaatagcactttcaataataataggaagtagtaaatattgttaaacaaggggctaagttctctattaagatacttctcatttgttacgtgcacagtgttattttcttgagccaattggatataaatgaacaaatatttaaaattaaaatgtgttcttcttattttagctctcaattgttttaaagcatacttcattttaatttgctttatacttggaccatgactttcttmtatatttttattgcatgttgtttacctgggcttttctaattttcttt

SEQ ID NO: 828774 - DNA, 628 bp, Homo sapiens
tccttcactaaatgcgggtggcctcagcttaaagatttatacacggaagcgggagacatwatccagaatatatatcaaggaatttaaatagggatatccaattaattaacatctgtattcatttatgcctagctttacattggatagattctatagtctatatcctgccatggttcagagcacgaaactctaactagagacatgtatgtaaaataatcagtgcaagaaagattgttcactttacctccaaaaaaaccttttggctttttaaatgttgaacaatagacatttacttaattggcacttgtaaagtccataaataacttaaggggataagggcaaatctataaacactgtaaaatattctaggttaggaaagaacttttgatacttcagtgttgccatatggtatgtatgatctcatgaatgtgaggcaaaaggaaacaattgaaattagtaacctcactgccttttttcctatctgagtgatgctgtgatgtagccactgaatcacattgagagaaatttgggcttggggctgtattttttaatacatggaaatgtcataatttaatagtactctaatactaattacctctcgtgatttttttttcctgaagtctcttta

SEQ ID NO: 828775 - DNA, 425 bp, Homo sapiens
taaaataattttcataccagaaaggaccacatagattgtttttatttgaagcaattgaggagaraagtgggctctatcattgctcatgtgttacactttgaatgatgttgaaagttatttctgcttccatacagtaatcctctctattagacttgcagtagtgcctaaaatgccacttaggttatttgtgtgggtaagacatagaagtcttaatatgttattattaaaagatcagtgcaaactaaaagatattgtgagaatttatcaagtttattccagtcacattctccagccagtgtcttctgcatcctttatgtttatatatttatcttatacattctctaaatgttgcaagtctccaggaatctctctcttacattatctttttcttgtgtttttcctgctactattaacacaggctcatt

SEQ ID NO: 828776 - DNA, 543 bp, Homo sapiens
ggctgaggcccggcgagaattcgagcatggcacaggcgggccagcagtgctgggggacccggcgtaccctctgcagctgctggcccaggtgctaagaccctcactgcctggggccagtggtgccggccggccactccaagtgtggggcccggcaagcctgcgcccacccggaactcacactggcccatgagtgctgcgcacagccccgattccctcccacgcctctccctccacacctccccgcaagcagagggagtcggctccagcctcggccagcccagagagtggctcccacagggaagcggcaggctgaagggctcctcaagcacagccagagtggatgccaaggccgaggaggtgccgagagtaagtgaggactgctagccgttgtcacctctcaatcccccctctaaayaggacaccccaactgctattgggaatttggccaatgaccactctagctacttcctgctggataggggtgaagaaggggccctgcagttgtagtgttctccagaggggaatgatttaggccagtggaag

SEQ ID NO: 828777 - DNA, 548 bp, Homo sapiens
agaaggtctgggagggagatgggggaggcagggctgacgtgtagaggcggtgagtaactccacacagagcaggactccggagcaaaccactttctttttttttttttttttttttttttttgaggkggaatcttgctctgtcacccaggctggagtgcagtgtcatggtcttggctcactgcaacctccgcctcccgggttcaaacaattctcctgcctcagcctcccaagtagctgggattacaggcgtgtgccaccatgcacagctaatttttgtatttttagtagagaccaggtttcaccatgttggtcaggctggtcttgaactcctgacctccagagatctgcctgcctcagcctcccaaagcgctgggattacaggcatgaaccaccgtgcccagtggcaaaccacttttttttttttttttttgagacagagtctcactctcgcccaggctggagtgcagtggcgcgatctcagctcactgcaacctctgcctcccgggttcaagcgattctcctgcctcagcctcccgagtagctgggat

SEQ ID NO: 828778 - DNA, 602 bp, Homo sapiens
tacaacacaaactgtacacagaatataaccatgtacagttacattctatggggatccaggtaaaccatgacccacctaagatgacaagtttgataaattttgggaaagaatcttaaacgtcactamtaacgtgttaaaacaataatataccatttttcaacccttcagctaagaaaagattaacagaaaaaaaaatcatttattatgggtgtagatttattatgggtgtaggtggtaagctataagcaaaatcaagtttctttcccattaaaattttggtttgctatgatggtttcaaatctctactcaaagaccattaatgtctctaaataatactcactagagctaggaatgaaacctcatcaaacatgggcaggtgttttattaaatttaatagattgtactcatgtcaagttataagatatatgtaactcttcccaactactggcgggtaaagcttcttcccaacactgggtcacttaggaaagaacgcctgtttcaggacgcacacatgctgtgaactttccacttccatgtcaccaattcagaggctctggagctgctgctgtcacactaggtcagagcgcatgcctccccatagg

SEQ ID NO: 828779 - DNA, 602 bp, Homo sapiens
tacaacacaaactgtacacagaatataaccatgtacagttacattctatggggatccaggtaaaccatgacccacctaagatgacaagtttgataaattttgggaaagaatcttaaacgtcactaataacgtgttaaaacaataatataccatttttcaacccttcagctaagaaaagattaacagaaaaaaaaatcatttattatgggtgtagatttattatgggtgtaggtggtaagctataagcaaaatcaagtttctttcccattaaaattttggtttgctatgatggtttcaaatctctactcaaagaccattaatgtctctaaataatactcactagagctaggaatgaaacctcatcaaacatgggcaggtgttttattaaatttaatagattgtactcatgtcaagttataagatatatgtaactcttcccaactactggcgggtaaagcttcttcccaacactgggtcacttaggaaagaacgcctgtttcaggacgcacacatgctgtgaactttccacttccatgtcaccaattcagaggctctggagctgctgcygtcacactaggtcagagcgcatgcctccccatagg

SEQ ID NO: 828780 - DNA, 612 bp, Homo sapiens
ttcattattggggtcattttccatattragattttttaactgtactaattccaggaatctcagagctgtttctgccagcagagctatgttttctataaaataaaaaggaagaaaatttataattacaatcttaactctctgtaaagcttattaacttttcctccctgtctttatacataaataatcataagcctatgggaaaaacagaacttttcaatttagcatttaacttaatcagattttagtaacccagctcataatctgtaactgtctccaaaccactagtcttatttttgaaacacagcttaaaaaaataataatataaaaataatctaatccctcatctactgaggaccaaaaaaaaaaaaaagcctaattctctgcagggacttaccttttaaacagtatccttgacaagtgagagatatttattagactaacaaagaaacatccacattaaaataacagataaagctaagctttggcatcagaaagacctgggttcaaatctcaaccttgccacttactaacttgaccatttaagcaatctgagactgtttcttcacatataaatgaaaagtcacaactgcctcaaagagaaaccattgttag

SEQ ID NO: 828781 - DNA, 630 bp, Homo sapiens
atatatatagtgcattcatatatatagtgcattcatatatatagtgcatgcatatatatatacatttatatacatagatatatctatatatatatakagatagatagagagagcgagagtattccgatctgtgaacatgaaaggtatctccaaatatttagaactttgaatttttattattattttatagtttctcacatagcccctgtacatatttagttagatttggacctgaatactctattttaagttagttggagtagtggattccattaattgagttttgaattattaactggtcttgcatgccagaaataatcctacgtggcatgatgtataattcttctatatattggtgaatttattgttattttgttgaacatataagtctatgttcttgaggtatatttttctatagttttctgttatttaaacactgttatctgtttttggtattagggtaaggcagaactcatataatgagttagaagtgtcctctaagcttctaatttccagaaaaaaaattcatagcatttactttataattatttcaaagaatcactggtgagcgcatctggacctggcactattcgtcaggttattgtttgggttttgctgctttttgtcatt

SEQ ID NO: 828782 - DNA, 630 bp, Homo sapiens
atatatatagtgcattcatatatatagtgcattcatatatatagtgcatgcatatatatatacatttatatacatagatatatctatatatatatatakatagatagagagagcgagagtattccgatctgtgaacatgaaaggtatctccaaatatttagaactttgaatttttattattattttatagtttctcacatagcccctgtacatatttagttagatttggacctgaatactctattttaagttagttggagtagtggattccattaattgagttttgaattattaactggtcttgcatgccagaaataatcctacgtggcatgatgtataattcttctatatattggtgaatttattgttattttgttgaacatataagtctatgttcttgaggtatatttttctatagttttctgttatttaaacactgttatctgtttttggtattagggtaaggcagaactcatataatgagttagaagtgtcctctaagcttctaatttccagaaaaaaaattcatagcatttactttataattatttcaaagaatcactggtgagcgcatctggacctggcactattcgtcaggttattgtttgggttttgctgctttttgtcatt

SEQ ID NO: 828783 - DNA, 630 bp, Homo sapiens
atatatatagtgcattcatatatatagtgcattcatatatatagtgcatgcatatatatatacatttatatacatagatatatctatatatatatatagatagatagagagagcgagagtattccgatctrtgaacatgaaaggtatctccaaatatttagaactttgaatttttattattattttatagtttctcacatagcccctgtacatatttagttagatttggacctgaatactctattttaagttagttggagtagtggattccattaattgagttttgaattattaactggtcttgcatgccagaaataatcctacgtggcatgatgtataattcttctatatattggtgaatttattgttattttgttgaacatataagtctatgttcttgaggtatatttttctatagttttctgttatttaaacactgttatctgtttttggtattagggtaaggcagaactcatataatgagttagaagtgtcctctaagcttctaatttccagaaaaaaaattcatagcatttactttataattatttcaaagaatcactggtgagcgcatctggacctggcactattcgtcaggttattgtttgggttttgctgctttttgtcatt

SEQ ID NO: 828784 - DNA, 616 bp, Homo sapiens; identical to SEQ ID NO: 824894

SEQ ID NO: 828785 - DNA, 600 bp, Homo sapiens
aagcaatatacctctctagaaagcagtttgttaakctcttataaaactcaacatgtaattaccatctgacatggcatttgcacatttggacatttgtcttagagaaattagaatttatgttcacacaaacacctgtacacaaatgttggtaacagctttatttatcacagctacaaactggaaacaagccaggtgcccttcagttgggttaaacagttaaacaaactagtatatctataccatgaaacactactcaataataaaaataaactattgactacactcatccacttgaaagaatctctagaaagttagtctgagtgaaaaaagccaatcacacggtttacatgctaaaaaaactccatttgataacattcttgaaaagacgaaattacagagattgagatcagattcgtggctatcagggttaaggacagggaaggagaaaacaaatgtgggtgggtttataaaagggcaagatgagggatctttgtagtgatgggactgttctgtatcttgactgtggtggtggatagaagaaactgtcaggtgataaacttgcacagaattaaatgtacacacattacacacaaattagtg

SEQ ID NO: 828786 - DNA, 600 bp, Homo sapiens
aagcaatatacctctctagaaagcagtttgttaatctcttataaaactcaacatgtaattaccatctgacatggcrtttgcacatttggacatttgtcttagagaaattagaatttatgttcacacaaacacctgtacacaaatgttggtaacagctttatttatcacagctacaaactggaaacaagccaggtgcccttcagttgggttaaacagttaaacaaactagtatatctataccatgaaacactactcaataataaaaataaactattgactacactcatccacttgaaagaatctctagaaagttagtctgagtgaaaaaagccaatcacacggtttacatgctaaaaaaactccatttgataacattcttgaaaagacgaaattacagagattgagatcagattcgtggctatcagggttaaggacagggaaggagaaaacaaatgtgggtgggtttataaaagggcaagatgagggatctttgtagtgatgggactgttctgtatcttgactgtggtggtggatagaagaaactgtcaggtgataaacttgcacagaattaaatgtacacacattacacacaaattagtg

SEQ ID NO: 828787 - DNA, 486 bp, Homo sapiens
aagtaaattttttttcaataaatgatattggaaaaactggatgtccatgtattaaaaaaccaaggggattgggttcctgttttacatcactccccccaaaattattcaaaatggattcaagacttaattacatgacctgaaatttttaaaactcctaaaaatgagaaaaaaactctttgacattgatcctgacaatgacttttggatataacatcaaaagcacagacaacataaaaataaataaattggattatatcaaactaaaaagcttctgctctgcaaaggaaacaattaacaaaatgaaaaggcaacccgtaacatgagaaaaaacatttggaagccgtgtatttgataatgtgttaatatctgaaawacataagaaaattatacaacattgtagcaaacaaacacacacaaaaacaataaatattcagattacaaaatgatcaaaggactcatataaagaaaacatacaaatgggcaaca

SEQ ID NO: 828788 - DNA, 486 bp, Homo sapiens
aagtaaattttttttcaataaatgatattggaaaaactggatgtccatgtattaaaaaaccaaggggattgggttcctgttttacatcactccccccaaaattattcaaaatggattcaagacttaattacatgacctgaaatttttaaaactcctaaaaatgagaaaaaaactctttgacattgatcctgacaatgacttttggatataacatcaaaagcacagacaacataaaaataaataaattggattatatcaaactaaaaagcttctgctctgcaaaggaaacaattaacaaaatgaaaaggcaacccgtaacatgagaaaaaacatttggaagccgtgtatttgataatgtgttaatatctgaaatacataagaaaattatacaacaytgtagcaaacaaacacacacaaaaacaataaatattcagattacaaaatgatcaaaggactcatataaagaaaacatacaaatgggcaaca

SEQ ID NO: 828789 - DNA, 478 bp, Homo sapiens
ttccattccattcctctcgtgttgattccacaccattccattccattcattcatttccattccattccattccgttccattccactcgggttgatttcattccattccattccattccattccattcsatttcattccaacccatttcattcccctggtgtttattccattccactccattctgttccattccactccattccattccattccattccattccattccattcctttccattccattctgttgcattccactcgggtggattccattgcattccattccattccattgcacttgggttgattccattccattccattccattccattccattccattccattccattccattccattccattaaattccattccattccactccattacattccattccactccacccggatttattccattccattcatttccattccattccagttgattccattggattccattcc

SEQ ID NO: 828790 - DNA, 492 bp, Homo sapiens
atggggtcttttatggttctatatgaattttaggataacttttcctatttttgttaagagtttcattggtattttgataggtattccactgaatttatagataactttgggtagtaagaacattttaacaatattattttttttcaatccatgacacaaaatatttttctacttatttatttcacagatttttttgtagttttcattgtagagatcttttatcttctcagttaaattaattcctaggtattttatatttttggccactattgtaaatagggttgctttcttatttctttttcattatcagcatgtacaaatggtattgatttttgtatgttaattttgtatcctgcaattttactgaattcattagttctaacttttttttgrtatagtctataggattttctatatataaggtcatgtcacctgcaaacaggaacaatttaattttcttctttctcatttggatgtcccttatttctttct

SEQ ID NO: 828791 - DNA, 576 bp, Homo sapiens
ctgtgcctttccctctccttccttcctttcttcctttcagggagaaggatccttccttcctttmagagacaaagatccgggtgttgtcgccaggagactgggaggatgagatgggtgcccatggagaagtgaaataaaatcagatgagtgagtttcccacagtcattgttctggtaagaaacatacagacattctgatgtgcaaaatacaaatggtataatttccttgactctgcctaggagttaaatgttgatatttgctgtcattgcacaatataaagataaatggtgaatgtatgtgtataatttaaaattacttctcactgcttggctggagtacctttgggtgtgttctccactgtggatagaggtccccaggaaaactggtctccagctgtccctgcagttacttgctggatgacacctcctactggctgtcttccctccctcacttgcagtcttccttgggatcacctccccaaaacaagacttgccccaaatcctcgaatcagctcctcttccacggaatccattgaaaacacctgtctgcattggccactgcggttcaggggctgct

SEQ ID NO: 828792 - DNA, 540 bp, Homo sapiens
aatgtttttccatttgtttgtgtcatctgtggtttctctgagcagtgttttctaattcaaattgtagagatcttttacctccctggttagctgtattcctaggtattttgttctttttgtggcaattgtgartgagactgcattcctgatttggttcttggcttgcctgttgttggtgtataggaatgctagtgatttttgtacattgattttttatcctgaaactttcctgaagttatcagtttaaggggcattcaggctgagactactgggttttctagatatagaatcatgcagtctgcagagatagtttgacttcagatgggtaatttaaagcaagaggatggaaattttaggaaagaatcaaaagaaagtgcttgaaatgaaaaacattataaccaaaataaagaatggctttgggcttatcaatagcctgggcatagctgacgaaagaagcagtgagcttgaagatatgccaattcaaaactgaaatgcaaagaaagaaaacaagatattcaggaactgtgggacaattgcgaa

SEQ ID NO: 828793 - DNA, 470 bp, Homo sapiens
tggaaattctcagaccgccaacccaggcctactaaataagaaactctgtgcagagcccaggaatctatgttttgacaagccctcctggtgattctgaggcatgctcaagtttaagaaccactgttctaggggatgggtatataagtgaataaaacaacaagcaaaattaaaagtcagctatcactgagatttggggctttgactgccaagtgaaacccaagtgaagatttttgcaggctctgggctagagagtcccaagttgagcagatctcctgacaaacttaccctgggtctttcttgatcctggcatttgttccttagttttcctctgtggtcaccttgttctttcccattggataccctttctctatgtctccatttatgtaaagtcaactcattttggggacctccttaaagtattgaaaagcyttttttcccctgattttttttcatttcaataatgtctgtat

SEQ ID NO: 828794 - DNA, 586 bp, Homo sapiens
aattgtattacttatgtctacacagtgctttctgtttgctaaagcattttatgtttagttctcataataacatttagaagaatgagttatgtcttatyccatttgatagtacatagagcttaagaaactttacacagaacaaataacagcactgggactagagcacattagaatggattagatcaggatgagttcctcaactattcccagtaggagtatcagccattctataatgaaagtattttgaatacaggacaatgagtaaaaagcatactttaaatgatgcttttgcctgttcacagataaagatcaaggacaaacatcaagtcatgcttttggaaagaggagaacgttttcatttctaaacttgcaagtttcccagataagctgaataagaacacttttctgcccttgcatataaagcgtgcatgttttatattttccttagttaactctatatctgagttttattatttgggaattaatgccgtttaattttgttttattatcattggagataaggaagtggctgtgaaaggaattaatattcatctgctatttattgtcactggtacatgacactagg

SEQ ID NO: 828795 - DNA, 540 bp, Homo sapiens
ttaaaaaccttgaaaattagttaaccacatccaacaataatttatatcggtaaattrcgaaaatacatcaaattgaagtggagcttatcccagaaatgcaagcctgatttaacattagaaaaatcaatcaactaattaccacattaacggattaaaggagaaattttatagaattatttccatattaaaaaaaacacataaaaagcacttgaaaaactcaacatccacccagcagcatgacatcccccagctgaactgctgctataccctaccacaaacggccaagctactacagaggtgttgaattctagttgttagcgcaccctcctcttaaactgaacagaagtggcatcccactcattggagacctcaggcctctggcacacagaaacagttgatacctcccccagaccacatacacccccgccaatactactggtgagacagcacctcacacttccaggagctctgagcctctggcacaccaaagtaattgcacccccagcaccacagctgatgcagtacccccaccccggccca

SEQ ID NO: 828796 - DNA, 498 bp, Homo sapiens
tccttctagatttgtgttctcttgaagaacatctccagtaacttcttcagcaaaagtttttagtagactaaattttatttaatttattggcttcggaattccagggtcatgtaggtaaattcaaaacccaaagcttggtaaagaaaggacaggagcaacaaattcccagcagatactttgttcactccccatccagatcccattctgagataggcaaatattcacgctgccttcttatacttgtggacaaacttatgttgtcctttcaaggcaggtaagaatttccctgccttatttaggcatttaattcctgctcttccattggcccaaagcgttgtttcctattctagaaataatgaaaacaaacaaacaaaaaccaccttctcactggtttccacaatcagtaaataatcccagatgagctgcaggaccwgcctgctgttcactgctctggtattcagttaccacttcatttctagctcctaggaacttctctta

SEQ ID NO: 828797 - DNA, 635 bp, Homo sapiens
aaaggaataagaaaatatgaaaaaaaagagaaacatgcaggcacattggaaaaaggagaataggaaaaacaatagcagataaaaagttttaaattgacaaagaacagattaagcagctaaataaytgatgaactgaaagctctacctggggatattagacagcgtattgcactgggaaattgtgacatggagaaagggaaattgattaagatttaagaaacatggaaggtagaattagaagggtccctgcacccctaataggcagtacaaaagaacagaacagaaaaaatgggagagatatagtcttgaaaattcttgtaataattttccagaagtggcaaaatgtataaattcatcaaatcaagaaccacatcattttcaagaaggataaataaaaataaatctacacctaaatacatcacagtgaagctgtggagcttaaaatcttaaaagcaaacacagaagttacttaactaagaaagccacaactattagacaaaaacaaaaaacttttcaatagcaaaaatagagaggagaaagtagcgaaagaatgtatttaaagggctaaggaaaagtaactgtcaacctagtttatactcagctaaattgttatttaagaacctgtttgaaacaat

SEQ ID NO: 828798 - DNA, 640 bp, Homo sapiens
gtcatgctctttgatagcatttaaacaaatttatgggcacatagaaggtatttagtatttrtgaggtacaggagacattttgatacaggcatgcagtgtgtgtttggtagccctttatccacagaaccttcaaaactgaagtgaactatgtcaaaccctgccactgctttatcaaatacgtttatgtaatattcgaaatcctttgtcatcatttcaacaatgttcatagcattttcaccagcagtagttcccatctcagtatatcactttctttgctcttccataagaagcaacttctcattcattgaagttttattatgagattgcagcaattcagtcacatcttcagactctacttctaattctagttctcctgctatttttattacatcttcagtgatttccttcacttaagttttgagcccctcaaagtcatccatgagggtttgtattagtccatttgcattgatataaaggaaccccagaggctgggtaatttataaagaaaagaagtttactgtggctcatggttctgcaggctgtacaagaagcatggtactggcatctgcttctggtgagggcctcaacaaccttacaattatggcagaaagcaaagggggagctgatgcatcacatgaat

SEQ ID NO: 828799 - DNA, 628 bp, Homo sapiens
gtcatgctctttgatagcatttaaacaaatttatgggcacatagaaggtatttagtatttatgaggtacaggagacattttgatacaggcatgcagtgtgtgtttggtagccctttatccacagaaccttcaaaactgaagtgaactatgtcaaaccctgccactgctttatcaaatacgtttatgtaatattcgaaatcctttgtcatcatttcaacaatgttcatagcattttcaccagcagtagttcccatctcagtatatcactttctttgctcttccataagaagcaacttctcattcattgaagttttattatgagattgcagcaattcagtcacatcttcagactctacttctaattctagttctcctgctatttttattacatcttcagtgatttccttcacttaagttttgagcccctcaaagtcatccatgagggtttgtattagtccatttgcattgatataaaggaaccccagaggctgggtaatttataaagaaaagaagtttactgtggctcatggttctgcaggctgtacaagaagcatggtactggcatctgcttctggtgagggcctcarcaaccttacaattatggcagaaagcaaagggggagctgatg

SEQ ID NO: 828800 - DNA, 520 bp, Homo sapiens
agtgtttatttttaaaatgaccagagtaacctagcagcatgtaagttgttcaagccttgtaaagactaccatgacctacttagaaggttcacaaattatgcaaaaactaaaatacaagagaaaaaaaaatggtttagttaataacagtctaaaaatggaagtaatatatcttatagataacaactaaaataatttagtatttaatttgacaaagagaaggctaaaggaggaaaatgaaaaagaagtgttttattacatagagaaatattgtaccagaggtggtatgcaggtattgtccattttcattgagaacaaaatagtgttttctgtgaaacaggagattttggggctatgtacaagtaaggactcccttgtgttaagttttccaagtcactgaagtatcttattwaaaaaaacatgaagtcagttttagggactggtttatgtgccttaaggtacctaatcatattatgtaatgcctctggtaactctttcaactctctggtattatgattatttt

SEQ ID NO: 828801 - DNA, 588 bp, Homo sapiens
tccagtatggaaactgccagcagcaagaaagctgggataattgttgggatcatttagttgtttccaaccttttaggtrtcaaagtccatttctaccaattgactaatgtctgaaaaggtttttccatacttggctcagttttatagccttttgtggcaggaaattaggccagtccttgttagaatcatcatggctgggagtaaattagatagataaggattcaatgcttatttttagcatatttgtaacttgaagaagttatttaataactctatcctagccatatcaataaaatatgaaaaaaattaataatcttaaaggttcagtaaagactagagaaaatactaacaatgagatttattagtaagctagatggtaatgttatctgtaagctttaatagctactaatgtgttcctttgtaactctgaaatgtaaaatctatttcagtagcatctctcaagtttttatttatattcatgttcatttctgaagaattttatgtggaactggttttgtcttgtgattatgttgaaactactgcattgccaaaagatgacttaaagcttcaaggacaccttaacattatg

SEQ ID NO: 828802 - DNA, 620 bp, Homo sapiens
gaaagtatcagtagctttcaatgagtctcaaamgattctaggatccccgaatggttgagaaccgttgcaaaaatattttcctttagaaggacttgctaatttaaagtcatgcacgtttaacagtgatatttcaggaagttcaaggaagatagtctgaggcacaagggggttgggggagactccaggacttcttttagctactccacaattctggatgttcactgttcttcagaatctttagcttgctttgtttagaaaattttacttttagcaattttgtttggtgcatgccatgagaaaatgcagctagttcttacatgctaagtccctcaaggactcagtggtgtacactgtggatttggggacattgctgttctactgcaaactttaagttatttaggaagtagagggttgaagagaaggaaaacatcaatttttattccatgtatttgttcacttgaggaaaaggcatttttttctgaattgcttgaattgctgaaaattagtatctatttttcaaataaataaaagaaaaaacaaaaatttgctatattttttggattttaaagctagtaagacaataaaaatgacagattcaaccctttaaaacttttcccttc

SEQ ID NO: 828803 - DNA, 607 bp, Homo sapiens
tttataagcacagaaaaatccttttgcctcatttctaacctatggagtgtctggctactcacayagggtatttgacttggttttcatcactgtgtcccagggataagtcctgaggcaagaagaccaatgcacttattatttactgtgaggtaattcataagaaatctgtctctgatccataatgtttcatgtgtgcgttgctgataaaattaataaagatgaatattagaaactcaacaacaacaaactagacttaaagaagtaatacataacctttgtccattttataatttttcctgactttggccctaatcccagggcaattaatgctaaatgaagtaccctcttattgtctgcaaaatcttgaagaggtgacgagcacagactgcatatggcgtaagtctcatgccacaatagctaacaagaaactgagaacgccttccagcaaccaagtgagtgagcatggaaagagctccagcccctgtcaagccttcagatgacagtattcctggccaacagcttggctgcaaccctgtggagactctgagccacaaccatcaagccaagccactcctgaacttttaactctcagaaattgtgtgaaatg

SEQ ID NO: 828804 - DNA, 495 bp, Homo sapiens
gtcagcaaagagtgcaaggtagattaatgcaaacaaaatggcagttaacatcccatagtgccaaatccacccttagacaagacagactttactgagagggwcctctaacccactaaatcttaggaagattctaacctttgtaagttgggcctcgaaaccatatttggtcaagcatccttgtcttttattaagagggacttttaacccactctgtcttaggagagactctaactcccctaagttgggcctctaactcaatcccatcctttacctgggtatcctaccacttacccaaagttggccaattggtgctgcagtctatttcctttgggtcagggtctcttcagtatcacccctttgtggttccccaggatggtgttaccagaaaggggtcctgattcagacctcaagagagggttcttgaatctcacacaagaaagaattcagggcaagtccatatagtaaagtgaaagcaagtttattaggaaagtaaag

SEQ ID NO: 828805 - DNA, 393 bp, Homo sapiens
cgcccgggtggaccaggagatcaacaggatcctcttggagcagaagaagcaggaccgcggggagctgaagctgctgcttttgggtgagtccagggtcggtgggcggtgggtggtgggcagtgggcggtgcscagccggcaggggtgtcggggcaaggaggcggatcaggctaggtcagacactggcatcgtggagccgtcgcctcctcccagggaatggggagcctggaacccattttccagatgagaaagactgaggctcagagaagccaagttccttgtccaacgcgcgaccagcgccaggtgcccaggcctgtccactgtgtggggcatacacaatagcagacgtggctctaccgggccctgccggcaggcccagcacgccctacctgtc

SEQ ID NO: 828806 - DNA, 547 bp, Homo sapiens
actgcactccagcctgggcgacagagtgagactctgtcgctaaataaataaatggtgaaatttgaataccgtctggagttgaattaattrtatggtgccagtgttagtttcctgggtttgacagtgacctatgattagataagctgctggcatcagggaagctgtgtgaagggtacctgggactgctctgtggtattttggtaactccctgtgaacctccaatcatttcaaaataaaatgttaaggccagtcacagtggctcacacctataatcccggcactttgggaggcctgcttgagcccaggaatttgaggccagcctgggcaacacagcaagatcccgtctgtacaaaaatttaaaaattagccgggcgtgatggcacatgcttgtagtcccagctacaaggaaggctgaggtgggaggattgcttaagccccagagatggaggcggcagtgagctgcgacgacaccactgcactccagcctgagtgacacagtgagacactgtctctaaaactaaataaataaaaataattaaaaaaataa

SEQ ID NO: 828807 - DNA, 602 bp, Homo sapiens
tatattgggttaaataattaagtaaattaatctcattgttttcttcatatttttaaaagtgtggctcctagaatactttaaattactactagggactgaattgcatttccctaaaattcatatgttgaagccctaactcctagtacctgagagtgtgactgtgtttggagataggacctttaaagaggtgattagggttaatggaggactccatccaataggactagtgtccttatgagaagaggaagagacagtgatgtgtgtgcccaagggaaaggccatgtggggacacaggggaaggtggccacccataagccacagagagaggcatctgaagaagccaaccctgctgacaccttgatctaggacatccagcctccagaactgtgggaaaataaacttctgttgtttaagtcatctagtctgtagcatttttgttatagtcaccctagcaagctaagaatactacttatgtgactcatgttatatttcaattaatggggatcartctggaaaagttggggcactagaaggcaataaattcagatttgagccttttgttcagctatgggatgaaatgagcctgtggacctgcctgatgt

SEQ ID NO: 828808 - DNA, 469 bp, Homo sapiens
aaatagatgcacagttagcacggaatataaggggaatgactggtgctttgaagaaagagagcagcacatgcagtgtgggtaggaagcactgttttagctgggggtctctatgaaggcgatgtttgagcagaggcctaaatcaggcgggggacagccatgcagctgtctggggaggagggcactgcagtgcaaaggccctaagacagaactatgcgtggagtgcttgaggaccagacagcaaggaggccagcatggccaagcaggtgtagcaagggagagaatggagagagatggagtcagcaggtttgactggggctgccctgcaaaggaggcttggttttagtccaggtgtgatgggagccagtgattggagagcggstgcaagatgatcggatttacatttttgaaggcttgtattgatgactgagtacctgctactagcctgtgctggagtcaccatgggggctgt

SEQ ID NO: 828809 - DNA, 623 bp, Homo sapiens
gagagtgagaagaaggagagggaggaagaggagcagcgggaggaggaggaggaaggggaagaggagggaaacatcacagcttcagctttcctggaactaaatttcaaattctatgcacgactcatccttgggggaaactatgtcagaacccttcagatccatcagttttagacgcctacaagttttaggagttggaaaccaagtagttttagaaaaaaatctgtcctagttttgtaattggctcccagggccctgctcaatgattattaaaatactgacatgaaatctctgagagaaattgctctgggccctctatttatcatttgcgtcggtgagacaagtggaggcctttctgtggtgtgtcagctagggtacgtttcaatgtcagataattaactttagtaagaaagagtcagatttgcaaagggactaaggccgagtatctggtggcccttgcttaaaggaaacttgctgaacagaactcagggcctcaggatgtcgtggatctgacttacattgtttgtttgaacagtggttctgaaggtgaggtccacagatccttccctattcccaaagcacrtggagaggctgcaggggatccatgaacctcctgaaactgcaga

SEQ ID NO: 828810 - DNA, 566 bp, Homo sapiens
tctcactctctgcatagccattatcaaaacttagaatatttgtgtttatttattttaacttctgcctctttctagaggtttaaggtgttttccaacgagaacatgataagatgaaaatagataatcaagactagaaaagaaagaggctcagagcctcaaggacattgtataaccctctcaccctaaattttactccatttctttttaaatggcaacagtgcaaaagcttccttgcatgctagaaagattgatttcccagagtcaaaatttttcagaatcattgcttttgacacttgtctatggagacaacattgtagatgtaacttggagatattatatgaaaatgaatttcatttgtagtaaattatcaaataaaataatctggctttgagatatgctacataattaggccattgacagaattttatgtggacagagaaagkctattttggacttactgatatattttgccaaaatgcttcctattacatgataattggatatattatctggatgtattttactgatacaacatacacaaagagcaagcatacaaacacacacac

SEQ ID NO: 828811 - DNA, 683 bp, Homo sapiens
atgaggaacttgttgggaattggatcaaaggtgacccttgctatgctttagcaaagagactgggagcattttgcccctgtcctagagatctgtgaaattttgcacttgagagagatgacttagagtatccggaagaagaaatttataagcagcaaagcattcaagacgtgacttgggtgcgcttcaaagcatttggttctatgcattcaagagatggtttggaattggaacttatgtttaaaagggaagtagagcataaaagtttgaaaaatttgcagcctgattacaaggaaagagaaacccattttctgaggagaaattcaaggcagctgcagaaatttgcataagtaactagaagccaaatgtaaatcaccaagacaatgtggaaaatgtttccagggcgtgtcagaggtcttcacagcaacttctcccatcactggcccagaggcctaagaggaaaaatggttttctgggctaggccccgggcctcgctgctttgcacagtctcaggacttggtgccctgcatcccagctgtgactaaaagggtccaatgtacaactcacactgctgcttcagagggtgcaagccccaagccttggcagcttccacatgrtgttgggcctgcgggtgcatggtagtcaagaactgaggtttgggatcctccatctagatttcagaggat

SEQ ID NO: 828812 - DNA, 646 bp, Homo sapiens
gcacacagatcaggaaatagaacctttccagaccctcaaaattgccttcttctttctctcaatcactaccctccttgccccaagtcatctccttggctgamttctacctccatatattcaatttgctagacctcattcttctcgtgttcacattcctgaggcaaagctctctttttgcaaagtaataggattcttatcacaaagactttctggttaaaaaacaagctgaataagccactactgcattgtgcaaggttgctttctcttttgcctacagagggctttcaggtagcagaacaaaatcactgtaatgagacagaaatggtgcctgtgagcaaaggtatcatgtctccttcgctagtggggcaagcactagactcttggaattgttccgatcaaggatgagttaaaccctacattttaattcttcctttcatttattcattcattaaatacttaacgtagtacagagtacacagagtatcaggcattggcctgtgcactcagtgtgtcgacagttaggttagagataaaaagaggaaaataaatctctgaaataattttgatcaatgctactgaaaggttttgacaagtttcagaagtggaagcaaatatatattttctacttgctctgtagcaggaataa

SEQ ID NO: 828813 - DNA, 606 bp, Homo sapiens
atgcatagcagagagtgattctttcatcaacgcttgaatgtgaactacattcaaattctgaattgaatgtagctaacttggaaaaataaatggctcaggagttaaacttggtaaaatagcataaccttttaatggttgaatttaaactttaaccagagatccaagcatcttcagatgactcttatttgcctaagcagaaagcccaagtcagcactaataaatcactaactataaagcacaatcttctctttctcagtatcatcatttttgagacaataagtcactggaagccatcccagagtcataaaattagggaaataacttatgacaagagagaaagatcgcattaactttacaaatgtcaaatttcaagagttggaacctaaaagaactgctggtattaatacaagtgttttcaaacatcagaataaaaggtcttactcatggctaccaggaaagatgaacaataacaacaacaaaaataaatacattcgcttgatttcaacattagtggctactcacgtgccacataattaaactttataggaataaatgtagggctcatacaaatayataaacaaattatcatcatatgtaatactttac

SEQ ID NO: 828814 - DNA, 587 bp, Homo sapiens
attttttaaacctcatagaatgagttggaatactttcttttttcttctgttttttggaagagtctgtaaaagtatgaatagtagttcccctttaaatatttgatacacatttaactttttaagaaatgtcaaacttttttctgtaatattttacatttttatcagcaagatatgaaggctcaagtttctccagatcctcacaacatttgtattatctctttttataatagacattctagttggtgtgtaaagaggtatatcatctgccttaacttgcatttttctgatagcttataatattgataatctgtttatattacattagatagctaataaactatatattagatatcacaccaacatatatataacatatatatgttttatatatatctaaatctttatatatagattttgatatatatgatatatattatattagatagctaataaactatatattagatatatattagatatatagatattagatattataccaacatatatataayttatatatattttatatatctctaaatctttttatacatataacatgtataaagatttttatatatcattat

SEQ ID NO: 828815 - DNA, 664 bp, Homo sapiens
tttttaaaatgacaatagcgttttaacaagagaacatctttgatcttcctattatcctaycagtacccttagccaacacttgagtgtctaatagcttactcacaggataacaagatttttccttttatctccctatcaatttgaaagagggtcgaagaaatgtaacacaataatggacgagaataagacttcatttaagaaaattcaatattcatgtatccaaacctacaaagagacaaattaggggaaattattcaaataatgcagactttcttataggtttgctttaaatagcttgctccattagaactttctaaatatttatagatcattaagtaattgacatgaagattgggggtggaggaagacagccttaaaatcagagcattaaaatattcatctaactgatggagaagaattttttcaaaaaaaacttaaaatacattgcaaaataatgcaaaatataatcttaagcatcaaaataatctcatatgaattgaaaatgctgtttctcaggagagaatgatggacattttattgtctgattcttgcattatttccatctctaattcagtgagttaaaggtaaacatatgcattgaaggagctctgggatatgtgttccaggaacttactaaaacggccatgtatttcacttttggaag

SEQ ID NO: 828816 - DNA, 570 bp, Homo sapiens
ccctgagtttaagcctgagtttgcagcacgtggggcagccacttkctatctctacccctgaggacttgactgaattgcaggataggaattttagccagaggtacttctgccatgaggggcaagaccatgggtgattcccttttggaagctgcaggatttaatttttctcatgtatatgaccattctgtgttctaattcccacgcccatccttggctctttgtgcacttagtataaattgaattccaaggaaattataccagggatcacatactattcatttcagtctgttgacaggcaatttttctgtagtaccctgctgcgggatttgatagtgagatggggtggtgtgaaaatgtgatatctgatattcttacagcatttgtccccaatctggtgtttatgggctgttttcttcctatgtcttatacagtttgggatactgtatttttgtaccttaattagtttcaaaattaataaactacgttttttttcctttaaagttctaagccacacactgtacttgccagcactgcttgtggcactgcaagcctgtcatatgagaggaatct

SEQ ID NO: 828817 - DNA, 620 bp, Homo sapiens
tttattgaataggaagtgctttccccattgcttgcttttgtcagccttgtaaaagatcagatgattgtaggtgtgtggctttatttctgagttttctattctgttccaatggtccatgtgtctatttttgtacaagtaccatgctgttttgattactgtagccttatcgtatggcttgaagttgggtagtatgattccaccagctttgctcttttggcttaggattgctttggccatttggtctctttttttctgttttatatgaattttagaatcgttttttctaattccgtgaagacattgggagtttgataggtatagcactgaatctgtaaattgctttgggcagtatggccatttttacaatcttgattcttccaatccatcagtatgtaatgtttttccatttatctgtgtcatctctgaaatttttcaacagtaatgttgtgtagttctccttgtaaagatctgctcggttagttgtactcctaggtatttcattttccttgtggctgttgtaastgggattgtgttcttgatttcactctcagcctgaatcttgtttgtgtatagaaatgctattaatttttatacattgattttgtatcctgaaactttac

SEQ ID NO: 828818 - DNA, 637 bp, Homo sapiens
gtcagggtctaataggaaaagactgagacccaccatctgggatgggaamagagagagaaatgtgttggaaggctttgagtctccagattccccaaaacttctggtcctgccaaaatggcctttccccgtttctggaagacagaaacccctccttgcttgaagaacaggcagatgcttcaaatgaagcaggtattctacaagaagttcttgacttcctcagcagctttcccatccacagatgccccatttgtcccttcttatcacttagaccaataagagaatcaaagctcagcatatccccctaggcaagcattggttctgctaagagaggagagggatttcttcaaggagctgaaggatctggctagtgtgtgttgggcacagaccagggagtgtgcttgggggtgaatcctgagggtcctgggccaagggggccagactagaaagctcttcaggggagagtttgttgttatgggggcacccaccagtgatacaggttttaataatcttgccagggccccataaggcaattcttatggctgctgagtggttcctagaggcttgttgagaatgacggcccacatgaaatgaaatagatgtgtcagaactcccttgcagatcatggctgaagggatcc

SEQ ID NO: 828819 - DNA, 507 bp, Homo sapiens
gcttaaccacaaagggggtatytttcctccccattctgctggttgaccagccttccttggattcatttccccatctgattctgcagctgaaatgctgaatcaggccaggtgcagtggctcacacctgtaatctcaacactttgggaggctggggtgggaggactgcatgaggctaggagtttaagaccagcctgggcaatttagcgagactccaactctaccaaaaacatctttgaatgatctgggcatggtggcacacacctgtagtcccagctactctggaagttgaagcgggaggatcacttgagcccaagagtttgagtctgcagtaagccatgatggcaccactgcactccaaccttggtgacacagcaggaccctggctctcggaggagcaacgagaaccccacacctcttgcaatgcgggctgagtcacctcctctcagtactcccctatttctcctgagggctacggaggagaaggatccagaactaggaaggcagtga

SEQ ID NO: 828820 - DNA, 634 bp, Homo sapiens
aaactgattatgtcacttccttgcttaaactctttaatgattatccattgctctgatgaaggtggtcaaaaaattcttagccttaataacagtgaagaggagtaggaaagggctagatcttgagctcccmtgcttcctcctgcattattctctatgcttggcttctctacatttccttattcctctaactatcaaaattcttcacctgggcacctgacacacactatttctactgcttacatgcttgtactgcctcttagtcaatcaatgccccgacccctcctttcttttgtattaggatcatttattttcctggtggaaaactgaagattctttttaaatcaactcttatttatccaactttcttttggcctttaagcaacagttaattacttccttgggaagccttcccttcctcccctggtcaatttgggaccctattactgtagctcagcctgtaatttttttcttgtaattctcattacaattgcaatcatttttgtaattttttaaagatatatgtctcccttgtggaactggaactttcacttactcacagacccagcccagttcctgagacaatgcctgggatctagtacttataaacatatctttgttgagtgaaagagtgaat

SEQ ID NO: 828821 - DNA, 630 bp, Homo sapiens
ctgagttatggaggaatggcagctaccagagcctgcagtctgtcagaaaaaggcagcttcttggagggaaaatgggggacaggcatccagacactactgctcagtttagttgattctgcatttagttccagggttatttgcctccctccattttttgataaacagtgcttttgtgaggcaagtttctctctaggtaatatcctggagttgtccccgcggggccagagcttcccagctgcaggctgctggggccttctagaaagcagtggaaatcccctagaagaggcaatggcattcctttctcattttctccaaccagaataatcaaaggaatgtaattgtttatcttgtcttttgggggtttactcataactgttttgaacttggtgataccttaaaagtggcaggccaagcggagatttgtagatgaaaccataagtgtcaccctaattctggagagacaccttccaaatcacacatgacagtggtttgccctagtaagggaagaaatgggacatcaattgtgtggttagatctcactgcttgcttaggagttttgtggcactgtgcatgcagcccaggccattgagaaatgtcccratcatttccatccttgatggataactttat

SEQ ID NO: 828822 - DNA, 609 bp, Homo sapiens
caggtagtgataggcatttttatgagcagataggatcctctccatgggaaacagggagctgttcattcctttgttgtctatcacagcaagtgagtccatcgccccctgcagaatcccctcatgactgaggtattccaggcaggactgtaccatcccatcagagatcactctgaacacagccatttgtagcttgtaatcttacttcagagggcaggattgttcctgtagtgaaaccaagccaccatcatattgagaggtaagactttttttttttttttttttttaaatatagggtctctgtcgctcagactggagtgcagtggcgctatcacagctcactgcagcctcaacttccccagggtcaggtgatcctcccacctaagcctactgagtagctgggactacagacacacaccttcactcctggctaatttttgtacatttttgtagagatggggtctttctgtgttgtccaggctggtcttgaattcctggmctcaagtgatctgcctgcctcggcctcccaaagtgctgggattataggggtgagccactgtgtctggtcgactatctcttactgtagtaacttctaacaaaattctactttca

SEQ ID NO: 828823 - DNA, 609 bp, Homo sapiens
caggtagtgataggcatttttatgagcagataggatcctctccatgggaaacagggagctgttcattcctttgttgtctatcacagcaagtgagtccatcgccccctgcagaatcccctcatgactgaggtattccaggcaggactgtaccatcccatcagagatcactctgaacacagccatttgtagcttgtaatcttacttcagagggcaggattgttcctgtagtgaaaccaagccaccatcatattgagaggtaagactttttttttttttttttttttaaatatagggtctctgtcgctcagactggagtgcagtggcgctatcacagctcactgcagcctcaacttccccagggtcaggtgatcctcccacctaagcctactgagtagctgggactacagacacacaccttcactcctggctaatttttgtacatttttgtagagatggggtctttctgtgttgtccaggctggtcttgaattcctggactcaagtgwtctgcctgcctcggcctcccaaagtgctgggattataggggtgagccactgtgtctggtcgactatctcttactgtagtaacttctaacaaaattctactttca

SEQ ID NO: 828824 - DNA, 602 bp, Homo sapiens
tttaatactgtatctttatgtttgtttacgtttctctcaactgtgaatattgccatgtaaggtcttgtgtttgtatrccaaagttttgttaaattttaactttttataatagatttgtatatattttatggtattaaatgataaaacattagtatctacatatattttgtgcattcatgacatacataaccgtttcttttttttaaatatatttttggactacactacatggtccatctgtgagttttttcaaattgtggcaaatctccaaaaaattttccagtacatttattgaaaaactctgcatataaatgggcctgcatagtttgaacccttgttagtcaaaggtcaactgtagtccagttcatcagtccttctcattatggttagtgactactgtcctgcttaaaaaatctttgtctactcaagtcataacaatattttcctatctcctagaaatttgtggtattacttttatatttagattacagttaaattaagtggtcatatatgtgtgagacagttttgattgtattccatttatatatttgtctatctttaggcaaaacattctattttaattattatagttttgaatatgt

SEQ ID NO: 828825 - DNA, 630 bp, Homo sapiens
tgtggattccaatgtgatgttttgatagatttatacagtgtaaaatggttacatcaagctaatcagcatagcsatcatgtcacttacctaccattttttatgttgaagcatttgaaatttacttttagttatttagaaatatactgtacattattattggctgtagtcaccctgccgtgcaatagatctcaaaccttattgctcctgtctgtctgaaactttgtactctttgatcaccatctcccatttcctccctcctcagcctcctagcctctagtaatcatcattggactctctacttctatgagttcaacctttttagatttcaaatatgaatgagttaatgcagtatttgtctttctgtatctggtttatttcacttagcaaaatgtccttcaggttcatccatgttatatttgagagtgtgtttagttttgaaagacactgacagattgtcttccaaagtggctgtaccttttgtattactacaagcggtgaatgagagttcttgttgttccacatgctcatgagtatttagcattgtcagtgtgttggattttggccattctgttagatatgtggtagtatctcattgttgttttaatttgcagtaacctaataatatatgat

SEQ ID NO: 828826 - DNA, 640 bp, Homo sapiens
agtgtgttggattttggccattctgttagatatgtggtagtatctcattgttgttttaatttgcagtaacctaataatatatgatggtgagcatctctcatatgtttttttgccatctgtatatcttctctggagaggtctctgttcaggtcttttgtacattttaaggtcaggtttttgtgagtatgttttcttattaagttttaagacatcttttaagaaccacagtgttactagacttagggtgcccctgaaagcagaaacaacttagattacaacatccatgttctttcaaatatctggaaagccttccaaggaaggacagctacaaataagcccagatagtgaataccacaataaatactgaactcttcaatgcccagacagtggagaacatctactagcatcaacaccatctaggaaaacatgaccacaccaaatgaactcaataaggcacgagggaccaatcctggagaaacagagatatgtgacatttcaggtagagaattcaaaatacccatgttaaaggaactcagagaaattcaagataacacagagaaggatttcaraattctatcagataaatttaacaaagatattgaaataatttaaaagaatcaagcagaaattctggagttga

SEQ ID NO: 828827 - DNA, 503 bp, Homo sapiens
attctagctgatactgcagaaattcaaaggatcattagtagctactgtgagcaactatatgccaataaattggaaaatctagaagaaatgcacaaattcctagccacatacagcctaccaaaattgagtcaagaagaaatccaaaaccagaacagaccaataacaagtaatgaggtcaaagccataatattaataaaaagtctcatagtaaagaaaagcccaggacatcagggcttcaatcctgaattttaccaaacaagaactaataccagtcctactcaaactattcagaaaaatagaggaggaaagaatactgccaaactcatcctgtgaggccagtattaccctgataccaaaaccaaagacaaatgaaaaaaagaaaactacaggccaatatctctggtgaatattgatgcaaacatcctcaacaaaawactggcaaactgaatttaacagtacatcagaatgctcattcactatgaccaagtgggatttatccctgg

SEQ ID NO: 828828 - DNA, 585 bp, Homo sapiens
cttccctttactgacttatgtaagtatgtataagtattttcctcatagtatttaagttatgggatatcaggagaagagtaaatatcactcatggactttttatcctcagggaaaggatttgttcatttttgtttgtttgcaggatagttgcatcctgctaggtggaattaggatcttgttattatctttaattggagagtaagtatggtgtaaggagatacatatgagtaccagtttgacaagggagggacttgtgattgttaattttatgtgtcaagttgactgggccatatgatgcctagatatctgaataagcattatttctggatgtgtgtgttaccagaacatattactatttgaataggtagattgagtatagatgatccccctcattaatgtgggtaggcgttatccaatcaagggccaggatagaacaaaaaggtaaaggaaaggcaagttcactgtctcttctggagctgggatatccatatttctcctacccttgggctttagagctccaggttcttgggccttcagacwccaacaccagcagcccctacccctgccccaggttctcacactgaa

SEQ ID NO: 828829 - DNA, 492 bp, Homo sapiens
ctaagggttgaaattccacctcctaccaacttggcagaacaggggcttgtattagatttccagggctgccaaaacaaagtaccacaaactgggtggtttaaacaacagaaatttgttcttccatagttctggaggccagaagataaaggtatcagtagggttggttacttctgaaggctgtggggaagaacttgttccatgcgtcttccttagtttttggtggtttgttgttaacctttgataatttttggcttgtagccccatcaccctgatttcagtccttggcttaatcaactacgtacatagtgatgccatttgctgagatggggaagattgtgggagggacagatctacacaggaaaaatcaacaatcataytttggccaagttaagactgaaatgcctatagacacatagatgaggatgtcaagcagttagctaaacagataactttggggctaaattaagaggtcagggctagagagtccttgtt

SEQ ID NO: 828830 - DNA, 486 bp, Homo sapiens
tctgtccagaatgtgctgcccttctccttcttagcctctgtattagtccgttttcatgctgcttttcttcccgagactgggaaraaaaagaggtttaattggacttaacagtttcacatggctggagaggcctcagaatcatggtgggaggcaaaaggcactttttacatggtggcagcaggagaaaatgagagaaacaaaagcagaaaccctgataaacccatcagatcccatgagacttaatcatatcaggagagcagcacgggaaagaccagcccccatgattcagttacctccccggagtccatcccacaagacgtgggaattctgggagatacaattcaagttgagatttgggtggggccacagccaaaccatgtcaggccccatcaggttcctgggcttgctaggtgggtggccttgatacaccaaagctgagctctcaagcatcaagccacacacagcctcagccaggagaacaaggga

SEQ ID NO: 828831 - DNA, 690 bp, Homo sapiens
  misc_feature 152: n = A,T,C or G
catcctgtgttccggttctgttaccttttgaacagaactgcacctaaaatctgagcagaccatcgctgatacagaagaagaagcttgcagccattacaatgtttcaaattgttttgaagtcactattaattatgtccaaaaaagccttgagncagcttaaattagaatgtacacagaaatgacaaatttgcaaaatccttaaatcgaagtaaaaaggcaagaattgagaaataaacacattcaactggctgttattttttacatgtattttcataaattcatgaataattccctaattttcccagcacagtgggctctctggtccagatggccatttctccttgggctgagctgctcttgtaggaatatgtgtgttttatctaataaacttttaaagagtaataaaagtttattaaatgaactttaatatattttacatatagaagagtgtaattgatggagtacagcttgatgaaactttacaatgtgaatattctcatgtgtcagtagccagatcaagatttgagtactgtccaggacccagaagcacccttcaggcccctcagtctctatcctccccaacctcttccccaaggtaatcaacatcctaacttctgtcaccataggttagttttccctagcttygaactttatatcaacaggatcctgtagcacgcgctcttttgtgtt

SEQ ID NO: 828832 - DNA, 598 bp, Homo sapiens
tgatttttgccttttctcctttttcagaataagtctcatctcttcyacagctgctgggcaatggacaaaagttgctgttaattggctaaagccacactctacattttaaaccacggtggtcctaagaaacaaaataaataaacaaaggcctctggaatcctttacattctatgtattcattttgattggattacatctgcataaagtgcaaatagttgcttgaaaaataaaatatttattccactagttaactctataaatacaggtatctgaatactcaggattatacccaaatcacagaatattaaaatgtgacaaccagaaaggaccttaagtcttttcttataccatgtatctgacaaagaacatgtatctgtaatgtaaagaacttgtacaaccgaataagaagaagcaaaatatcccagtaaaagtgggctaaatatttgagcagacatttcagaaagaaatataccaatgggcaataaggacatgaaaagatgggcagaataattattccttagggaaatgcaaatgaaaaacatagggcatagggtgatgatactacagaaccattaaaatagctaacattaaaaagatt

SEQ ID NO: 828833 - DNA, 601 bp, Homo sapiens
aacatctctatttaaatatgctctagaggaccattaattagcagaggagatgttagaaacactttctcactgattagatgagtagtgttcagggtatgaggtcagccagaaatacaatgatacagacctccatctccagtcaactcagtacaagaatctggtgagctcagcatcccgacagtgccttgtgtctggaatcccattgggtcatgtctctctcccaattttatctgctggtctttcttgtctgattggacattttaactgctacctcattgatcctttcatataaagtggttgttgaagcttctaaaagcagaggtggttgtgatgcacgaactcacaggacagagtggagggctgtttctgtgcccacttgctgagccacaagtgcgcatgcagcagagttcagatggtatgtaataaatgtcccagcagtggggcagtggagaggagacctggtagctttcatttgcctctaataattgaataatcctkccattaagaatgcaacaatagatccccagctcagcttttgccagaatagggatgggagggagaaaggaagggaagggagaagagaggagagaaagggaattaa

SEQ ID NO: 828834 - DNA, 598 bp, Homo sapiens
tgatttttgccttttctcctttttcagaataagtctcatctcttctacagctgctgggcaatggacaaaagttgctgttaattggctaaagccacactctacattttaaaccacggtggtcctaagaaacaaaataaataaacaaaggcctctggaatcctttacattctatgtattcattttgattggattacatctgcataaagtgcaaatagttgcttgaaaaataaaatatttattccactagttaactctataaatacaggtatctgaatactcaggattatacccaaatcacagaatattaaaatgtgacaaccagaaaggaccttaagtcttttcttataccatgtatctgacaaagaacatgtatctgtaatgtaaagaacttgtacaaccgaataagaagaagcaaaatatcccagtaaaagtgggctaaatatttgagcagacatttcagaaagaaatataccaatgggcaataaggacatgaaaagatgggcagaataattattccttagggaaakgcaaatgaaaaacatagggcatagggtgatgatactacagaaccattaaaatagctaacattaaaaagatt

SEQ ID NO: 828835 - DNA, 584 bp, Homo sapiens
atatcctccctcagtgtcttagtctattcaggctrctataacaaaatgccatacactgggtggcctatacaccatagaaatatatttctcacagttctggtggctggcaagtccaaggtcaaggcgttggcagatttgatgtctggtgaggtctttctggttcatagatggcaccttcccactctgtcctcataagatggaagaagggtgatgggtgtctctcaggcctcttttaaaagggcactaacaccacttattagaggtcagccctcatgacctaatcacctgtcaaagacctcgcctcctaatatagtcaccttggaggtttcaatatatgaatttgcaggggaccatgacacccaggaagtcctccctgaccacctccttctgaataacattttcctctgcaagtcttacaccacttgcctctctgctacttacatgtaacacttttaagcacagagagaagcacagggatttggagaatatataatagtaaagtactaacaacaacaaccaaaacacaacaataggtgatatataaatctggctcttactatgggctacactctatgacaagccct

SEQ ID NO: 828836 - DNA, 278 bp, Homo sapiens
agacaaaaccctaggaatcagggacacagcaggaaccaaaacagacacagtcgctgccttccaggagatcacagttgagaaggggacagtcagcagacaatcgcggttgaatgggataaatgaaacactaaggtttcatttcaaaggaactgagaaggggataggatacagccccaggggggagaggatacagtcaagaaagtcttcttggaggagatgccacaaamtgatatttgaaagacaaacagaagtcagctgggtaaataaagctggctgtg

SEQ ID NO: 828837 - DNA, 629 bp, Homo sapiens
gcaaataatttccaaccaatggaacagacaatgtaaaatattaatggcctgttraacattaaccagttttacatctagctcagcaattttatcttaacatttctttgtcaagctgccaataactgccatcacttcttaaatgctctttgaactgattatgacatcttacttgttccctcattaattaattagttcaataaaatatttgacatatgtcccttttatatttacctgagagttattattttatccttttgaaaattataccctaacacgacttaactctctttacctctgtttctctatctgtaaaatggaaaagacctactttttaaggtttctgtgagaattaagagacaagatatgtaagacacttagcacagaacctgttccaagtaaatgcacatgaggccttaagctttcaatgtaaatctaaagagagtatttaaggcatctgaaatcgggattggagtccagtttatcactgttcaccttcagcttctttcctaaacactcacatacactagattttacaaacttgcctgaaacaacttctccttttttacaatgacattctttaaaatcttatttgctgattctttgctaattatatacctcacacctcatgg

SEQ ID NO: 828838 - DNA, 629 bp, Homo sapiens
gcaaataatttccaaccaatggaacagacaatgtaaaatattaatggcctgttaaacattaaccagtttyacatctagctcagcaattttatcttaacatttctttgtcaagctgccaataactgccatcacttcttaaatgctctttgaactgattatgacatcttacttgttccctcattaattaattagttcaataaaatatttgacatatgtcccttttatatttacctgagagttattattttatccttttgaaaattataccctaacacgacttaactctctttacctctgtttctctatctgtaaaatggaaaagacctactttttaaggtttctgtgagaattaagagacaagatatgtaagacacttagcacagaacctgttccaagtaaatgcacatgaggccttaagctttcaatgtaaatctaaagagagtatttaaggcatctgaaatcgggattggagtccagtttatcactgttcaccttcagcttctttcctaaacactcacatacactagattttacaaacttgcctgaaacaacttctccttttttacaatgacattctttaaaatcttatttgctgattctttgctaattatatacctcacacctcatgg

SEQ ID NO: 828839 - DNA, 615 bp, Homo sapiens
tgaagctatgcaaataacatatttctctttaagttttacatgaattgatggatcttgcctgtggaaattattgtggtgttctattagtgattttctatttccctcaatccttcaacataaattaattgaaattcttctgtaagaaggatttgtcccttctctctggtatatgtattttataatttatttatatcagtctgaactcacgtatttaactttcttttgggttaaatccaatgctatcgttatttatttatttatttggtcaaattgttctagctttggtcattggcaactctgattttctcccgtttctttttgatgtacccgcctccctggccccccattctttggagcacttccctactttctagcactacaaaatgctccaggcttctcttacatttttccctgcaacaaccctagaatcagtgattttccaaagaagccctggtaccttttgttgaaggatgatatttagaaagtaagatctggacastaggtagacttgctgctagtgggatgtcattacctctagacctgtctcagcagacacagctaggaaataaatacatattactaacccaagtatgttagtttcctatgctctgtaac

SEQ ID NO: 828840 - DNA, 608 bp, Homo sapiens
tgttatcaccagctttccaattatgttccttccaagtttcatccagcccgaccagtggttgcagcccatgaatcrgtatataatcaatatataatcacacatctggctgtttctccttccaagcgaagtacacaaccagatgcactgccagaagttctgcccacaggggtggggggcatttttcttctccaccgtctttcagggatgtcccagaaaggggctgtaatgctgaagttgtccactttcagatagcaccggtgtattatgcagagaaatctataaactaggcccaagttttctcttcctctgttaacttattgtagggaaatccccatgaggccataggtacaggacacaggtgcaggcagtgtagcaggagtggggaccatgaatatttggaccacttcctcatgtaacttaacttgtgccttcagggcctacttgggcccaatcacatatacaccacttccatttgataatgcagttttgctgtgcatacctaactttatgacttagtgggtcatctaacacccagttcatcaaaggtagtttgggttccttggactcatggtggcccatggttaaccattcagtttctattaagaccc

SEQ ID NO: 828841 - DNA, 479 bp, Homo sapiens
aaatatcagcagatagttttcctgactccttgtcccaaccttccactgccataagaaatatgagggcatgaggttctctargaatgtccagagaagggcctaggatgttcccttgtaagtacatagaggtaatacatttggttttatgatatatctcttaaatgcaacagaatatcgtaaagcatttttcctaattataatttttagcacttgcgtaatttagagttgtataatggttaatttagtcatttactaattggttatcctaagggctttcttctatgctgtattttcttcttagtactttctccctacttgattttgcctttgatatgctggtgactcccaaatctgtatctctggtctagcctagtattattctcctgaacaggtgcctcaaatttatgaaattcaaaactgtatttatccttacccctagaacttgttaatctgccacatgacaatggatggcaccaccc

SEQ ID NO: 828842 - DNA, 611 bp, Homo sapiens
tttcactcccgagaatactggagttctaaaaaaaaacatgacatggaaacagcaatgtttatcgcaaatgggagaagttctaatgatgaggatttcaggcactgtagtcagacactgagcgaggtctttttggactaactatatgtgtgaggagagtaaaaaggagtttccacagtcctcttcaattcctacgtagagatccgtctgcagcgacgctgactttaacacattcacacttactgagataatgaaaaagaaaagagctttttcctctgtggaattctttttacgacaaacttttcctggttgaaatatctaaaaataattataaatcatcaacatttttccaagagatgctttagacaagttagtcttgggcaactgagtaaaattttttgcatttggtttttcgtttccatggtttcctttctccactcaaatgctagaactggggctgggaagctaccagagtgagaatgccaggggcctatatagttgcaggatcgttgcattataagaagcagaaaattaatatastctctaagaaggattccagtctcagatgatatttggtggtatccagcgaaattatcctgtagatacttgtagat

SEQ ID NO: 828843 - DNA, 694 bp, Homo sapiens
gagaagagagttctaacaatcctctccagaaaaatcctggtcaaaacacaggacttcagcaatctgctcttttcacttgctcaggactcgggcttcagctttgggtgtggactgtgtgcagggcctatatttagtgattattttgcatatgttctctcaaaaagtttcacagatgcctcacgctggcagttgggggtatatttccttttagtggggactatctgttgtctgaatttgccaagccgctcatacacagataacggatttcacattcagtttagagggagactgatgggcctttgaatctatgacaagcaagacccaattgtagcatagtagacagatataatagcacaggcttaagagaaaggaaaccacaagcgccccaggttttattattaataataacattaaatatcattgctgataaagttataaataataatagcagataatatttattgagctcttaatagacgcctccgtccaaaaatcagctctaccacttgctgttgatttgagcttggaaagtgactgtattagtctcacagggctgccataacaaagtacctaacactaggtgcttaaaccacagaaatgtatctcctcacagctgtaaggrctggaagtctgaaattaaggtgtcccagggccatgctgtctctggggactctaggggataatctctcctctc

SEQ ID NO: 828844 - DNA, 604 bp, Homo sapiens
agtaattgaataaacatgagaggagcatttttgggtactgcataccagctgaggattaacacacagtacatgaattaaaaatttcaggaaccttgcaagaggaaagattacagctctttataacaaagaaaattattatttctattattttccctgtagatgcattgacaaacttagacttttggaatacgttgtctttagttgttcaggctttaccatgtatttgtatagagcaatctatttttcttggggaaaaccaaatgcccatgacgtatgtttgctttagaagatggtttctttgacttgttggaataaatcacaatctcctgtttctacttttgtcctttcacaaggatttccacaattacttttaagatttgttttaatatttaaaggggaaatatctattcaaaaggcaattgaaatgctattatgtgcactagccaagggaaatgtaaaggttttacttttggggagcttaaaatataataaagaagcaaggtcaatcaaaattggtacaataaacatcyataccacaacattcttttgtagaccaatttatttttttatctacctggttgtgttattgcaatgctaggtatct

SEQ ID NO: 828845 - DNA, 604 bp, Homo sapiens
agtaattgaataaacatgagaggagcatttttgggtactgcataccagctgaggattaacacacagtacatgaattaaaaatttcaggaaccttgcaagaggaaagattacagctctttataacaaagaaaattattatttctattattttccctgtagatgcattgacaaacttagacttttggaatacgttgtctttagttgttcaggctttaccatgtatttgtatagagcaatctatttttcttggggaaaaccaaatgcccatgacgtatgtttgctttagaagatggtttctttgacttgttggaataaatcacaatctcctgtttctacttttgtcctttcacaaggatttccacaattacttttaagatttgttttaatatttaaaggggaaatatctattcaaaaggcaattgaaatgctattatgtgcactagccaagggaaatgtaaaggttttacttttggggagcttaaaatataataaagaagcaaggtcaatcaaaattggtacaataaacatctataccacaacattctttygtagaccaatttatttttttatctacctggttgtgttattgcaatgctaggtatct

SEQ ID NO: 828846 - DNA, 615 bp, Homo sapiens
caaagctaatttttagttatttacattttagttactacctcatttgtctcctggaagtctttcttttctaaatgctacattctgcagacatattcagccmatgcttttctagctcagttattcctatgcaaaaagttaatttaatatcctacaacatggatgaaaatatcaaaaacatgcttgaaagatgccagtcataaaagatcacctattttatgattccacatatacaaagtatccagaataggacaacctgcagggacagaaagtaatttagtagttgcctatggccaggggtatgggggggggtacagtgggaagggtgctaaaggctacaaagtatctttttgagatgatgaaaatattctaaagattgtggtgatggttgcacaattctgtgaatattctaaatattcacagttatttaaatattacatttaacttaactaaaaaaggaaaacatcagttttgcctatatttgaatagccacatcagatcttgactgactgataaaaggacttcattctgtcataccattggtctccattaaaaacacaaacatacacaatagatgtatttgtatctcacacagatgatctcattaatctcgtgaga

SEQ ID NO: 828847 - DNA, 607 bp, Homo sapiens
gggattacaggcgtgagccaccgcgcccggccgtgtcatagtcttattcagagagaccttaatcatttttgcttccgcaaaatatcacaatggtccattacgttgatgacagtatgctgattggatccactgagcaagaagtagcaaacacaatggacttattggtgagacatttgcgtgccagaggatgagaaataaatctgactaaaattcaggaatcttccccctcagtaaaatttttaggggtccagtggtgtggggcctggtgagatactcctaaggtgaaggataagttgctgtatttggcccctcctacaaccaagaaagaggcagaatgcctagtgggcctatttggatcttggaggcaacacattcctcgttggggtgtgttactccggcccatttatcaagtgaactgagaggctgccagttttgagtggggtccagaacagaagcaggctctacaacaagccctggctgctgtgcaaagtgctctgccacttgggccatatgacccaggagacccaatggtgcttgaggtgtcagtggcagayagggatgctgtttggagcctttggcaggcccccatagatgaatcacagtggag

SEQ ID NO: 828848 - DNA, 622 bp, Homo sapiens
agggaagagagcatgcctctaatacagaaatcaggtatttagggggaagaacaatctaataaaacactttggacagcccgtgatagtgttcagacacacagttctagaagagaaataagaaagcatttctttggccaaatgtgatctgaaccatccgggtttttgcctcacatactgtaagagacatttattctcttcactattcaattattttgccagcgagatgtgggaattaaagtagcagcaatcatgataacatgtgtgaagcatcaaaatactttgcactgagcagacagagatgccaattgtattttcagcttgggtttacatatggaaaatattgttattatttccttcaatgtcatcagtttttaatggctcctattccatccaatttttaagctgtaaatatagtctagtatttgaaaagaaaatctaagtagttctaatgccagaggctggaactagtttgccagcaaaattcatctttagtttacatgtatttggatgcttgattatatgtccccaaatccagtcataatttagcccagaattttaractaacagaacgcaagtgtagatacatttgtttgtctcatgcagtttaaaaaaaaaaatctgt

SEQ ID NO: 828849 - DNA, 556 bp, Homo sapiens
ggtttccagtgtctataagcctgcaaaatgagtagagagaataatggtatacacacccattgttcaaaggcacacttagagggagagaaaaaggatatagtgaatcttgtcggggatttctaggttcagttcaattaagattgtcctacataaaagaaactcctccaaatgattgaatttctagctttccagtgatttgagttttctttttcctctgttccctgcaggttgctttagggaccatgccaaaccgatcacttgagatatacgtttatagtgagataagactgtaggctagaagaaggaatacttagcgacttaaatggggggtgctgagcactgaagggaaggagggagaaatgagatggtaacagatgtaacaaatgctgctgcccccagcaaagtcaggaatgaaattccttcctggaaatttggacctgggcaagaatgactcctcagatgtaaatagtgtctatgactttgaattttcatttgactgctggtgtaccagattgaagayataagcttagcaagtcctctttctctcctctcttta

SEQ ID NO: 828850 - DNA, 546 bp, Homo sapiens
aaagaagttaatcatgacaggtgtatgggaaaaacagtgccttcaaacagtgtttgtagcagtgtacactggcaaaatattttttacaattaggaaagacataatagatccttaaaccttgtcaacactttggcttagtgattttacttctggaaaaatacatataattacatctttttcatgtaaaaaaaattaaacagtagattcttctcaaggttggtggttatgggaggtgacaattgtagcatatcatctcccggcttcaagagtgggcctgtgttatactagtcatgaaacttcagcttcgttgactatgccagttggtccaggggctgaccacacaacccatgacaaagatccaaagggcttttcattctgaaataagcacagtaaatttctttctgccctgtgcaatttctgccttgttctttagatgggaacytacggttatagccacatgggaatcatgagaactgacagcctgagaggctaaatccaaaagacagccagaagcagggaaaaaagagaacagtgataagacagaaa

SEQ ID NO: 828851 - DNA, 600 bp, Homo sapiens
tctaaagtactttgtcactagttcaaaaatactccaaaggactctggaggccaaggtgggaggattacttgaggccaggagatggaaaccgtgtctctaaaaacgttagctgggcatggtggctcgtgcatgtagtcctacattatgtaaactccaaagttctttcttgctagctcaaaagtatttcaaaggactcaggaggctgaggcagaaggattgcctgagcccagggttcaaggcttcagtgagctgtgattgtgccactgcgctccagcctaggcatcagagcaaggccctatctctggaaaaaaacaaaaaacaaacgaacaaaacacgccagagcaaaatgtcttagtgttcaatcattctttacacttgttttatttatttttaatttttattttttgtgggtacatagtaagtgtttatgtttatggggtatatgggatatttcaataaaggcatacartgtgtaataatcacatcagggtaaatggagtatccatcacctcaagcatttatcctttgtgttacaaacaatccagtcatactcttgtagttatttttaaacgtacaattacattattctttatgcctgtt

SEQ ID NO: 828852 - DNA, 586 bp, Homo sapiens
gcaagtctttcaatagacacatgaatgtttctcccaaagcaagggttttggtgatcaggaaatgaaacttaatataaaacctaaattaaattgaactttttagaaattgccttgagaaaacctggggtgggaaataaggacttgaaactagactggaagataatcttggattccgaggggacccaagatgattgggagcatgactttggggccagcgaagtcattttaacatcatggcattgagacataaatgcccacctgaaatagctggtaatatggggactgaagtactcatgttagtgtgacagcagcagggtcactggattgaataactccagggggcaccattcatccattcctttattccaggaagtgttatggaatacaaggtattacacagaagcagcaatttggaaagaccatcttgagagattcttcataaaaacagaaccccrgtctataaggtacacattgagatcagtgtcactctgtccatgctctcatcccacttctgtgtagatgtcttctcccatttgctattgtgttaagacatcagaatggatcttccaaggtgctaatctctctc

SEQ ID NO: 828853 - DNA, 618 bp, Homo sapiens
gctgtgtcctcatcctacatagcatatgagagtgtgtgacgggagataggatgcagacctgagaagcattaaacacctaggcaataaaggtgccagcatcagctgagagcgcaggtagacctcagtcacatttgttactgtgtaactaaaaatacaaaattagctgggtgaggtggtgcacgcctgtggtccccactgctcaggcgcctgaggcaggagaattgcttgaacccaggaggcagaggttgcagtgagctgagattacaccactgcactccagccttggggacagagtgagactgtatctcaaaaaaataaaataaaataatctaggacaaccaagagaaggactcaggctcaccttactctatgtcacatgtgatatataacacttgagggggacacacacttgtcactttgtatcactatgtcctatatgatagccaatgataacccaagagggggaggcagccttgttcacaccatgtcacttatgatattatatgacatcaaggagcccagacctcagttgcattatgtcactatggcacatacagtatcatgcaacaactgacagaagggttgygggcctgattcacagtgtatgtgagtcacaaa

SEQ ID NO: 828854 - DNA, 566 bp, Homo sapiens
ctgaccaataagaaataataaaggggccaggcacagtggctcatgtctgtaatcccagcactttcgggrgccgaggcaggtggatcacctgaggtcaggtgttcaagaccagcttgaccaacatggcgaaaccccatctctaataaaaatacaaaaattagctgggtgtggtggcacgcacctgtaatcctagctactcaggaggctgaggcaggagaatcacttgtacccgggaggtagaggttgcagtgagctgagatcacaccactgcactccagtctgggcaacggagcgagacttcatctcaaaaaaaaaaaaagaaacaataaagggagtccttcaagttgatatgaagggatactagacagttgctcagcctgatgaaaatataaaggtaaatacataaagattaaaacctgtattattgtaatttttgctaataactcaatttttaatactttaatggaatttaaaggacaaaagcataataattataaatctatgttaatggatacaaagtatataaagtttaatttgtgacatcagtaacttaatagtggggcaaa

SEQ ID NO: 828855 - DNA, 662 bp, Homo sapiens
ggcggcttggggacagcagaatcctcatcgcctggtgcaggcaaggccctgcaggtgcccagtggccaccgaggcagtgggagaaggcaggggggcggggcactcacctgttgctgaggaagcagctctggatgaccttcatgatgaaatttgcagcctcgcgctcagtcatgttggggctaaacctgtgcctggagaagaggctgtgtcagggctgccatgggcagggccgtgctggctccctggcccagtgggaggagggtcttccatggggacggacttcagctgagagccatgccctggaaatgtacctttggggtccacatgttggaagatggggtgctgtgaaggccacacctggcctatcatgggccctgtccccttcccagcatcacctgagtggccccatggcattaggggactaagcattggggagctaagctactgcagccccagaccttagggtggaggtggggtgggcgtagcatccttgacataaatagaggcccctgggtgggtctctggtgtggccggcacaagcaggggcccctcacagttgtggtctaggggyagagcctcacctaggaaccctgtctgctctgaggttccaaggagatgacaaccacagtgacaattacatgaaaggtacctatcttggatgg

SEQ ID NO: 828856 - DNA, 651 bp, Homo sapiens
agctctctagcttgctgggaatctgggttaaggtaaatgaaaatacaattttaggcccttaattgtatgtaaactttacttccaatgaaacctccagacagaggctttcacaggacattctcatctcagaagctcagcacgataccctggaaacaccaccagctaacctttcctgggcactgttgtatgcccgaccatgtgctatgtcactggagccgcagggccacccaggagcctgtgcgttctgtccatgtgatcaggtgggctcctctcaatcttcacacagcacagctgagcctcaaacccagcactcaccctgacctctcacctccccacaaggtaggaaaacctggggctgaaagtgtgcagggacatgtcatctttagccttgggcaaaggcaacctttcccactgatgatttccagatcacccaggggtattggttctgcctcaattttccaactggcacagagatcaagggcgacggtgaagcagattggaagggcaaagacgccacggtgggaacaggttcctatccctcccggctgctcyccagctgggtggccctcagtgcatctccagagggcagtcaaaagccccaggccaagaccaccctgcactctggatccctctactcgctcaccaaacaca

SEQ ID NO: 828857 - DNA, 608 bp, Homo sapiens
aagagttatctaggtgtatgcatttttaaacatgccagtagactatttacttgaacatatatgttctttaagtactgactcatattacatagattgtggcttgaaaacacttacttcaawttttggatgggattttctttgtggcctactacactatcatattctgtgaatgttcaatgttcatttgaaagtaatagattatttctgttaattacagtcgtatgtgtatatctctacagatatattatatatgatcatgtttgaaaattttcttatccaaaaccttgcatccttgcttgtgttttactaagccatctgttgttttctgagagttgtgatactgagaaattgtgatttttgtcaatttcttattaaatttctatcaggtttgttccatatgtaaaatctatgatgagttttgcataatatttatgtttcagattctagccccaattgtaccatcaacttttgagctcaaaactaaatcaagagtttatttcctcaatgtcccttagcaataaaacaacaggtgaaaccagatgacttctaagggtcccgccaaatctatcattctttgactttaatttataatgaatttaaggcacctt

SEQ ID NO: 828858 - DNA, 638 bp, Homo sapiens
ctgtacctctctacatgtacattcatgcctcctattccacctcatgggggttttccatatttgtagctccatcttctgacagtgacaaccttggtatcctttgtccttattgtattggctaatgtggwgcctcctcctgtgtgaaccctcttctcctctctgccattgctgctcctctcagacccggttatcctttgccatttcaccccaatatctgcctttctcactgccctggtccaacacccatatggtcacctttctgcagccacacctctccttcttcctctgcacgggctcagggcccagtcagacttgagagctcattccaggccagtgtggctcccatcatcctgagacagatgccagctttgcccagacccaccttgtggctttaggattgttgaagaagggattttagcattttcaacaagtgctttaggtttcaggcctggtcagccgagggaaggatgatacaccagtaaccaagactgggacgggagctgggctggctggcagatggtggggtaccatttcgcacatggtgaggtgcttgtaggaacctccaagcggagccaccatccagtggaaagtggatctggtgggagaagggggctcattgtagactagaggacccaggg

SEQ ID NO: 828859 - DNA, 500 bp, Homo sapiens
ctcaccacgttcccaccgtggccaatctctcatgactccatgcctctgcacaaggtggctccttggcccagacgttcccaagtccctgacgtggctgtgcacggtgccacctgcacctatcacgccgccacctgcacctatcacgccgccctcctcctcccttacaaggtcctcaccagctccctggggctcacaaggtgcttctgataccgatgggaggtagtcaaatgcctaggcagacaggggcaggtccctggtgaaacctacctccaagccaaataacagcctgaaggctgaaagaccagacggcaggtcctggataaaacccaagacccagagcaaaactcctattcccgtttgcccaccctttcccaattgattctttytgaataatgccttttaaccaatcaaatgttgccttttccaatactacatacagcctgcccctcccctattctgagcccacaaaagccccagactaagacacactggagggattt

SEQ ID NO: 828860 - DNA, 658 bp, Homo sapiens
taggaaagctgcctgtggcacacggatcctcatctgcacatgcccacttgtaccacaactgaggacccccaggaaggcagcccaccctgggttttatattcaaargaaacaagaatcactgagctaaagcattgaaggatatcgtgtttgggggtgtggggtagtcgggggactggaacagattccaggatgttggattctcagcacattctacagttattcttgagaactataagccagaaagctgaaagaaccgggcccagtccaagaccttgaaaactgtcttgcactacacttatattttatgacttgttctgagaaggtaagtgtgtgtgcgtgcacgcacgtgcatgtacccatgttcacatgcaggacatacaggacagcaggagtggagagactccataatcgtgctcttcacctcaaattggaatctggcaagattggactttctgaaaattaggtaggataagggcttaaagccattttgggttgagcactaaaatttcatgacacattctatttgatggaattctatgcaaccttaaaagaagaatgaggcagctccaaagtattttgtttaatgtgaaactcaaggttcaaaagagtttgcgtaagcctgggcgtggtggctcacacgtagaatctgagcactttg

SEQ ID NO: 828861 - DNA, 593 bp, Homo sapiens
  misc_feature 40, 51: n = A,T,C or G
ggtagggagatagactctgagggcttcctgtagggcatanatcacactttnttacataattgcgagttgtctcttaatgaaaagaaagtttgtacatatggcacttcactccatttcccttcttttccacaaaagaggtctagctgtaagatggtgttataatttatactttcctaggaggccaggtttctcccccttgaagaggatatcgcggccaggtggtagtgcagaagaatataagctgtttctttgttagcgtctgagggccaaattggtcccgattctccagaatacatcttaggggcatttttgccttggggggaacatttcccatctgaaaaaagaacacagggatgccagcacccctagtcattttctggtaagcattagtcatagagcgtcctgtatggtcctaatgcttatttctttccagggtgtgtaaccacccatggacctctgcttatcggattagttatgctcaccgatktagcagtcctgcacctgtttacccacctttctttgaagggggcctgcccctccacacgtgtgggtatttctcatcaggtggagatgagagactgagaaaagaagta

SEQ ID NO: 828862 - DNA, 648 bp, Homo sapiens
agctcatctacaccacgggccaaacacttctggacgggagaccagatataaattaaggcaaggctgctgctgtcagatacatccccacctctccaccaagacactcatggccaacagamgtggccaaaacagatgactatatcaaagtggttccctatcctctctgccccacagaaggccggacgtcccgggccatcactccataaaatcctgtttctttggaaatgaggagaaaagagaaacctctcctgtccatccaggctgccacttctggtggcactgcaggacaccccttctggctggcaggggttcatcccaaagctttctgacctaaatagaaagctctgtgcctagtatggatctagctgccaaaagattttcactgttcaatcagcagattagggctgtagataagcagacaccaacatccctgatgtcttgtccctgctgagggctggaacctgaggggactgccctgctgacctgtcttttctgaatgatcacattcccaaaatctttctcattgctggtcatcccagttggaggcctgcagtaacacccacagtgaaaacctccctttacctcctctgttaagtgaggctgttggttggattcttagcagcataaaacctatcagtaaactaaaac

SEQ ID NO: 828863 - DNA, 586 bp, Homo sapiens
taaggtgaatgcaacagaacagagggtgcagaaataaactcgtggctatatgtcattttatatgagacaggtggcactcatcagtggagaaaggatggcttatataggtgatatttggagaactggtttactattggagaaaaattattcagatctctatcttctaccatatacaaacataatctccaaatatagacctaaatgtgaaaggcaaatttatgatattgaaaaaatgaaggagcttgtgtgtgcacatgtgtgatttgggggtataaaagatttttcacacattattcaaatagcatgaatcataagggacaaaatggttgcgtgcaaccacactaaaaatttctgtttaataaaagacaccatacaccaagatgacagattgatcgtaggtttgaagatacatgcaacttttaaaactaacaaggatatttctagaatataccagggactaccacaaatcaagaaggaaaagrcatgaaaaaattagacaagatattaactcacaagaggctaactaatgtacaaacagatgcttaacttcactagtgatcaaagacacacaaaacaaaagaagatg

SEQ ID NO: 828864 - DNA, 592 bp, Homo sapiens
aaatgtcttttcttgataaattacctggtatcaggtattcagttatagcaacagaaaatggactaagacagtatgtatgtacagttggccctctgtatccatgrgttctgcatccatggatgcaaccaactgaggatggaatatacagtcatgcattacttaacaatagggatacattctgagaaatgcattgttagacaatttcatcattgtgcaaacatcagaatgtgcttacacaaacctagatggtagagcctactccacacctaggctatgtgggatagcctattgctcctaggctacaaaactgtaaagtatgtgactgtattgaacattgtaggcagttgtaacaccatggtaagtatttgtgtatctaaacacagaaaaggtgaaataaaaatacaatataaaagatacaaagtggtatacgtgtatagggtacttttcatgaatggagcttgcaggactgaaattgctctgggtgagtcagtgagtgagtggtgagtgaacgtgaaggcctaggacattgctgtatgctacagtaggctttgtaaacactgtagacttaggctgcactgtttatttctaaaag

SEQ ID NO: 828865 - DNA, 596 bp, Homo sapiens
aggggtagggagatagactctgagggcttcctgtagggcataaatcacacttttttacataattgcgagttgtctcttaatgaaaagaaagtttgtacatatggcacttcactccatttcccttcttttccacaaaagaggtctagctgtaagatggtgttataatttatactttcctaggaggccaggtttctcccccttgaagaggatatcgcggccaggtggtagtgcagaagaatataagctgtttctttgttagcgtctgagggccaaattggtcccgattctccagaatacatcttaggggcatttttgccttggggggaacatttcccatctgaaaaaagaacacagggatgccagcacccctagtcattttctggtaagcattagtcatagagcgtcctgtatggtcctaatgcttatttctttccagggtgtgtaaccacccatggacctctgcttatcggattagttatgctcaccgatktagcagtcctgcacctgtttacccacctttctttgaagggggcctgcccctccacacgtgtgggtatttctcatcaggtggagatgagagactgagaaaagaagta

SEQ ID NO: 828866 - DNA, 650 bp, Homo sapiens
tagttttagtttactgataggttttatgctgctaagaatccaaccaacagcctcacttaacagaggaggtaaagggaggttttcactgtgggtgttactgcaggcctccaactgggatgaccagcaatgagaaagattttgggaatgtgatcattcagaaaagacaggtcagcagggcagtcccctcaggttccagccctcagcagggacaagacatcagggatgttggtgtctgcttatctacagccctaatctgctgattgaacagtgaaaatcttttggcagctagatccatactaggcacagagctttctatttaggtcagaaagctttgggatgaacccctgccagccagaaggggtgtcctgcagtgccaccagaagtggcagcctggatggacaggagaggtttctcttttctcctcatttccaaagaaacaggattttatggagtgatggcccgggacgtccggccttctgtggggcagagaggatagggaaccactttgatatagtcatctgttttggccacktctgttggccatgagtgtcttggtggagaggtggggatgtatctgacagcagcagccttgccttaatttatatctggtctcccgtccagaagtgtttggcccgtggtgtagatgagct

SEQ ID NO: 828867 - DNA, 628 bp, Homo sapiens
gctgcttcaaatgcatgggaaatgaaggtgagatagaagcaggcaagcaaggcagttcaggccagcctgtgagcacctgggtttgaattgccaaggagccatgaggggacctggctgcctacctatttggtaactcctgcaattccaacaccaagccatgctagtgaaaagtgatttgtaagtgtgtggggaaggggactaatctggacaagctatgttctcctgtgaggtggttcagacacatgtgacaggcttggccgggaaagatggactgccctctgtgccaggaggtggctttgagatttaatcagcagggtttgtcaaatattcttttatccacacaagtgctttccctgagcagagtgcaggtcagtaaaaatgtcttcattgtaatacactgccagtgttgctttcgcgacaggcaaccttagccgttggtacaccctggtccaccttccatgtctgcttggttgcagagaacttgatctgaaccagctggtatcctagaagcaacaaattaaccarttctcccttaagtgtgaatggttgatagccagcgtgatgtgatgatgtctcttgtgaattggaatgttcaaaggtgttttaaatggcatggggtactttgtag

SEQ ID NO: 828868 - DNA, 537 bp, Homo sapiens
ggttcagacacatgtgacaggcttggccgggaaagatggactgccctctgtgccaggaggtggctttgagatttaatcagcagggtttgtcaaatattcttttatccacacaagtgctttccctgagcagagtgcaggtcagtaaaaatgtcttcattgtaatacactgccagtgttgctttcgcgacaggcaaccttagccgttggtacaccctggtccaccttccatgtctgcttggttgcagagaacttgatctgaaccagctggtatcctagaagcaacaaattaaccaattctcccttaagtgtgaatggttgatagccagcgtgatgtgatgatgtctcttgtgaattggaatgttcaaaggtgttttaaatggcatggggtactttgtagtcaagtgcccccaaggaaggcaggctgccactgagggtgttctgggctgattcaaacatggggcttcagaaaagacttgccttaaatctgtagagtagcatgagggawactgagactgtagtgagtctaaggaagaaaat

SEQ ID NO: 828869 - DNA, 517 bp, Homo sapiens
aggcctgaatttggatcccttgtctgattgccatcaatggcctttggcccacaatgagtggtcttccttcawgaaacttttaaataattcatggaaccaactatgaaaaagtttattgtttaaaagtctgggcctggctgggcgtggtggctcacgctgtaatcccagcactttgggaggccaaggcgggtggatcacgaggtcaggagatcgagaccatcctggctaacacagtgaaaccccgtctctactaaaaatacaaaaaattagccgggtgtggtggtgggtgcctatagtcccagcgactcaggaggctgaggcaggagaacggcgtgaaccctggaggcagagcttgcagtgagcggagatcacgccactgcactccagcctgggcaacagagcgagactccatctcaaaaaaaaaaaaaaaaaaaaaaaggtctgggcctggaaatttagacataattacacagatgcttgtgctatggtagaaagtgcattatctaactcagaaagt

SEQ ID NO: 828870 - DNA, 577 bp, Homo sapiens
caggagacaatgtgagggggttattgcaatggttaagataatagatgagaacctgggagacagaggttgcagtgagctgaaattgtgccactgcackccagcctgggtgacagagagattccgtctcaaaaaaaggagatgttagtagcttagaacaggtgatggcagtacaatggacagtactagacatatgtgctaggcacttaagagatgagatcaataggaattggccatgggtttgtaagatgtgtaggttggggagacagctgtgagggtatagactcagcaaccagcataaccccaagagataggtcttactcacctgtcagggtggccctggtggttggaccaatgcccttggggaccagtacctcatgatattgctcacccgccagggtgctgtacacaaccttgtactcctgaacttcggcttcactgttatcccactcgaggtcaaggctggttgctgtgcgagaaccaactcgcaagttcttgggggcatcgatctctaaaaatagacagacatcaccaacatcgcacatgataatgtaatgtacatttgtggtgcatcttgaac

SEQ ID NO: 828871 - DNA, 582 bp, Homo sapiens
gtctcttcctcatttggacattgcacttttcttcttctcttccttggatggcaacaggaccttcacagtgaatgatttgaaaagagcctaataacagtgtgggcaagttttagggaaacaacctctgcagtcccctcaggctaggaattgtggggtgcccatttctatctctgaacttgaagggcagtggcggggagtgatggctgaaaatggaacagggaactctaaggagagggttgcccaaggagcttcagccacaagtagagaagtcagtgtgtctgctgcaaactgagagggtgggagccaggggcacaaatgcttgaccttattttcttcctcattccattctcctgctgctgtcccctacttggctaaaaccatccatatgccaacaagagagggcaagggaatctgttgatgcagtgctgcaggtcagcttcaggtacagagccctggagaagggyaggatgtggtgtggcccagagggacagacagatgacatcctgtttccctgtcatctcctggagagccacctgttgctaatgggattgtggcttctgagacccacctgtctacaatgct

SEQ ID NO: 828872 - DNA, 568 bp, Homo sapiens
aactacttgagactgagtaacttaagaaaagaagtttaattgagtcatagttccacaggcttaataggaagcatgactgggaggcctcaggaaacttacaatcatrgcagaaggcaaagggggaggcaaggaccttcttcacatggtggcaggagagagagtgaaggggggaagtgccacgcattttaaaccatcagatcttgtgagaactcactgtcacgagaacagcatgggggaaatctgcccccatgatccaataacctcccaccagatccctcccgcaacatcgggaattacaattcaatatgctatttgtctggggacacaaagccagaccatatcagtgtggaacgaaaggggatggagctccacacccacggtggctatatctcaaattcagcagtcaaatgatatttcatgagggtagttttccagtactaccatcaccaatgcaagtttgtactaaatttggggttctccttgggcaggtgtcatatttcttccagaagcaactctgcacccgtccaactctgtatcctttaattctcattagaatgctatgaaatac

SEQ ID NO: 828873 - DNA, 486 bp, Homo sapiens
tgttaccttttaccacccatttactttagtggtgatttcaactctacctggattcctgcctgtaaactcttttgttcatatcatcacactgctttyttctaaactacagcttacagacccaatgaaggaatgatgaacgacatgaactggtgtcccactgggcttaaattgatataatttactttctaatgacactcagactggtacactcccattttaaagggctctttgccttagtgattgttaagttctttaaagtctctcctctccctctcttcattctgttcaccatcacctcccatctgggccatggaagttagtttctagttggtgttccattctccacacagtagtcagaatacattcccacctaaaacccccaaatggcttaccactggtttgctagactttaaatcctagaacacggcataagaggacctccatgatctggctcctgcaggctccaaaatcatctctctctacttt

SEQ ID NO: 828874 - DNA, 457 bp, Homo sapiens
tacattttacaaaagtgtggacaaggctaagggaaaatcagccaaaggtgatgaagcaccccagggctagcaacagcccagcagagatccatttcccaccctaggtcagaatggaaaaggrtgggagaagttgctggaatctagaatgagtagagaccaccagatagaagctatagcctttggtagaaggatacagcccacccaccaacaacctggcagaaaggaggcaaaggaataattgctttgacctcactctgcttccatgtgtgcttgtcccaccaatggctccattggctgacccgtaaggaagccagaggtcacagagcccacaaatgctccaaagggcagggtggggaagggtggggagtacatttggaggtggaaatggaaaactcgtcattggaaaatattaaaagaatgatttatcagtgccagagagggtgtggcgaactgggga

SEQ ID NO: 828875 - DNA, 515 bp, Homo sapiens
gtttgtgactcttgtgattgaaatagcattaataaaagcctgaccttatggaaagacacaaacatgcataaacccagttatctctaactttgcagcggtcatgacaccattgtctttcatgactgactttttttttttttaacccaggatcttactctatcccccaggctggagtgcagtggtatgatcatatctcactgcagcctcgaactccttggctcaagtgatcctcccaccacagcctcccaagaaaccaggactacaggcctgcgccaccacacccagagaccttgacatttttaagcagtacaggcaactgggcacaatggctcatgcctatgattccagcattttgggaagcctaggagggaggattgcttgagcccaggagttcaagaccagcctgggcaacatggtkagaccctgtctctgcaataaaagcatttaaaaagttgccgggtgtggtagcacacatctgtggtctcagcaactcaagaggctgaggcagaaggata

SEQ ID NO: 828876 - DNA, 515 bp, Homo sapiens
gtttgtgactcttgtgattgaaatagcattaataaaagcctgaccttatggaaagacacaaacatgcataaacccagttatctctaactttgcagcggtcatgacaccattgtctttcatgactgactttttttttttttaacccaggatcttactctatcccccaggctggagtgcagtggtatgatcatatctcactgcagcctcgaactccttggctcaagtgatcctcccaccacagcctcccaagaaaccaggactacaggcctgcgccaccacacccagagaccttgacatttttaagcagtacaggcaactgggcacaatggctcatgcctatgattccagcattttgggaagcctaggagggaggattgcttgagcccaggagttcaagaccagcctgggcaacatggtgwgaccctgtctctgcaataaaagcatttaaaaagttgccgggtgtggtagcacacatctgtggtctcagcaactcaagaggctgaggcagaaggata

SEQ ID NO: 828877 - DNA, 588 bp, Homo sapiens
gccataatctccacatgtcattggagggatttggtaggaagtaattgaatcatgggggcgagttttcccatgctgttctcatgakagtgaataagtctcacgagagctgatggttttataaagggcagttccccagcacaggttctcttgcctgccaccatgtgaagaaggacatctttacttccccttccaccataattgtaagtttcctgaggcctccccagccctgtggaactgtgagtcaattgaacctctttcctttacaaattacacagtctcgggtatgaccttataacagtgtgagaacggactaaaacaggggcggttttctcccttttgtgctgttctggtgatagagttctcttgagatttggttgtttaaaagtgtgtggcacctccccttgctcttcctcttcctcccgctccagccatgtgaagacatgcctccttcccctttacctcccaccatgattgtaaatttctcgaggcttccccagcccccatgcttcctgtacagcctgtagaaccatgaaccaattaaaccccttttatttatgaattacccagtctcaggtatttctttatagc

SEQ ID NO: 828878 - DNA, 706 bp, Homo sapiens
aaatgtgggtagcaagcactgagatgagctggtgagatttgttcctgcccccatccagctcacggttgagtcaaggrtacacctacataggagcacagaaatgctgtagacacagaacattcagccctgcttggtgcaccagggaaagaacacttcttggacaaagcaatgtctaaggtgagatagatccaagataaataaacatggcagaatttacaggacttcatgactgggatgtgtgggatgtgggagagggggcaccctaaaaggagaacttgggcaactgagtgaatggcactattcacgaaggcagggggcactggtgagcaggcttggagggaagggggagctttcaacttcagggacaggtgtcggagatgtctgctaggactatgagtaccagaggcatttagtgcccgagttggaggtcagaagaggattcttgttcagattttgatctggaaggcgttatctgatagacggcaggtggagtcaggtgaggccaccaggaagtgtgcattgaatagaacgacaacaacgtaggtgaggctagactctgagcacaccaatgtgtaatggcaggaagatgtaaggagtaagtgggtcggccactaggcctgcagtggcaggagcaaagtgattgtgcaaaggcccagggcagagtggcagtggcaggctctcctgggtatgtgcagttccagaaaga

SEQ ID NO: 828879 - DNA, 664 bp, Homo sapiens
tggagggaagggggagctttcaacttcagggacaggtgtcggagatgtctgctaggactatgagtaccagaggcatttagtgcccgagttggaggtcagaagaggattcttgttcagattttgatctggaaggcgttatctgatagacggcaggtggagtcaggtgaggccaccaggaagtgtgcattgaatagaacgacaacaacgtaggtgaggctagactctgagcacaccaatgtgtaatggcaggaagatgtaaggagtaagtgggtcggccactaggcctgcagtggcaggagcaaagtgattgtgcaaaggcccagggcagagtggcagtggcaggctctcctgggtatgtgcagttccagaaagagcccaatgggaggctgagacagcagaggacggctggtggagacatcaggttctgacccagctgagaaagaccacagtccaccagccttagatgtcagcagcaaaatccaacaaaatgctcaaagatggaactagatgtgatggcttcaggagatgcacctgccaaaatgcccgcrtctctcttcctgtccctggattgtgaaggggaggatgagaggaatctgaaacactgaacaattagccaaattacacctcaaagaactgatgaacttgttgaatttggattacattt

SEQ ID NO: 828880 - DNA, 602 bp, Homo sapiens
cgacagtgcaaggcgaggcccctgggagggctcctctcacctgccggagtccccttgaacctgtagagcgattttgggacttccagggcctctccttaygtgtaaagacttcccaggcctgatccctttgcaagacaggcttaccaaagggaagtggggtctggcaccgtgtcctccaaatagcaggggctcatcctgcttcttggccttgtagaatgaactgctttttaagtgccaagtcccctgggctgagtgctgtgggtcataaggttaccccaccttatactaaccctacaaagtggggctgtcatcatccatgttttctggaatgctcagagagagcaagtctctggtccagggtcacactgccagaaagttggtggagcagggagggaatcccagaagtgcagggaagaccagcggattattcaacgtcagccagcacatcagtaatgggcaagcactttgatttcctggttcccagccaggacttgatctactagtccttccttctgtaagggccagagagtaaacaccaggctttgcggcagggccacgtcttgacttttgtgggtccttggcacttttaccttcttgggtcc

SEQ ID NO: 828881 - DNA, 548 bp, Homo sapiens
ggtgccattttatactggatcttggatccccaraatgagggagatgctacaggaggaggcagtgcagtgcttctaccttgcatatcattgcaaggcaacccaaagccaattggcttgttttgtaattagcccatcctccatggagtctcatctcttaatggggagtggggatgtttccatatcttccaggtggacaagagcatgcttctctgattcaaatgtgcaaagagttaagtatccctccatgaacactattagccatcccttaaagtatatttcctacctagttattacacaccaaagctctctcatactgcaaggtaacttttgatacccccaaaacttaaaaccatcagataacacaatgcaaaacagaacagagcctttgattttgagagggatccatccactttcaattcctggggttacatgaggaaaatagggggtttttcccccaaaatggaatctatggtgcctcctctgtttttcccaaggagtcccaggctaccagaagttatcttagggcctctcatgtgtgcattaagagt

SEQ ID NO: 828882 - DNA, 548 bp, Homo sapiens
ggtgccattttatactggatcttggatccccagaatgagggagatgctacaggaggagrcagtgcagtgcttctaccttgcatatcattgcaaggcaacccaaagccaattggcttgttttgtaattagcccatcctccatggagtctcatctcttaatggggagtggggatgtttccatatcttccaggtggacaagagcatgcttctctgattcaaatgtgcaaagagttaagtatccctccatgaacactattagccatcccttaaagtatatttcctacctagttattacacaccaaagctctctcatactgcaaggtaacttttgatacccccaaaacttaaaaccatcagataacacaatgcaaaacagaacagagcctttgattttgagagggatccatccactttcaattcctggggttacatgaggaaaatagggggtttttcccccaaaatggaatctatggtgcctcctctgtttttcccaaggagtcccaggctaccagaagttatcttagggcctctcatgtgtgcattaagagt

SEQ ID NO: 828883 - DNA, 368 bp, Homo sapiens
ggggcaaagtgggataagtctaataaaattaggcagcttctgtctgcattcctctgaattagcattatgcctctttctgtgacattaggtatatctcagccaacccgtgacattatccacaacttgacatgatgscatccactagtcctaaaccaactctgtcaaccaagtttctttacccttttttctattcctggccgtatcctttctgctccccaccagcactatcaggagtaggaagtgacatgcttagatttggaaggaaccttaaggatcaactaatctgtaacacattgatcccctcattttacagattaaaaaatagaggccctaagataatttaaattcataggttatgagtgactagc

SEQ ID NO: 828884 - DNA, 591 bp, Homo sapiens
actctgaactttatttttatttatttatttattttttgagaccaagtctcagacacccaggctggaatgcagtggtgcaatcttggctcactgcagcctccacctcctaggttcaagcaatcctcccacctcagcctcccaagtagctgggattacaagtgtgtgtcaccacgcctggctaatttctatatttttagttgagatggggtttcaccatgttggccaagcttgtcttgaactcctgacctcaagtgacccacccgcctcagcctcccaaagtgcaggccaaaattctgcactttaatcaatagcaatttaacattaccaattcctaacaggaaagaaaggacattgaatgctttacatgcgctagctcatttatccctcccagccctagggtaagtagtattgttatctccattttatctaggaggacccacgggcttagagtgactatgtggcagggctaaagtcacacagcccttggagccggagcttgaaggmaggcagtctgactcccaagcgtgggctcttgaccagttctctccattgccttcagttagaagctccttagtggtcccagattgagtc

SEQ ID NO: 828885 - DNA, 568 bp, Homo sapiens
ccgttgcccttccggatctatcccgtggatgcagagcaagagcaacccatctttgttcagcatcccaggagacaggcctctattgacagcatcagtctggctcctttgccctctgatttcccattgaatgtggccagtgggagggcccagcagatggagggccaggaggaggaagagtctgcagcatttgttctcctggctcccaccctgccaggtctctgtctgacagtggctcacgcttttccacagcccctgtcaggtggcctctcccaaagtgacagtgttcacttggttctgtaagtgttttctccattgcctcttgccagggagggtaatggcttcctagagccagatgccagcacctgaggttgcccaccaccccatgctgtttcccttaaccctgcctacactttcaagaattgaaactctttgcagcctcctttttttttttttwaaaaaaaggtactatcgatttcctaaaggaccgtgagtgatatacactcagagattcttttgtcatgttactttccgtagctcaatatggctgttatccacattatacaaagaa

SEQ ID NO: 828886 - DNA, 644 bp, Homo sapiens
tttgtatagagagatgaaactataccttcattatttttcagatggctacccaattttccctaagaaattaccctacaaatatacttgcacatatttacaaagataaatgtaaaaatacactaatttactaatgtttggaaaggcaaaatatttaaaataaccttaccatctatcaacagaggactggttacataaatttctgtttatttacacactggaataaaatatagctgtttaaaagaaagatgttctataagtactgatatggaatcccaaaattatgggcttgtttataaatcaaccctaagctgaagaatagcacttatagcatttctgatttaaaatacaaaacaaaacaaaaaacacatacaatacaaacacaaaacataacagacatacacataaatacagaagaaactggagacaatgataaccttggaagagaaaattgaggaactagaggactgggatagaagaaagagttaattatttctgtacatttttgtaccatattcatgtacagtatcatctatttaaattcacaaataaagrcaagaaaaatatagatttttaaaactgaaggtattatgtttatgtttgggtggctgattcattatcacataatacagatttgtaagataatg

SEQ ID NO: 828887 - DNA, 550 bp, Homo sapiens
tttgtttatattgaattttgtctaaattgaattttcatatttctggcagaaattttttgttgttaatccagccaaatctattcttctcttttgctaccattgcttctgtgcttagaaagatttctcccaactcaggaggagataaatatgcacctacatgtatagcttttttgttcatggtttcatttttttccatttaacacatttaaggattttcatgatgttttaatgaatgaaagtgtttcttgagatttgtacagaaaagcattatatagtattatgtggttcttaaggtttaaataagtacatcaggataaatttttaaaatatgtaataaataaactaatttaagggggttccatgtgaatcgttttcttaaaccatcatccctaatttaatttcataggttagttgagcatcaagaatatgaaactgcggcccaagaaacttggtttctaatcatgctyctaccaatacatgatcataactgatcacttaacttctgtgtttctcttccctcatctgaaaaagagggatttgtatggaatga

SEQ ID NO: 828888 - DNA, 634 bp, Homo sapiens
cagccaatgttgcttacactttttctctttttcatcccatctctatagagctaggcttcttttttcaaagcttcatcctaacaagcttccaagtctgtggaaggaattattttgctgatatgtagcttaaaaggctcaaagctcattttccaattctgcactctttaagaaactttcagccctcacattgagcatctctgcataagtgggaacactcattcactcattcttccctcagccatccatttggcatatatttattttgtgtatgacacactcttccagtattaaggatatagctgagaatcgaacaggtgtggttcctgttgttgaagagctaataatctagtggagagacagaatcacataaacgggtgcatgaatacttgattacaattatgatgactgccataaaaaagcatgcaggataagaacatgcaacagggatatgtggccaatatgattaatatttcttgaacaaacatgtggtacagcttcttaagtgccgggggttttggaggcacttaagtatcttgtcttatgtaaccagcacaacgaccctttgggacagatagcatagatcttattttacatackaggtaactgaggatccaaggggttcaaccactaactg

SEQ ID NO: 828889 - DNA, 581 bp, Homo sapiens
atgaagtgctgcttaataactatctatggtatagatgatttttctcactttggctgctgcactttgtttcacactcaaggatttggggtccccagttgacctaagtcttccaaactggtgtgtcaactccaccatgatcctggcatatccctttaactttctgcctttcggttatagttttttccttggctatatattttttgcattaatttactttcttttcattgaaataagatgatgaaggctttttattctaatatccataaactctgactcatgctataattttacaataaatgtgttttgtgtgtcttaaaattgtttttccagattattatattcttttcctgaaattagtcaatttcaattagtcaatatttattaagttagacagtgtggaaagaaggattgatgggggttaaaaatggaagacttcgagggcttgttaacctaagaatacaaactggcaaatgataattgctgaataaggaaggcaataataagtgctataggtttccagatargttgcaatgaactggacaggtgtttttgttttttgttttttgttttattattatact

SEQ ID NO: 828890 - DNA, 620 bp, Homo sapiens
tgtcgaagaataattgcgggtaaattggtctttattttagaataatttcctttggcatcgtaacaacgttatttatgcagtatattcatatatttcatgttacaatatgttcttccaaaactatgaaaatcagaggtgtttagaaatctctttagggaaaaatttttccttctgcttagagcccaaactgaaaatggatctaccattagccatgcactgtagaattgcctgagcaaaaccattaaacatttcccagacaacagaatctggaaatctactggactagcactgcatgctaagtatcatgggggctataccacgtgatcagtaaatcaaacccgaatgttaggtatcttctctgtaatgactttgtatgtatgttccagaaacagtgatgcttacttaaatctgctgactagtatagttagtgtaatgcagtgtaatgtaatatagtatagtttatataaataatatattgcagtatagtatataayatttagtgtggtatattgtgctataatatagtatggtatagtgtagtatagcatagtataatatagtgtagtgtcacatagtatattgtagagtgaaatggtatagagtggtattgtctagagtag

SEQ ID NO: 828891 - DNA, 620 bp, Homo sapiens
tgtcgaagaataattgcgggtaaattggtctttattttagaataatttcctttggcatcgtaacaacgttatttatgcagtatattcatatatttcatgttacaatatgttcttccaaaactatgaaaatcagaggtgtttagaaatctctttagggaaaaatttttccttctgcttagagcccaaactgaaaatggatctaccattagccatgcactgtagaattgcctgagcaaaaccattaaacatttcccagacaacagaatctggaaatctactggactagcactgcatgctaagtatcatgggggctataccacgtgatcagtaaatcaaacccgaatgttaggtatcttctctgtaatgactttgtatgtatgttccagaaacagtgatgcttacttaaatctgctgactagtatagttagtgtaatgcagtgtaatgtaatatagtatagtttatataaataatatattgcagtatagtatataacatttagtgtggtatattgtgctataatatagtatggtatagtrtagtatagcatagtataatatagtgtagtgtcacatagtatattgtagagtgaaatggtatagagtggtattgtctagagtag

SEQ ID NO: 828892 - DNA, 661 bp, Homo sapiens
gcatttgtatttgatagcacaacagggagactatagtcaataataactaaattgtacatttaaaaataactacaagagtataattagattgtttgtaacacaaaagataaatggatatcccatcttccatgatgtgattattacacattgcatgcctgtatcaaaacatctcaggtacaccataaatatatacatctactgtgtgcctacaaaaattaaaaattaaaaaaaagctacaaaaaaaaagaatcctagacttgcttttattacggtgatgtttggtgccttgtattcttcacacactaaagcggaagtataattggaatatggaataagagcaaaaattaaagctaaattgatctttttttctttctcaaaatcaaacgttacacttgaattgaaataatttgtggtgagcagaaaaaaataaaaaaactccactaaagtagtttctttatctttataaatcattagctggatctgcttgacagcttccctttattagtgttcaaattgcctttattgtacctccaggaccaaatgctttctaattcaccaccattatcattataagtaagaatccaggccactgttcttattgcagaattataagaccttaggtgttttaaycaccaagcatcctttgagttgcctatcatgc

SEQ ID NO: 828893 - DNA, 658 bp, Homo sapiens
atgttcagcagtgcaagtattgtcttgataaacatcttaaacaacagaaaacagggttcgagagcagagaactggtctgacctcaaatttactggggcgggttttttccccaccgtagtaagtctgagggtactgcaggagaccagggcacatttcagcccttatctcaactgcataagacagacactcccagagcagctgtttatagacctcccccaaggaatgcattccttccccagggtattaattattaatattccttgctaggaaaagaatttagcgatatcttccctacttgcacgtccgtttataggctctctgcaagaagaaaaatatggctgtattttgcccgaccctgcaggcagtcagaccttatggttgtcttcccttgttccctgaaaatcgctgattttctgttctttttcaaggtgcactgatttcgtattgttcaaacacacatgttttataatcaatttgtacagttaacacaattatcacagtggtcctgagatgacgtacatcctcagcttaygaagataacaggattaagagattaaagtaagacaggcgtaagaaattatgaaagtattatttgggaactggtaaatgtccatgaaatcttcataatttatgttcctctgccatggctccagccggt

SEQ ID NO: 828894 - DNA, 597 bp, Homo sapiens
ttgtacaaggtgagagatgaggatccagtttcattctyctacatgtggctagctaattattccagcaccatttgttgaaaagggcgtcctttccccactttatatgtttttgttttctttgtcaaagattggttggctgtaagtatttgggtttatttctgggttctctattctgttccattggtctatgtgcctgtttttatactagtaccatgctattttggtgactatggctttatagtatagtttgaaatcaggtagtgtgatgcctccagatttgttctttttgcttagtcttgctttggaaatgtgggctcttttttggttccatataaattttaggattattttttctaattctgtgaagaatgatggtgatattttgatggggattgcgttgaatttgtagattgcttttggcagtatggtcattttcataatattaattatatccatccattagcatgggatgtgtttccatttgtttgtgtcatctatgtttctttcagcagcatttggtagttttccttgtagaggtcttttgactccttggttaggtatattcctaagaggttttggtaggttgtgtcattattg

SEQ ID NO: 828895 - DNA, 461 bp, Homo sapiens
ttctcttcgtcctcaggaacaccaattattcttaggtttcgtcgtttaacataatcccagacttctaggaggcttygttcatattttcttattctttttcctttgtctttgttggattgggttaatttgaagaccttgtcttcgagctctgaatttcttctactggttcaatttatggctgagactttccagaacattttgcatttctataagtgtgtccagtgtttcctgaatttttgattgtttttttctttaagatatctatttccttgaatatttctcccttcacttcttgtattgttttttggacttccttgcactgggttttacttttctctggttcctccttgattagcttaataactaacctcctgaatcctttttcagataattcaaggatttcttcttggtttggatccattgctggtgaactaatgtgatttttgggaggtgttgaaggg

SEQ ID NO: 828896 - DNA, 461 bp, Homo sapiens
ttctcttcgtcctcaggaacaccaattattcttaggtttcgtcgtttaacataatcccagacttctaggaggctttrttcatattttcttattctttttcctttgtctttgttggattgggttaatttgaagaccttgtcttcgagctctgaatttcttctactggttcaatttatggctgagactttccagaacattttgcatttctataagtgtgtccagtgtttcctgaatttttgattgtttttttctttaagatatctatttccttgaatatttctcccttcacttcttgtattgttttttggacttccttgcactgggttttacttttctctggttcctccttgattagcttaataactaacctcctgaatcctttttcagataattcaaggatttcttcttggtttggatccattgctggtgaactaatgtgatttttgggaggtgttgaaggg

SEQ ID NO: 828897 - DNA, 581 bp, Homo sapiens
atgtaccctgtgaattaagaagcaagtataattactggcaattatagaaattatgaaataacagaaaggatggttcctattacgctactatccaagtcaaattctttcatagttcctgtatttcaaaataacccggccaggcctgcatttgtgtaaaacaaacaccttatttaataacagatagataattcattgcaaggagccaaacgtgtctatacatcaattatttcagtaactaatattcctttcaattcaatcaatctgaaggtgtgattagatgtgtggctttgctgacacagacagtaccctaggccggctcatcccagcaccagctcacaccgtgcacgcggggccacggcttccccagctttgtgacacgctgactatagttggcaacctactttacacgcaagttacagtcattgcagggttttaaatacttttttccttcacttttagaaggagccatcatataaatatatgagaaaatgatagaatataggtgttcctayctccagccacccccatgcgaaaaattaaactgatcataccattggggattttgaatcaaattcaaaaga

SEQ ID NO: 828898 - DNA, 467 bp, Homo sapiens
cagatggatgccaataataatctgagtgacaaggtcttgctaagtttcccccagtcaactaccctcagcgtgtatgccctttgtgtcatatctcatatgcctacaactctstgcttttcattaaactcagtataaaaacactgaggtttaattgtttcttcaggtcttcctttcattatgaaagctcccgtgttgtaaaacatagattaaatacatttttgtgcttttctcgtgttaatttttgtggtggtgatagagccctcagcagagaaattagaagggtagaagagaatccttaccatgtgaaataactggaattctacaatttgctggtggtatatatcagcacaactattatggaaaactgtttggtagtattaccaatgaagaggttcaaaatatgccacctcaaaatatatcattttggaaaatggaatgttttgagctaaaggcaattgagaactagc

SEQ ID NO: 828899 - DNA, 553 bp, Homo sapiens
ggcatggtaagcaaaaagcagggaccaacaatttatgattcctccattaactaccaatttgttccttaatctctagctgcattaactctgatgaaagagcaagrattcatcaaccactgtgaaagttccactttatttaatcctcatagcacttagaagtagctattattaccatcattttatggaagaaagtgatgttcagagaatttaattcatagaatttaagtcaaagaatttagaccatagagttaagaagacttaagaaaagcatttgaacccaggtactctaaaaacattcaaatgcttaataaaaatctggctatttaattttagagtcaaaatgttaattaaactggacatgttttgtcatttctgtgcctaattttttaaaaacttcatatttaatccatattttttaaatctttagttacttgaaattataagctataataagaatttgtaaaaaaaatgctttgcttattgttttaaaaaatcaaagattaaaaaatcatagtgccaaactagtagggaaatgcactaaattttattataa

SEQ ID NO: 828900 - DNA, 553 bp, Homo sapiens
ggcatggtaagcaaaaagcagggaccaacaatttatgattcctccattaactaccaatttgttccttaatctctagctgcattaactctgatgaaagagcaaggattcatcaaccactgtgaaagttccactttatttaatcctcatagcacttagaagtagctattattaccatcattttatggaagaaagtgatgttcagagaatttaattcatagaatttaagtcaaagaatttagaccatagagttaagaagacttaagaaaagcatttgaacccaggtactctaaaaacattcaaatgcttaataaaaatctggctatttaattttagagtcaaaatgttaattaaactggacatgttttgtcatttctgtgcctaattttttaaaaacttcatatttaatccatattttttaaatctttagttacttgaaattataarctataataagaatttgtaaaaaaaatgctttgcttattgttttaaaaaatcaaagattaaaaaatcatagtgccaaactagtagggaaatgcactaaattttattataa

SEQ ID NO: 828901 - DNA, 619 bp, Homo sapiens
aaatatgaaaataaaatggcatgattattttagctaatttaaaacgcaaccaaagcaatgttatacttctagatttcaagcttctagccctttttgttgtgaaacctttcagcaaactatttaatttctatatggagctgccttgtccttcagtcagtaaactcattaagtgccaaattatctaataattcaattattggatatctgtttaattattgagaaacactgttggtgttttgcactcaaacgacatttcgatacatattaacaataaggtatcatcataaacacttatcatcagaatgaaaaaaaaaactgctgtatttttcaagcttattttcatttctgagaatatttccaagaaatacaattatgcctcaaaatggcttaaagttaactgtcaatcattctttatgtatagtatatcaaaattcaataatgtggatcacagaagtcaagaggacaagatttgagccagcagaatctcagctgaatactgatccttaactttctgtctgtggaaactggtcctgtttcctcatattataaaatagggattatttcatttattttmccaaactatgataatgattaaaggagataatgaaaacaacacatt

SEQ ID NO: 828902 - DNA, 595 bp, Homo sapiens
ctttatctgcatttctagacttatagtgaccagagcattcctatgctaagtagtggggctactctagtaagaaagacaaacttagtctctgacctcctggatttgattctctatccagaagactgtggacagtaacagcccctcagttctcagtatttatattgcatcttaaatcttacattcggttctgagcaatctattttagagagaaaaaatctgtcagagctagaagataatgatgcaatttgaaaccacgtcataaaacaaataactgaatgatattgggacctttagcctagaaaaagagaattcaaagcaggaaaatgattgctgctctaacaaatttcaagagctgctgaatttcatgtgactcctaagggcagaattcattagcccacagaaattacaaagacatagttttcatctaaataaagtaaaaggaagaaattgctaataattaaatgagctgcttgggaakagtgagattatcatcaaaaatattcactcaagctgaatgcccatctgttgtagatgccagagagaggattcttctagtacgtgggtccttacattaactgaattctcaggtccttac

SEQ ID NO: 828903 - DNA, 524 bp, Homo sapiens
aatatatatactagatattacatataaatgttataatccccagaatctgtggctaggtgggcataatgtaatcccaaggatccttgaaagcagaagagggacacagaagrggtggaatcacagaagtgagagtgtgaaaaggacttttcctgatcttgttgactttgatgatgaagcaaggggtcacaggctaaggaatgtgtgcagcctctcaaagttgaaaagggcaagggaaaaagttctccctaaggcttccataaagaaaatagttctgctgaaaccttgatcagtcttctgaaactacataatgataagataattcgtgttgctttaagccactaaatttgtagtaatttattacagtagttggtcacagaaaattaatacaatggccagacacagtggttcatgcctgcaatcccagcactttggaaggccaagatgggcagatcacctgaagccaggagtttgagagcaacctggccatcatggtgaaactccgtctctactaaaaatacaaaaat

SEQ ID NO: 828904 - DNA, 642 bp, Homo sapiens
tagtacaagccagctccagcattactctgccttttacttcagtaaatagtatttgcaatagtttttttattaattaattctattggaatttccaaatgtataattatacgcttgtagttttacactttctatttttacaattttaatctgtttaaattgtttaattgctttaattaatattctataatttctataaatggttagatgttactggagatgttgaacagtcatactttgctgattttgtagagaagcttcttgtgtttcccactgaataagcttctgttccttgaactcatgtagatgtgtttgtttatgtgtgtgcctgtgtgtataattatgctaatggtatatctagtaaattctgttttactgagtgttttaatctaaattaatctttatgttgttttctgtatggtgcttatgtgcatccatactggacctatgaagtaataatcatatgattttttataagttctatcaatgtgactgcattaataaatttcttaataatgagccactatgttatttttggcataatctttctttggtcgtgttttgcttagtactctacttkactatgctcctatgttttatgacatactatactatttaagtcattacatcaatattcacaaatgt

SEQ ID NO: 828905 - DNA, 595 bp, Homo sapiens
gataccataaaattggaatcatatagtgcatagcttttgcagattggcctcttttatttaacaatatgcatttctgtttcctccatgacttttcaaatmttgataactcatttgttttcagctctaagaatattctattgtctggaagtaccacagtttatttatctattcagctattgagggatatgttggctgcatccatattttggcaattacatacaaagttgttataaatgttcatgtgctagtttttatgtggacatacactttcaactcatttgtatcaatacctaggaacacaattgctggattatatggtaaaagtatgtttagttttgtatgaaactgtcaagctatctttcaaagtgtctgtaccatttcacagtccctcaaaaaaaaaaaaataaataaatgagagttccttttgctccacatccttgctaggatttgctgctgtcagcattttggattttggccattctaataagtatctttttttaaatttgcaattccctgatgacatgtcaatcgtcttttcatatacttatttgcccgatgcatattttcttaaaagctatgctttgaagtaagaact

SEQ ID NO: 828906 - DNA, 648 bp, Homo sapiens
cgatgttctccctccctctgcccacctaacaggtcacaatgtgtattatacacccacccccaggtgtccatgtgttctcattgttcagctcccacttataagtgagaacatgtagtgcttggttttctgttcctgcattagtttgctgaggataacagcttccagctccatccatgtccctgcaaaggacatgatctctttcctttttatggctgcatagtattccatggtatataggtaccacattttcttgatccagtctatcactgatgggcattccttctgagacttcagttacttatacactagaccacttgatactgacccaacaatcacttacattatcttttttttccaatccttttctctctgctcagttaagatgattttttaaactgatttttcatttctacatttccccacccttttttttccccacaagtttttaggaagaaattgaagtacagtcagtggcatttatataacatttcctcatgcccccttgtaatccatccttcccttacctcattcctagagaaccagtaacagcctttctgccactacagattgatttgcattttccataawtttacatagatggaatcatattgtaagtactagttttcctgacttctttcattctgcata

SEQ ID NO: 828907 - DNA, 638 bp, Homo sapiens
agcagcaggcaccactctgacctcatgccctcagcacctccaaaagccctccaccctcttaagaagggcctagcctcatgaccctggtctgcctttgggccagatctccctgtgcaggggtggccaaggtccccacttgcccacacctcagaatttgcagcctaggatgcagccactcttttgtaaactgcaccctaaatcacacagcatttgtgtaaccacccattcaccccaaacttccagcttccttttacaaattactcttaaaacagtctgactttgggaggccgaggtgcgcggatcacgaggtcaagagatcaagaccatcctagcaaacatggtgaaaccccgtctctactaaaaatacaaaaattaggcatgttggcacatgcctgtagtcccagcaacttgggaggctgagataggagaatagcttgaacctgggaggcggaggttgccgtgagcccagattgcaccactgcacttcagcctggcaacagagtgagactccgtctcaaaaaaacaaacaacaacaacaacaaaatagtcatcaggctaggtrtagtcgctcagacctgtaatcccagcattttgggaggccagggtaggcggatcactttaggtcaggagttcgagac

SEQ ID NO: 828908 - DNA, 583 bp, Homo sapiens
tgtaggcatctgcaataataaaacatttattctaggtgaggagatagatggtgagtgaatgtcaaggactgggttgcaaataggtgatttttaaaaattcctctcagtgcaatgctgaaacatctattatttcccttttgttttctcctgagcatattttggcaaaagctcagccatattgccatcttttgccatttatttacttgaatttcatatatttagattgattgatgacttttatctgcctagaacttggagaaacattttgcagtatttttttttgtgtgtgatgtaacccaaaatttaggatgaacagcggtgattattaaacaaattcacctttaaatgcagttaccctttactccctttttaaaaggcttctgagtcaaaaatctctagtaggaggtggttaccagaggcttggtggttagggaaaagggggagagggggatgtgttggtcaaaggatacataattacagttaggaggaataaattcaagagctctattgtacaccaaggtgactataktcgatgactgtattcttcaaaaactgaaaagaaaagataagtgttctcatcaca

SEQ ID NO: 828909 - DNA, 477 bp, Homo sapiens
acacacctgtagccccagctacttgggaggctgagggaggagaatcgcttgaacccgggaggcagaggttgcatgagccgagatcgcaccactgcactccagcctgatgacagagcgagactctgtctcaaaaaaaaaaaaagaactacaaaatgcttgtgtcctcatagagcattcagtccagcaaatgagacacacagtaacaccggtaattgtaaattacacttgtgatacatgcaatatatggaaagcatggtgtactctgagagcccatgagggaacctaatgccggctactgtgtcagagtagatttctctgcagaagatcctgagctcagatctcgggatctgaataacctaagtgggaataatagaggggaaagagcttaaggaaggggacaatgggaatggcaggcastggaaacagcagggtgcaaaagtcctgggtgagagaacacagggccctgttcagaaactg

SEQ ID NO: 828910 - DNA, 595 bp, Homo sapiens
gggaagggatgggaaacacaactgaaaatactaaacaaaaaayccagaagccttctgataggttcaagttactcaacaattttatttacccattctacacacacgcacacaaaaacacatttcaaatacagttatgcacactttaaatggatctgagtggcatactttgttatcagtgtcacccgattaaatcagaatgttgctaaagacttatgttcctatttcaacagagcagtgcctaggaaatctacagtagaactctcttcctaggcttcccaatctgacccattcccattcaacccagaggtgctcagccccacaccatcccccttcccaaagggcaccatgtatgatcagccctttgattttgccatagcaaaaccatcaccataccagcataagttgatcttcttgttaggtcaatataataaaaaacgtacataagcaattcagatacaaaaacattgcgtaggtaaacattggtcacagatatccagtgaaaggcttactggaaaaaatacttttgccaacccttaaaatcaatttttaaatgccaaattttcttctcatttttacttactagattaagtgtaaa

SEQ ID NO: 828911 - DNA, 631 bp, Homo sapiens
ctattttttgtttttgtgacagcagactaagttatatatttcaatatgatcaccaagacacaagagataaatgacccagagtgagatgagaggcagatgtgcagaaaattctacaaagagagccagtgaggtgactctctgcactgaggatgagagagggtggtgggtggagatgggaggtggtaaggcagatttctttgcagagagctgtgctgagactggcctccctaccccattgaaggaggggtggtgcttgccccttgcctcaagtctagtgagatgagcttcagttgactgcttagagagtgtgtgttccctgccgctaggacaatagctgactccccactatggtcattagggaggagatgaggcaggttacctagctgctttgggagtagagtgagccaaccagagttgctgttaccctgagattggcctgcatctcagattctatccaggcagagaaagtgagcttcctgtggaccagaagtggaggtgactgattcaggaaggggaaacacactggagccattttcaatcccaccccaaacaacttctgcagtaggcagaataatcgcccccaaagatgttyccatcccaattcctggaacctgttgatatgtcaccttac

SEQ ID NO: 828912 - DNA, 563 bp, Homo sapiens
aagtaagtccttgattcctaccaggatccacaatgggattgctcttaaataggcaagtgctttgctgctagacagataaagcatgatcgctgtctactatagggtcacatgcaggtaagtggttgactttggtcaaatgacactatgatagctcagtgttatccaattgcagaaatgcctatttgttcactgaaattctgctgagtaactgtaataagaatgagaaggcaattgtttcagagaaaattgtgtgaataaatttagaagaagtaacacacggttttaattcatagaatgacaggtggaatgatacagtttagacgtaggatatggaaaggcacttactagcagcttacaaagcaaaacaactcgtcaacataatatgcaaattgaatatatttgaatagtagcatgacaaggttacaaccataccttaagagactttttctggtctgttaattktataaagaagcagaaacaatttcctgaatataggtaatagacctaactatgggatctgaagtggggataaatagaaagggaataggtgggaaaattaggaa

SEQ ID NO: 828913 - DNA, 602 bp, Homo sapiens
cgtctttaaaattatttgtgtttaaattcacaccttccccttgggaatcttcgcacggayttgctaattgggtttctctgaatattcagttgttcaccgctgactgactagacttcccaaagccttgataactggagaatttccaaatgctgcatttttttcagccaggcagatggcatggtaatggtagatgtgaacttatgtcctttttccttttatagcagtgcctgagtatctgactgacctactgggattaatttactcttacaataggtgataatagagcccaattccagaagtggggtgctcagcagttcttgctaccatgtaccattttcacagccttaatgtgggaccagagcagtataagggcttaacatatattttctcctttattcaaacattactcctaagtactattattgttcaaattcagctagaaaactgagactcacagaggttagttaaacaactttcaaagtcaaacacctattaaatggttgagagtgactgaaatctggataccttaattttaaaagtcagtgctttcgctgttgtatctccccatgaggccaacccaagtggtcaaccagtaaaaaatt

SEQ ID NO: 828914 - DNA, 472 bp, Homo sapiens
atgtctttaggtcagattcctcatcattggattctgagatggtaatagtgctgacaagtgctttgagtttgaagttgttcaacttgaccctggtctatgtgtcttacctattttgtttcatgttgcaagcactgctagctttcctattcaatacccatcctcccttctttttttctaatagaaagctacttttgtttgtaatgacagtggcccatctataaacttcaacttcccagactcccttgcaactagaaatgattttatgatatagttttgggccaatgaggtgtaaacagaggtctgctaaggagctctgagaatttttgtttgtccgtttactcatcaattcattcctttattttaatatcagtgtcattccttctttcttcaytatttattctccatcctgtctggaacatgaatatgaggttagagttgcagcaacaatgttgagactatggatgataagtgt

SEQ ID NO: 828915 - DNA, 574 bp, Homo sapiens
ggcatgatcatttgtagtgtcaaagttctggaatgattgactcactcgcacatctgttctattttttcagtcagatgatctcaaggcctttcagctcaacactgggcctgtttcctgatggtaaaataaggggmgtgaatgccaaatattttttagatgcatcaatgttactttagtatcctttacagttttaatgtatttaatcctgtgctatcatattttttattctaatatagaagtataacatatggagctatgtactgaaatgaaaggaataaggaaggtggcaactgaggtggcaagttgtcacgcatttgacaaattatggtccattatgtaattcaaagtacccaatggaataatctgggttatggaagttatctgagttctggataacaactttacttggtagtatgctcttcaaagataaaagtaaataaactaacacgaattaagcatatattgtttattgtacaatgaattaattggttacttttaaaattataatctcaaaaatttttgaattaagttcaactaatccaagttttatagacaagaaaactgtgtttcagag

SEQ ID NO: 828916 - DNA, 543 bp, Homo sapiens
ttctgttttcagaaacccaggcttttactctgggtctgccttttcacctttaacactggcttctaaccctcaaggtcgctgattgtctaaattgcttttggagctgtaagaaacgggaaggagaaagtagctatttgtcctgtcttaaaagggctttcctggaactcccacctaacatgattatagctcattggccaggaccaggtcacatggtcactttgactacaagggatactgggaaatactatctttcagctgagtttctagccaccccaaacaaaattgggattgtctttctaaggcagtagggaaggaacattgcatgggcaatgaacagaatatgtgtcatgcagataagaataagtaaggagataactaaatgatttggtcaatgtctgcgtgaagaaacaaacaaacaaaaaasaactatttgggagccctgtttaagaagggggatatttacagactattgtgattctggggctgagaaagacactattcttgtgtgtatacccctagagcctttgattgaactcgaaagct

SEQ ID NO: 828917 - DNA, 543 bp, Homo sapiens
ttctgttttcagaaacccaggcttttactctgggtctgccttttcacctttaacactggcttctaaccctcaaggtcgctgattgtctaaattgcttttggagctgtaagaaacgggaaggagaaagtagctatttgtcctgtcttaaaagggctttcctggaactcccacctaacatgattatagctcattggccaggaccaggtcacatggtcactttgactacaagggatactgggaaatactatctttcagctgagtttctagccaccccaaacaaaattgggattgtctttctaaggcagtagggaaggaacattgcatgggcaatgaacagaatatgtgtcatgcagataagaataagtaaggagataactaaatgatttggtcaatgtctgcgtgaagaaacaaacaaacaaaaaagarctatttgggagccctgtttaagaagggggatatttacagactattgtgattctggggctgagaaagacactattcttgtgtgtatacccctagagcctttgattgaactcgaaagct

SEQ ID NO: 828918 - DNA, 647 bp, Homo sapiens
aattgatttttacaaaatcctattactgctgccaacttagttgaaattccagttctttttcattttgtttggatcttttttaatgctaactaattgtattcccatctgttaagatagctagacagcgctaatgtgtccgtttcagttcctttggccatgttcattagattaatctagccatgaagacaatgaaaaatttatctagactaactgtccattaacttctctgatatcttggactttaaatgtatgtgtgtgtctgcaggtgtatatgtgtgtttgtgtgtgtgtattatattggtttagttagttttagtgcatttattttgagggaaacttcagtgaactagatttattatgcaaataaaataaatttttgttatatttactttggggttaattaatactagccattatcctccacttcagaacccagaatagagtgcactatagactgaaagtttatgtcccccaaaagttgcatgttgaaacctaattccctttgtgatggtatttggaggtgaggcctttgggaggtatttgggtcatgaggctggatccctcaygaatgaaattagtggccttataaaagggaccccagagagctttcttgtcccctctggcatgtaagggacacaagaagacag

SEQ ID NO: 828919 - DNA, 539 bp, Homo sapiens
gtatacacatgccatgggggtttgctgcacctatcaacccatcatctaggtttaagcctcctgatgctctccctcccctttccccccaccgcctgacaggccccagtgtgtgrtgtttccctccctgtgtccatgtgttctgattgttcaactcccatttataagtgagaacatgcggtgtttggttttctgttcctgtgttagtttgctgagaatgatgttttccagcttcatccatgtctctgcaaaggacatgaactcatccttttttacggctgcatagtattccatggtgtatatgtgcaccattttttctatatctttatgttgtacttttatttgctggtttttgaactatctgtgtttgttttgttttgttttctcagaggtctcttgcgtgtttttcttgtcacttcgagattaaatttttgaaatggctgcttgcagaacccattctcagtggtttaattgagcatagacagcccaacaaagaccagacaaagagatgccttcaggggctctaaattgcgtggtctttg

SEQ ID NO: 828920 - DNA, 405 bp, Homo sapiens
caattacttaatggacactatgtacattatccaggagatggtgacattaaatgcccagactttcaccactacataatatatccatttagcaaaactgcacttgtacaccttaaatttatgcaaaacaatttacaatggaactataatattacacagcaatcccacttctgagtatatatccaaaggaaattaaatcagcatcttgatgagatatctgcacttccattttcattgcagcattatatatggaatcaatatatgtgtccatactttgaagaaagggtgtgtatgtgtgtatatatatcccatatacatatgcacgtgcrcacacacacacacacacacacacagtgagacagtttttaaaaagatggaaatcctaccatttgcaatcagaggattaac

SEQ ID NO: 828921 - DNA, 586 bp, Homo sapiens
tcagtctcttaacttcagtgagctaaggtggtttgatcatctttaggacctgacactgcttgtgtttgtttcacgttgctattaaggaatatctaaggatgsgcaatttataaggaaaagaggtttattcagctcatggttctgcaggctgtaccagaagcatggcatgaacatctgcttctggtgaggggctcaggaagcttccactcctggctgaaggggagggggagccagcatgtgcagatcacgtgacaagagagaatcaagagacaggggagggaagtgccaggttctttttaacaaccatttgtcataggaactgagagtgagaattcactcaatctctcaacaatggtaccaagccattcatgaggaatctgccccatgaccttaacacatttcaccaggcccatctccagcactggggatcaaatttcaacatgagattcggagaggataaatatccaaactataccaccaccgatatgttcaagtgtcaacgtcagattaacaaagaaagaacagagattatatacagatcattacactgattctcatttaattaacatgtaattactataacaaa

SEQ ID NO: 828922 - DNA, 603 bp, Homo sapiens
tggtcaaattcctggatctgacagataaaagataaactttattctccagcaaatatgaaaatccaaatatttcagagattcctggccaaaaaaaaaaaatcacaataagcctttgtacccattttaaggaacacatcatgcctatgaattattaaaatctgaagtttttaaaaaataaaattttaataaagatttaaaaaaataaatcttatttaattgcttaacgtttaagcctttttacaaactattactatcataacaagaaaagcatttaaggacctcttcactgaagttagtcaaatattagagggaaatactgttttaggctggagctgggatactaagggagcatatgcttaaaaaaatgctctgtgacttagtgagaaacgaactatacatgaataaataggcgaaagaatttgacagactgaacgtaagtgaatctctgcaatattgctgaaagtcactctataataatacgtatgtccacctttggacaaaattccaaattaaagagacagygtcattgctctttcccaaatgtcagctcagagttaaagacaaccgagaaaaaacaaacatgtggcattgcataacatgaag

SEQ ID NO: 828923 - DNA, 603 bp, Homo sapiens
tggtcaaattcctggatctgacagataaaagataaactttattctccagcaaatatgaaaatccaaatatttcagagattcctggccaaaaaaaaaaaatcacaataagcctttgtacccattttaaggaacacatcatgcctatgaattattaaaatctgaagtttttaaaaaataaaattttaataaagatttaaaaaaataaatcttatttaattgcttaacgtttaagcctttttacaaactattactatcataacaagaaaagcatttaaggacctcttcactgaagttagtcaaatattagagggaaatactgttttaggctggagctgggatactaagggagcatatgcttaaaaaaatgctctgtgacttagtgagaaacgaactatacatgaataaataggcgaaagaatttgacagactgaacgtaagtgaatctctgcaatattgctgaaagtcactctataataatacgtatgtccacctttggacaaaattccaaattaaagagacagtgtcattgctcwttcccaaatgtcagctcagagttaaagacaaccgagaaaaaacaaacatgtggcattgcataacatgaag

SEQ ID NO: 828924 - DNA, 604 bp, Homo sapiens
aaaccaaattctttaaaatatacaaaatgatcgatttctggagtctgataagaataatacatattttgtaagtaatgcctttgaagagcttgaaaataatttttcatttattttatagattaaaatatcctcttacaattttgtttgtagtctcaatgcacttgtgactagtagattaacatggaggttactatactgtccctaatgggctttcctgtgtctctttcctatgcccatcctcttcctctccattctgctatgtcctctccaatgcatccagggtttcactttctttcacaactccgattgattttctgtcctaacaagcctgattccaaacacagttctacagggacaaaggtatagagaacaaactcaataggttgctcatccacgaaacaacaggtgacatggcagagttagaaaaactagtaaggaggccatgccaggaatgaatgcaacaaacttctttgaatatatattcaarcattatatttaatatatattctcgaatggaatgtatatattccattccatttcctagtatggaaagaaggtctaccagacaatgtacttaacaaactaaactattttcccatcaatc

SEQ ID NO: 828925 - DNA, 537 bp, Homo sapiens
ttgtgagaaaaatgttatttgaattctttcaattacatcttatcagattttggtgatgcttttgaattctcaaatgtttcaagttgcaattctctgttaagatttattacatcattatcaaaactttgtattaagaaaagagtatatctttctgaagtcccgtagtacatattgtttctgccattcatttgatgcttatatttctcatttgctaacatttataatcatctgttcttacgcaaagcagtatgtcttggtggagaggtagtggaaaaaaacaaaaaacacccatgaaataaatctgtactcaaagaattcagcttgcttaacttcccaactaagtgatactactttggggaaccataactgctttccttactccatcccttttgtttcacagtgcyttgttcacagctcaattatttgaagtctttatagatctgtttctctcttttgttgtttctgctgtacacctggttgtctttgacattacttctgccagtctttgtggtcacaagtgacttgtggagcatttta

SEQ ID NO: 828926 - DNA, 556 bp, Homo sapiens
ttgatgaccagtgatgatccaaaaggaaattcctttggatatttgtgtacaatatgtaaaaactctrtcagcttttccatgcttgggcctatattcattttggggcatgttgacttttagatgctggcagaacattttttacagagctatctagctagttgaaaattgggaaagagattgggtctgtgatacaaattgttttaaaaataagtttttcattattttatacccaattaataccagttggagatcctaaagcaataattgagaactatttagaattcagtcatatatagatgctgtgggtattattaaatatccaatgtggagctgtaagatttgattatttctattgctggcctgaagaagtacagatttccatgttactttggttattaaaaatattagggcaaattatctggaaaccataatagtcaacataggacttgtataatgttttgatttcctttacattgtcagcattttgaacataaaacagtaagcagaacttttcaaatatatctgttcaaacagtatggttagaggttgtatgtgg

SEQ ID NO: 828927 - DNA, 509 bp, Homo sapiens
gcttttttctgctgcaggatatctttttgagtagctatttggagctgcccttcaaagtaatacagtggtgatgtcctttatcttaaagctcaaaacttatttttaatctactactgctaatataaaaataactttattcataggtggttacaggatcttttaagtcaaagagcaccaccaccaggatttctactaaaactcaaatacaatatagaacaggaaatgatttctaaatacccaggaaagtaaaagagacaactattcagccaaactattgctatttctaagtatacaatattcaaagataatatggcatatgaaagaagaaaagaaaatgtatcctctagtttgctgctaagcctgagtttctagggagcattacaatatgtaatgtagaaaccaggactttctgtactctgttgcatttctcaatgaaaggcaatctgrgctgcaccagctttccaaaaatatcacatgtgttggcgtgctaagattccttaaactgaaat

SEQ ID NO: 828928 - DNA, 617 bp, Homo sapiens
ggtacagctagggccacggcttcagagggtgcaaatcccaagccttggcagcttccatgtggtattgggcctgcaggtgygcagaaggcaagaattgaggtttgggaacctacacctagatttcagaggatgtatggaaatgcctatatgtccaggcagaagtctgctgcaggggtggagccctcatggagagcctctactagggcagtgcagagggaaaatgtggggttggagcccctacacagagtccccactggagcactgtcaagtggacctgtgagaaaagggccactgtcctccatacatcagaaaggtagatccaccaagagcttgcaccatgcacctggaaaagctgtaggcactcaaaaccagccggggaaagcagccatgggagctgtatcctgcagagccacagaggcggagctgcccaaacccatgggagcccaccccttgcatcagcatgcccaggatatgagacatggagtcaaaggagattattttggagctttaagatttaatgactgccctgctgggtttcagacttgcatggggactgtagcccctttgttttggccaatgtctcccatttagaatgggagcatttacccaatgcctgt

SEQ ID NO: 828929 - DNA, 651 bp, Homo sapiens
ggaaatgttacagaactttgaccaaaaaataaatcctgagtattgagaaattaaaattaaagtcttgcaaattgcagagtttaaaaattgttattgatattttaaattgaagaaattagtggaaatagtagttctaaattgcatacatttgaatgtggagtgttaaaagattatttcccttgtctcctgttttatttaggataaggttaactgagattttggtacatggtgggccattcaagttatgtataatgttttgtgacaaactacatgtcgacagtagttcctgatgcctaatacatttctgagaaaggtaaagcagccctttaggaaaaacaaggagagtaaagcttacagaagatttcttaagatgggcttgatttgattatctttgaaacctagagatgtgtttgggacccaggaggttgtgtttgaatcataaatataatcagggaaccttaagaaaaaaaaagccatggagatcatttggtgattatctattgaaaacaaatgttttcaggggacaagcagcytgagtataataaagcaattagaaagttggggaatggagaataggagaataagctgtacctgaaggaatcttaattagggaatggttgctgaaaactgcagagacaagacttctctaat

SEQ ID NO: 828930 - DNA, 597 bp, Homo sapiens
gtattatcagaaatttatcccggaaaacagtcagctgccccagaagacacaygcgtgctttacagcgatggcttgacatgagaaaaatcagcaatttctttaaaaaaaaatgtatgaatatatttttctcctcaatcaacacttttggtaagcaatttattctaaaaaagaaacttttcatgaccccaactctggagagcttgcagaggaatattgactggatgcttcctggcttcctgtggcttcactggaatctccttgagggctggggttgggcctccctctgccttggcctctgaggctggaacaagcccagctcttgataacaacccagctgagtaagatgagcatcagagcagtgaactgggattcctgagggtccagggtcctctctcgccccttgtcctttgctcactccttcctgtgaaatgcttatttttgcctgagctccctgtgtcacaggtatcctgcagcctagaatgaatgtgctcccccattccttccagttccagacgaactactctactcacaactctgctcttccaagaagccttccctgacttggcccgtggaactgtcctctgggattcctcctgc

SEQ ID NO: 828931 - DNA, 641 bp, Homo sapiens
acatgaaatgtttttccatttgtttgtgtcaactctgatttctttgtgcagtattttgtaattctccttgtaaagatctttcacctccctggttagctctattcctaggtattttactatttttatggctattgtgaatgtgattgcattcctgatttgactctctggttagatgttatttgtgtatagaaatgctactaatttttgtacattgatcttgtatcctgaaactttgctaaaattgtttatcagatataggcgcctttgggcagagactatgaggttttctaggtatcgtatcatattgtctgtgaagagagatagtttgactttccatctttttattttgatgccttttatttcactctcttgcctgattgttctggctaggacttccagtactatattgaataagagtgatgtgtatgggcatccttgtcttgttctggttctcaacgggaatgcttccagcttttgcccattcagtataatgttcaaagcctacagtcttaacctgcgtgtgccactgcatccagtaggaacaagctggstgatgaggaaaagagggaaggtgtttggggcagagggacaagcagtcacaaagttctagactctataatggaagagaagaggaactgcag

SEQ ID NO: 828932 - DNA, 637 bp, Homo sapiens
gtggtcaacaaacatatgaaaaaaaaatgctcaacattactaattagaraaatgcaaattaaatccacaatgagatactattatacccaagtcagaatggctattattaaaatgtcaaaaaaaacagagatattggcatgcacttcagagaaaatggaacagctatacactgtggatggaaacgtaaattattacatcctccatggaaaacggtatgtagatttctcaaagaattaaaaatagatctaccattcaacccagcaatcccactactgagtatctatccaaaaaaatcatttcatagaaaaatacctgcactcatgtgtttattgcaacactattcataatagcaaagtcatggattcaatcaaagtgtccattactgtattagttctttctcatgctgccatgaagaaatacccaagaatgggtatttataaagaacagaggtttagttgactcacagctccacatggctgggaagacctcaggaaacttacaatcatggcggaaggcaccactccacagggcggcaagagagagaataagtgccgagtgaagggggaagccctttataaaaccatcagatcttgtaagaactcactattatgagaacaggacgggaaaaaccacttcc

SEQ ID NO: 828933 - DNA, 526 bp, Homo sapiens
actcttttgagtcatcatcaaacctagatctatgccagattattatccaaactaagatagtaagggtgaatatgtgattaaataagatagaataaataaaatawttttatctggagaaacaccaaaacaacttcttttccaagctctgaacaggtatttgccttgggaagagtccctatataaaatagataaaaattgagacctgtaatcaactaaaacctgcctcatcaacaatagcaaattatagcaattaaatatagtattaatggtagcttttgatgtggtttctaagctctggttacatagttgtccagggattgacgagtctatttctagtcaatgctttacatttttactagaacgtaagaggagtaactgcactctttttgaaaagattatctatgagttagaagttttcaattattaattcatcataaaaaaccttacaggctgcattttttaaaaattttatctgatatagcttgtatttgaatcaattagacagaagacatctaactgctgattc

SEQ ID NO: 828934 - DNA, 559 bp, Homo sapiens
ccccaaaaatttggtgcttaaagggttaatattatttggaaaactctcaactgtagagcacctgatttctatgtgacattggataaaaggagaattaccatgcttgcatgtggactataatttccaaagagctaaaggatgcttctagtctgattttaagaaacatagttgtccctaatccatttgttgtcaggataacaggatcttgctgcagttgtgatagcttacatgacctcccatgcccagatagtaaagggacttaaaccatattgtaagaggaccaattagagatacctgactgttcagctcatgaggaaatgcaatatgaaaaagaaacaggcatgctgactatgctcaaatattaaaaggactctcaaataaaagtaaaattagatttattttaaatggccccaagaaacctttctaggaataataaatagatatttcagggggatagatatttacttgaggtraaggagaacattataatagccagacttctccaatgaaagaatgaattaccttagaaggtatcgagtctccttttacttgaggcatt

SEQ ID NO: 828935 - DNA, 535 bp, Homo sapiens
aaatgacatctttttgagagctgacaacactcatcatcacatactccccaagtggtgtgactatagcacctacgcccctcccttaccatgaacccgtaagaaagctgggtgcarggatggtgaaggatttgccagaagagacagctagtaaggaggagaagtgggattcagtcctgggtccatctgaccctgaatttattccctgctgtgaagcttcctctgataaatgagcagaggccacacgcaacagtggcgggaggagggtgaatgaagttggccttggttccatatgatcccttgaagcctggcgttcacaacgtttgtgcaaagcagtgccgttaatataagtccttccacattttactgcctgttgtagagtctgcttgtcactctgacaaaggcaaaactttctggcaagcagaagccccaaggtgctacaccagggctgtcctgtggggatggggcttagaacaaaggcaggactggagaacacaggcagacggaagaattaggaagccccgaacagttcagacaa

SEQ ID NO: 828936 - DNA, 574 bp, Homo sapiens
tttatctgtttctatgttgcagaaatattttccatttgctgttactgtttgtatttgtagttctcaataacttcatttttgcctcacaaaagtttttactttttgtaaagttgaatatgttggtcctttcccgaagattataagacctctctcactactgatttttaggacattttgaggggttttgttggcaaagacatccagcaccccttcaggcccagcttgccctggcttgtcttgactcctgggattttcttcactgattagtcctcctttttaatcccaggtgccttgcattagaaactccccaaagttccttgtacattgatgggcctaacctctgatttccagggtgtcacagacttttcccccttatttttatgtcttctgtcattgccatggaatttggggtgaggtttggggcttaccatgggctcaatttgccatctggcaaacagaagccagtgctyattaaataatagatactagaaaatccattgatgaggaaaataaacccatatgggagtggtagactttatatgttccaaaggaattaaatacattcatctccttc

SEQ ID NO: 828937 - DNA, 620 bp, Homo sapiens
aacattaaaccataacaatcttttgctctggacaaatatttataaatgcctatcatttatattgtttgccatcagtccagctaaattatcctcagattttcagggtcggcaaactgtagcttggagaccaaatctgtcccgccacgaaagataagaatagtttaacatttttaaactattttttaattgtcaaaagataatatttaataatgtgaatatttatgaaactgaaattccagtgcacctgaataaagttttatagaaatgtaaccatgcacaatcatttctatagtatctataactgcttttgtgctacgatgacagaactgaataattgcagcagagaaagtatggtccagaaggcctaagacatttactatcttgttctttacagaagatgattgacaatctctgcattagaatgtgtgggcatagggttaggggtgggaatttgtttaaaaagacatgttccctggttctacccagargttctgattttgtagatcagtgtagaagtctaacagtctgcatgtttaataagcatcccaggtgatattgtagcaacagttcctggcattgctctatgaaaaacatttttaaatctaatgtgattatgtgtg

SEQ ID NO: 828938 - DNA, 547 bp, Homo sapiens
cttcctctagaatcattacaagattagctaccagttgtacatcagccactcctaatacctagtggggtttcaatgttttcttgcrtcaatgaaggtgctaatcacgtctatggtgacatttaacaccacctccgactccctcatctcaaacctctgcttctgctggccacctcctctgccacaccaccccccttaactgaatgggtttggtaaactttggtttgagctagatttctgacaattatcccccactatttttacctgcatggtgccaccaatgtctgcatgaagaggggagagataaagaagaaagagaaaaaaatggagaagtgcgttaaaataaataaataaataaaattataaaggcagctgagagctaggttgtcaaagtcattaaatgccaactgagaaggaatgatgtgattccatctttcttttagaacaagtactaatatccaagatattgctaacgctgtgatgtgtgtcactgactttgtgatagaatgtaacaagtaccaaattttctaaatgctttgccataaaatta

SEQ ID NO: 828939 - DNA, 375 bp, Homo sapiens
ctaatatatgactctttaaatttggaggacaggcatggtggctcacgctattcaggaggctgaagcaggagaatcgcttgaacccaggaagtggaggttttagtgagccgagatcatgccactgcacttcagctgggagacaaaacgagactccgtctcaaaaaaagaacatggaaacattctttttgcacagaattttttatctatgcagcaaatatttattagcttcaagcaaaaatctagacactagtataaaatcataaaatttaaaagataaaaatgtgtgcccttttagggtttatattgttttagagtayagtatatggaaaatataaaagcaagatattgagcaaatcattaaactaaggcaggtaa

SEQ ID NO: 828940 - DNA, 489 bp, Homo sapiens
ttgacacataaaattaagtatcatgaccctgttatctggattaaattcacacttttgaaggtattgatcagccacaattagtatcttttatgtggctgaggtctttcaagacttgcctgaggtgttttgtgatcccagagtgtcaacatttggctacaaggaaaggtctcagcaataagcctaggtatttgatatggtttggatttgtgtcctcacccaaatctcatgtcgaattataaccccagtgttggagaaagaaactggtgggaggtaactgtatcatgggggcagattacccccttgcttttctcatgatagtgagtgagttctcaagagatctggttgtttaaaactgtgtagcacctcccgtttcgctctcttyctccttctctggccatgtaaaacgttcctcctttctcttcatcttctgccatgattgtacatttcgtgggtccccctgcctcagtcatgctttcgtgtacagcctgt

SEQ ID NO: 828941 - DNA, 505 bp, Homo sapiens
ctgatacggaagacgatgtgatttttgaaagagttgtataattgaataaatcatgatcagttaattatcctaktgttatttctattacttatagattttctattatgtaaatttgaattcataatttgattaaaaagtatacatctaaatacaaaaatttaatatattaaaaacaaaaatcctaaaccagtgctttgcagctagtcgtccctctaaagaaagccttagaatgaggcaaactgtctatttagtcaatctgaggcaacctggggaattaaacaaaatgcaatctctctttcaaacaaaccttattaaatattttctgaaatacaagtttgatataaaatgtgaacagtatatggtaagagacaaatacaactgagatttatgctatagcaagtacccattgttcaaaatataacatatgcacattaaactaactttggtgtatttctccttggattgaaatactgaaaatattctacactttccaacatcttaaaaa

SEQ ID NO: 828942 - DNA, 622 bp, Homo sapiens
caaaccttattaaatattttctgaaatacaagtttgatataaaatgtgaacagtatatggtaagagacaaatacaactgagatttatgctatagcaagtacccattgttcaaaatataacatatgcacattaaactaactttggtgtatttctccttggattgaaatactgaaaatattctacactttccaacatcttaaaaaaaacatgcattggaaatctttatctttattcccctctccccatccccactctgaagaagaagcagtttctcaccttacagtttctatcatctgcagtggtttcatcaaactcttctcccagctggaaactaatctccgtgttcttgaatgtgctgagagtcctgatgaccactttgtctccttcttgactgataattaccgttggtttggtcacatttcccacctgcctagtggcaaagcccacgcctaaaatagcaaagggaacagtacagtctgcagcgacttccaaaataactcacaaagcaagaatctgctttctgattctggaatccasgttctaaagtgtaagtttcattagaacatgattagcccattaatcatgtaaaacactactgtgataataagtggatgcagaagaa

SEQ ID NO: 828943 - DNA, 538 bp, Homo sapiens
tggccactattatatatcaaaattgtttgatttaaatatcatttaaattcaatataatgttacagcaaattaagatatttgctgtttgtaaaaaagaaccacttataaaagattagttttacaatgtaaatcactccccaatcatatttttcatagtcaaaatcaagtgaaaagaagtatagctaataagccaaaagttgctataaattactatgctaaagaaaattcaattaatctaaaagaaggcgcgagcacaagaaaaaaaaaacaaagagcacatgggtaggactaagagaaatcaaagagcaagatgggggaacttaaaaaaacaacaacaggccccaaattatgctgtctacaaaaaatttactataaatataaagtcacatatgtgaaaaggatgaaraaaatgtgtcatgcaaatgctaatgataaggaagctggaatgggtatattatgagataaagtagacttcaggacaatgaacctcactggggacaaagaggaacattttacaggattaaagtatcaattattc

SEQ ID NO: 828944 - DNA, 538 bp, Homo sapiens
tggccactattatatatcaaaattgtttgatttaaatatcatttaaattcaatataatgttacagcaaattaagatatttgctgtttgtaaaaaagaaccacttataaaagattagttttacaatgtaaatcactccccaatcatatttttcatagtcaaaatcaagtgaaaagaagtatagctaataagccaaaagttgctataaattactatgctaaagaaaattcaattaatctaaaagaaggcgcgagcacaagaaaaaaaaaacaaagagcacatgggtaggactaagagaaatcaaagagcaagatgggggaacttaaaaaaacaacaacaggccccaaattatgctgtctacaaaaaatttactataaatataaagtcacatatgtgaaaaggatgaaaaaaatgtrtcatgcaaatgctaatgataaggaagctggaatgggtatattatgagataaagtagacttcaggacaatgaacctcactggggacaaagaggaacattttacaggattaaagtatcaattattc

SEQ ID NO: 828945 - DNA, 572 bp, Homo sapiens
gtatctacacagttcatcaaggactttaactccatgagtcatttactctattcagactcataccacaacatttatgccaaacccttcaatgttagggcatakattatccaatttgataggaaactctattggcttcacaacaccacaggttgcaatataagacacattgggagtaaatggacagtaaatgacatactgagaaatgtcttaagtctgcctctattatggaatcaaagggaaattccttctgtaatatttcctttaggcctagcataatattaaaaccccaaggaaatttaatttggtttcagtatcctttgaaattattcttttaattaaaagtatatattttccttcaggccttattttaaaacactaagtgaatccttgttgcttctcccagaaatataaaatgaaaatgaaaatgaaaatgttatccttttattatgacacctgcaaaattaattctttctctatggataggtaaggggcactggtatgcttataaataaaagtctttttctttaaatttcctgttttctataataagtttaaagtcaaatttgagctct

SEQ ID NO: 828946 - DNA, 613 bp, Homo sapiens
cttccttggctcctcacatattctaaagcaccccccaacaactatactyagcccaagagttaacagcattccttaagagcccttaaaccccttttttttttcactttgaaaatgtaagttgatggaatcctgctcgtttacattctgtgtattttctgacaggacccgcaagtattttcaaaggctccactctgagttagaattagcacattagggacagcagattcactgttaaggaggaggccccacctctggctcatttttctttccttaccttgctcagaacaggattccccacataccaactggccagctgacactgttgcacatttgcacaatcattcattcattcattcaaatatttactgtgctcttattatgtatgtgtcaagtcccgggccgggatctgaaagcccaaaatgaatgttgaatcagtaactccagcctcattcatctatcagttgtgtcaccttggacaagtaagctaattttcctgagcctcagtttcctcaactgtaaaatgtgggataacaatagtctctgcctcacaatattaaataattgtacatacttcccaaattaagtgtaataatatacataaagaacattatat

SEQ ID NO: 828947 - DNA, 502 bp, Homo sapiens
atggacatccagaggaacaagattgacatgtagagaaacactcctaaattagaaaaatacatgttgccaagaggacactcatgctgctggaggaagaaaataagatagaaatgaaacacccatgctccagcctcatgagactgctttccaaatacttttaaagaaaaaaaaagaaaaagacaaagcatacaaaaaaaaattcctccttgtaactcagctctaaaatttaaaaaaaatataattcctgctttcaaatgttgttaataaaaaagaaaatataagttttttttttaatttaacattctgaagcccatgtgcaaagaaaggtctatttctagactactcagattagatcatagaaaaatatcactggggtggtaaaaaagaaatgagacaacaaawagaatatgaagaccatcagaataccattttgagttaattttctgtagcatttttaaattgtacttttttgatatacaacaccatatttgcaaccatgttt

SEQ ID NO: 828948 - DNA, 600 bp, Homo sapiens
taattttagcctctaaagatcaccgagcaaggtcaaaagaaaaragtaaagaggctggggagagaggaaagggaggaaaaaattttcagcaactgcttccagatgagtgggcagtccctccatgtgtgcagggccatcccctcaacaatgggttgcatgtcatctttcatgtacatctaaatggaaagagggtttgaattccagctgcccatcctgagaatgccagcaattcagggaatactactttgcaacacagtgaatgcattttagggagcctaaaaagatggacatctgaccactccatttctcttccagtgttctttaggaaaagattgagtgaggaagctctctctccttgttagccttctagcaagctgaacttgctcttcccgttccttttaacccacttcctggttgggtttggtgtctcctcttagaatctccgaaacataccacagatcattctacattcaaccagtttgtctcatggaaaaaaaaaaaaaagcaacaggcagcagtggaattcaggccaccccaagtcaccaatgtggcctgatggatgtggaaactggaccatgcctcagggatgaggcatgtgat

SEQ ID NO: 828949 - DNA, 660 bp, Homo sapiens
cttcactcagtctcttacccatatatttatttatttttctaactatttatatatccttatatttcygtacttactaaaactggtatcatatgatatataaagcttagttctgcctctttcatttagcatcatatattgagatatttcccattaactattcctcaaaaacataagtaatggcattaaaatattccatctcacaggcttaaagataattatcattgtgattctttactatcatttagaaacatgaacatggcagaagggaacttttctcaagaagaaaaaaaccttttaaaaataacttttatggtgttaaatgtaacttggtaaacagcaaacaaaaggatacatgcaacctcttcaccatgagattaaggaccatatttgccttatctaccatatcttcaaggtctaggagagtccctggtacaatgaatatttatttaaaggaaggaaaatacatatggctaggcattgaagtttgaaggttatacttggagaactgcacacttcaggagtctagaaaacttctcaattccccaatcaccataagctgccactagatgaaatggtgatcaggaagaaaagacagtaaaacattatgttttcctgtcttgtagatggcatttgtgttaagcgtaaactgcttccattttg

SEQ ID NO: 828950 - DNA, 604 bp, Homo sapiens
aaagctcttgggtaaaagataagttggtattgtacctgggctcgtatttcctgaaagacagtatagaagtttctttgtgcagctgaaacataaacctcttagggaaacatttctgcccattaccagcttatcagagaccatcaagaatgggatcacccagtatctccttcttgatttgattaaactatcattaagtgcctgagagatggacagtggcctgacagcctctgaccttaaagtaactctaagagctatttgtagaagctgaaggagaccggatttttcgtccacttttgtagttcgtgacctttggcttaaaaggggtacaattaggtcttactcatgctgattaaggcaaaaataaagaattatttctgactggagaaaaccccaattattaagttatcgtatactctccaattgtctataattttacagcaatttcactaaaatctgcatcaaacgttttctacatgacttaataaataaaataccaattaaaatgttccaggtatgaggaaaaggcacattcycctatctaaattgtgtttatgacatatcagggattgagtatcccctgaatcatcccaattattttgtgact

SEQ ID NO: 828951 - DNA, 591 bp, Homo sapiens
tatagcaactcaatttataatggcctcaaattaaaagcagtccaatgtttgccaagaaaaatatataaattgtggtatatccatacaataggatactacacaacaatagtaattaacaaatgttgctacacaaaacataatggataactatcacagacattatagttatcaagagaaaccagaaacagaagagcgcatcttgtatgattcaaatttatgtgaatttcaaggacaggtataactaattgtagtgatagaagccagtgctgtaattatctggggaggagtcgatattgactgggaaggggcgtgagggagcctgctggggtaatagaaaagttctgtgtatttatttgggtggtgtttacatgggcatgtacacagtaaaaatttattaatttatttaatctttatgctccttactatgtatatgttgtactgcaatcagaaacagacaaaaaatcccagcatgttacccacatgaatttttagagcacttycacattacctcatctgtgtaacttctgagttacacagatcagatattctctgggcaagttgggaagttggaggaagtatttcagggtgtag

SEQ ID NO: 828952 - DNA, 559 bp, Homo sapiens
gaggaataaaactattctgaaaaatagatgagaaaggtatatttccaaacttattcagcaagcctagtattactatgatatcaaaaccaaaaataaagacacatctaaaaggaaagctgtatgccaatatttctgatgaatattgatgcaaaaattctcaacgaaatactagcaaacaagtgtctacaatacattagaaagatcattcatcatgaccaaatgtgatttatctctgggactcaaggatggctcaacatatgtaaatcaatcaatgtgataaatcatatcaacacatttaaggacaaaaccatatgaccattccaattaatgctgaaaaacatttgataaaatttggcatgtcttcatgataaaaaccctaaaaaaactgggtttaaaaagaatatacctcaacacataaaagctatatatgacagacccaatgctggtattatactaaatagaaaaaaaaatgaaagcctttyctataagagctggaacacatcaaggatgcaaagtttcacctctattattcaatatattattggaagtcttagctaga

SEQ ID NO: 828953 - DNA, 605 bp, Homo sapiens
ttcaactttaagtcatttctttgctgccatatctgatcatacgctgttataagaagtcaagtcatctgttgaatgctttgatgcttagaaatttcctctaccaggtgccttttaagtcatcacccttaaattcaaacttccacagatccctatgatatgaacacaatgcagccaagttatgtgctagaacataataggactgacctttactccagttcccaataacttcttcatttccatctcagacctcatcagcctagcctgtacatatttctattagtattttggtaacaaccatttaaccagtctttaagaagttccaaactttccctcatcttcctgtcttctttcgagcctccaaagtcttccaacctatgcctgttacctagtttcaaagccactttcacatttttgggtatctttatagcaacaccctgctcctggtaccaactttctatttgttcatttttgcattgctataaaggagtacctgaggctggataatttataaagaaaagaggttgtaattgcctcatggttctgcaggcastataagcgtggtgctggcctctgctcgtgcttctggtaagccctcatggagcttt

SEQ ID NO: 828954 - DNA, 526 bp, Homo sapiens
ttggctagaacgccatcccttccatttttgccttttgtgggggactgctgatatgtctggaattggtgcacgacaaacacaccaggccacgatgtgtaaaacccamaacatttgtgtttcaaaatgtgagacctttgagtttaaaaacagactttaaagagcttgagaacctggcaattaatcagtactctctgctcagaatgaaagcacaggacgggttggtgtgtctcgacacacagatggatatggctggatctaattactttttctctatgatgctcaaacacccatttgtttgatatttctccccccctattttgctatttattgcttggcatttggtaggcataacccagtattgcagggggtttggaaatcatttttaaaaaattggtgccgctgttgtatgcagaacaaaatctgctgcggttttgaccacaatgagatcgagttcttgttgtcttactgtcactgatcaactcacagagccagggactggattcttttttttttttttgagatggag

SEQ ID NO: 828955 - DNA, 520 bp, Homo sapiens
tcactgccttcttgtagatttctctgatttctttcaacagcattttgtaattgtccttgtagagagttttcacccagatatctaaaatcttcaaatatctaaaattccaaatagcttaattcttctgtctgtcatgtctacaggacccagaggacctgatccccacactggcttcctgagctcacatggcagctaagcccagccccacttaagaggggatttagaaaataccaccttctaagactcacctactcaatccacctgtgggcggttatttttttttttttttgaatgagcatggttgtgctccaatcaaactttattcataaaaacagtcagtggggtagatttgactcatgggccaaaatttgacaatccattttttttgaacagcattattgtgtttktattaatccttcacataattattttaaaatatgtaatgtacagcatgagttctatgtagccttttgaagagtgacactggaacctatcaggggatggggggcaaggggaggga

SEQ ID NO: 828956 - DNA, 520 bp, Homo sapiens
tcactgccttcttgtagatttctctgatttctttcaacagcattttgtaattgtccttgtagagagttttcacccagatatctaaaatcttcaaatatctaaaattccaaatagcttaattcttctgtctgtcatgtctacaggacccagaggacctgatccccacactggcttcctgagctcacatggcagctaagcccagccccacttaagaggggatttagaaaataccaccttctaagactcacctactcaatccacctgtgggcggttatttttttttttttttgaatgagcatggttgtgctccaatcaaactttattcataaaaacagtcagtggggtagatttgactcatgggccaaaatttgacaatccattttttttgaacagcattattgtgtttgtattaatccttcacataattattttaaaatatgtaatgtasagcatgagttctatgtagccttttgaagagtgacactggaacctatcaggggatggggggcaaggggaggga

SEQ ID NO: 828957 - DNA, 294 bp, Homo sapiens
atggatgctacctatgtgtccgtgtggtcatgcactttagaatccttctcctctcatgggatggsagtttccttacaatttgtttatccctcatgtatttatcgaacagtgctaagtgctgggagcatggcaaggcactgaactggctctgttgtctactgcatttcaagtcaaaatggaggtgaaggaaaaagaggtacaggattggtcccatggggagagacactgacttgaggatttcctgataacctcgtatgcccggatcagtgtatcaaggccttttattgttctgta

SEQ ID NO: 828958 - DNA, 294 bp, Homo sapiens
atggatgctacctatgtgtccgtgtggtcatgcactttagaatccttctcctctcatgggatgggagtttccttacmatttgtttatccctcatgtatttatcgaacagtgctaagtgctgggagcatggcaaggcactgaactggctctgttgtctactgcatttcaagtcaaaatggaggtgaaggaaaaagaggtacaggattggtcccatggggagagacactgacttgaggatttcctgataacctcgtatgcccggatcagtgtatcaaggccttttattgttctgta

SEQ ID NO: 828959 - DNA, 611 bp, Homo sapiens
cagtgactgtttccttttctttatgtatcaaaattactagcrctgtgagcaacccccaccattgtcctggacttataaggagtccagtaaatcactaagtgattttctttttcttccttcctttctttctttaaaaaacaaaaataaattttctgagattagtatgggaaaagaaaaagcaaatgagctcacccgtggaaatttttatcccaactgtttctaaagtctgaaaacaaatcacattttttcttttaatagaatatagatttgatttcttgattttaaaacatgcacttttaattctgtctgggcatgcaggatgcccacatgctggctaaaaaaagaaacacgaagctatttggagaatcactttgtctacacaaaagcagaagctgatttgactaatgatttttctcctctttgatttttatttgaatcaaaatgagcagttagttatatcttggcaccccactgccattgcctctgcattctcctaaaataaagaggatttgatgtgcttagtacagatgtgttatgagagggtgacataagtgtgcaagggcatccttgacgttgtgttgtgtccatgtgacatagtaactgggcacaac

SEQ ID NO: 828960 - DNA, 490 bp, Homo sapiens
ggcactaccttgtccagcttgattactattacactataaaatacactgaawacatgttcatatttgttgaataattgaatgaattctgcagagaaacaagctttaaatgcttggggatctggattgttcaaaggtcccagctagatcagcttcttcaaataggttttatcttgacaacccagttgctgctgcctgcaatgttgtgttgagaaggattctgtggctgtgcattattggttgcgtgctgtgtgcttgcctccctctcttagttgtgtgtttgcgtagcatcttgtagtgcagatttttctttctccttggagagtttccttgcctacactgtgcttccgaagactctgcaaggtacctttgaaaaaagaagccatatgtagcagaagcaaataggaaatgaaatgttcaggagattccaacaaaggcagaaattggccctatgcctcttcccattccttgttctgagtactgtgggttgaca

SEQ ID NO: 828961 - DNA, 600 bp, Homo sapiens
ccacagatgtgaaaacagacctggaatatttcatggacgtgacatatccaccacatttaattaaaaaaagaatgtatgagaacaatgtatccttctcaatcygggtcgagggaacaaaacaggactggattagataggacaactgtaatctctagagacagttccatgtttaatgggagcgccacatgtttgatatgtagggaagtaagtgggtgtcctggacacggtccactattcatcataataccacagccctgttcattcccagagaggagagttaaaaccatgaaaccatatgtagaatattaaaaatcatttaacattaaaatgcacattatgaaggcatgcactttggacaaggctacagtccaagagctctgagaaatctccagttcagtagataattgttgtaaaggtaaactgagttatctatatgtacctacacatgcggatgtttgcacacaggcgcatgcatgcacacacagagggactgtcatagaagcttagtcctcatctcttcaatgctgcctttcatcactctgttttccttactgatttctgtagtgaggtcaatatcaataattgatggagctatgatat

SEQ ID NO: 828962 - DNA, 616 bp, Homo sapiens
cgcaccactccgccccccgcccagcgtcagaccctttatttaccttccatgtcataatgcacgtctttggcatcgtcttttacaagctttcattaccgcatggattgtgtccactgtgcaccgaagggcccctttgtgttgcttctgattaactgcaatgacagcatttgatactactccatgtgccggaggaaggcgccttggttatgtttccttgggcaaagcacatgccatggcggggttgagtgttgtgggggtcccatttcctaggtgtgctcaggttctgaacctgcagccagagggcgaagcgcacctttccgctttcattcatgtggggctcaggagggctgcaccttgttttctttagctcccagaaacagcttggtttggaccattgctgcgatgcccctcatcgccatcatgggataaccaggatgaccatctcggtcgctctcccagccagctgccaatagcattcctgatttatttgcagcaacttrgagatccgcagctaacagccatcttgatgggaaacagcactataattgcttggggagaaaggcaggcatttagcagtcgtaaaagaaaatctgcccaccaccaaaccaaatgccgc

SEQ ID NO: 828963 - DNA, 608 bp, Homo sapiens
ggtcgagctgcctgagggcttctctttttatagtccctgtttggggatccacctgtgtctggttatcttgaaggttggtgcgccctagcatgtgatgtcgtcycaaattggaatatcccaatgcagttggtctaaacagatttgggcattctggcagacatctgcacttacaaactaactgtgataacatatttacactatacccataaattgcactccaaacaatgacctaatcattgccccttttaaaaaggccccacttcctaataccatcacctaaagcattaagatttcaacgtacatatttcggagggacacattcagcccatagtggtcttgtatgcaaggctcagatggtaaggtttattttatactctgctttcaggtggggggatacaggtttttaagctgaggacaaagcatgatgactgtagtgtctttggaagattaatcaggcagcagcttggaggacagagtggggcaaaaggtgtcaggcagtggagtggcactgtgctgggtgtatagatacaagggcctggtcccaagtgacacaagttcaacagtttacatggaaaatgtataacagggtacataattttctgtaattc

SEQ ID NO: 828964 - DNA, 610 bp, Homo sapiens
gagtggggcaaaaggtgtcaggcagtggagtggcactgtgctgggtgtatagatacaagggcctggtcccaagtgacacaagttcaacagtttacatggaaaatgtataacagggtacataattttctgtaattytatagaatcttttttttttctttttttttcttttttttttttgagacagagttttgctcttgatgcccaggctggattgcaatggtgtgatcttggctcatcttaacctccacctcccaggttcaagcgattcccatgcgtcagcctcctgagtagctgggattacaggcgcccgccaccacgcccggctaattttgtatttttaatagagacggggtttcaccatgttggtcaggctggtctcgaactctgaccttaggtgatccgcttgcctcagcctcccaaagtgctgggattacaggtgtaagccaccacggctaatctcaattttttagaatcttaaagacagtaacttacacccctgagcggaactgttgctcaaccaggatatgccatttaaactccaaagtacaaaatagttttaacgaggaagccaaaactgccaagaagaatgcaggaggtggaaggctttggg

SEQ ID NO: 828965 - DNA, 623 bp, Homo sapiens
gattccacaaaggccagggctcaatgaaagttataatttgcacagggcattcaatgtctcaagttcttctatttttacaagtatggaagaataaatttcccgagtgccccaaaggaagggcaagaacagtcaaattcatctcatcagcagtttcttactgggcacctcctgtctgccaggctctgttctgggtgtagggataaaaggcagaaagaggcaacaggcacagtgacaacaaaactcagtatctcaataaagtggcgagggctatgggaagagtaacaacgaggggaggcgtgcagaaggccagggctggaatgagcagcaccagtcatggtcagagagggaggaggtgggcagtggccacccgctgtctggaggaaatgcggacatactttcctgagaaggcagagagcatgtgcatgtcccaagtggcaaatcctgagtgcctagggggcatgcccaggaaggcaggtcagagctgcatgctggagagaggaagcgccatggtcactgctgtggggcttcccagaccagagtcacagggaggacccctgctccccaggacggagcaactgagcagctggtgccagagcggygggaacaggaggagcgtcgggctt

SEQ ID NO: 828966 - DNA, 613 bp, Homo sapiens
tatagtgagagatggagtctaattttattcttctgcctatagttaacagttttcccagcaccatttattgaagagactgtcctttccccattgtatattcttggtgcctttgtcaaagatgagttggttataaatgtgtgaatttttatctggattctctgttctgttctactggtgtatgtgtttttttgtttttctttctttcttaagccagtaccatgctcatttggttgttagagctttgcagtcaattttgaagtcaggtatagtttgatgcctccaactttgttcttattgatctatacctttggctattcagggtcttttgtggttttacataaagtttagaacaccttttttttcctatttttgtgaggaatgtcattggtattttgatagggattgcattgaatctgtaaattgctttgcgtagtattgccattttaacaatattaattcttccaagccgtgagcatggaatatctttccattttctaatgtgtcctctttggtttattttatcagtgtgttayagtttttatcgcatggatcttttacttctttggttaaattgcttcctagatattttacattcattgtagctattgtaaat

SEQ ID NO: 828967 - DNA, 578 bp, Homo sapiens
gtatttgccaggaaacttttaaggtaatctgtttacttatataaattgtaatatatcaaattacatatgcaaagtaacaattgatatgaatatataatacaaatataataatttataaaaacattcaaaatcactatttttccagcaaaagtaaaataatttttaaaataacttctttaaaaatatttggagagcttaactattaactttgctcagtatgagaaaacttttaacttatatagatgataaatattaatttagatattgtcaactttttcttttcatcatttgacatgtaatggtatgactaacatttgtagaattaataataaaatataaattattattatttaattctcaaagctcaagtcacacatgaaaacaccaaggaccaagcataagcaatatccacagggcaaccaatggcagccaataggcccacataggtaccactcagtatakgtttgaaatcactcagtcaattaagagaaaatcctccagtcatagccatctagtcaccataatttcatagctcatatattgcaaacacttggggtgtgttccgttgccaatgctgt

SEQ ID NO: 828968 - DNA, 623 bp, Homo sapiens
gctgtgccattggagaggcaaggaccaacatcaggtagtagtgggaagattcacagtgacgtggagaaatggagaatgaaaagttctgttcagaaatttgctggtgaacacgtttagtgtacactaaaaatatttattgaacatgctctatatgctgtatattattatagctgaaactgcaacaaaaaataggatacaatcctgatcctcaatgagttcactttatatttaggggaagggaaacatgtaaatagatcatcagtgaagccatttcatcagtgaagccaatgcagtctcttctgaagaaaattacttatgaagaagatagattaaattacttatgaagacaaagaattcatagtatcaaaaactaaaaatcgcaatcaaactagtgtaagaatcttgaaggtttttcaattaactataaattcaatagtggtggattgacctgtatgattggagggctgtagtgctttataatttgaaatacagtgaacttcctggctttaaaaatgtttagtgtaattttcatttatccaccrctgcctgcacactgaggtaattagaaaatttcaatatttgctccttatcagataatgcccccttcccattcctatgcagct

SEQ ID NO: 828969 - DNA, 633 bp, Homo sapiens
gagcccagcttgcttcaccccctggatcccgcaccrgggatgcaggtggagctggccggccagtcccgcgctgtgactccgcacccctcagcccttgggtggttgatgggactgggcgccttggagcagggggcggcgctcatcagggaggctccggccgcaaaggagtccatggagggggtgggaggctcaggcatggcgggctgcaggtcccgagccctgccccgcagaaaggcagctaaggcccggtgagaaatcgagcgcagcgccggtgggctggcactgttgggggacccggtacaccctccacagccgctggcccgggtgctaagcccctcattgcccggggcgacagggccggccggctgctccgagtgcgggcccgccaagcccacgcccacccggaactccagctggtccacaagcaccgcgcacagccccggttcctgctcgcgcctctccctccacacctccctgcaagctgagggagccagctccggccttggccagcccagaaaggggctcccacagcgcagcggcgggctgaagggctcaagtgctgccaaagtgggagcccaggcagaggaggcgccgagagcaagcgagggctgtgaggactgccagcacgctgtc

SEQ ID NO: 828970 - DNA, 511 bp, Homo sapiens
cttttgagttagaaactatatagggaaaatttgtgatgataatatctcctgtttatagagcatctatgaaccatgagaccctagggattattctattcctttttcaattaatgactccttcctttcttgttccaggtgagctttgctgttctttaagttaggcactctctgtatccaagcattgtcctattcattctctaaacaagtcctcagggtggacagggctgtgcagctggacccctgtgctctgtgtgcaggccccagcctgaggaggagctgagcaggagattccttcgtcaggctccatccagcgggaagcagcgaaatcctctgatttacatcaagaggctggtctcctggccaaaccttgccacggagggctatgcctttgtgtagtctcttttctccaagagggtgccctttttctgtataaacgcagtgcccaacctgcagatagtgctgaggtagggattgcaatgwagaaacgggctctagagggcaaatgagttgc

SEQ ID NO: 828971 - DNA, 603 bp, Homo sapiens
agtcctcagggtggacagggctgtgcagctggacccctgtgctctgtgtgcaggccccagcctgaggaggagctgagcaggagattccttcgtcaggctccatccagcgggaagcagcgaaatcctctgatttacatcaagaggctggtctcctggccaaaccttgccacggagggctatgcctttgtgtagtctcttttctccaagagggtgccctttttctgtataaacgcagtgcccaacctgcagatagtgctgaggtagggattgcaatgaagaaacgggctctagagggcaaatgagttgcatgaaaccattgcatgtctcagctggagtctgagcacggatctgtctggctttccattcttcccccatctttacggagctctttattcatcgtgtgtgtaagattgtttcctccactgtggctcctaggactttggataagtctattttcaaagggctaaaattagcgtttctgatacttagtccatgaytttcccttgcttggatatttgtccttataattaactgaatattttctttgcttccttcaatggcagcattcctggttggattcagcttcccccaaaggttagcccc

SEQ ID NO: 828972 - DNA, 614 bp, Homo sapiens
cccaagcaggccattcctgcctggcaccacagggatccatagggagggcagccagagaagcagggggtaaaactccacagggagaaggaaatctctagctaaactttgtaacaatttgaacrgggcgagagacctccaggccacaactctgggtagggcggcaaatctggtttgcagactccacaggcgagggaagaaccaagcccttttctttcgcagctagaaggcaggtagcctggggcaagttttcaagcccatctcgcccactgtctggaaacagggctgttgggggaggcacggtgggattaagactgctccttcagtttgcgtgggagctgggtgaggcctgtgactgccagctttcccctacttccctgacaaccagcatgattcagcataggcagccatattcctcctagctacacaactccagtgacctggcaatctcaccttcatccccaacagcagccacagcaagacccgcccaagaagagcgtgagctcagacatgcctagccctgccccaacctgatggcccttccctacccaccctagtagtggaagactaagggcatataatcttgggagttctacggccccgcccactgctggtcc

SEQ ID NO: 828973 - DNA, 588 bp, Homo sapiens
gatgtaaaagttatgtttacattactctgtattgagagtgcaatcgcattatattaaaaaaagcaatgtggatacattaattttaaaatattggtaaaaattgctaacgatcatttgagccttcagtgagtcmccatctttttgctggtggaggattttgccttgatgttgatgactgttgacttagtggttgctgaaggctggggtggctgtggcagtttctttttttttttttttttttttttataatttatttttttattgataattcttgggtgtttctcacagagggggatttggcagggtcatgggacaatagtggagggaaggtcagcagataaacaagtgaacaaaggtctcgttttcctaggcagaggaccctgcggccttccgcagtgtttgtgtccctgattacttgagattagggattggtgatgactcttaacgagcatgctgccttcaagcatctgtttaacaaagcacatcttgcaccgcccttaatccatttaaccctgagtggacacagcacatgtttcagagagcacagggttgggggcaaggtcacagatcaacaggatcccaagacag

SEQ ID NO: 828974 - DNA, 617 bp, Homo sapiens
tttcccaaattgtaattgtaaggctattaataattttyatagagtccccttatgtctcagtctattactttcataagctgttgtctgtcaagtttggggaaacctctacttttggattacatcatcctttgattattttcataaaataaaaacaggttgtcataaaaatgaaacagattttatgacacttggaccaattctagggttctatttgttctttgtttctcaaggaaatacaatatccagggaatatttgcatattatatatactgctttctagcattattgcctgaaggtggatggtttcagcagttctgatgatgatgaattctgaaactgcttggagactgggggacaaataacagttttatatcatacagctgaacctctatatagaatgtctgtgctgagggagaatttttaggcccacgggaggttttttcatgacctctgtccatagtaaaatccatttacaactttctttcactctagggagctataaagggataagtttcttcttaagtagaagttagacaaagaggttgaaggttctgaatattttttcactttctcttctaataggaaaggatacagtaaattttgcctttcgtaagaac

SEQ ID NO: 828975 - DNA, 622 bp, Homo sapiens
tatatgcacctaacactggagctctttagtttataagacaattagtaataggcctaagaaatgagatagtaagacaataatagtgggggacttcaatactccactgacagcattagacaggtcatcaagacaaagtcaacaaagaaacagtgaatttaaactataccctggaacaaatggagttaacaaatacttatacaacattctacacaaccaccacagaatatacattctattcaacagtgcatgttctttctccaagatagaccatatgataggccacaaagtgaacctcagtaaatttaagaaaattgaaattatatcaagcactctctcacaccacagcgaaataaaactggaaatcaactccaaaaggagccttgaaaaccatgcaaatacgtggaaattaaataacttactcctgaatgatcattgggtcagaaatgaaatcaagatggaaattaaaaaattcttcttactgaacgacratagtgacacacctttcaaaacctctgggatagcaaaggcagtgctaagaggaaagttaataacctaacttttaacttaaaagtcaacttaaaagttaaaagttgatgcctacatcaaagactgtgaaagagca

SEQ ID NO: 828976 - DNA, 622 bp, Homo sapiens
tatatgcacctaacactggagctctttagtttataagacaattagtaataggcctaagaaatgagatagtaagacaataatagtgggggacttcaatactccactgacagcattagacaggtcatcaagacaaagtcaacaaagaaacagtgaatttaaactataccctggaacaaatggagttaacaaatacttatacaacattctacacaaccaccacagaatatacattctattcaacagtgcatgttctttctccaagatagaccatatgataggccacaaagtgaacctcagtaaatttaagaaaattgaaattatatcaagcactctctcacaccacagcgaaataaaactggaaatcaactccaaaaggagccttgaaaaccatgcaaatacgtggaaattaaataacttactcctgaatgatcattgggtcagaaatgaaatcaagatggaaattaaaaaattcttcttactgaacgacaatagtgacacacctttcaaaacctctgggatagcaaaggcagtgctaagaggaaagttaataacctaacttttaacttaaaagtcaacttaaragttaaaagttgatgcctacatcaaagactgtgaaagagca

SEQ ID NO: 828977 - DNA, 642 bp, Homo sapiens
ttaatgaatcagcttagttgatacaagtgagaacacacaaagaaattgmtagaaaaaattatcagcaaattattctagttgttataaaatgcatattaccgaacagtgatgcctttttttctgccttacctttgtgtcctccatcccttaaaagcattttctaaataagttgatgaataagttttgtgggcagtgatgatgagtatctttagatctttttaaagaaacaaataactgagttagaacatataaatatctgacagaaagtattataaacatctaggcagatggtaatgtgaagaattaatacagatctggacgattagaccaaaggaatctgctattagttagaacattttggctgtggttaatattctgagtttggaatctggggtaaaggaaggttatattaaaaatggaagtatctgtagcagtttaccttttgggttcttgattcatatatagatatctgggctttagagttaaagaaatttcctttagcaagactttctgaatcatctaggaaaaggcaaagtattatatatcattgttgtagagtagatttgtccttaaacccaagttaccaggtcagaggtcagccagcctttgatgatgaggaagtaagttggtaatccatgtagc

SEQ ID NO: 828978 - DNA, 481 bp, Homo sapiens
tggagtggaagtgtgcgatcacagcccacgttaacctctccctcccgggcttaagagatccctgtagtcccagctatttgggaggctgaggtcaccagagcgcagagacagaagaccaggcgggccggccccaaaagaaaagaaaataaataaacgaaaattattaataaataatgaatgaaggaagggaggaaggatatacatacacgtgtatgtaaatgaaatggggcttcgatacatattcatccattaaaagtaacataatataaacgtattaattatggaaatatcatttacatagttttatcactacggggtgtgtgtgtgtgtgtgtgtgtgtgtgtgtgtgtgtgtgtgtgtgtgtrtgtgtagatgtatgttcatacacggcagcgttcagaaaataagattgaaaaaaggaaggaatcggccgggcatggtggctcacatctgtactcccagcagtctttgggaggccgag

SEQ ID NO: 828979 - DNA, 518 bp, Homo sapiens
  misc_feature 1, 2: n = A,T,C or G
nncatctgtctctctctctctttctgtctttctctctytgtgtatcgttgtctctctctgtctgtctctgtctctgtctctctgtctctctctctctctctctctctctctctgtctgtctgtccgtctgtctgtctcggtctctggctctcgctatctcccgccctctctttttttgcaaaagaagctcaagtacatctaatcgaatcccttaccaaggcctgaattcttcacttctgacatcccagatttgatctccctacagaatgctgtacagaactggcgagttgatttctggacttggatacctcatagaaactacatatgaataaagatccaatcctaaaatctggggtggcttctccctcgactgtctcgaaaaatcgtacctctgttcccctaggatgccggaagagttttctcaatgtgcatctgcccgtgtcctaagtgatctgtgaccgagccctgtccgttctgtctcaaatatgtacgtgcaaacacttctctccatttccaca

SEQ ID NO: 828980 - DNA, 605 bp, Homo sapiens
  misc_feature 410: n = A,T,C or G
cacctgggagacctccctcacgccctatgggatttagggcgcagactctgcacccctcccctgaccctggacatgagggctaagcaagtcccccacaactcagttraaaagggacctggagggacttctgcagtgagtgtccaacctcacatggtctgaaggggcacaggcaagggtcattcacataccctatcatgggccacgctggaaaggccactgtgccacgcctgtggaaacacctgtgaactgcacccaccacaagggcacgcagtgggccactgatcaccacacactggatcgtgtgatggccccagggctgtctgtcacgcacaggagggcagctgggtccagactcctatgtgagcagcccgtggagtgatctcagcagctctccctgccctgaaatggtntggaaagtgggggccaagcaggaacagcccaccgtgggtgacctcctcccctgtctactgttctcttacggggttaaggcaaaggggaaattggatccctgccaggtttccaataaagaggcttcctcaggattcaaactcatttcatgagaagagcctggccccatcaggcacctcagcaacttgtcaaacatg

SEQ ID NO: 828981 - DNA, 589 bp, Homo sapiens
acaggcgtgagccatcgtgactggccggctacgtttatttatttatttttttaattattttacttttttttagttttccattttaatctatttatttatttacatttatttatttatttatttatttacttatttatttattttcgagacagactctcgctctgctgcccaggctggagtgcagcggcgtgatctcggctcactgcaagctccgcctcccgggttcacgccattctcctgcctcagcctcccaagtagctgggactacaggcgcccgccaccgtgcccggctaactttttgtattttgagtagagatggggtttcactgtggtagccaggatggtctcgatctcctgaccccgtgatccgtccacctcggcctcccaaagtgctgggatgacaggcgtgagccaccgcccccggcctatttatctatttattaactttgagtccaggttatgaaaccagttagtttttgtaattttttttttttttttttttttttttttttttttttttgagacgaggtttcmccgtgttgccaaggcttggaccgagggatccaccggccctcggcctcccaaaagt

SEQ ID NO: 828982 - DNA, 643 bp, Homo sapiens
ctcacacctgtaatcccagcactttgggaagccaagcttggtggatcacaaggtcaggagttcaagaccagactggccaagatggtgaaaccccgtctctactgaaaatacaaaaattagccaagtgtggtggcaggcatctgtaatcccagctactcgggaggctgaggcaggaaattgcttgaacccgggcggtggagattgcagtgagcggagatcgggccactgcattccagcctgggtcatagagcgagactctgtctcaaaaaaaaaaaaaaaaatagaattaggtttgcctgttttgggacttgatataaaggagaacatacaattatgtactcttttttatctgacttctctcactcatcataatgtatgtgaagttgatcagcattgtgttgtagaaatgctttgttctttttcattattgtatgatgttccattaaataaatttaccacaatttatcccttgtagtgttgatacacatttgagttgttttcagtttggggctatcagaaataatgcttctaagaacatttgtatccatgtcttttggtgaagagatatatacacrcctgaagaaaaagggctggactgtaggatatgcaattatttaactttaagggctattgacagttttca

SEQ ID NO: 828983 - DNA, 657 bp, Homo sapiens
cccttcctggagaagacgattcctgaaccaaagctgtaaggccgagtagacaaatggcattggtgaattaaggttatgtcctaaataagcacgttttcccccaggaaaattctagacacttttgttcctagcatcaggttaagaatgctatttcttcagagtcaataataaatgagtactttttttaaaaaattcaagttgatgtatgaaaacgttatcttacttggagttttaatatgcaaatacagaacttttaacattagtggtgacattgccttaggagagtctgaagaaaaactaaggctgcaatcataaggcaagcagattataaccctgtggaggctggcaaccaaggagcaagagatctgagaatgttctttctaaatccaacatcttacacaagtcttgtggcttaaagttatctagtgaagattagcaaagtggatccaataatgagcttttgttaaaaaatggaagattttagttgcaagctacatttcaaaaagagcacgttttacatactagaactttkaaaaagtttatttcaggttgaagaattatattttcatagtattctagcataatcatgctacttaaggaatgagatttttaacaaagccatattcaatagcgctgtactgcttcataatcatggta

SEQ ID NO: 828984 - DNA, 609 bp, Homo sapiens
gttctcccttttccctgaactcccagctagcttctgtggaaattgtgacatacttttctgcaactaaccacttaatttattttcttttaaaaaataataatagtaattgtayatttatttcttcagacccctcttttgagaccttttgcctctctgtgccttcatgaagtctaatcgatgccctctatcggagctttgcagagtgctggagcagcatcaatccttttgaacagaggtttggctgccatcgcgcagggccaggactcaggccaggaaagtgaggtgcttaggctgcgcacttcacagcatcacagggttgttcaagtgctgatgttgagccacaaatagtctaatattactgaaaacttagggataaggatgtggaatagtgagaggtcagactggacaggcaggtgagggcctgatcatggacagccttctatgtcctggaatgcaatcagactctatcctcaaagcaaagtggagccaagtgcagtgtggatcaggagagaaacgtgatttcagatgggcatgttagaatgactgacttcatatcagcctagagaatcagctggaaagagcaagaaaccaaagacagaaaagagttta

SEQ ID NO: 828985 - DNA, 632 bp, Homo sapiens
taagtttctaaatttttcattcagaacatacagcttgatastcaagtgggaggttttcaggccatccaataatacttcagttgagtaccattaattttattttgaatttgatatttctatgttttaattataaaccttatctacatactgaaacataaatatatagaacctacattgacccccaaatataaaacatctgaaatatgggcatttcctgtttcttttctgaggcaataaggtgagttgagaatcaacagaagagacatgaatggaaaaaaaagataatatctctagggtttaagttatttttatctttaattatcacaaattaccctggattgtttctcaagcctacataaatatcacttttttggcttttattctttttaatgaggttcagaattttctaattttagtacaatgaacacatactattctcacatagcaaatgttaaggaaagtctttaaaagtaaaatacgtttaagaacaacagcaacaacttcctaagaaaagctttaattcaggcttcaattctacctctcatcccatttctctttccttatgatttttgaacattgataggaataattgttgaaaggacacaaaggcataagaatgatacaatggactt

SEQ ID NO: 828986 - DNA, 631 bp, Homo sapiens
agcttatgatctctaaacaaaagcctccactcttcataacggcaaagtcatggaatcaacctaagtgtccatcaacagttaactggataaacaaaatgttctatgtaactgtaaacaaaaatgaaatcccatcataaagctgatactccttataatcaagacagttattaagaatctaggtttaaaatatataaatctaggtttattcatgaaattcaacctcacttggtttcctttatcagcttattattggttttaatttccctgcccagtaatcccatcactgtattttaacttctttttcctgctacccattgctggagataggggatggggggcagccagccaagtgtggaatgcagcaaaaccattcagagtagacaaaattgacaaaaattgtgaaagcaaataatgtgacagcctcagaatcctgacctttagaacttgaaaccaataaacatgagttcttttgtattatgggtaaaaaaaagaaatgttgttgtatatatacaccatgcaatactatgcaaccctaaatggaaggaaattatgtcctttgcarcaacatggatagagctagaggccattatcctgagtgaactaactcagaaacagaaaatcaactaccaca

SEQ ID NO: 828987 - DNA, 642 bp, Homo sapiens
atgaaaaggcaaagaaatgagaataataattcaaaaatgtaaaaaagaataatgaggttgtagaacacatattcttccattttcaggtgtactataatgcttcaataatcttgagagggtggtcttggtgaaaggatagaaatatatatcaaaagatcaggatagaaagttgagagatagatccatccaaatacatatggccattttagacaagggtacaataggcaattcaatggaaaaatgataatgactcttcaacaaacagcattagacactggagatctagaaactcctaaaattgaattatattataacaaccaaaactaattcattataggtttgattgtaatgacagtttgtgccctgccaaataaaacagcacattttaaaagtatgtatgtttgtcttaaaagttaaaaaaaattttgcattgtaaaaaaaaagtataaatgtgtgtatatgtgtttatattcttttttagataaaagcaccagaaattttatttgcccaattttcaaatggtactttagtccaagggaaattttttgtgatttttgactaatgcaatcaactatccaatgaatgcaggtaataaagtgtacccatggtcacrttgtatagcttttatctaaatcatcatga

SEQ ID NO: 828988 - DNA, 589 bp, Homo sapiens
gggacatgagtgagttaatttgcttcctatgtgtgtgaaactacagggaaataattcaggaagttggagatacctgktatagaaagcatttctttagtttttgcctttccttttacctctcttatttccttgctaatcacagtgtctaagaatatgtggtcttattattaagaaaggtatcttttggcctatgagttgctgaactcatttttgtatcaaaaactgctatcttgtacagcttatcagaaatgctgacgttcacccttcctcaggtcttatttgaattgtcagtgctgacataattttaatgcacacacactgggatatgtgtagctaatacaaatgtatgtctttggcataaataatattcatcgttgaattttcctctgtgatgtttttacaaccaacaacccttccactaggcagatcatcacaaattgggattttcaatgaatcatctggtaataaagaagtatgtgctttgcagattgagccctcttccatgtgacatcaacagcttcaacataaattacccattacaggtttatttgtcatgaactgcagccaaaataccatgatggtaaagcta

SEQ ID NO: 828989 - DNA, 589 bp, Homo sapiens
gggacatgagtgagttaatttgcttcctatgtgtgtgaaactacagggaaataattcaggaagttggagatacctggtatagaaagcrtttctttagtttttgcctttccttttacctctcttatttccttgctaatcacagtgtctaagaatatgtggtcttattattaagaaaggtatcttttggcctatgagttgctgaactcatttttgtatcaaaaactgctatcttgtacagcttatcagaaatgctgacgttcacccttcctcaggtcttatttgaattgtcagtgctgacataattttaatgcacacacactgggatatgtgtagctaatacaaatgtatgtctttggcataaataatattcatcgttgaattttcctctgtgatgtttttacaaccaacaacccttccactaggcagatcatcacaaattgggattttcaatgaatcatctggtaataaagaagtatgtgctttgcagattgagccctcttccatgtgacatcaacagcttcaacataaattacccattacaggtttatttgtcatgaactgcagccaaaataccatgatggtaaagcta

SEQ ID NO: 828990 - DNA, 670 bp, Homo sapiens
aacttggaaatgctcagcaagatacttaagatgccaaaaggaaactccaagggctggaggcttagtaagcattctatgctggagatataaacatgctatcacckgcatgatctcaggcaaggctcttattattcccagaccttatcgtttttatttacagaatgcacaaactccttttacatgagaaagcctctaatatgtaatatttggcatcattacacatgtagagaaactgatactcaatactcaggagacatctttgggtatttatacaaaacttgttttaatatctgtgcaatgagtctactgatgggtgaaactatctgaagaataattataaccttctataatttttatcacttttaatgataattatttattctgcagccatatatcaggtattacacttggcactctaaaatgtttaatcatcagagcaatactgcaaagggatttttattactctcattttaccaatgaggtaattgaggatctggataaatatcttgacagaaacctctcaactgacaaggaactgaatcagaatacccaagtctattgactataagtctatggctattatcatcccactaacttgtgacttattcaccacattcgaaacatgagaaacagagcattgagcttagcagactgctgccattcaagacac

SEQ ID NO: 828991 - DNA, 619 bp, Homo sapiens
ctaactgatcaatcaaccttgtgacactgctctgtaactgtgtgataatgtaccttatgacattcttccactgcccacaaaaaccggcccctaactgtgactttycactgcctaaccctaacctataaaaccactccaatcccatcacctgctgctgactcccttttctgagtcagtctgctcttgcctgagtgaataaacagccttgttgcttacacttggcctgttcagattgtctcttcaattaaatgcatgcataacaaaaaggactagtccaacggctatacaccaacggcgaccaagctgagaatcaaatcaagaactcaaccccatttacaataattgcaataaaataaaatacttaggaatgcacttaattgggaaggtaaaagacctctacatggaaaactacaaaacactgctgaaaaaaatcatagatgtcacaaacaaatggaaacacatcccatgctcatggatgggtagaatcaatattgtgaaaatgaccatactgccaaaaatgatctacaaattcaatgcaattcccatcaaaataccaccatcattcttcacagcactagaaaaaaaatcttaaaattcacatgcaaccaaaaaagtgcct

SEQ ID NO: 828992 - DNA, 647 bp, Homo sapiens
caataaacttatcagctcacatggtgttctgtaggggactctggaatagccaactggatggttctggttttggctttctcaarattacagtcaacatgttgcccagagctgctgtcagctgaaggcttgactggggctggtaaatggattgctcatgtgcctagcaagttggtgggggctgctggcaggcctttgttcctcattggcagttgacaggaggcctcagttccatgccacatggacctctccataggcctgcttgagtgtcctcacaacatattatccggcatcccccagagggagtgatccaaaagaaaggaatattgaagccatagttttttgtctttgttttttgagatggggtcctgctttgttgttcaggatagagtgctgtggtgcagtcatagttcatggtaacctcaaactccttggtttaagtgatcctcctgcctcagcctcccaactaattagggaggtgacagatgtgtgccaccatgcctggctaatctttaaaaaaacaatttagagatggtggtctcattttgttgcacaggctggtctgaaactgctggcctcaagtgatcctcctgcctcagcctcccaaagcatagggattacaagcatgagccaccacacccaaactggaa

SEQ ID NO: 828993 - DNA, 647 bp, Homo sapiens
caataaacttatcagctcacatggtgttctgtaggggactctggaatagccaactggatggttctggttttggctttctcaaaattacagtcaacatgttgcccagagctgctgtcagctgaaggcttgactggggctggtaaatggattgctcatgtgcctagcaagttggtgggggctgctggcaggcctttgttcctcattggcagttgacaggaggcctcagttccatgccacatggacctctccataggcctgcttgagtgtcctcacaacatattatccggcatcccccagagggagtgatccaaaagaaaggaatattgaagccatagttttttgtctttgttttttgagatggggtcctgctttgttgttcaggatagagtgctgtggtgcagtcatagttcatggtaacctcaaactccttggtttaagtgatcctcctgcctcagcctcccaactaattagggaggtgacagatgtgtgccaccatgcctggctaatctttaaaaamacaatttagagatggtggtctcattttgttgcacaggctggtctgaaactgctggcctcaagtgatcctcctgcctcagcctcccaaagcatagggattacaagcatgagccaccacacccaaactggaa

SEQ ID NO: 828994 - DNA, 611 bp, Homo sapiens
ctccctttgccaaatgagggcaaagacactgagtataggtaaacaatagtccatttcaggacccgtgcccaggagaacatgcctaccaaatgcaaagctmtagggcaccaagtgccggtttgtggacccacagtagcctgcaaggattaactctagctttaaaatcacacggcactgcagtttggcacaaaagcagccctctactccgagagagagtatgctatcaatatgtaaaaaggtattatccttgaatatgtgtatccttttgctggtacataaaccctgcctcaagatattcttcatgaaattccaaggaacatttctcagttcaatgaccctaagaaatgatgttgaattactctccacttacaaaatagaggaaaagcattttctttcagttcctgtaaatggaggcctagagacgtaaaggagtcagagtcagaagagtcaagttttagattctgctttgaactatatcgagatctccaaatcggagatgctagtctgggttatattcttgccgtcaaggacgcacagaactggtccaaattgaccactgtttcactacatggcaaaaaaaaaaaaaaaaaaaaaagagagaaaaacatgtt

SEQ ID NO: 828995 - DNA, 545 bp, Homo sapiens
tttttatgtacctgctcttcattttagatggcttattttcatgttaggaccaaagaagccagtcatcatcctggattacttgtgagtttaaagccaaactccatttttctctcctgacttatttggccttgcagaccagctcacattcacctttgtcatttctgcctgtgcataaatccaggtgggaacaccactgttctttaggaccatcacaatttcatgaatttaattcctaaaggcaagtgaccaaatccagactcatcttccagatgtccaaagttcccattttaacattaggtgcaattataagtcctccaattaaaccctaaggatcctatttgtttttataggcagcagtaacacaatgggcagaccccttcgctctgttattcccctgtctggaattactatcagggtaacaagttggcaattaaatccaaaaccacagttatgtaacctgtaaactatctatakatgtgcaatattgatgtgattgtgcccagaaactgccataaacttcaatggaaatgtatgtacaggacatc

SEQ ID NO: 828996 - DNA, 622 bp, Homo sapiens
tttatcaaatgcatacatagttaaagtataaaatacaatagaagttacttttactggccaggcacagtggctcgcgcctgtaatcccagcactttgggaggctgagacgggcggatcacgaggtcaggagattgagaccatcctggctaacatggtgaaaccacctctgtactaaaaatacaaaaaaagtagccgggcctggtggtgggcgcctgtagtcccagctactcaggaggctgaggcaggagaacggcgtgaacccggaaggcagagcttgccgtgagccgagatcgtgctactgcactccagcctgggcgactgagcgagactccatctcaaaaaaaaaaagaagttacttttactggcctcctaagtgatttgcctgattaagcaactctgtccgttctctcattatatcctatcgactgatgttcacagccacctcagtaccggatgccctctagcccgcctgtaaactcctgatccctcctgtggagatgtrtgtggaccaagcgtcagtggtgtttgtacccacatgtgctgtgccagttttgctagttcatataattattcaatgataattatgtaaaccaatgatatatgggtgtgtagaagagaactg

SEQ ID NO: 828997 - DNA, 639 bp, Homo sapiens
  misc_feature 1, 2, 3, 4, 5, 6, 7, 8, 9, 10, 11, 12, 13, 14, 15, 16, 17,18, 19, 20, 21, 22, 23, 24: n = A,T,C or G
nnnnnnnnnnnnnnnnnnnnnnnngaattcagtttgctagtatttagttgaggatttttgcatctgtgttcttcagggatgttggcctgtagttttcttttttcattgtktctttgccaggtttcagtatcagagggatgctggcttcatagagtgagttggagaagagtttctccttgatttttttggaataggttcagtagaattggtaccagctctttgtacatctggtagaatttggctgagaatccatctggcttgaggcttttttttcgttggtagaatctttattactgattcaactttggaagtctgttgatttattcagtgtttcagtttctttctgattcaattttgggagattgtatgtgaccaggaatttatccacttcctctaggctttctagtttgtgtgcataaaggtgttaataatactctctacggatcttttgtatttctgtgggattggttgtaatgacacccttgttatttctgattatgcttatttggaccttctctctgtttttctttgttaatctagctagcaatctaccaatcttgcttatcctttcagagaaccaacttttggtttcattgattctttgtgtggatttttgggtctcaatttcattaggtccac

SEQ ID NO: 828998 - DNA, 611 bp, Homo sapiens
gtttccctacccactctacctgttaagcttaggtgtgtctcctctgtgcttctatataacccttcactatagagttaggatgttttgttatggttatatatttactygtctttcttccaaagaagactatgagctcctttaaaggaagaggcaaatgtaataaattattacaatccctagcgcctagaagtgtaacagattcacaatacattcttattgactgtaagaaaccagtgcttaatccaactatataaaaaaaatgacccatgaatgaagataataatggcaatgattatgtaccaaacataaattggaggatgagagagatgaggagactaccgatttattctttactctggaaactttgacagaattaatgttcagtacatgctataatgttcgattattcaacagttcacacactggagtcaggaagttgcccaacactgaattttcccttctccatcagcctgcctttactccattttatatgtcaggtttccttcctctaaaaattcttagggtttaccacttcagcatgcagatttaattactggtagtgctgtctaaggcaagcagtcctatcagtgctaaatctgtttaaaaaaagt

SEQ ID NO: 828999 - DNA, 643 bp, Homo sapiens
ttcatatgcttagaaggtaatctaccttgatgatcttctagcaaaatctgccagyagaggagagttaattgcatgggggaaaatgaacatttatttgggatgagactttggcaaaccacacagtgcagctgttgcatcacatattttctgtcaacttgacgactggtccatatatgcctagtgttaaaaatgcatcatgtcattctgtgccttcttttacattaactccagatgctctgggagatacaacgacctggcccacacagtagtttaggtttagaaatatttatttaggtcttgaaatactgacttctcaatagaataaagagcagagagggaaattttgaagttacaaaactgagatttattcattcttataaggctgtaagtgggaatatgaggattgttatagggtgcttatcaggataggaaattattatttatcattagagaatgaatagcaataagacctgttggtactattgagtaatcctgtggtgaacaactcataaatgcattggaagtaatcacatcctaaacatctaaagttaataacaacctgttataagaaattattactgcagtttagttcacctctttatgagactgaccaggcctataaaaatgatttacagaaacttat

SEQ ID NO: 829000 - DNA, 368 bp, Homo sapiens; identical to SEQ ID NO: 827089

SEQ ID NO: 829001 - DNA, 524 bp, Homo sapiens
cgagttccagcagcagcatctttcaggacgttattcacagtgcagctgctagaaactstatttcattgatctgattcggattcctcagatatgttgtttccacaaacttggacttagccagttaggtcatcttcccaataaaaaaactctcccttgaaacaagctaactccgttgtattcctacagagtatctggagaagtgttcaaatgaactgagattatggtgagacaagtaaggttcctcgggggcaaaatttagggaactgcacgctctcactgcagctccagcattgaataccagaaagagaatactcaagttcaaaggccttgttgtagacatgaactggtgttatttctgaactatttgtggcaacgtacaggtgtgccacatgcctcgggactaggctgtagcaatccacctaaatcccatgaggatttgcacactggagaggatctttgattattaatcttgcttcagggattggatttggaacttcaaaagcactttcctcccacagaaaatc

SEQ ID NO: 829002 - DNA, 530 bp, Homo sapiens
ccaatttccaattcaaaatattctgatgcaggatgtaaacacattctttattgatatgcacatmgtgattctgatttggaatattaagggtcccattttgaaaaccatggtctagtttatttccatcttttgagagatgaaaaaagagaaactcacagaaattaatacattttcctgaggtcactcagataattaactatgacagaggtatgagcagaattcaggttccaaaatattaataggctagtgactcttatcaattaaatattattatccgagttggtgtgcaagatggatctagtggaatttatcaacttgtctttcttctccctcgggattcttttccctgagaaaggcagtatatctccagatggcagtggcaactatgaaataaagtcatgaattttttctttggcccattttcttcccaattgactatgatgttttggcatgttcttaacacaaaatctgttgaatactatcaagggagccagaaaattagctgcaaagagccttatgccattttatag

SEQ ID NO: 829003 - DNA, 644 bp, Homo sapiens
tttctttctgatcttttgtctttcttgacttcaagtttgtctttgcacttcaagttatataagggaaaataaaatttcagataaggataaatgtttagatatatcagcagtactctgccttatcaaacagtttaaaaagagataaaggactttctattcagataaaatgagtagataacatttataattccaagaaaataattatagttatcattcataaaaatataaaaagtaagttctattttgagaaatctacatttaacagctttgtgttgtttccttgaactaaccatctggtcctccaaaatcctacttaattaggaaaattttaaaaactgttgagaactttctttctattcttttgagaaaaaattgaatggagtagaataaaattaccctggaagcttaggaaatcctgtgaactaagttctgattgctgtcttttaacctttttaaaacactttcagtgttaaaagaaacatttcttgtttatttgaattttcattctgacatcatacactaattttaaacatttatttcccaactttgttaaaatttactattcrgttataataattgaaaaaacagatgttaaaagatttacagtcaaaagtgtattgattgcatgcatatattcctagagt

SEQ ID NO: 829004 - DNA, 634 bp, Homo sapiens
ataactattgtatgccttcaatatagatatttttaaacatcatattttttctataaatttaaaacctgtcaaagtttaatgcaatcagaatacatatttttctttctcytttgtctttttgtcttttcctctttcttccactggattcttaaattctgagacattgaagtaaattatatttttttaagacttaggaatcaacattttattcaaaatattggtgaggtcttctgagaaaattatgaattttaataaagacagaaaagttagcctgtcacaataacagtgcaaggccattgtccactccaagtcaatctgaatgtggtgacatcaaaaatgacagttatcgagttggttaagagagatgaacatggaatggaggctgtaaagttcaatgagattaagttgaaatttgcttagtctgtcagtcagtgtcattcatgcacaactactgcatacagagaattgtactatatacttcctagagaaaactcccagaaggtctgtatatatgttttaggaaatgttacatttatcctcttcgcctaaatgtcaagaacaaagtaatgtttttggaaagtatgcattaatctacctatacatttttaaaacataacctttaattaattatgtg

SEQ ID NO: 829005 - DNA, 418 bp, Homo sapiens
atatttatcaagaacgttggcatcgaactgtagcaccactcaccagtttaccatgcyatttggacctgacactcagcaattatttttctagcatcaaatgtaacactaatcctcaacaatgattcatctagcaaatctgactctgcaagcttctacccccaccccaggttaatatcctttggaattattttgagatacttatcgctgaggagtgtccacacctgctagatattccctaagtcattaaaaggattgggaatatagcatttaacaggagatcaagctgcagtgagttataatatgattgcactccagcactccagcttgacaacagcataagaccctgttgttgttgttgtttttaaagcaatcaactctatttccatcaggtccattgagtttatattatatattgatg

SEQ ID NO: 829006 - DNA, 438 bp, Homo sapiens
tgcagtggcgccattttggctcactgcaacctctgcctccygggttcaggtgattcttgtgcttcagcctcctgggtaggtgggacaacagttgtgcaccaccatatccagctaattcttttttttttttttttgtatttttggtaaacatggggtttcaccatattgactaggctggtctcaaactcctggcctgtagcgatccaccccccttggcctcccaaagtgttgggattacaggtgttagccactatgctgggcatcatgtagttatttatagcaattccagaacagactaatacagtgtatatgccctgtgattcaaaaagtctacttctaggaatttatactacagtataccagtataaaaacaggcttatgtattcaaatgtcaaatgctatgatttttgtaacagaaaagtattttaaactgcctga

SEQ ID NO: 829007 - DNA, 437 bp, Homo sapiens
aatgactgttaaaccttcatccgagtctgactsccatgaacgaactactcaggcagatgcaaacaaccaaccagccttagagacaaacggaccagcgaggagaggagagttgtgtggagactggagaatgtgtgttgccagcctgtttctaaaaatggaatagaagaatggtgagtatccttgaggcagagagaaagaaagaagctctcccatgaatgctgctgtaagggaagaggcatctgcaacttgcctttctaacctacccagacttgtgttttacaactggcctgatacttgtacaggtaactggccaagagaaaaagtgatcatttgggtctggtgcttcttccatgttttttttttttttcttaaaagaaacattataaagctgaatgtctgaaatgattttggattcacacctactgtctatggaacag

SEQ ID NO: 829008 - DNA, 635 bp, Homo sapiens
aagttatatatatgtacacacacacatatataatgtaatatatatgtggttttgtaatatatacatttatgaaggaaatgtgatatatatacacacacatacatataaattccttcatawatacgaaagtaacacgccaccctgcaacagccatttggctgctttcaagtactgaagactcaaaggagtatttgatttgcttcaagctgaaatataactacatgagctctctgctctctctctcttcctctctcctctattaaataaggaaaaaagaaagtgttttctcaccaattctaacaactggccttacagatgggattcatgccccacaatgaataaattccagggtggcaacatgcagattaattaggcaggaaatcatctccctgcagcagcccgctcctcattctctaacaagactaaaaatgatttgtgccacctgtttatggctccaggcatttgcccttggtcctccaatgactctattaaaaactttttgattaacttggtccaacggtcagctttttgtttgtttgtttctttggagtaaataaatagagattgtgcatccttgtgcatagagagccatgtgggcgaatcagcagcaagtagttaagcttgaaataccagga

SEQ ID NO: 829009 - DNA, 509 bp, Homo sapiens
attgctctagctaggacttcctgtctttggtttaccctttgcacagttttctgcttcctattctctactttgtcttctktgttaagcgtagatagttgttggggctggaaaactagacttgggagccaaggcagtgtctaagttgcataaagaaaagacacagacatcctggccagcacggtgaaaccccgtctctactaaaaatacaaaaaaaaatcagctgggcatagtggtgggcgcctgtagtcccagatactcgggaggcttaggcaggagaatggcgtgaacccgggaggcagagcttgccgtgagccgagatcacgccactgcactccagcctgggcaactaagcgagactccatctcaaaaaaaaaaaaaaaaaaaagaaagaaaaagaaaacacacagatatctaatgagataaatctataaagacaataggaaaaagctgaggatgataataatggttgctgttgattcaggatccaatatattcaaagagctttctat

SEQ ID NO: 829010 - DNA, 519 bp, Homo sapiens
ccgtgcccagagtgaacggatggatgaggccgtccccagagtgaacggatggatgaggccgtccccagagkgaacggatggatgaggccgtccccagagggaacggatggatgaggccgtccccagagggaacggatggatgaggccgtccccagagtgaatggatgagcacccagcctgagcccgggaaggtgctgagggttagcacaggccgcctgctgctgcaggagtgagaggggcccactcagggaaagaggggttcagggggagcagccaggtgtgtacagatggctgtagccatgtggaggcgcgcgtggggaccggcaggcaggcagggagttgggctttcttctgggagcagtagggagccacggttgaccgtggagcaggggagagacctggtttgatcttggtcttgacttccaagccccttggtccctccaaccttggaggctgctggaaggagagggcatctcatttaccatcctggctgcttcatggggatttgggagataaaaa

SEQ ID NO: 829011 - DNA, 519 bp, Homo sapiens
ccgtgcccagagtgaacggatggatgaggccgtccccagagtgaacggatggatgaggccgtccccagagtgaacggatggatgaggccgtccccagagggaacggatggatgaggccgtccccagagkgaacggatggatgaggccgtccccagagtgaatggatgagcacccagcctgagcccgggaaggtgctgagggttagcacaggccgcctgctgctgcaggagtgagaggggcccactcagggaaagaggggttcagggggagcagccaggtgtgtacagatggctgtagccatgtggaggcgcgcgtggggaccggcaggcaggcagggagttgggctttcttctgggagcagtagggagccacggttgaccgtggagcaggggagagacctggtttgatcttggtcttgacttccaagccccttggtccctccaaccttggaggctgctggaaggagagggcatctcatttaccatcctggctgcttcatggggatttgggagataaaaa

SEQ ID NO: 829012 - DNA, 618 bp, Homo sapiens
aacatggtgaaactcccgtctctactaaaaatacaaaaaaattatctgggcatagtggtgggygcctgtggtcccagctactcaggaggctgaggcaggagaatcacttgaacctgggagatgaagtctgcagtgagccgagatcacaacactgcactccaggctgggtgacagaatgagactgtctcaaaaaaaataaaaataaaataaaaaataaaaaaatcccacgtccagccacaggcccctcctcacagtgctccaaactcagggagccccggtctctgcctgatgcacctgctcattccagcctcagctctgtgttcaccacccccaggaacggccccgccccccacctagcccagtcagccttaccaggaagctctggaaaccaaccggccccagccggcccatttacttctttgctccttaatcactagctcactaggcccacagaacaagacagggtccgccccccgcccaccgccgccccccggtcctggcctgtgaccggcccacagcggcgctcactgcctgtttgttgaatgaagaactaaacttctgttgacacacctcccaagggctggttcatctgtttcccacgccactcaacaagaccac

SEQ ID NO: 829013 - DNA, 536 bp, Homo sapiens
cagtctgaggagggctctctggatccatccaggcacgggagggacttgttctggaaggaggtgggcatttgcccatccatgaagcccctcatctgtgctcataggtgtgatcacagcacgaaaagaagacaaagaacaaagaccaccagatctagggatgatgaggttcactatgccattgtggtggcttttgtaaactgtgttaggtgcgcaagtgagttttttcattttcctcaggccctacttccggaagaagaggaggaaatgaaatccacagaaatcaatctgaaaacatgggctgttctcctatcactcctcatatacctctggggcacaaaggaagcataaaaggctcacctccttacaccagggaactaaccgtccagctgagtgagcatggtgcctgcctgggcaatgaatgctgcttcaagacagcacaaaagtggaggccacggtacctakccagcattatggctgaaggatttcagcgaagtgagaggtttctgtgggctgagcacagcttctagagaggaagc

SEQ ID NO: 829014 - DNA, 631 bp, Homo sapiens
tggacattaattgtgattatctatatttccctgtctctccaggtttgggggtaactgtgctgtgacctacagtttctgatgtgcataataaaagtcgtgggttttcagtttgttgagctcctttcttgttttatgaatgggagtggtgactttaaaatgattcacatgttggaggtgaaaccagcagtcttggatgttgcattcataactgagcaagctcactgggattggaaagcagattctgaagatgaaacctagttgttggcctttttaaaaagcaatgttaggctagattaatcatttgcaaatggtattctgccattttatcttagttcatactatattttatgttttttgttggcaataacatttctgaaataatttttataatatgtaaaatttatatacagaagagaaataaatgaaatcttctcttggtggtttttagggtcagaaaattctattaggtcttgtattaatctgttccatgagagaaatgtctcwtctgctaccctgaattttaaaccatgctacataatgtaatttaacccctggtttttttctgaaacatgaagccatcgtaaaataagattcttccattggaaaacattaaacataacaactcattttc

SEQ ID NO: 829015 - DNA, 552 bp, Homo sapiens
ctttgcagagaaaggcccttctaaatgtttcctgttttcctttttttagtttggcttttttttttttttttttgcttttgcttcattctgtgctgtttgcggtacacctcaccttcagtacaacagtgaaatgagatgctgctccacatgaatgccattgattggccatctggttccctgcagaagtgtttgcttttcagttgcttccccagagggtcaaaagctcattctagacattgattgaccttagcatcctccacccagcccatcagcactcaccgtgaaactgctatgcagtcgcgattcacaggaccctcccataaatacaccacctaattaaaaaacatccttgaacatcatcagctggttcctcaatttatagaatacattatggatggttgctcatggccaactaacacacattctggagaagggtgaatcaggctcattttccttgtktaatccccgaaggagcgcgggcatgtaaattctcaagccttattctctatctgtgaaatggagatatcattcatattctataaatatgtgttt

SEQ ID NO: 829016 - DNA, 671 bp, Homo sapiens
aagtggatgtgtaacctctccatgccacacaataggactctctgccagtgtaaacaagaaggaggattttataaacaatgattttcagaaaatactgttaagtaaaaacatctaccttttgtgtaaagaaggaatagaaaataaaaaccaatacatgtgtctgcttatctttactagaaaaaaaatatgcacaggaaaataagtcaaccaaaatgaaattggttacttggaaaaggtgaggctggagtgggcaggtggaatatgagagagagtgagacagttttatactttcttgaataaattttgacttttggaagcacaaaaaattaataaagatgggagggggataaaaacattataaaactgaatataaaattagcagactatgtattttatatgaatgctataacaacactgaagggaatcaacctaaacaaaactaatcagtataacttacgaacacagtgtttcactatccactcacaatctttaatagggttaataggtttgtttcatgttgctgtttttgttctaatcttctgagaacattttggagtattacagaattgaacagaggagtgaacgttgttgttatcattgggagtcgggttttcactatggaaggaagaacacacygatatggacatgggaaagaaccctgtggtaatgca

SEQ ID NO: 829017 - DNA, 492 bp, Homo sapiens
gactaggagcgctaagtgtaatttgtagagtaaattaatgaatggacagatgacaaatggctttatcctttcacaagaaagatggagaaacaggcctaaaagaatgaatccaacttgccgaagaccatacccctttctcagacactcagactcctccatgcatccattcagacattctcttacagagtgtcttagtctgttttggttgttaacccaaaccaaaatactgagtggcataaacacaagaaatttatttatcacagttctgaaggttagaaatccaaaatcaaggtgaccgccagttcagttactggtaagggctctatttttgaattgcagacagttagctactcactgtgtccttacacggaaagaaagaaagagcaagagaagaagagaatragagacagaaagagagagagagagagagattgagtctcttctcataaggacactaacgtatcaaatcagagcccccagccttttgaactc

SEQ ID NO: 829018 - DNA, 472 bp, Homo sapiens
tgactacaaacttaaatgtcttttcaatggaagaggtgtttttcaataaaattataatatacccacaaaagtcaatattttgcatactctggagttatgtgatagatttatttgtattgacatggactattttgggaaatagttttagcaaaacaaagaaaggtacaaactttcagttataagatgaataagttctggagacctaatgtacagcaaggtgactacagttaacaataatattgtgtatgcttgaaatttgctgagacattgaatctgctggcaccttggtcatggatttcccagcctccagaaaagtgcaggagtggataaaatgttattaatgtaagctaaaatatcttatatatatagcagaatattatttttgctatattagtcaatgagtccctctccactatatttctcttttattcaatttaaamtggacattgacacccaagacctcagggctgtt

SEQ ID NO: 829019 - DNA, 617 bp, Homo sapiens
atgctgagcattcctgcttctcctgaggcctgatgtcaattacctcatgaaacagatagatttcctacttcagcatttgttggagtcttaaaaatttactttatttatgtttcatggacacataataattgtacaccttcatgggggtaaacagggaaattttaatacatatgttttacagtgatcagatcagggtgatttgcatctccatcatctcaaatacttattatttccttgtcaatatcctccctatagctatttaaaactatatattattgttaactgtagtcatcctacagtggtatagaacactagaaattattcctcccgtctagctgtaattttgtattctttaacaaatctctccctatctctccctttctccaatccttcccagcctctaggatcttctgttctaccttttacttctatgagatcagcatttttaagcttccacgaataagtgagaacatgaggcgtttaacttcgtgttcctggmtcgttctactgagcacggtgtcctccagttccaaccattttgccatgaatgacaggatttcattctttttatggctgaatagtattccattgtgtatacacaaattttaaagtgtatg

SEQ ID NO: 829020 - DNA, 590 bp, Homo sapiens
ataccccactaaataccactgaagtatcaaaacaaatactttycagcaaacagtgtaagatgcaaaccatcagcaagagaaagtgtttatctaaaacagtggaagatggagagtggacaaaaactgttaaagtgtaagatggaacagaaacaaaagacaccacagtctggagaacagtgaagatgccaagagggtcctctttggaatcccacaggggcccctgattccacattggcaaatatagtggtagatgggagagaaaagtgaggttgaatgcaagaaaactgattaacattttgtgtatggaatattcatctccatttccctacctccccccactgagtagaagttagaatgctttgtatttacctcagtggaaaacaaagcaaaggaatcttctctaaataaatttagctaacctccaaatgccaagctttccagtgtcgttgctgatgctggcatcttgagaagaaactgaggtggagcaggaattctgcaatcactgtgacccgacgttatacattcagcatggtggtgtacaaagccagaaaggacctagatccttgataactctcttgaatagccctgga

SEQ ID NO: 829021 - DNA, 580 bp, Homo sapiens
attttggcatgcatgagagggcaggggagtcctggagccaatctttcatgaatatcgggggtcaactgtrtgtgtgtgtgtaaacatatatatatatatatagatagatagatatatttcattcgtattatatattttatacaaataaaaaggtgtatatatattatatgaataaaaatggttttaaagagcatttgctaagaatttcagtattgtacttcggtggtggaattagagaccaaagaaagtttcttttgtatgctttatttttgtttttgtttcttgcaatgtaaataaaagaaaatcactcaaattgtgaactatttcttttacacaagaggtcctcagccttacattgactgtcaatttactttatattcagttgtttacatcattaagtaatcagatattttaagacttctgtattagttcattctcacactgctgtaaagaaatacctgagactgggcaatttatttttaaaaagaggtttaactggctcacagttcagcaggctttacaggaagcagggctggggaggcctcagtaaacttacaaccatagtagaaggcaaaaggga

SEQ ID NO: 829022 - DNA, 580 bp, Homo sapiens
attttggcatgcatgagagggcaggggagtcctggagccaatctttcatgaatatcgggggtcaactgtgtgtgtgtgtgtaaacatatatatatatakatagatagatagatatatttcattcgtattatatattttatacaaataaaaaggtgtatatatattatatgaataaaaatggttttaaagagcatttgctaagaatttcagtattgtacttcggtggtggaattagagaccaaagaaagtttcttttgtatgctttatttttgtttttgtttcttgcaatgtaaataaaagaaaatcactcaaattgtgaactatttcttttacacaagaggtcctcagccttacattgactgtcaatttactttatattcagttgtttacatcattaagtaatcagatattttaagacttctgtattagttcattctcacactgctgtaaagaaatacctgagactgggcaatttatttttaaaaagaggtttaactggctcacagttcagcaggctttacaggaagcagggctggggaggcctcagtaaacttacaaccatagtagaaggcaaaaggga

SEQ ID NO: 829023 - DNA, 580 bp, Homo sapiens
gttgtgaaattttgttactctaaccatatgctaataattcaaaatctgttctttatgggtgtccagttatggttgawtatttcagttatctagaaagagtcttcttcagttgcatgatttgtttattcagtatttcacaggttaatgtttatccaattttgttttgtaatattttatattcctgtattttcctgttaggataggctgtcttacatcatttaattgtgtttttagtttctgcttatatgttataattttttatgactatatttaactgtgtacactttaaaagagtgtagaaaaaaagtcaaatatgaatcaaccatatgtgtattgcaaacataattctctgttcgtttgactgtataaacattactcatgctttatttatgacttctgtatttatttaattagttggtggtcaattatttttttaatcctctctgggtgagtagttgtggaaattgccctaatttccacatctatgtattaatgaatctatattacgtttgcgtgaggaaaacacctctgtgatgcgagggtaatttttttttttttttttttttttgaccacagaagt

SEQ ID NO: 829024 - DNA, 522 bp, Homo sapiens
cctaggagattgggggctcctgcctgaactctgcccacagggaggcagagcatatttctgccttgtarcatatttctgcctccatcaccagatgatgtgactctcctttctgcctgcaccttgcccacaggaaagattctgacatatcactgggcctagtaatcagtaatcaggtgatgtgtctctcctgccatggctttacccacagggagtgtggtgacatatcactgagctcaatattcaggtgatttgactctgctgcttgtactctgatttcaggaggggattgtaacatatcccgggtgagcacacaagtgatgggactcccttcctagcctccgacctcataaaagattgttacatatccctggcccagccttaggtatgtgactctcctacctggtccctgccatcaggggagatattgacagatctctggccaagcatccaggtgatgcgactctcctgctcactccctacccacaggagagattgaaacatatatcttggccagctcacagg

SEQ ID NO: 829025 - DNA, 583 bp, Homo sapiens
tgttgtctatgttctgtttttgttcattaagcacttttttctaattacattttaatgtaattagaatgtccacctttacaatacacaaatacagtaacggtaactcgcactaaaacaaagcatacttctgatagccattatttttctctttgggacaaatttaaagtttttcttttgtcacaaaaacaggaatgtacttatacaaaggctcaaaataggccatctttttaaacaaaaaggcaatgattcacaaaagactatgaatagaacatgtaactaattgatacaaatctaataggatttgttaaaatcagccacatccaatacatctgaagtgtacttgtataaaatatcacgtgaagaaaagaagactttatcaatatcttaaaaagtgggtttgttcatagtctgacaagttaccattaaaagtgtttcctgtgacataaggaaatgcaatattatttttcttgaaccctytcagcgcaagactttccactcaataaaatcgcagaggatctgaaactgagaaaatatacttgattactaacaacttgtgaaacttaatactttttttttttttttt

SEQ ID NO: 829026 - DNA, 481 bp, Homo sapiens
ataggcaataatgaacaaataacaaagatgagaggtgcaaaggccaaggaggaaactttaaaaatgtgatgtgggaagttcgcttcaatgaaattggttctggaaratcctagatttacttcttttgctgccacagatggacatttcctaccctatgcttattatgctcctaaatcttctaaggctcctcctgtccctccactaacattccagggcattcacagtgacagccgaagttctcctcttctttctgttattcccttgaaggccttgtggtctgagtgcttttccattgttttgggggatctggggaaatctgcacattttgcgagacttctatattaagctattttgtaaaaatctgttcctcatgtcagaagtttgtgagagtaaaagtgcaggcattggggtttggttcacatatttcagaaacaccaaggacaaatgtttctgcttcataattttcagtcctatgatttca

SEQ ID NO: 829027 - DNA, 606 bp, Homo sapiens
ggaggcagaggcatgagcatggcttgaactcaggaggtggaggttgcagtgagcagagatcacaccactgcactccagcttgggcaacacggggagactctgtctcaaacaaacaaacaaacaaacaaasaaacagaaatacactcctgggtggagatctaagatgctaacgagacatgcaacatatgaacaagcatgtatagtcactgcgtatgtgcacccagaatatcactcataacatgcttataagcaactcctcttccccttttcttattaataataatgtaaaactcccgtaagggggtttctccagcgacaatccacgctgtctcactcttatgagcagtctgccctggagtatctctctcagggtgtactgtattctgcacttaactttcaaatattttcttttccaataaattatgctgtactttttttccttgtgtctcttgtttaaattcttaaaaactaagaagacaagaacagaggtatcacatcagttgtcaacacagcaataagtcagcctccttcttgtaagcatagcccatgtagaaaaggagagtcgcatcacctaggtgctggatccagagatatgtcacaacttat

SEQ ID NO: 829028 - DNA, 486 bp, Homo sapiens
agcacattgagggtgtaactctattctccttccttggcactgcccacagtgagcattttgacatatcgctaggccttgcacccggagatgtgagtctcctcttctgccttggcgctgcccacaggaagcgttgttatatatagcttggcctcacatccaggttatgtgactctccggcttgtgcactgcccatatgggacactgtgttatattgctgggtccactactcaggcgatgtagccaaactgcctgggccctgccttacaggggcattgtgacatatctctgtgctcatcagcctggtaatgtgattctcttctcctgcctggtccctttacacagaagggattgtgacacgttgctgggcttagcaccaagttgatgatgtgaatcttctgcctggatcgagttcacagaaggcatggtgacatrcctctgggtccatcatctatttgatgcaactctcctctcttacctgagcattgc

SEQ ID NO: 829029 - DNA, 526 bp, Homo sapiens
acatatccctgacaatgatccaggtgatgagaccctcctgcttgctgactactcaaatgtgagattgtcacatatattttggcctagcatgtaggtgtgatgatgacattcataccttaaaccaaccaataggagagatactttgtctcatatccaggctttacaaaatgtgcaaaattatgggtcttctcttactatgaaggtcagagaaaataagcactcttgcatatcctgtaaagcactcagatggtacagtgtcatcacagggcccagaacacaggtgagattgtgttctctgtgtgcacacccaccaatcatcagaattgtcattcctacacaggaacagaggtgattagggaggtctaaacctcatacctgaatgccgtccacagcgggaattgtaactatcayatgtgaacatccagtcacagtggggatagtgacttatttctgaacccagtttacagccaagtaaagatcctcttatctggatccagccagctggagagatgttgactctcatacc

SEQ ID NO: 829030 - DNA, 526 bp, Homo sapiens
acatatccctgacaatgatccaggtgatgagaccctcctgcttgctgactactcaaatgtgagattgtcacatatattttggcctagcatgtaggtgtgatgatgacattcataccttaaaccaaccaataggagagatactttgtctcatatccaggctttacaaaatgtgcaaaattatgggtcttctcttactatgaaggtcagagaaaataagcactcttgcatatcctgtaaagcactcagatggtacagtgtcatcacagggcccagaacacaggtgagattgtgttctctgtgtgcacacccaccaatcatcagaattgtcattcctacacaggaacagaggtgattagggaggtctaaacctcatacctgaatgccgtccacagcgggaattgtaactatcacwtgtgaacatccagtcacagtggggatagtgacttatttctgaacccagtttacagccaagtaaagatcctcttatctggatccagccagctggagagatgttgactctcatacc

SEQ ID NO: 829031 - DNA, 546 bp, Homo sapiens
tctctactggaatgttcaatttttgtagaaaaaccacgtgcgttctttgttatgtggattccagggtgcgttttaggttttcgrgcattgcaaatggtgacctttttttcaatgtattggtcacttttcattaataacttgttcctatgaagcacttcacagtatttttgaaatattaacatttttgtggtacatttgccatatatgtttctttactccatttttcagtaaagataatttatttggctgccagtgtctcatcatcgataagaccagtggagggtttagcccagctgtttgtggattgtttgaagagagctgtgtaaatctgtagtccaggggaaattctcctgttacttcaaaacttgaaagagcaataccttatggtaaggtacgtgattctcttacaagactatgaagccagatgtctgtactttccagtgcccaaattgaatgaataatagagagaacagcctaatacagcaagggcggggctgggcgtggtgaagctcctgcttctcctcccgggcatgctgcctcccagca

SEQ ID NO: 829032 - DNA, 625 bp, Homo sapiens
atgagccctcctagcaccaccagccacagtctccacctccggggacacgagctgggatctgagtggcgcaggtactacgttctagagasgccgtacccaggaccgcccatggcacgcagaggaaaactgaaacaacgatccttccagagacaaagcacagccccagatggccacaggaactggccgcccccaggagctgctgagcacaaacgccactggagagagggcttggtggctgcaccgaagagcagaacagaggaactgaacagccacagccaccgcagaactgggggatctggacagagctctcgctgtgtgctaagaaaggagcaagagacagagggcagggagaaaagctgcgagacgtgggcaagtcccagaagagagtcggggaggtgagagaaggaatatttcaaaaaacaaaattacatgaaagattccagcatggatgggttcctagaggccttatcaatacatatataagaaaaagctccatagctagacccacgataatgaaacctaagaacatcaaagacaaagagaaagttcaaaagctcccagagggaaagagcagatcagatcagtgtaaacagggaggcagcaggcagacatccaagtcccagac

SEQ ID NO: 829033 - DNA, 594 bp, Homo sapiens
cgcccatggtcacacaggagggagtgcagggtccagttctccctcccccacccaggtccgcactacaggctctgatccacgccctcccttgaggacaaaccctgagccacgctgggtcctcccgcaggccctgaaatagagcttcattgccacatcagacaccgggagacgcgaggaggccgtgagccaattccagatgacttgtcaaggctgcgccagccacagagtcagggaagcctctggctgcctctgtaatataagaaccaggactgaaggcccctctgggagggcactagacgagggcctcggcagctccgcaggcaggtggggcccaggccaggcgggacagaaacccaaatgtggcgatgcaaactggacagaaagaggcctctctgggctgcggctccctcactcggggcctgacggtaccagggggagttaatctctcacacacaagctggcgccagacccctaactgcaggtgtccctaaggagaggtgcctggcaagkcctctcctgggagtggacgctctcctcctgagcacggtgtggaagcagggccgtgcccagcatgggtgcgtgaggactggatcc

SEQ ID NO: 829034 - DNA, 602 bp, Homo sapiens
acttcacaatgacaaaatggttaattcaacagaaagttataaaaatcctaactttgcacctaataattgtctaaaaattcataaagcaaaagttgattaaaagacagagaaaaatagacaattccccaatcatagctggagattttaacacctctatctcagtaattatagaacaaagagacaaaaagtcagtaaggatataaaagattggaacaacactatcaacaaacgatctaattgacattttcagaatatcttactatacaacttcaaaaatacacatttttttcaagtgcagatggaatgttcaccaaaattaaccatattctgcaccataaaatgtctcaataaatttcaaaacatcaaaatcttacaaagtgtgtcttggtgacaacaaaattaagttacaaatcaataacactaatgtatctagaaaattcctccaaagttttggaaaataaacaatatacttctaaataayttatatggcaagaaatcagcagagaaattagaaaaaattttaactgaatgataatgaaaaccaaaaaaatcaaattttatgggatacagttaaatcagtttctagaaagaaacatataact

SEQ ID NO: 829035 - DNA, 597 bp, Homo sapiens
ggattatttcatagagcatattattgatatttctgaagatatgggcttagtaggagcttttatcttctactgttcacagactgattgagtcagatccmgggttggactggacagcaaagcgtggttctggccttcctttgcctgtggtttcctagctaggcctgctgatcgtgccctgcactgcttctcagtagcaagtgtatttatgtaggagcggcacctgcaggaactgtttgcaactgggaagggtacccagaagcaaggagggaagtatagaggagctttggtagcaatcatctcccaaaaaataaagaagatgaactttggagttagagatgcataggttcaaatgttgcctgtgccactttgaagcagtatgatgttgagcaagttacttcccttcactgagactcaatttcctcatctgtaaaatataaatagtaatatttaccagtcaggttgttaagagggttaaacatgacagtatatatgcaatatgtcttacgtaagtcagagtaggctctctgctgtaacaaagaactccaaatctcagtggtttaacttaggttatgatgtggtttgactgtgtccccactc

SEQ ID NO: 829036 - DNA, 597 bp, Homo sapiens
ggattatttcatagagcatattattgatatttctgaagatatgggcttagtaggagcttttatcttctactgttcacagactgattgagtcagatccagggttggactggacagcaaagcgtggttctggccttcctttgcctgtggtttcctagctaggcctgctgatcgtgccctgcactgcttctcagtagcaagtgtatttatgtaggagcggcacctgcaggaactgtttgcaactgggaagggtacccagaagcaaggagggaagtatagaggagctttggtagcaatcatctcccaaaaaataaagaagatgaactttggagttagagatgcataggttcaaatgttgcctgtgccactttgaagcagtatgatgttgagcaagttacttcccttcactgagactcaatttcctcatctgtaaaatataaatagtaatatttaccagtcaggttgttaagagggttaaacatgacartatatatgcaatatgtcttacgtaagtcagagtaggctctctgctgtaacaaagaactccaaatctcagtggtttaacttaggttatgatgtggtttgactgtgtccccactc

SEQ ID NO: 829037 - DNA, 613 bp, Homo sapiens
tcatgggggcaggcctttcctgtgctgttctggtggtgacgaatgagtctcacgggatctgatgattatataagggggagtttccctgcacaagctctcatctggtctgctgccatgtgaggtgtgcctttyaccttctgccatgattgtgaagcctccccaccacatggaacggtaagtccattaaatgtcttttgtaaacttcccagtcttgggtatgtctgtatcagcagtgtgaaacagactaatacaggttatttcctgctggaagaaagaggagggctttgcttcatgcagacattcagggacccagatatctttcatctagtggccttgtcattttctaaggccttggaaccctcattgaatcatctgtctctggctggcaggagacgggagagagtgaacatggattgtgcagaaggccaggctggaggtagggcacattgcttccactcagattacattggctagaactcatagccatacctactttgtgagtttttttttttttttttttttttgagacagggtcttgttctgttgtccaggctctagtgcagtggtgtggttgtccaggctctagtgcaatggtgtgatcaggcttgaccac

SEQ ID NO: 829038 - DNA, 556 bp, Homo sapiens
tctggtgctgcccgattcctgaatcatttaaagctcaaataaactcatgacattttaatatgcatamatttatcttttaacagaacttggccaagattttcaaagaacggcgaggagttcagagtctctagagtgccgttgtaaagaggggaagggtagtggctgaggcctgagagctgagggagcagaggctgcagggtggtacagacaactgtgatgactttggatgttactcaggttgaggcaggaaagtactgacatgatggctttgagcagaggtgggacaccatctaacatattttcaaaggattaccctagcttgtgtgataagaggattgaagcaggcagaccagtgaggagctgttgcactgctcttgagaagagaggggctccaatcaagatggccatagtgaagtgtggtggaggatgcttaggtctccttcaggaattaaacatttattcctccagcagccaggaagctccagctaatggcctttggctgtcagccctcttcaagtattgcctctgctaaagacagttgtcttgcccagtgaca

SEQ ID NO: 829039 - DNA, 543 bp, Homo sapiens
acccccagcccaacctctgatttcctgaaggtgactacgaatcacccaataccagagctagcaaggacttaaaggtsagccaacccattgcctcatttcctggcaagaatacacacaaaaccttccaagaccaataagtctcctctcacttctacctgagagcgctgcccaccgtcaagtccggtcactcacttggttacatttagatgattagcagttaattgaaggccccttctctgggccaaggaagagaaggttaatggaaatttgcactgcagttactgtaatttaccatactgatgggaactctatattgatttttttttacctgtcttgggtaaaaatactattttagacaatctattattttggctgaatatattcaggttaataggagaaaattggaataacattaattcccacctgaaatataaattcagaaagaaatatattacagtgcttttcaaacagaaaatgtgaccctgcattgtttttagctctccgagaaggaatacacagctcacacacagtatgttaaaggtt

SEQ ID NO: 829040 - DNA, 529 bp, Homo sapiens
tatgcactggtttgggattctctgtttattaagtgtcactaggtggtgagaaatccactgggcattagacatctttttaaattaattgccaagaagcattaagtgtctattaacaagcatcttcttgcccctcaatattctactttgtggtcataacaactaaacacataaggacaatgttcacatgccaaagagaacaggcactgggcatgctggttcctacatgtgaatcaatttgagccagtacctatagccaaagtactgttcaaaaaagttttaagtctactttgacattctttctctaatactgagggatttgtatttccttaaacttttaaatgataaatgttatcagtatcagggatttcttaggtagaaaaattaacaagtattatcacagcttcagatatattcaatagaagagacagtaacatacttttgccttcatggagcttaaaaattacccagaaatgtaagaccagcaggtrttaaacagctacaaaaacaataatgtgataaaactctgtgg

SEQ ID NO: 829041 - DNA, 600 bp, Homo sapiens
cccacctctaccacttactagagatacatgaagacaatgaagataataagtctattcatggactactttgacaattatataaaaattacgcctgtagagtggaatccatacatattacggctaaggaatcagaagctctgtgacctggggcaagtacttaacttcactaagatcagttttctaatcaataaaaagagagattatagcaatacctattttatagggttgtgaatgagctaatgagtgtcaacatcttaagcacactacctaacctgtaataagcactcagacttggtattgttatgaaaataacaattattctagccacacaatgaatgtcactcctcttcctcctaaataggaatgccttctcagaatcttgattttcaaagtgatggattgggagatcccaagccatgaatgtgagtttgtgtatttcccttcttatttatttctcagttcagttaaagccaccatcatcctcctagttgcccagattaggacctttgggrtcaacctgaactccaccctacattcaccatatcagcgtttccatcttaagggggcttctgggatccatccccaaacggaatgcaagaa

SEQ ID NO: 829042 - DNA, 451 bp, Homo sapiens
caggggaaacagaatttctaaagagaagccaagtttctggggtttgaactttctgattctttgaacattctttaagaactccaactatatcttgctatcatttctactttccacaaaatcctggacagtaaagaaaacagagacatgtaagatcaaaaagttttgcatagctgtgtcaaaaaacagagatgctagcataaataatccagttttaatcacagtaaaaggagccccaaactcttatttcaagtggggcaggcataaagaagtaactcaccagctaagatttctttatgcgtctcagcagtcttgccacgctgtgtcttcttggggaagtgtctctagtttgcwagctgaattgccgtgggtgagaactatgaagccttggctgactacctgctctgccggccaccagatacacctgagccctttctcagtgcttgagaggaag

SEQ ID NO: 829043 - DNA, 576 bp, Homo sapiens
agagaacagacccacctcctcatagatgctgtcattcctgtgaaagtctccagccttcctgggaagaacatggacgtgaacgtgctgaaaatgtacaagaaagaaaaaaaatgtgattatctccccatgtatttttagacttgacagtgatgctctcatgaagcccaattactccacgatggttcctgctgggttatttttcagaggaagttgatatccaccttcggtaactatacctgaaatctgccgagaagagagtgcactaagcaagagagaacaacttggggtatatatgagagttggtgcgaaatgctagagtgtttcagagtctctgtggaattattcatggttgtcagtcttggttgtagttagccagtgctttgaaatgacagtgcatcttcaaaggtgaccatcatgactctgaaactgacaagaaataagaattggctaacagagamctgcataagtaaagagcgagtgaatgaggtagcaagtagtatgggcagaattacagacttggggcttcgaaaaataatcatataatagtaatacaaacagttctcatttagtaagcat

SEQ ID NO: 829044 - DNA, 492 bp, Homo sapiens
ttaccttctggaacagttctgagttctcatctcatttctggccctagcatgtaagcttgggtttttggtttcttcgttttcaaaagaaaccagttggaataaaccatctccctggtccctcctagcattytgaaaccttcagtataagaaatttttaaaaggaagccctgaaacacctctacttctcagtgctactctggtcttgagttttctggaacatgttcaacatgcattcatttagcaaagctttgattgcaagtgcctactatgtgccattcctttttaggcatttactcaggctgttcctccacctggagggcccttagcctcatcttcttttgagtttcgaattgcagattttcccaggagaggagtctccatctccttcagcactttgcacagcactccttaggtgagagttgagaggtgtgtgtgttttcccctaagttatttgtctccaaagagcagggaccgtgattttttcttcattgt

SEQ ID NO: 829045 - DNA, 508 bp, Homo sapiens
catgcaataacagaggcaaatctytttgctaaagtaaagcataatataaaatataagaattgtcactgctgtgagttaagaggatttcattatttttacactggagaagaaaaacaattgccattaaacaggttctccatgacctgtccccatctcttccctgccctcatcacctgtccttcctctccctgttcacatgtaccagccacctgaccttgctttgctccttcccatcatatcaggcacatgccagccttgggcaaatccccctcctcatcaaagcctttccatgaccgatcctccaattgaaactatcactcactcccctcttatatcacttcttttaatacagtcagagtacttgccactgtctaaaaaaactgtttgtttacttgttttcttttcttttcttttctgcttttcctactattctctcctgcttttcctactactctccaccagaatcaggagcagtaaactcaatggctctgtcttacttccatgctac

SEQ ID NO: 829046 - DNA, 507 bp, Homo sapiens
gggcaaaagtgagaagacaacagataagagttaaaagatacagacaaccaatgtaggagatctaatacctagctaatatgatttctggaaagatagaaccaayaaaatggagaataatggagagaaacaaagaaaaaaagtttcagagctggcaacatgaatctttgcaatgaaagcttgtatcatcaaggtgaatgataaaagacttacacctagcctcattctcatgtgattttagaattataaggagcaagagaaaatcttaacagctctcagagaaagaacaggttatctgtaaaggaacaagaaacagattaccaaattatcatgaagcttctaattaatatcagtagcctagaggaagaatttaaaaatgcactgaaaaatctgagggatgtttattttgaacctgaaatgttatatccaaataaatgactactcaagtgtgattgcaaaataaagacattctcatacatgcaaagatttaaaagtgttactatccacaga

SEQ ID NO: 829047 - DNA, 521 bp, Homo sapiens
agctggtactacttagcatgtggctttcatctgtgtgggcactacctccagcctcatgttctaacaggtagaggaagcaggaagtgacagagaaaaagggctgggctcctatcaggaaggcaaagcttacttagaaatcctggcaggctctagccccactgcattgaccagtgctgttcacagggctctgcctagctgcaagggaggcaggaactgtaatttttaactactgacccaaacaacagaaacttctgttggtaaggtagacacagagaatggacattgctgatggctatccatctctgccatgccacactcccaggtttattattaaattagcatttccccgattgtttctactttatgtattttctgggcatttcagctcactcacasgatttcctttcatctcacccatccttgtgttctttctgaaggttttgatgtgaaggctattagtattggcatcattaataagcattggttgaagttcctaattgggtgtttgttctgggtgaggt

SEQ ID NO: 829048 - DNA, 521 bp, Homo sapiens
agctggtactacttagcatgtggctttcatctgtgtgggcactacctccagcctcatgttctaacaggtagaggaagcaggaagtgacagagaaaaagggctgggctcctatcaggaaggcaaagcttacttagaaatcctggcaggctctagccccactgcattgaccagtgctgttcacagggctctgcctagctgcaagggaggcaggaactgtaatttttaactactgacccaaacaacagaaacttctgttggtaaggtagacacagagaatggacattgctgatggctatccatctctgccatgccacactcccaggtttattattaaattagcatttccccgattgtttctactttatgtattttctgggcatttcagctcactcacaggatttcctttcrtctcacccatccttgtgttctttctgaaggttttgatgtgaaggctattagtattggcatcattaataagcattggttgaagttcctaattgggtgtttgttctgggtgaggt

SEQ ID NO: 829049 - DNA, 590 bp, Homo sapiens
tcttgaatggccggagacataatttgtggtggaaagagctggatgagagaatcctcctgtgatggcttctgtctcccatcacaaacagcttttcagccccttgctcttagcytaattaacattgtctactccgctttcaggcctcagctcagccttcccagacccccacagactctgctgccccaaaacccttctcccatgcctcacttggcctggtctgcaatcagcacatctcttcccacatgtctgccccacgtgagggtcagggctctgtctgtcctgtcctctgcatggcctgcacggtggctggcacaggggaagcctttggtaaactctggtgcaatggatgaataagcaaaccattccctaatccagcccaagaagtagcacctttgggtactgagaggccagcacagacctcacggcagctggcaaccgctggccacctgctggccaagacagtgtccacaatgggaatgagacttaggaccctcgaaaggggaggcccttgtcatttcattcagtgaatggcctttctgcgtgcacacgtggaaagccccgatagcttgcttttggagccgcttggcatt

SEQ ID NO: 829050 - DNA, 459 bp, Homo sapiens
cccctccaggggcacaggcacagaggtggctgtccctgcagaaacttccctccacattttccctttccgttgggcttccccaaatcctcatccctccttccacaaacccagaccctgcctggtctcatggttgtggagaattaactcaggggcaagaaggctggataaggagataagtgaggaaataagagaaataaaaatagaaatgccacagcagggatctcgtggcagtacccactctgggctgggattgttctacacgtgtgacaggcgttaagtcctcccatcttcttgataacactgtgaagtaggtttcattcttatcccccatcttttagatgaggacattgaggcaragaaaggggacacatttgctttacattcgctctgctagatcaggtcctgatgcgtagtagatgctcagtatttgttgagtgaatgaagatgtgattgataaaa

SEQ ID NO: 829051 - DNA, 583 bp, Homo sapiens
aacttgattatttaaaaaaattgttttgtgtcacaggacaaatagatgtttttccaaagaagatatacaaatgtccaataagcacattaaagatgctcaaatgtaactaaccagtaaagaaatgcaaatcagaacctcactgagctaccacctcacacccattaggatggctactatcaaaaataatcataataacatgtcagtgaggatatagagaaactagatcccttgtatactgttggtggaaaattaaatgatgcagctactttgaaaaatagtatggtgtttcctcacgtattagaaatagaattaccatatgactcagcaattctacttctgcatatatacccaaaagaatcaaaggggctggaagagatatttgtatacccatgtacatagcagcattattcacaatagccaaagggtggaggcaactcaagtgtccatctacaaatgaawaaacaaaatgtggtatgtatacacatacatacatacatacatacacatacatacatacatacatacatacacacacagtggactataaaaagaaggaaattttgacacatactacaatgtggtt

SEQ ID NO: 829052 - DNA, 682 bp, Homo sapiens
taaaaattattaagttggtaaatttcgggtgtattttaccacaattaaaaaaaatttttttaatggttctgtttaatctaggttatttggccttttcaaatgaattttaggatcagcttgtcaattcttacaaaaatgtctactgggatttttattgtgatttcattaaatatatagattaatttaaaaataattaccatctttaattaaaaacattgagacctccaagcaataacatggcatatctctctgtttattcaggtattctttaatttctctcagcaatatgttgtagttttcagtgtataagtctaaaatatcttttattaaatttattcctaaatatttttatgctactgtcaatggaatttctgaagttttattttttgggttgttctttgccggcatatagaaatacaattgatttctacatattaaccttatattctgagacactgtcgaattcatttatcagttctagtagctttttgaaaattccttaggattttctacatatatgatcacattgttcacaaaaaaatggttttatttcttctgttccaagktgtatgccttgttttttgcatgacttattaaaccggctaggacctccataccatgttgaatagaagtggcgagacagaatttttaaacgaggttattttactctgtgaggatccca

SEQ ID NO: 829053 - DNA, 682 bp, Homo sapiens
taaaaattattaagttggtaaatttcgggtgtattttaccacaattaaaaaaaatttttttaatggttctgtttaatctaggttatttggccttttcaaatgaattttaggatcagcttgtcaattcttacaaaaatgtctactgggatttttattgtgatttcattaaatatatagattaatttaaaaataattaccatctttaattaaaaacattgagacctccaagcaataacatggcatatctctctgtttattcaggtattctttaatttctctcagcaatatgttgtagttttcagtgtataagtctaaaatatcttttattaaatttattcctaaatatttttatgctactgtcaatggaatttctgaagttttattttttgggttgttctttgccggcatatagaaatacaattgatttctacatattaaccttatattctgagacactgtcgaattcatttatcagttctagtagctttttgaaaattccttaggattttctacatatatgatcacattgttcacaaaaaaatggttttatttcttctgttccaagttgtatgccttgttttttgcatgacttattaaaccggctaggaccyccataccatgttgaatagaagtggcgagacagaatttttaaacgaggttattttactctgtgaggatccca

SEQ ID NO: 829054 - DNA, 682 bp, Homo sapiens
taaaaattattaagttggtaaatttcgggtgtattttaccacaattaaaaaaaatttttttaatggttctgtttaatctaggttatttggccttttcaaatgaattttaggatcagcttgtcaattcttacaaaaatgtctactgggatttttattgtgatttcattaaatatatagattaatttaaaaataattaccatctttaattaaaaacattgagacctccaagcaataacatggcatatctctctgtttattcaggtattctttaatttctctcagcaatatgttgtagttttcagtgtataagtctaaaatatcttttattaaatttattcctaaatatttttatgctactgtcaatggaatttctgaagttttattttttgggttgttctttgccggcatatagaaatacaattgatttctacatattaaccttatattctgagacactgtcgaattcatttatcagttctagtagctttttgaaaattccttaggattttctacatatatgatcacattgttcacaaaaaaatggttttatttcttctgttccaagttgtatgccttgttttttgcatgacttattaaaccggctaggacctccataccatgttgaatagaagtggcgagacagaatttttaaaygaggttattttactctgtgaggatccca

SEQ ID NO: 829055 - DNA, 626 bp, Homo sapiens
atcagtaataaaaagtctcccaacaaagaaaagcccaggaccagatggcttcactgctgaattctaccaagcttttgaagaactaacactaattcttctcaagctatttcaaraaaaatgaagaagagggaattctttctaactcattctgtgaagccagaattaccctgataccaaactcagacaaggacacaacagaaaaagccacaggccaacatctctgatgaacacaggtgcaaaaatccttaacaaaatgctagcaaactgaatccaacaatgcatcaaaaagataatataccatgattaagtggggtttactctagggatgcaaggacggtgcaacatatgcaaatcagtcaatgtgatacatcacatcaacagaatgaaggacaaaaaaagtatgatcatctcaatagatattggaatatatattggtataaatacacaaagtaatattattctgacataataaagaataaaatcctgtaattcatggcaacatggatgagcctggaggttatgatgttaagtgaaatgagtcaggcacagaaatactgaaggtactaactcatgtgtaggagctaaaaaacttgagctcataaaagtagagagtagaattgtggtta

SEQ ID NO: 829056 - DNA, 516 bp, Homo sapiens
acatgaatacatgtaatgcatgcaattaaatgcataaatcctaactgcacgtgcatcaaatttgacaaatgcatacacatttgtaaaccaaacttttatcargatgtagaacatgacccttcctcaccaactcttgccccccatcacagtcaaccactgttctgatattttcaccatagaaaaatttgcctattctagaactttatgtacacagaaccagacaatatatactttattgtataagatttcttttactcaaaataacattcttagaattattcatattgttgcctgtatcagtagctcattccattttattgttgaatagtgatttgtcgtatggatataccatagtttgattattctcatattgatggggatacctgggctgtttccagtttagagttattatgattaaaattgaacattcttacatgtctttttgtgaagatatttaatttctcctgggtaaatacctaacagtaaaactgttctgtcagaggattaagtatttag

SEQ ID NO: 829057 - DNA, 609 bp, Homo sapiens
tgtaaggacataataaggttaatttaggtcataaggatagggcyctgatttgataggattcgtgcctttttaagaagagatttcagaaagcactatttttctccttgtttacaagaagaggtcatgtgagcacacagtgagaaggcagccatctgcaagaagacagccctcactggaagctgaccatgcaggcatcttgaccttggacttctggcctccagaactgtgagaaaataaatttctgtttctttaacagaaatttatgttgtggcattttgttatggcagccagagcagatgacaacagtggccaaggcagattatcctcctggatatagcctctgcagcaggcttttctctttagcctcagttgtggtgtgtgtgtgtgtgtgtgtgtgtgtgtgtgtgtaagtgtgtctgggcagaagtcttaaaagctaggggacagttcaataccttctcttcacccttgtgggtgactgtggaagcatgtgttgagatggagttagtgtctgccttcgatcctgagggactggatgagcagaccacctccatgctagacaagcagcatgagagggagaatgggatgtttgctatccagatagaggca

SEQ ID NO: 829058 - DNA, 693 bp, Homo sapiens
cctgactgcaggggacagtcctcagtccctagtgctggctgtgtagcctgggtcaggcccctgcacctgacacacagtaccattgtgcagagtgggcagaagcccactggcctctcactgatcagaatcatgggttgggggagtggggagcatgtggccctctgggtgtgttgacacctggcactgaggaggttctagctgccactcagcaatttctggcttccgtgaggaatctggcctccacctggagccagcaatgtctgtctggcactggctgagccccaggcatcagcacccctcaccacccggggaaagctggtttccattttacagaggacctggagacttggagaaaggcttgacacacgtgaggctggtcacggagaggtgggggggtcccagtgggagctcatggccatctggtcacctccctcctcatccctgtgcactccctgagccctggccagagccctgctcccagctacttcaggagcagtggcttttgtggcaatgggcaagcaggcagtggccggccctacccagcacacgtggcactaccatggctgcctggccggggggcagcctttgacctctacactactgrccacagggaaccaatgagattctccggatgtacatcgccctgacgggtctgcagcatgccggccgcatcctgactaccaggatccagta

SEQ ID NO: 829059 - DNA, 517 bp, Homo sapiens
ggcgtctggcacctaagagttaaccaagttatgatggtaaaggaaaagttattgaaggaaattaacagtgctactgcactgaacacatggacaataagaaagcaaaacaacctttttgaagatatggagaaagtttgagtggtctgcatagatcaaaccagcaacaacatttccttaagcctaaaccaaatctacagcaagatcctaactcatccatattatgaaatctgagagaggtgaagaagctgcagaattaaaattggaagctagcagaggttagtttatgaggattaagcaaagaagccctctccacataaaagtgcaaggtgaagcagaaagtgctgatgtagaagctgcagcaagatatccagaagacctagctaagataattgatgaaggtggacacattaaacaacagattttcaatgtagatgaaacaatcttctattggaaaaagatgccatctgggactttcayagctagagaggagaagtcaatgcctggcttcaaagcttca

SEQ ID NO: 829060 - DNA, 523 bp, Homo sapiens
taattttttgtagatacatggtctcactatgtttcccagactagtctcaaactcctggcctcaagtgagcctcatgcttctttagaaaatattttaaattctattgatggtatatttgaatcatattcatatataaaggacatactatagtgaaccctcacatttaatgagttacacattataattacaatttctaatcaacagttctttagcaggcctggtgactggaagtggtatgaatctcccttactcacgccaagtgctaacacttgggcaaggttttgctttttgcaaatctgcatgtagattttcctgatagcagaactcagagaaatcaacaaattgccaggaactggggactataagtgggctatgttgtgaagaaacaggctacttggaacttctgagagctcagaaatttgayttggcattcttcaaatgccttagaaacttcaaatcctctggattgagagtggaacatttgtcatacaaacaatgaagaatccactggtgaggatctatg

SEQ ID NO: 829061 - DNA, 600 bp, Homo sapiens
actgtataaagaaaagttttttgtcaatgctctgctgtggttttgttaataaaaacarattattatctaatgaaagttaatagtaagccaaattacatatgaaatatcattcgttagtaaagcacaattaacctatttgatattacatgacttgtttcttactattgcgtaggattaaaattttggcatcatgtttggttggtgcacacaaactctgccaagcaaaataaattaaaataacctttataactttttgctccattgagagttttcaatgtttagtttttaaatgcagacttaacttcattaaattatacgtggaatgtatatggaaatatggctcaaaataatggtgccagtgattttactgggaaaaagtcatttagtaagggataaatggctggtaactaaactctaagaatttttgcatttttgtatcactgcctttctttaaatgatcctatttttaaaatttgtcctgcagaaagagaaagaacagaaaattcatatctggtgatcaaccagtaacatgtcctttgtgttcctggacatctcagaaaacaaatcatattgaagtacatgacattaatataaataaac

SEQ ID NO: 829062 - DNA, 633 bp, Homo sapiens
tagagtttcattcaacaatgatgcattggtcataattgcccttgattttttagacaatttccaataaatgtgatcaaatacaatctacgtttgcccyaaacaatacagtttctgatagctgcttgtgactatttaaatttaaatttaattaaataaaattaaatggaattcaaatttagtccctcagtcacactagccccatttcaagtcctcaagaaacgcatgtggctaatgattacggtggtatagtagagatagagaacatttccattattgcagaaagtttattgaatggtgcttatatatgtttttattgagaaataatgcaactgacttttagattaaaaatccatccaagttctccacaactctattaaacagaaaagctgaaactagcttccagatctttggcatcaagtaagacgctttttaagagttcagctgcgcccaggaacatgggccatttataatgcctaattttctatttaatggttttccttccttgaccttgcaatcaatataggagaaaagttttgctgtattcatttatatgaagaagaaaattattaggataccagaagttgtatttaattttttgtttgaaaatgtatacatgtatctagattctttgat

SEQ ID NO: 829063 - DNA, 630 bp, Homo sapiens
ctatctttatccacgaaaatggaggaaatgatactacttgcctgttaaggatactacatgcctgttgaggcttaaaactgtgagtttattatttatttatttatctattttgagacaaagtctcactctgttgcccaggctggagtgcagtggtgcgatcttggctcaccgcaacctctgtctccagggttcaagcgattctcatgcctcaggcgcccgccaccatgcctggctaatttttgtatttttcgtagagatggcggtttcaccatgttggctaggctggtctcaaactcctgacctcaggtgatccacctgcctcggcctcccaagtgagtttatttacataaactcacagatacttttaagttgctagggcaacttttcttagaatacagtatggttcatgaagactggccttttatagcttccttatatgctgtctcctatggtaagaacaatgaacaaattacttttgcttttaatattatttaaaaataaattctgtcatttaattaggatatgctaattgatataacaaacaactccaaaatatcaatgaattaacacaattaagttcattactcatctgataagacatggcaawccctcctccagacagctattcag

SEQ ID NO: 829064 - DNA, 612 bp, Homo sapiens
attacatttcacacttccctgattggaattttactcccaaggtgctcactgaatgggaatttaaagtttatttttaggtagcttctttgtgtttacactgttttctttcatagagacagatataactaaatgccatggtagagaattttccacactctgaattaagttgttaggtgtgttgaaatatacccaagacaagcattatcccctttctgtagccactcacaaacatgtttggcataaaatctgttattccttattccttgttattccttgtattgtaactatattccctgtatttcctgatgcggttatattgtcagggactagaatattggagcaaataaaatgatagggaagaaatgatctagaaagggaaactatgtagtagagaaaggagtgagagaaaagcaagggaaagaatgacagtttgaggttttatgaaagtgttttctgaccaattaaaagtttctgaatatgtgtagtttgtgtgtggggaaagagaatgcaartacaatatatcaggatcaaaaagagaaatggcctaagtgattaggaatcaaaagcatatgtaggttattcaaaccagtgtgccacagggtagttttgaaa

SEQ ID NO: 829065 - DNA, 632 bp, Homo sapiens
ttttttttttttacctcctgagacagaggcttgccctgtcacccaggctgtagtgcagggcacgattttggctcactgcaacctccacctcctgggttcaagcaattctcctgcttcagcctcccaagtagctcggattacaattgcccaccaccacaccgggctaatttttgtatttttagtagagacggagtttcatcatgttggccaggctggtctcgaagtcctgatcttgtggtctgcccgccttggcctcccaaattactgggattacaggcatgagccaccatgcctggctgataaaagccattttaactaaggtaaaatggtatctcgctgcagttttaatttgcatttttctaatgatagtgattttgagcaccttttcgtctacctgtttgccacttgcatgtcttcttttgataattgtctattcatatttttgcccatttttaaatccgattattagatttgtttcctacagcgttgtttgagctctttatatattctggttattaattcattgtctgatggctagattgcaattattttctyccattccgctggctgtcttttcagtttgttgactgtttcctttgctatgcagaaattttttgacttgatatttaccc

SEQ ID NO: 829066 - DNA, 416 bp, Homo sapiens
gggatctgtccctcatccactatgctccaggtccctcctgtcctgcctcccctttgtacaacagcagtgctgtccaacagaaatatattgagagtcacatatatccttccagctattccagtgggccaaaaagtaaaaacaaagaaaacaaactaacccatgggtgaaagtaatttaaataatatattttatttacccaatatatccagaatatcattttatcatgtaatgaataaaaaataatttcagactccagtgcgttttgtatttacaacacccctcacttcaraccagccacactgcaaatgttcctagccatgtgtggctagtggctcccctggtggacagctcagttctgcagggaagtacggtgctgtcctcatttacctctttggcccctcccctccctctgcctc

SEQ ID NO: 829067 - DNA, 265 bp, Homo sapiens
ttatttaactgttctctagtttttcaacatttagctgctcctaattgttaaattttataatcatcctcggacataaagccctgttcaagctactgaggtttctgtggcatagattyctgggaggggactaacttattgggtcagagggtatgaatatttggaaagctcttcatacatattgccaaattggtttccagaaaggttatgccgatttgcattcccactgataatgtaggagggtgcctattccattgcattcttgcca

SEQ ID NO: 829068 - DNA, 408 bp, Homo sapiens
ttggggataagaggcaggggaaggagaaagataggcactgggatcctgggccaggcttargcctttgtcctttgtcccctcaggctgagtcagcatctgttgtctcaggagtttctgtctcagttcaggcactatgagtgttacctcccctaggtgccgaggacaggcccccagcccggtgatctaactccttagtcagtgatcggtgaggcctgtcaggggtctgctccctgcttatttgaggctctggtttcccttctgaactgaagggaatccagtccacttgccagacacttgttttgctcttatacttgctcagccctctgagtggaccccaatggtggatggcaggctctcctcgaagcaggcactagtacgcccttgactgtggattccaggaggcccagg

SEQ ID NO: 829069 - DNA, 671 bp, Homo sapiens
tatgcatttgtccattttgagttattggttgtataattatctataaatcacataaggtcaatctctttatccaaatcccttcttgataacaatgttgcatttcctattgattggaagaaatsattttgcacaaaatggtcatttcctgcatccctagtcttttttaaaagacttatgccatcgtcttcacagctgggctctgggaacagactgctttcatacttagcctgagtctgagtttgtcatagttcttttggctgaggtctaacttggggacggatgggaggtgaataataaccaatctctaggctgggtcaaagcaggaggttttgggcggttttgggttttgtttgttttttttttttacctatttgaaggtcactaagactacacggaaactatcaggcaccataaagaagggaactgagtctcggagtaacccacttaggactgaattcatttgctccgcaattatttattgagctcttacttgtgaaaagcacaaagtgtttttggaaaacagaagatgaataaacacgttccctgctttgaagatgtttacagtacaaaatattagaggaacttcctattataacccagagctctttaggcaaggcttccactcttagctgtaaaaacatatctccttaagataaagaggattataaaat

SEQ ID NO: 829070 - DNA, 559 bp, Homo sapiens
ctggataactgtcttctgaaatgcagtcacccaactgcaaaataaaaaggcaatgttattaccttggttcaatcaggggctgtcaatttggaaactccagaaastcaggcaatgcagagttattccaagggtttcttgacccgtttattttccaacactgaccaaagactgaatacatgctctctggtataaaaacaatgtctttttaagacctttttaacaatttatttgaaaatatacttttgacgatttttaaatgtgcaatagatggtgtcactattataaaatcacattcatttgaaagcattgccaaattcattttgacactattcatttttaacattaaccaaataacattactctattaacactgactattaccatgaatcatagatcttcatacggaagaataatttggtgttaaaatggggctgtgtctccagtttcatactacatatatttcaagaggatatacattatcatgctctataattcccctcactttctttaaatgtattttaactttaatatttggtattcatcaaataattttatgcag

SEQ ID NO: 829071 - DNA, 626 bp, Homo sapiens
aaaagacctatagcatcaacacatttttaaggctaaatgccagaatcaagcttgtaatactgatgattaattccgaaagactgtctaaggctctatctactgatrtatcttgtctttgcaataaccacatcaagtagaacatgaacaaatgaagaaaggttgccatcctccactgaggtctgtcctataatccactgatttattctggaactctgcttttttctttgcctctaacacttaaggtggaatctttcagactaatacattctaagaactatgtgtttattggctttattttaaaatatcatttgttatgtaagataggaattatttttttgccatattccacacaattttaccttcctacatttgtactcacagtttaatattgcatttaggttaatttgaaattcacagttactcacagaaagaattttatttaaaagaacaagggcaattaaccaagtcccaggtaggtcacacttacatatttccatttgccaaacatgagattctgaggtacgtcaagtcggcaaggtatgataatggtatctccatatgctgaatttacagtataccatccaaggcctttgggggaaaaaaaaaaaggaagaagagagaaagag

SEQ ID NO: 829072 - DNA, 645 bp, Homo sapiens
aaaaagtaaaaagaaaaaattaagatacatcaccagaaaaaatcaccttcactaaaaagaggacaacaaggaaagaaagaagggagagaagaccacaaaacaactagaaaacaaataacaaaatggcaggagtaaatctttactcatcaataataacattgaatgtaagtggactaaactctccaatcaagagacagagagtggctgaatggataaaaaaacaagactcaatgatttgtggtctacaagaaacatacttcacctaagaagacacacatagactgaaaataaagggatagaaaaaggtattccatgcaaatggaaaccaaaaaagcaggagtagctatatttatatcagacaaaatagatttccagacaaaaactataaaaagagataaagaaggtcattatataatgacaaagggtcaattaagcaggagcatataacaattacaaatatataagcatccaacactggagcacccagacataaaaagcaaatattataagagctagagagtcaaatagacccaaatataataatagttggagacttcaacaccacrctttcagcattgtacagattatccagacagaaaatcaacaaatatcagacttaatctgtgctatagaccaaatggactt

SEQ ID NO: 829073 - DNA, 587 bp, Homo sapiens
agcaatgagcacttacataaaaaagtagcaaaacttcaaataaacaacctaattatgcatcttaaagcagggtccccaaccccctggccatggactggtactggtccgtrgcctgttaggaaccaggctgcacagcaggaggtgagtggtgggtgggcaagtgaatactaccacctgagctccgcctcctgtcagatcagtggtggcattagattctcataggagcacaaaccctactgttaactgcgcatgcaagagatctaggttgcgtgctttttatgagaatctaatgcctgatgttctgaggtggaatagtttcatcctaaaaccatcccccatcaccccctgctgtccatggaaaaatcgtcttccatgaaactggtccctggtgccaaaaaggttgggaaccactgtcgtaaagaattagaaaagcaagagcaaaccaaacccaaaatttagaagaaaataaataatatagatcagagcagaaataaatgaaattaaaatgaagaaaatacaaaagatcaatgaaacaaaaagttggtttttggaaaagatcaagaaaattgacaaaccattagccagac

SEQ ID NO: 829074 - DNA, 638 bp, Homo sapiens
ggctagggtttttcaaggatagtttggtaggcagtgggctaaggaatggggaatgctgattggttgggtcttggataaaattgtagrgagttgaaactgtcttcttgccctgactcagttcctaagtagtggtcacagaaccagttgagtcagtttcttcatacgggctcctggtccaagtggcaccagttggtccatcaaaatgcaaggtctgaaagataccccaaccaccagttttacgttttacaatagtgatgttatctataggagcaattgtggaggttgcaaaattcttgttacttttggctacataactcctaaacaataattctaacctcgtgtaattttacaaagatgcttttagtctctgagcaaggagtgggttaattttgggaaaggagtgttaatcatctttgttttaaagctaaactttaaactgaatttctcccatagttagcattgccaacactcaggaatgagcaaagagcttgtgagattaaaagcaaagatagggccaggcgcagtggctcatgtctgtaatcccagcactttgggaggcggaggcaggcggatcacctgaggttgggagtttgagaccagcctgaccaacatggggaaaccctgtctctactaaaaat

SEQ ID NO: 829075 - DNA, 595 bp, Homo sapiens
aatatttattctatatttaaatatttgtaacagcatggtttgttttcagtcatgtaggaaggtaaaatggaaacatttggatcatgttgtaagatatatatatgtatacacacacacacacacacacacacctatatatatgcactcacatatgtgcatatatatacacagtttgttatgggcaattgcaggcaaatacatgatgtgcagatagcagattgcttaaatattttatttctttatgagtcacaaattatccttccaatatattccaagaagcatccaattttttataggctttcagacatggagtgactgtggtaatgggttttacacttcttcccctagagaaagactaattcaatccaagtcttgggtggaaaatagatctaaaagaaaggaaattctattaattttttaagagtctacatttttttcattgtgggcctcttttcattagtaacttctgttgttttattgctgtaaacctgggaaagaaaaatggaatgctcaagaacatagcactcaagaarcatgctcaagaaaccacccaggggtgtggtaaagataaaatttatgtttgttttgtagttta

SEQ ID NO: 829076 - DNA, 643 bp, Homo sapiens
ttcatagaagacccatagacccaataatcttaggaagaaatgtgacataatctcaagttagtaattcaataaaatcccatttttacaccaagttagtatagatttaaatcttatagcatcaagtgtttgaagcgttatggatcaccagggtttcatgaattggcgtagcgtaaatttttgtgacttctcttaaaaaacatcttataaagttgaatactcacgtactgtatgttccagtaatactacttttacgtttttacccaagaaaatctgttgcatgtgtctaacagtggtatgtacaagaatattcttagaatcaacattgataataacaaaaatcagaaaagaactcaaatgtacatcaacacactttgaatagcaaggccttatattatattgtctacttttgtatatgtttgacattttctgtaaaagagaaatcaagaatgaatgattgaaattaaaaggttcatgtgtgggaataggagaggttaaaaaggacgaggtgattgtkcaattaaagcaaaatggctattcttaatagtttatttacataagaatagaatttccattagacccttgaaacaggtccttactttaaacaagatgcaagtaatgtgctatagagagtaggatccctata

SEQ ID NO: 829077 - DNA, 543 bp, Homo sapiens; identical to SEQ ID NO: 817059

SEQ ID NO: 829078 - DNA, 612 bp, Homo sapiens
tgaggctcacagagatgatgtgatttgcctagggccacccaactaatttaaagtgacagagctgggataggacccttggtttgactgatcatagggcccaagttcttaactgcctyactgggtagcctgcacatttagacacttctcttgctctgtctgcagctcccctggtttggctcagcacctgagtctttgtccacagtctggggaggggctgggatgtggagacccctacctgctgcatgctgctgaggggtcggctgtgaggtttgagctggtctcgatctatctcacaccgacctacaccagatggttcttgaacaagtctttagtgcattgaaactctgagtttattcatttcttcattcaacaaatatttactgagggcctggaggctccaggccctgtccaagtgctggggtccctcagggaagagcttagactctgaaaacatccaagaggaaggctcccggagttcctgtcacttgggcctgtcatgtcccactcaatctcacaggaaaccttccctgtatcacccaaatcaggcccatgagggaccagagacctcgtgcttctttgcttggcactggcctgatggcaagtccaaggaga

SEQ ID NO: 829079 - DNA, 612 bp, Homo sapiens
tgaggctcacagagatgatgtgatttgcctagggccacccaactaatttaaagtgacagagctgggataggacccttggtttgactgatcatagggcccaagttcttaactgcctcactgggtagcctgcacatttagacacttctcttgctctgtctgcagctcccctggtttggctcagcacctgagtctttgtccacagtctggggaggggctgggatgtggagacccctacctgctgcatgctgctgaggggtcggctgtgaggtttgagctggtctcgatctatctcacaccgacctacaccagatggttcttgaacaagtctttagtgcattgaaactctgagtttattcatttcttcattcaacaaatatttactgagggcctggaggctccaggccctgtccaagtgctggggtccctcagggaagagcttagactctgaaaacatccaagaggaaggctcccggagttcctgtcacttgggcctgtcatgtcccactcmatctcacaggaaaccttccctgtatcacccaaatcaggcccatgagggaccagagacctcgtgcttctttgcttggcactggcctgatggcaagtccaaggaga

SEQ ID NO: 829080 - DNA, 627 bp, Homo sapiens
agagtgtgtgtgtgtgtgagtgtgtgtgtggggggcaccactctgttgarcaaagtgtgcgtatacctccctggagtatgaatattgcctcttatagatgtcaaatttcacacctgtgttagtttttgtccctttgaggttacctcttaaatattttgatttattttttaatgtggaagtaaatcattagaaatattttgtaactctgggcttcgttttccaaacaggtgtagaggcattttctgcagaagcaataggatgtcatgaaataatgtgggtcgtcactggaagccaagagaaaaattagtttaggaaactcagccatgatcagctggtgcactttcataactccctagtttactcagtgttagaaaatgggacccgtttcacactggggacttgttatccagttttacacctgcttgatttactttcattgtgtctcacacttaaaaattctgacactttctgtttttactaaagcagcgaataaagcattgttttccggatccctcctactcctcagcaaagtctttgtgtagagatctgataagcccttagggtgccctgactgcagccaacaatagaatttgtttagccatcttgctattcctttcttcacgtgca

SEQ ID NO: 829081 - DNA, 538 bp, Homo sapiens
tgtgtcaggtatgctatgttcaatttcattgagtcctaacaaggatcctataaagtaggtatsattgcgtccatttcacagatgaggaagtggaggctctgaaatgttacataacctgcccagggtcacaggtatctgactctggccattatgctctttctactgtgccctaagccctccaattttagtgtcattgtcaatgagagaagattggttcatcaaaagtgagagtaaaacagtgctatacaatagaactgggtttctcaacctcagcactactacatttgggaccagataattttggttgtagggtgttatcctgtgcattgtaggatgttcagcagcttccccggcctcttccaactaggtgctcgtgccaaccacgccactctcccaacagcatgacaataaaaaaaagtcttcaaatattatcaaacgtccctggaaggcaaaacagccaccagttaagaatcactgcaatagaaatataaggtgagccacacgtgcaattttaaattttctgatagccacatttttt

SEQ ID NO: 829082 - DNA, 619 bp, Homo sapiens
atatatctaagctgatggggctgggttccatatttgtataaggcatgaattccaggtggctcccctccatccccscagtgcgcatgcgggcccttagtccactgcaggcatgcttaagagaactgtgtaagttctcttatctgcacaaaacatctggtgtcagcacttgtggggctggtcacaggttctctggggacctttccttactgtctgcctaaagaaagctaactcctttcattcccttcttcaggagtggagacccccaacggctgttggggaaagtagacaatcaccattctaaactgcttcctgctgacagggagttctgttttgggaaagtggcagttagggctcctcctgaggtctgtttaagggtccatggaagaatggcacatccatgcatggtttcatttgcatcgccatttgaagtttaatggccttttagcaagaagaagcaatttgggttatcagaagctgtaaatcaaaatgaatcaagggagtaaggacagctccacaatcccaagattgctgacatgcccagataactggtggctatagttatccctgctaagatttggatgcatggggcttagctttggttgactcccttggtcttatt

SEQ ID NO: 829083 - DNA, 630 bp, Homo sapiens
gaagaaataattgaagtaatgttgactgataattttaataataaatccaggtacctcaagaaagagcagaataaatacttcccaaaatatactccgaarcatatcatatccaaatttcaggaaagcaaatctaagacaaaaatcttgaaggatgccagacactgtgggagatcttacctacagaggaaaaaaatataagaattatgtatgcctggctgagcacagtggctcatgcctgtaattccagcactttgggaggccaaggtgggcggatcacaaggtcaagagatcgagaccatcctggccaacatggtgaaaccctgaaacccgtctctactaaaaatacaaaaattagctgggcgtggtggggtatgcctgtagtcccagctactcgggaagctgaggcaggagaattgcttgaacctgggaggtggaggttgcagtgagctggatatgccactgtgctccagcctggcatcagagcgagactccaactgaaaaaaaaaaaaaaaaaaaaagaattacatatgccagtcctcagaaaccatgaaagcaaggagagagtagagtgggatattttagctgtggaaagaagtaaaacccaccaacctagagttctgtatacagtga

SEQ ID NO: 829084 - DNA, 588 bp, Homo sapiens
tgatcataagaaattccccattaggccatggtgcaggctgggggagaaggcagagtggaggccatgggcacttgagccacttcctcatgtaacttgcttatgccttcaggacctgcttgagcctgatcatgtatataccacttccatttgatgatggaatgctgctgcgcatgacccactttatggctagatgagtcagaaagcacccagttcatgataggcagttcaggtcacatggtgactttatgacacatagtcaaactttcagtttccaccaaagcccagtaacagaaaaagagctgtctctcaaagggagaatagttatctacagaagatggcagggcctcgctcaaaaatcctagaggcgtccactgtgattcacttatgggagactgccaaacgctccaaacagcatccctatctgccacttatatctcaagcaccattgaatctgccgatcatatggcccaagtggcagagcagcttgcacagcagcctggacctattgcagarccttctgctgttctggaccccactcaaaactggcaggctttcgggtcactggataaatgggccagagtaacaccc

SEQ ID NO: 829085 - DNA, 486 bp, Homo sapiens
ctcaaaaatcctagaggcgtccactgtgattcacttatgggagactgccaaacgctccaaacagcatccctatctgccacttatatctcaagcaccattgaatctgccgatcatatggcccaagtggcagagcagcttgcacagcagcctggacctattgcagagccttctgctgttctggaccccactcaaaactggcaggctttcgggtcactggataaatgggccagagtaacacccccaaatgactaatgtgttgcctccaaaatccaaataggcccactaggcattgtgcctctttcttggttgtaggaggggccaaatgaagcaacttatcttttaccttataaggaatatcttgacaggccccacaccactggaccactakaaattttactgaggtagaaggtctctgaattttagttggatttatatcccatcctctggcatgcaaatgtttcaccaataagtccagtgtgttttcta

SEQ ID NO: 829086 - DNA, 676 bp, Homo sapiens
agatgtctttcagtaggtgaagagacaaatgaactgttggctcaatggctcacacctgtaatcccagcgctttgggaggccgaggcaggcggatcacctgaggtcgggggttcgagaccagcccgaccaacatggagaaaccccatctctactgaaaaaacaaaattagctgagtgtgatggcacatgcctgtaatcccagctactcaggaggctgaggcaggagaatcacttgaacccgtgaggtggaggttgcagtgagccaaaattgtgccattgtactacagcctgggcaaccagagtgaaacttcgtctcaaaaaaaaaaaaaaatagcaatgagctgtcaagccgtgaaagatgcagtagaactgtaaatgtatcttaccaggtgaaagaagacaatctgaaaagactgcacactgtgtgattgcaactctgtaactccaggaaaggcaaaactatggagacagtaagatgacgggtggttgccaggggctcgggggaggaaggaatgaataggtggagcgcaggggacttagagaacacaarttctcatttccaatctgtgcttggttgaattggtggatgaagaacctgcggatacacagggctgactgtattgcatatgacacagtaaagatggatacatgtcattgtactaccgtcataactcaca

SEQ ID NO: 829087 - DNA, 644 bp, Homo sapiens
ggggggaggtgtttgggtcatgggggtggatccctcattgcttagtgctttctttgtgaaagtgagttctcctgagatctggtcatttcaaagtatgtggcaacycccactctctctctctctctcttcttcctgcttttgccatgtgaaatgcctgctctcccttagccttctgccacaattgaaagcttccttggtcttcaccagaagctgaggagatgccagcaccatgcttcctgtaaagcccacagaaccatgagccaattaaaccacttttcattataaattacccaacctcgcatattcctttttcttttcttttcttttctttctttctttctttctttctttctttctttctttctttctttctttctttcttttttttttttttaaaaaaagacagtgtcttactctgtcacccaggctggagtccagtggtgcaattatggctcactgaagcatcaacctcccgggttcaggtgatcctcccatctcagtctcccaagtagctaggactactggtggcacatgctaccatgcccagctatatatatatatttttttttgtaatttttgtacagatgagctttcaccatgttgcccaggctggtctccaactcctggactcaagtgatcctccc

SEQ ID NO: 829088 - DNA, 584 bp, Homo sapiens
cttccatgatgcttctggggtaaggactgaaaaagagcccagtggaacgggatagaaagtccasaaacaagagatttgtgttaagtgagcagattttagctgctctgttcacaaaaaaaagtaactatgtgagatgacaggtatgttacactaattcactatggtaaccattttactatgtatatgtatcttataacatcatgctgtcaagtttatttcaaaaataaattttacataaaatcttagcagtgttattcataatagacaaagagtgggaaaattctatttttttaaagtacagaaactttattcctcaaaggggaaataggttaataataataagaagaagaattaaggccaggtgtggtggctcatgcctataatcccagcactttgggaggccaaggccagaggattacttgagcccaggagtttgagaccagcctgggcaacatagtgagaccccatgtttacaaaaattaaaaaattagctgggtgacgtgacaagtgcctatagtcccagctacttgggaggcgaaggcaggaggattgcttgagaccaggaggtcaaggctacagtaagg

SEQ ID NO: 829089 - DNA, 572 bp, Homo sapiens
tttgcagcagctttagtcccacccaacaccacggtgacctgtttattcaaactcaactgccaagtcaccttccccacccagccctgctctggcctgttcyatgagcgaggccctatttggtctggcatgactctgcctgccagctgctccagggccacaggtggttggacagtcagcgacaggaagaaaagtggtcagccacacgcagagagaagcagacacaaggtggatgtggctgagctgtaatccttaaactcttgatgaaggtgttaccagaaaggggcctgatcagaccccaagagagggttcttggatctcgcacaagaaagaattctgggcgggtccatacagtaaactaaaagcaaatttattaggaaagtaaatgaataaaagaatggctactccgtaagccctcagggctactggtcactcatttttatggttacttcttgattatatgctaaacaaagggtggattattcatgagttttcagggaaaggagtgggcaattcctcgaactgagggtttctccctttcttagaccatgtagggtaacttcctgacattgccg

SEQ ID NO: 829090 - DNA, 602 bp, Homo sapiens
agatggagttgctctggtttaaacgcctctgacaaaaaggtgacccaggccctccactgcctgggaccaacagccttctagacccccatgtgcccagctgctctacgctaagagctttaagcacagccagagcagccttcacaacctgactcatgcaggccactgccagcctatatgatctgacaacaccaaaacttctgggagcctcagtttccttgttaaagggaataatactaccatgatgcctggtatggtttggatctgtgtccccactcaaatctcatgtcgaaatgtaatccccagtgctggaggtagggcctggtgggaggtgatgggatcatggaggcagtttctcatgaatggtttagcaccatccttcttggtgttgttgtgagttctcataagatctggttgtttaaaagtgtgtagcacctcctcccttgctctgtcttgctcctgctctcaccawgtgagacaccttactccccttttgcctcccaccatgattggaaagcttcctgaggcctccccagaagcagaagctgctacgcttcctggacagcctgcagaaccatgtgccaattacctcttttctttataaa

SEQ ID NO: 829091 - DNA, 629 bp, Homo sapiens
gttcttgctaatatcatccttggtcttgttcaacttgtcttgaatctccaaaggtaagaaagacaaagttatccagatgcaagagtacrgtagagacagcagaattattatgacagtcaagcaactgctcaatgctaggcaccgcacaagtaactaaactaacatttttcctaaagatatatggtgatattctgactgatcagctactttctggcatgtacaatagcctcttaaaaatttgaaaagcgaagcttctctctaaaggtcaagatgcactcagccggtcgcggtggcttacacctattatcacagctcttcaggaagccgaggtgggcagatcattacaggtcaggagttcgagaccagcctggccaacatggtgaaaccccatctctactaaaaatacaaaaattagccaggcatggtagcaggcatttgtaatcccagctacttgggaggctgaggcatgagaatcacttgaacccaggaggtggaggttgcagtgagccaagatcacaccactgtactccattcagcctgggcaacagagcaagactctgtctcaaaaaaaaaaaaaaaaaagttgcacccaatttccccataacccttttctctgccacattgacatc

SEQ ID NO: 829092 - DNA, 602 bp, Homo sapiens
atgccaacatctaatattttttttaaattttttgattatggtcattcttatggaagatctaggattcaagggctgctgttcttgcaggagtgaggtagtattattgcactgtggttttaatttgcatttccctgataattagtgatgttgagcattttttccatatgctttttggccatttgtatatcttcttttgaaaattgtctattcatgtccttagctcactttttgatgggattgtttgtttttttcttgctgatttgtttgatttctttgtagattctggacattagtcctttgtcagatgcacagattgtgaagattttcttccactctgtgggttgtctgttaactctgctgattgtttcttttgctgtgcagaagctttttcatctcattaagtcccatgtatttatctttgtttttgttgcatttgctttcgagttcttggtcgtgaagtctttgcctaagcgaatgtctagaagggtttttccaatgttatcttctagaatctttatggtttcaggtcttagatttttaagtctttgatccacgttaagttgattttttrcataaggtgagagatgaggatccagtttcat

SEQ ID NO: 829093 - DNA, 607 bp, Homo sapiens
ataacaagttgtattatcacaaatctctaaaaataacaacgcagtttttaaactcgtattttgtgagttggagcctggcaacaaaacaacaataacaacaaacaacaacaataaataaaaaaccacttaacacagacatttctaggctgaaaaagagaagaagttgccaagtgcggggttttttttcaatcatgtttggaaataagttccaacttacagaataagttgcaagaatcagactgtctcaaagaaaacacatataccttttgctcagattattgttaaattttacctcatttactttatcaattgctctttctctatttatgtgtatcagattattgttaaatgttaccttatttgccttatcaattgctctctttatgtatgtttgtgtgtactgttgcacatgcaaatgcacacaaatatatgtttctgaattttttgagagtagattgcatacattatggccckttacctcaaaatactttattgtgtattttccaagagtagggattttttttacttaatcaaagtatacttcttatctgattgactgtctatattccaatttgccagttgacctaacattgtcctttggagcact

SEQ ID NO: 829094 - DNA, 641 bp, Homo sapiens
ctcctttcccccagggctctcagtgaggctggtgatgtcccaggggarccaggcaaatctcaggctcaggcagaggaaaggggaaagaagagaggaagacaaaaggagaggggaagggagaaacagagggacccagagcaagggtggtgagtccaggtgctctcagggatagaaagcaatgttactcaggcagaacacacagagagaggagtcaaaatcacagcaattcaccccagcaaccaaaatgtaattttaaaaaacatactatacttgcttctctaagctctatgagagaaacatatagatcacagccatgctttctaaaattgcctttctcccccacttctctcctctctccccctcaaaaattatccctacacctgcccctctttctttctctttctctctcccaccttctctccatctctcccttcaacaaaaacaaacaaaacaacaacagaatttcctaccaaccccagtcagctcacctttcctccttctccccctccctaatgggaagctttccttcctattaggaagaaaaaaaaaaccccaaaggatggtggaaaagcaaaaccagaatcctcttcagggagctggaggagaagaaaggccaggaaagcttatagggtcgttatttc

SEQ ID NO: 829095 - DNA, 610 bp, Homo sapiens
cactctataatggttgtgcggggatatgaaaatgtagttggccaggcgcagtggctgatgcctgtaatcacaggaatttgggaggcygaggtgagtggatcacttgagcccaggagtttgagacttgggccacatagtgaaacttcatctctacaaaaaatataaaaattagctgggcgtggtggtgagtgcctgtagtcccagctacttgggaggctgaagtgggaggatcacctgagcctgggaagtggaaattgcagtgagccgagattgtgccactgcactccagcctgggcaacagagtgagaccctgtgtcaaagaaaaaaaaaaaagtaaaaaagaaaaaacagaaaatgtagttacgatatctgtatttgtggtttgaggcagaaaggcagaagcacagaagctagagatccagagacaaggatagttccactactgttttcttgtagctcacttcagcagagtgacaatgttgcatataagccaatttctatactttctaaaagataacactaaaacataaatatttctaaaagcgaaaaatcacttaaatttcttaaaccttagtcagatgcaacttactttggtatgctcacctaaaga

SEQ ID NO: 829096 - DNA, 552 bp, Homo sapiens
ctcacttgtgtctagatgactgacagcctgagagactctataagaacatgtttttctaagccctttttgtgccaggtgtcccgttaacgtctctgttagttcagaggtgagttttgttcagacgttttgaacaaaaggcaaagatttcctcatgggaagggtgttcaaaactgacagctataaatgtaggtcagagacccacccacctcataacagtcatacactcccagagttaaacgattggcctctgatggccacacacccctatgggcttgtgtcttggactctgggatttaaaagatatatatgtatatatatttatgtaaacctgagcatctcagtttgggtagagttttaaggttatatgaaactgatagaacttttgtattttttttttaaatattgttttgatatatcagatatttgttttgtctggatcacaagtgagaaagaaaagagaayaatgctctttttcacaatgaactggtcaaattgactatcttgtaaagtgatactttactatgtcagtgaaatttcagtttgattttagtc

SEQ ID NO: 829097 - DNA, 589 bp, Homo sapiens
gtgtagctttgacaattacttgttaattttattaaacaataaaatatgccatattagggttcttacaacggtatttgtggtacattagattatgtaggtaacaatcacatttttatagtcagtgtttcagctgacaacaatgtcaaaatgattaacagcctacactttagaaaataacttcctaatgcaattgtttcttgtaaaggataggacatttttaaagttcttttggaaataaaatacattatagaaagatagaggtaaaaatgcatgagagaaagatatttagacgtaaatgaaatatatttattatgataacatgtacattgttatttctaattcatatactatattcaaagtccagatatcaactaagtctactgtaaatagtaagatatataatagtaccatggttctagaaaacatttttttccttgaaatgagttttagttatatacatggaaatrtatttgtataatttgtctaatattggagctgagatttcttcatatgactaagactttaatttttgtgtataaaagctttccatgtaagtgatatatctatgattttttttttttttaatgga

SEQ ID NO: 829098 - DNA, 580 bp, Homo sapiens
tctgtattttcaaaatcaaccaaattygccattttgagtagagtatgtccaggttcctgattgtaaaagtaatatcctcatttggaaaaaaaataattaaccgcaagacattttcaactcacccttgcaattcaaatgattcctctaattcataaacacgtgaactcttcacataagctctttgactttgccccagattattagaatgatatatggtcaactgacaattcaaagtttacctgtgtgattttgtctcttctgtgcctatttattatagtccaccacagacacacaaacacacacacacacacacacacacacacacacacaagtgcatacctaacagcttagaaaaaagaaagtgagattcgcccgggcacggtggctcattcctgtaattccagcactttgggaggctcagataggaggatcatttgtgctctggaattcaagaccagcctgggcaacagagagagaccctatctctacaaaattcaaaaaattagctaggtgtggcggcgcacaactctagtctcagttacttgaggggctgaggtgggaggatcacttaaacccagga

SEQ ID NO: 829099 - DNA, 610 bp, Homo sapiens
ggttataaacagaaactgtaatcatgtctgacagggtttggaagcactgcacaatattaagcttgagctctgtcatttccactgaccaaggacaaccacacagctttttcagatctctattggtggttctggcaaaacacaatgtaaaattctttacccaaaaaaaaaggcacaagtctgaaaaagtgtaagcatgatgatttcttactattggtaaattatgcagtcactttaactcacttttcttccaaaatctggacagagaagatagacatgtatccaacatccttctttgtcagaattctgacaatatgttccagcatataactatgccattggagagagagttgatagccaatctttaagcttgtaattaaccctaaagaagaaaatacaactgaatgaatgttttaataacagaataataaatgatgatacagtgacatatcagacaaaggagttctttctcagaggaaaattattactgcaatttccattttaattggagctgaactattatttagtaaaactgtgtagattcttaaagactattaattcagatcttctaaggtgtcagtgaaataygctacagctttttttcctcttcatt

SEQ ID NO: 829100 - DNA, 581 bp, Homo sapiens
atattagtttaaatgttctgcagcttccatcttgaatattttctcttgctcgtgttctctcttttggacttcttgtctgagggtaagcaaactgctgtgtcatgagcagtcctagggaggagcataygttgcaagaaactgaagccccaagtcaatagctaatgtggaagtgagacctgccaaaaatcacattagtgagcttggaaatgtattcttcagttacaatagaaccttgagataactgcagcactgggtggcagtttggttgcaaccttgtaagggacacttgaccaaaaccatgcagctaatctgctcccatatttctaaccctcagaaaatctgtgagatgataactgtatgcttattgttttaagctgctaaattttggagtaatttgatattgaagcaatagagaactaatacacctctgttccagttttttctcagatttctaatctcagtgaaattgcaccaatatctgcccattcccacaagccaagatcctaagagtcatccaggataccactttctccttcgatctctaagtcaattatagttatacattggtatccatggtggat

SEQ ID NO: 829101 - DNA, 625 bp, Homo sapiens
ctgagctaaccatagaattattgacatgtccatakgtcatttatattgatggcctttgagagtttttgctaaaccgagttgttcattttagtgcacccatcaactaaatatttggtgtcacaattgccacaatattaaacatgtgcaaactccttcattatatagttatatcacagttcaaaaatttccctgcctttcacagcagccatactctgcaatgaaatttcaattggtgccaatggttctatatactaaatatgtttcttttaaagtaagcatttccattgatccaaaacaaaataaaaagcatctaaactcataatttcctgttagtttttatatctaaaaattgaatcctattatttaaattaatctgatccaacaatttatatatcacttttgtcctcatctctatcagtaaggtgaaattctacacatttagaatgaagagtgttcttggaaataacgccaagagatagctgacagatttccacaacagcaatcgacaggaaaatatcaattactttctgaagctgacaaatctaatagtccctgctatgttgagaaatgtcttataaatgttggagaaggaagagcttaaaccttgggaagtcactgaaagtac

SEQ ID NO: 829102 - DNA, 566 bp, Homo sapiens
acttttcttgctctgagaatagtaaaaacacaagtcagttattatctgggcactactggttactcttgcagagctttggtcccttgtggttaactaacttttatctccgtggatatcctgaaktgtctggggtttttttcagtagactcttttctagagcagttttaggtttaaagcaaaattgagcacaaagtacggagatttcccacatatccccagctcctacatacacacagccttctccactataaacaaccccacccaggtggtacatgtgctacaatcaatggacctacattgacacatcattgtcacacagagcccatagtttacattagattcactgttggcgtggtacatgccatgggtttagacaaatgtgtgacatgtatctaccattacagcatcatgcacagtagtttcactgcccgtaaaatcctctgtgctctaagtactcatcactcctccctcaacccctgtcaaccatggatatttttattatctccatagttttaccttctactgaatgtcatattttaggatcatatggtaggtatccttttcag

SEQ ID NO: 829103 - DNA, 648 bp, Homo sapiens
ataaaatctgcctcttctctttctctaggaagtcttttaatagtcgattattgtgtaaatcaatatgacaataaataaaaggacattttaaatggtcaggttaaaaattaaaagatggctgaatcacacasaaaatgcataaattcaccacacataaatcaaccaagttgactgtagagcgatttcaactatgttctttcaaaataagaaacactgaacctgtaagagagtatactcggataagatagtgatgcttcttttaaataataagatgaaaacattctctaaagcacacaggtgctctaaatatgagacccactctaaaatttttcttcttttgtgtagatttgccattctgagcttttgtgaccctctcttttcattttcttaccttccaaatggcctagcctggccttgtactcaatctcacttacatgagcaggtcttttacatataaatggttagcatcagaggaaaaatctattcaccaaagataattgaaaattcctaggtgcttctccatcttgttacccttcagctttcttctccaaatccattattttggaaagtaagttctgtccaaagcatagcttctcaagtttgattctccatttaaccaatggccctccattattataagctacaata

SEQ ID NO: 829104 - DNA, 622 bp, Homo sapiens
ctggttccttcattaattaaggagttgactaaagtctgttttttttgtgctaaatttatatttgtatgagagttgctatggtctaaatatgagggtccccccaaaattgtatgttgaaatccaacttccaaggtgatggtattagaaggtaggacttttggggaggtgattaggacataaaggagcccttaagaatgggattagcaccttaatgaaaaagaccccaaagaactgccttgccctttccaccatgtgagaacacagcaaaaaggtgccatttttgagaaagcacattcttaccagtcactgaatcttgatcttaaacttcccaacttccagaactctgagaaataaacttctgttgtttataaaatacccagtttatggtgagatgagctctgatttacaatagtttgacttaaatttttgactttacgattgtgcaaagagatatgcattctgtagaaaccttactaaatatgagtactcatataactgttctgytttttacttttagtaaagtgttcaaaaattacatgagacatttaatactgtattattttttaaaaggctttgctttagataattttgctcaactataagctagtacaagttttctgag

SEQ ID NO: 829105 - DNA, 602 bp, Homo sapiens
tttgggaattgaagtaggtttatgaattaaaattatgtgaataaaatataaatactgaaaaatgtaaacatgctctaaaaattgttactaatttctttctttctcacaagaattgaagtgttaagaaatgtttaaaaggagtgaaatatgaaaaaaaaaaatcttacagctttgccaacaggtagtaaaaaatataaagccagccctcatgtagttgcagaatatgtcaaaccaatgttctctggtgctcacttgacacaagtgacaatgtagaatgtaaaattatcacatgtaaggtcacaggtagggatactttttttttttttctttttgagatggagtcttgctctgtcacccaagctgcagtgccgaggtgcaatcttggctcactacaacctctgcctcccaggatccctccagggtttaaatgattctcgtgcctcagcctctggagtagctgggattacaggtgcccaccaccatgyccggctaataactacagatactactgaagtactattaactgggtgaagcttaaaaaatattgacagtagtctatgggtaggcatatttaaaatcaaataccctacatgggtacctgg

SEQ ID NO: 829106 - DNA, 415 bp, Homo sapiens
ctagagtactttcagaatcataccattacactggcaaatatgacatatatgcaatatgattaattggtttgtaggtagataaaaataaactatttatagtttataacataaccctagactctcagaatatatcaaaatgactcatcataattcatttctatttatattaataaaataaatatatcattgcaatggcatatgacttgtttagcagaagaaatagatgataatttagagaagttgctttacagaattcatgaatatataaagaattattagctaaagaaagcataatttacgggagattataatagaccttaggaatcagatatcttgacctccttaggaatytggagaggtattcaaagccccagaactggatgcaagaagaacaatgaaccgagcctcctaattc

SEQ ID NO: 829107 - DNA, 560 bp, Homo sapiens
gacaaggaaaattgccccacaacaggtaatagcaccatcttggtgaatactgacagcaataatgtataaacaatggcactttaaaaagtgagaattgcggccaggcgcggtggctcacgcctgtaatccgcccgtaatcccggtactttgggaggccgaggcgggaagatcacgacgtcaggagattgagaccatcctggctaacacggtgaaaccctgtctctactaaaaaaacaaaaaattagccaggggtggtggcgggcgcctgtagtcccagctacccaggaggctgaggcaggagaatggcgtgaacccgggaggcggaggttgcagtgagccgagatcacaacactgcactccagcctgggcgacagagcaaggctctgtctcaaaaaaaaaaaaaaaaaaaaaaaaaaaaagggggaattgcaatttgttatataatattatttatcacctctataaactttaaaaaagctttcatataatgacatgctaaaaattaaaagcatctaaaggkggtataaaagcctaatttattaagtaattctcaataaagc

SEQ ID NO: 829108 - DNA, 608 bp, Homo sapiens
ctagaggccggcaaagactaaagactccaagcacagccattgagggatggaccaagaaagagacagaggaaagatgtaagacttggaaactggatgtagaacgggagagaaagcaaggaatcttacaaggctctacaggaatagggcaagggactgcacagctaaacaggaaagatttttcttttctttttacattagatattattttcatacgtttggacacaaccaggctacttgtgatttttgaggcaacttctctacttattttatccacacgagttgtctttttctatttattctttagaaagatttctttgtggccctcaataatgctgaaaagatttctaattccaattctggtgcatggcacacataaggaagttaacttgtaacatcagcattatcaaactaaaaatatggaattaagaaaaaaaagtcatcaaaattagtttaccaaagttctctattagttgtcccaccagaaccaccactagcaaattttccaggattgtgctatagagaaaggtggcaaataacaaggagcactytctacacacagaaggtggtgattctggagcccctccaaaaggtggctgctctatctatga

SEQ ID NO: 829109 - DNA, 594 bp, Homo sapiens
tgccccatctctcttctgtgttatggcccctggccctgctcccctccacagcatgtctctcctctaggttggcaagctttatattaataacataaaacctttgtcacacatgagatggaatgcaaatcatcttacatatattatcacatttaattaacaacattatgaggtaggtactattattaccactgtctatctagacgggaaaattaggacttggggaagtcaagaaacttataaacaaacagcaggctggagtttgagccccagcaggctgactcagtacctgtgcacataaacaccagaccatcttgtcttgtctatatatggttagtacttcaccttatgcctttgtttcctctgtcctctgagtcagcctggcctccatgtttctgactctagactgatcacttaatatttggtttttaattattttctctgtcacagatgctataaagggaaggccaaatgccgcttgcctggcttctctcttctcctaagaaaagccagtcagggggccatctgcagggcaatcagtcctggtcrggaagaggaaagcgcccaggcctgtcccttggagggccatccctcctc

SEQ ID NO: 829110 - DNA, 616 bp, Homo sapiens
agattctctcaatagaatatgtggttaaatgtatatgagtgcatgtttggggttgaatgggratggggcagaaaatgataaatatcaatttctaatatatccattaaagaaaatctaagatgaaaaattatctttcttcaaggtttcatattgtttgctcaaaccctaggtttctagggggcacttctagcatatgttattttaaagtttagtgaaagactgtgtgctaaaatgtctgttctctgccccacaaactgcttcaagacctagggcttaaggtagtgaaaaataatacataagagcagcatagaacttaacaataaattatgtcctaagagtttcttgatgtattagtttgctatggtatctctaacaaatgaatacaacaataaagaaatgtattttctcacaattctgggagccagaaatcaagatcaaggtgtgttgcagggtggcttcttgtgacctttctcccgacttgcagatggctgtgttctccccatatcttcatatggctttccgcgcacgcgcgcgcgtgtgtgtgtgtgtgtgtgtgtgtgtcctaatgtcctttccttataaggaaatcagtcatattgcattagggctaacccta

SEQ ID NO: 829111 - DNA, 606 bp, Homo sapiens
tcaaaagtcatttatgtcttgacatttattatataaagatgaaaagtgaagtctctgattttaggaagttcagagtctagctrtgaaggaagacaagcatgtaaacaagtaactgtaatataaggtgacaagtgcgggaatagaaatatgcatgcagcactctaggaatgcaaaacagattaattttacctgaggtggctagaaaagcttcagggagggtagttgatatttgagctagaaacttgataagaggaagtgggaaatttcaggtacacagcaggaaaagcaaagataagagccgtttacagatacctgccaggacattaggggaccctcagctgctatcccttttctctatctgggaatctgcagctaagggttatgtagcctttgcttttgaactgtcaaaatgcaaagcatctaattataccccccttattctagacagcaactgttgagttcagactctaagaactcctatccacctgcctgtctgaaagaaaccaccttcagattccacagtaatttcccttctgaaggagaggcctaaggtgattccatggtgcttttatggtgcctctctccctaaagaaaagaaaaaaatta

SEQ ID NO: 829112 - DNA, 403 bp, Homo sapiens
ttctttactgttgagggataaaatactgaaatgggcttctatgggagactgtggaatctctattcagtcaataagatttattgctrtccttggggaatcataaagagaataaaaaactccttgagctgaaggatttagttctttgcttacttaaagaaaggtagctgaacaatctttcagtatcctctctggcccttgattaccttcaaaaacatgattcggggaaattcaggaatctagtaagggaattgtttagaactgtatgttgaattggtcccatgctatatcctgagtctataaaaaaagagatatctgtattttatataggtatttctcctaatttttagtttgacccttcacagtttgttgacatccacgactagctatggtgtggggaaaatgg

SEQ ID NO: 829113 - DNA, 563 bp, Homo sapiens
ttctgaaatgttacatgcatatattcattttttctattctttttgctggtgaatcacttgaaaccrtcgtcctcaaactttttggttgcaggaccattttatagtcttaaaaattattgagatccctaagagttttttagatgtgggttatacataacccacatattattagatattaaacctgacaaaattttaaaaatatttattacaaattcacttaaacattacaaaataaacattaatgtttatatattatatttttaatgttaatagttatattttcttaaaacaattaggacagtggcaatggtctatattttacaaattttctgaatgtcttaatataatatagctgaattttcatatctgattcaggagatgttgtgtgcgttcatatatgtggcattagaatagagaggattattttaaaagctttttcagatgattgtagacattcttcttttaaaactacaccaaaactcaacacctgttagtttcttaaaggtgaatagcaaagagcatatcattaaatttttatttcctctcatatataatgtattggc

SEQ ID NO: 829114 - DNA, 618 bp, Homo sapiens
agataaagttaaaatttagcagtttacaaagaagaaacaatcactatttaatgcttttaagtatgaaatagctgrtatggtttaattattccatttatgttaataagaccatcttctgatcatcaattataatctggttacaaaaatagtagtatgatatactttgagattgttgtatttatccattgtgctaagtaattagcattaagaggagcaatctgttggaacatagtattttaaagtgacaaaaattgctggacgagtatcacatatagtcctttggagatttcacatagtacttttcatgtaaattttgataggcaattacttttcattaatggtggtttgagtacttagagaagacaactatgtactgtacttagtgctgggcaaattgcctggatatacttcatatattgctgttactttaatgaatagtgttatggcaattagaagactgatggcttagaacatttaggtagatgtatttgaaggtccttgaactaagtgacattgctcagtgcgcactgcaaagtaacttatctcttttgaaaagtatgatttgaaagcagaatcacctaagatatttagcataattatagtgcatttaaaataacc

SEQ ID NO: 829115 - DNA, 547 bp, Homo sapiens
attaaaagaggaatgagtaaataaatgcaacattttcattgctaaagtatgatatgtacatacagatgtgtgtgtgtctacttacatacgtatatatgtagggaagttcaaactttccctttggaagtttgagtctaagtctgctgaagtaaattaacaataggcagattaacaggacaaaaaaggtattcaactgtattaacgtgcacatggacgcaggagtcctgcaaatataaaactctaaaaataggcatgtggccaggtgcggtggttcacgcctgtaatcccagcattttgggaggctgaggcaggtggatcacctggggtcaggagtttgagaccagccttgccaacatggtgaaaacccatctctactgaaaatacaaaacattagccagacgtggtggcgagcgcctgtaatcccagttacttgggaggctgaggcaggagaatcatttgaacctgggargcggaggttgcagtaagccaaagtcgtgccattgcactccagcctgtgcaacaagagcgaaacttcatctcaaaataa

SEQ ID NO: 829116 - DNA, 547 bp, Homo sapiens
attaaaagaggaatgagtaaataaatgcaacattttcattgctaaagtatgatatgtacatacagatgtgtgtgtgtctacttacatacgtatatatgtagggaagttcaaactttccctttggaagtttgagtctaagtctgctgaagtaaattaacaataggcagattaacaggacaaaaaaggtattcaactgtattaacgtgcacatggacgcaggagtcctgcaaatataaaactctaaaaataggcatgtggccaggtgcggtggttcacgcctgtaatcccagcattttgggaggctgaggcaggtggatcacctggggtcaggagtttgagaccagccttgccaacatggtgaaaacccatctctactgaaaatacaaaacattagccagacgtggtggcgagcgcctgtaatcccagttacttgggaggctgaggcaggagaatcatttgaacctgggaggcrgaggttgcagtaagccaaagtcgtgccattgcactccagcctgtgcaacaagagcgaaacttcatctcaaaataa

SEQ ID NO: 829117 - DNA, 607 bp, Homo sapiens
acatatatatagagagattaatatagaaactttaaatattgtttttgtgaatcttaaaaatattaatttgaagctattcaatattaaaattaatttaaatatttaagtcatactaagtagagatgttgaatcattgctcttcctctatacttgttacagtatctgggtataagtagtacattaaaaaattcagttggggccaggtgctgtggttcatgcctgtaatcccagcagtttgggaggccgaggcaggtggatcatgaggtcaagagatcgagaccatcctggccaacatggtgaaaccccatctctactaaaaatacaaaaattagctgggtgtggtggcacgtgcctatagtcccagccacttgggaggctgaggcaggagaattgcttgaacacaggaggtggaggttgtagtgagccgagatcatgccagttcactccagcctcgtgacacagtgatactctgtctgaaaaaaagaaaaaaaaaaattcarttgagaagataactaaacttttctaggcagaactctttgaaaacaagctatagtttcaagatggaattaactaaatagtctgccatttatttgatgtttattaattt

SEQ ID NO: 829118 - DNA, 565 bp, Homo sapiens
tgagaagtctgaacatgtagcattgagaggacttaattttggtttagccaaaatctagccactcacatytactaacacatttctatgttagtgtatgttacctccaaatgcttggttctctgcctagcaagacagaaaaacaaatgcaaattaaatttgaaaacttcaactgatatataattatttcaataaatacttactagaaatagcactgtccttggccctgggaatataatagagataaacatgttctttacctcataaaacttacatgctactagcaagaaagcaaacaaaaagagctcattaataaatacaaaattggccgggcacggtggctcatgcctgtaatcccagaactttgggaggccgaggtgggtggatcatgaggtcaagaaagtagaaagctgggcctgtagtcccagctactcgggaggctgaggtagcagaattgtttgaacccggaaggcggaggttgcagtgagccgagatcgcaccactgcactccagcctggtgacagagtgagactccgtctctaaataaatgaataaatgaataaataaa

SEQ ID NO: 829119 - DNA, 456 bp, Homo sapiens
gcagagaagacaggttcttggttttattctytagtattaagctcagttctctgttttgtaatgcctaaagggatattatgattctttacagaaaaaagacataattttaaatccttgtgctttggctgaatgaagagtgaggtgatagaacctggtggagggaggggcaataggggagtgggagggttccattctttgtcagtatagtttccatgcctctccctctctctctctctctctgtctctctctctctctctctctctctctccttttgatgcatagccaattgcaatctgcacacaatttagatgaagacatttaactgaatatccaaaacctaaattttcttttctttatagatctagaatttttcaacgatgttgcttttgtaacatacagtttgggaaggcaatattattggataaggttttgtgttctttcaggggagaaaccat

SEQ ID NO: 829120 - DNA, 600 bp, Homo sapiens
cgtgagcattggccagtcataaaagatgcaatcaggccatggagttggagcagtgtcttagagtgctttgctttgctaagcataactctttagcagcaggggcagtggatttgaaacatctcggaagacaactttgtgggcctgatgcagtaattgtttaccaacaaataggaaagcatttcaatatttaacagttagtacatctgtaactggtacctaccagtctagtatgggaatcatcaaaatccttttaatcttgagctcatcgagaagaaataatggcttattaaactagcagaatgtaaccaacttggaggaatgtccttaaattctatgcatatattatttcttttctttcagtcatgcaagaattatttattgaatatgtgttatatgatggagactgggtggtaggagggtagtaggatgaagaaggttgactggttctttcttttaggatgattacagtgtaggatgaagccaaacaatacaaaatttacacarataactttgtaatttcaattgtgataaatgttacaaagaaaaatgaagaagcctctgaggtggatcattaattaaatagttctctgaccttgagca

SEQ ID NO: 829121 - DNA, 551 bp, Homo sapiens
ggaggagaaccaagtttgaagagtagaaaatcaagagtttctttctgaatctgatacatttgaaatgtacaagctatgagaacaggtaaaatgttgtgaatatatatctgtagctcaggggagggattgagataggaaatataaattttgtggcatttacaagaacagtttcagtgaagtaggggaaaaagtcatgttggaatgacgagaagagagaatgggaaatatagcttttggaaaataatataagatgatatcttgatgacttcaaggtaaagaaaagttttaaagatgatttaaaaacagattttagtatcacaaataaaagggatttaaaggaaataatgctaaatttttcttaattagaaactttttgttattcaaaagacgctattgtaagattaaaaggcgaaataacagagtgagaaaagatatttgcaattgtargggtgggaaaattttacttttaccgtcttagggtttttttcagctagacctgagaattaagttgacataagacagatcaacaagagaaaatcatacaaagttaa

SEQ ID NO: 829122 - DNA, 576 bp, Homo sapiens
atgcagatatcttctataaagtcagacaccaaagagttgccaaaaagtaatgctattttcttcgccagatttttgttttagaaaatgtttttcataacaggcacatttgttaacatctaatggcttttcaaatatactaataaatatatcacttttaatatggtaaatatcaacagataaaacccactgaagcaaaagctttttgtagtcctcaactaaagagtataaaaaggccctaggacttaaaacgcttgaataccagtactctatatagtgtgcatctaaccagaaaccttaattttactacttgcattgaagttttattagcagcttgaggtatgccattatatcttggactaggaaattaatttttcctcaatagattcaaaactagaacatccagaagttactaaatgaagtgaaatgaaggcattttaaagtagctatgcattttatgtattcyctattcttttgtttaatagttgaatgaaaataggcaacctctatgtgggctaatacaatcaaaacctatccacctacacacataaagtacggcaatcatctgtaacagaaatt

SEQ ID NO: 829123 - DNA, 642 bp, Homo sapiens
acaagggctgagaaattggaggttgctgggaaaagcagctctactatagaaagggtccctttctaagtaagtcacccttgggagttcagtctgtgaatgtcagtagaaggatgaagggaagcaggttacccagttctgatgtggggcatactattgcacactgctttctgcaagcagcacttagtagcactaattgaatccaaccccactgatcatttcagataccaacccccatctggcctatatctactcaggaataatggctgtgggtgtcatagaggtaatttgaaagacattttcctctactgctttaagtgaaacctcaagaatattttaaaaaaccctcagcagtcccaaaatgtcttattcagggttaataactttctttccactggccataatggaatttagtcctcatttatgtgttcttgcttttatgaatcccagaaagatggcctgattttaaagcttgtccttgactcttcttcaagcagcaggatccagatcattcactctgccaccataattttaacataaaacactcctaaactgtgtctgagacgattacaaatttctttatcttgcagtaaaagtaaaatctcaaaacttttacarttcttaatagtatttaggttaccctag

SEQ ID NO: 829124 - DNA, 616 bp, Homo sapiens
ttcaaaaatgcacaaataaaattgtaaaatatataaccttttcaaattgtttttttccactcagcataattccctgaaaattcactcaagttattgcatatctcaacagttcgagcagtattccaaarcatagatgtgcagcattttgtttaacagtttacctgtttatgcatatctgggatgattccagttccaagaaagaacagcacaaatttataataatgaataaagctgttatgaacatacctgtacaggtttttgtgtgaacatatgtttccatttctctagtataaattccccagagtacatttgttgggtcacatgctaattgcatacttagtcttaaaagaaactggcaaattgttttgtagagtgcatatatgtgcattttctaccagcagtgtctgagagatccagttttctcacatctttgtcagcatttgatgttgtcactatacttatttagccattctgataggtatgtagttgtccctcattgtggttttaatttacatttacctgatggctaataatgttgtaaatctattcatgtgcttatttaccatttctatgtgctttttggtgaagtgtttctttatgctttttgtccattttc

SEQ ID NO: 829125 - DNA, 407 bp, Homo sapiens
cacttcttcaagtctggctcaggggcaggcattatttgttaatatttcacatgaaagaatataaaggctttacaggaatggaaatccatagactaacaacttaatgttccattaagaattaaatcgtctgatgcattaataataacttcttaagtgttcatagatatttatagctaagaaaaccctcatgataaacatggtagacaccacactcctggctttagggataaggaatgtgaagctcagcacatatgaagcagctcacctgaaatcatgctgctagatactgcagagctgggaactcaactcagaaatgtcctaccatgaacttgaagcatttcaarttaatatttataaagcttcttatgaactggactaacaaaagatacaactgctctaggtgtctt

SEQ ID NO: 829126 - DNA, 404 bp, Homo sapiens
atgctgtataataaatctcctgaacttatttccatctaattgaaattgtatttcctttgatcaacatctgccccaccccttcccactcctccccactgcccccagcccttggcaaccagcattctactctcrgcttctgtgattacaactttttaagattccacatatcagtgagatcatatagtatttgtctttctgtatctggcttatttcacttggcataatgttctccagatttatccaggttgtcacaaatgacgggatttcctgctttttttaaaactgaatggtattccattgtgtctataaaccacattttctttatccattcactcagtgatggacatttaggttgcttccatatcttggctactgtgaatagtgctgcaatgaacacaggcatg

SEQ ID NO: 829127 - DNA, 339 bp, Homo sapiens
tttttgatatatagaaaataaaataactgcaaaaactgtgatttaaaaaatatatctttatgcaaaataactgcaaatgaaactactactactatgctgatagcagtggagtagtattattgatgatatattgattactatcttgatagtagtggtatgctagtattgctcagatattgattactgcattgatagtactagtatattattattgattatatattgrttactatagtagtgatagtattttgttattattgatcacacattgattactgaattgatagtagtagtatgttactattggttatatattgattactatgctagtagtagtat

SEQ ID NO: 829128 - DNA, 339 bp, Homo sapiens
tttttgatatatagaaaataaaataactgcaaaaactgtgatttaaaaaatatatctttatgcaaaataactgcaaatgaaactactactactatgctgatagcagtggagtagtattattgatgatatattgattactatcttgatagtagtggtatgctagtattgctcagatattgattactgcattgatagtactagtatattattattgattatatattgattactatagtagtgatagtattttgttattattgatcacayattgattactgaattgatagtagtagtatgttactattggttatatattgattactatgctagtagtagtat

SEQ ID NO: 829129 - DNA, 566 bp, Homo sapiens
atcccctgtttcaataagaactgtagctactattttttgttcttttttttttttttttttgagatggagtttcactcttgtcgtccaggctggagtagaatggcgcaatctcagctcactgcaacctctgcctctcgggttcaagagattattctgcctcagcctcccgagtagctgggattacagatgcctgccaccgcacccggctaatttttgtatttttagtagagacggggtttcatcatattgatcaggctggtctcaaactcctgacctcaagtgatccgcctgtctcagcctcacaaagtgctgggattacaggcgtgagccaccgtgcccagcctcagcctaattttttgtatttttagtagagtcaggggcttcaccatgtcggccaggctggtctcaaactcctgacctcaggtgatccacccacctcggcctcccaaaatgctggtattacagatgtgagccacyacacccggcccattttttgttcatttatgaagtgccaggccttgagctaaacactttgcatatattattatgaagtgacataaatgaac

SEQ ID NO: 829130 - DNA, 457 bp, Homo sapiens
gtctcccccgacctctgtcccccacccctgcttgcccctccagcccccaacctgcctctgcctgtccctctttcatctgatctcccycacctccctttactattcggtgagttgggagagttcccagccctctggctggcctccttatttacaagagagaaatcaaagtaactccctcagagggtagttagaaaaattaaatgagaaggaggtgaggtctcctccaccctcctgccaggctctgcaccccttgtgctcagtgcggtggggtgaaaggagcaaagcatcatttaccaagtgtggtatggtgggcgagtttctctatcagcctgcactgggatttgagggagcagggccccagcaagtgagagtgcctggaatccctccactggtgtctaaccttttagggtgtcagtggcccataggaaaatgcaaacatttctgggccaaatccctc

SEQ ID NO: 829131 - DNA, 595 bp, Homo sapiens
atcctctgctttccttttaaatataaatttcatctttaagtcattttttgtctcccacatctgagcataggtttttagaagcagtcagaccacatctcgaatgctttgctsatggaaatttcttccaccagataccctaagtcatctctcttaagttcatacttcaacagatccctgaggaatggagataatacagccaagttctttgctaaggcacaacaaggatgatctttgctccagttcccaaaaagtttctcatttccatctgagacctcatcagcctgaacttcacagtcaacatcactatcagcatttcagttactaccatgtaacagtctctaaggatttccaaactttccctcatcttcctgtcttctgagctctccaaactcttccaacctctatctgttacccagttgtaaagctgcttccacattgtcaggtatctttataataatggagggatgacctaacacaaaaattggtatcagaagtgagttattgctgaaaagaatcagatcttgtgaaaactcattatcctgaagatagcacaaagccataaagggtctacccacatgatgcaaacacatcccac

SEQ ID NO: 829132 - DNA, 503 bp, Homo sapiens
caaaaaaactcaacatcacggatcattagagaaatgcarataaaaaccatatcatatcacaccagtcagaatggcaattattaaaataaaaaaataacctgctggtgatgctgtggagaaaaaggaacacatttgtactgttggtgggaggacaaattatttcaaccactgtggaagaaagtgtggttgtttctcagagacctaaagacagaaataccattcaacacagcaatcccattatttggtatatacccaaaggaatataaatcagtctattataaagacacatgcacgtttacattcattgcagcactattcacaatagcaaagacatggaaccaacctaaatgtccatcaatgatagactggataaagaaaatgtggtacataaacagaacgaaatactatgcagttacaaaaaagaatgagataatgtcctttgcaggtacatggatggagctcgaggtcattatcctcagcagactaacacaggagcagaaaac

SEQ ID NO: 829133 - DNA, 641 bp, Homo sapiens
aaccataaattaacagaatgcagaaatttgtctcaatatggtgtctctatggagatgcttgaaatatcaagcacccaattgctcaataaatgctaattggcaaagataataatgatatcttaactcatttcccaaaaggctttcttactctctgttgatttctccatccatctgctttagaatattaaaaggagaaaaagaattcagtactcataagaagtataaaattttctacaatttttgtagtttgagacatttctcattatacatttttattatacacatacacacataccttactacagttaattagtttataatgattaactttggaagcctctcccttctttgaattaaaacagatatttcagagattacttggatgaaaaaaaatgaggaagaggcctgatccatatttattgttacgctttttgtgactattccttccatatttgtgtggatctatcaccaggttatttattctgttccagtgatctacgtgtcaaaccctctgccatttacacagccttatatattgaagctatataataagtcttgaaacgcataaattaatttttcctcctttattcattttctcccyaatgctattttagttatcctagggtttttgccctgccata

SEQ ID NO: 829134 - DNA, 606 bp, Homo sapiens
cagagagaggtcattctccccagcccacttataactttaaattgtataatttaaaaccaatgtgagattgtttgagtaggagtaagaacttttttcacgaaaagtatcaatacagaaattgataaattggcaagcaatacagtcatgtgtcagcttaattttgaattaaatacaaatatttttcaaaaaagttctaaaggagttttgtgattacattttataaatgttgatccagttgatcacttgtactttacaggtgtccccaacccctgggctgtggactggtactagtccccagactgttaggaaccaggccacacagaaggtgagctgcgggtgagcaagcattactgcctgtgctttgcctcctgtcagatcagctgggcattacattctcataaaagcgagaaccctgttgtgaacagcacagtgagggatctagattgtgggctccttatgagaatctaatgcctgatgatctgaggtggaacagtttcatcccaaaaccatgtctcatcccattcaatcccatcactgtccctggaaaaatygtcttccacaaaatagggccctggtacaaaaaggttggggactgcttctatagaa

SEQ ID NO: 829135 - DNA, 690 bp, Homo sapiens
ggtaatacaattgtaccttggtatccacaaggattggttccagaactcctggattctaaaatcctcagatgctcaagtcctttatataatgtattagtatttgcatataaactatgtacatcctcccatatactttaaatctctacattatttgtaacacctaatataaagtaaatgctctttaaatagtggttatacagtttcattttttatttgtattatttttaattttttttcaaatattttccatatggggtggttgactcctccaatatggaactaggatacgctttttctgagatttgaatgggagagaatctacacaagtcctatctgccccatttaaattgtagcttagaataatcttgttcttctggtgttaaaatcttttctggttctgtatttttatttcataaaatatattttctgtgtatactcatttatgcttcagggttgctctgcaactatagtttcgtcacagtttattccttgacctgtttctcatcttctctaatcttcaccttaaattatccagaagttaggggcaaaaaaatatgactaggtaaaattgtgcagcctcttctttatccctgatgccactgccaatccccagttttggaataggtcatatatggrgtggttttcatatcttctttctctgataagtccccagactttatggttcatgat

SEQ ID NO: 829136 - DNA, 595 bp, Homo sapiens
gctcatacatgatccatcatgtattaatcctaaacaagttacttggcttgagcttcattttcctcaactttgaataacacagcacttcctacctaaggttgctatgaagataaccaaaaatgaatgtaaattcattttcttttttaaatttttattatttttgagatggagtttcactcttgtcgtccaggctggagtgcaatggcacaatcttagctcactgcaacctccgcctcctgggttcaagcaattctcctgccttagcctcccaaggagctgggattataggcgcctgccaccacacctggctaattcttgtatttttagtagagacagggttttaccatgtgtaaattcattttctaagttgtaaagttggagataaaaaggttttaatattaaaagcttcttaaaaacactagctgaagtatccaaaattttgtttaggagctcagtttgaaaaaatgtagaatataaatgtggaatccagacctgggctccatttccagctctccaccggactcaggatagttataaccaatgtccaggcttccactgggaaaatggaacttyccatttaattaggaaatgaggt

SEQ ID NO: 829137 - DNA, 611 bp, Homo sapiens
gccgtccactcctgggcatttattgggagactgtttattactgaatgaatcttgttacttattattggtctgttcacatattctatttattcatggttcaatcttggtaggttatatktgcccaagaatttatccatttctaggttttccaatttgttgacatacagttgttcataatagtctcagatgaaactttgtatttctgtggtatcagttatgaggtctcctttttctctgatgttttttatttaggccttctctcttatttcttcatctagttagtgatttttcaattttgtttattttttcagcaaaccaacttttcattttatgtatctttttgcattttttcctatttctcttttttgattagttcttctctgatctttataattcctttctttctaatttggggtttggtttgttcttttttttctacttccctgaggtgcattgttagcttgtttatttgaaatctttccacttttctgatgtaggcatttgctgtgaacttccctcttagtactgattttgatgtatctcataggtttgggtatgttgtgtttctagtttcacttgttttaagaaatgttttgatatctttctcaatt

SEQ ID NO: 829138 - DNA, 550 bp, Homo sapiens
tgccacggatgacataaaatgcttggcgcacagtaggaaatcagtccacttccctgcccctcgtctaccttcagggcaggatcaccatggcattctgtattatctggcttccccccaagatctgaagcaygctgggcacataattaatttttagtagtaacctgatgagtgaatcataaactgggcttctttttacaggctattcctaaagctaaatatttgtaaaactctgatagatgctctgcaaaatggaagtgccagggacaagggaaggatcaatgtcatcaactcactgaacaaagtcagactggactagggctgagtcgaattatgccaggaaaatgtgttctctaggccaaagggtagggcactggatggaaaaatcagcccctcagagagctgaaagagggtttctggatggaaacagggcattccaggccagactgggctgagccatcaagctggggccatggtgctgttgagtccttgggatcccaatgtcatcatgaaaatcatcaatttttttagtgcctggacaggcgaatggaaa

SEQ ID NO: 829139 - DNA, 605 bp, Homo sapiens
ttcatacttcaaatcaatcttgtatctactattacattttatgcttacaacattccctgcttccattttccaaatctgtgatgaaagggtgggtaatattaataataatattaatattctcattcatagaaaaataaaccaaggtccagagaggtaagctctttgcctgaggctagacagcagaggggagcttcaagctcaggcctccaatctccaggtagatcctctttccatatgacctggccccacaatttccccttttcctgctaaaaaggggaaagggacaaggctttagatttaggaaaactgcttttctctcattcaatggtgatgtaatgatggcgatcactgcctctctttgcatatgggaagccaaggctggtatgctcttagttacccatcgtcctatacagactgctctactgttgtagtttaagcaggcagcgtcgatagtgtcatggaatgaacatttcttattgaaaatacttttcatgttgcaaaagcaatatgctgttttttaaaaataagactatttagatacattgcttataatatggaaaattgaacaaacagtaygtaagagattggccaaataaacttctaga

SEQ ID NO: 829140 - DNA, 581 bp, Homo sapiens
gcaacacttgggctcactgcagtagcagcaggaagtgactaaaaaattattacagtagttcagtatatactacaactaattttatgcagctgtaatttaatactacatctttatgtttgtttacatttctcttaactgtgaatggcataatgtatggtctgtttgtgtgcgtaagttttgatcaattttaactttttaaaatagattcgtgtataattttttgtagtaatttataaaatagactagtttttatctatatgtatttatgacacatgtaacatcttcttaattttttggtatttctaggctacacagttcatctgggagttttttcagattgttacatatctctacaattttttccaatatacttattgagaaaaacctgtgtatatatggacctgggcagttcaaacctgtgttgtaatcagttgacctgggatgtggcctgagcatcagaattttttaaagttcccaggtagtttaaatatgcagycaacgttgagaatcactggaataataggagaggttcaaagaataagaaagaagtcttggcaattttaaatctgagtacaaaactt

SEQ ID NO: 829141 - DNA, 605 bp, Homo sapiens
tttttctgtctttacagcttcccgtgaggtgtttggggcttaaatagatgctgcataggaccttagccattgcatctgagccatctctcatgatttaacactgggtctcaaccctggatacctagcaggataaagaattctaatttccaggatgcacaccagagagttaaatcagagattctggggtggggtgcaggtatcgtcacattttaaggcttttcgaatggcttcaatgtacagccaaggctgaggaccactgactggtgtagagtggacaaggtagcacgtgatttgaactgtcttctcatcactaagcaactgctctacacttgaaaatacctgtcagattgggtttcagttctaactttgtcttctcataccataactagtacatcatggagaaatgctgccttggtttctgatatctgtctcattctgtgatagacacttccataaaatggcaatccatatttccargaaatgtacacattcagtttctgtactgtcttgatagcagacagaccatgctttttattagagaacatttcaggttttcagagacccatatccctactggccccaaggaaaagatgtcaccttggctt

SEQ ID NO: 829142 - DNA, 525 bp, Homo sapiens
tggatcacctcataatgacctggtagcaatgactgtacaaggcaaaaagaaaactcttggctgccagaagctgggaggaatttctaaggctcatggggattagaaacctctgtgtcactgcaggagggggaacaatgccttctgtcagtttttattcaagtgtttcattttgagccccaaccacactgactttgatgtgagaataaattaattccagagccccgacttgaaatttcctgactctgcctgtctattgtctatccacccacacaaaagagaaacagcggaaccttgtcagttttcaagtgagcagcttgcaatacacattcttctagggagctttttaaaaggagcattggagtttttcaatcctccttcttcttccttaagtatttgcccattttaatgttgagctgctttctttatatggaaaaaagaattgctccactgagctgtaraaatttgattttcttggtcagttggggtcaatcttactctattaaaaattttaaaacaatcacttat

SEQ ID NO: 829143 - DNA, 575 bp, Homo sapiens
attgagatttttctcttttctaatgaaaagataatgaagccaattactaaacagactagttttcagttttatgctaactaaaatgtaataaatacycacttttattggcaatgttattttaattacattaaacttgcttgcttttaaacagatgtttgtatgttataattcaagcagagttaaggaaagaaaggcattctgaattctgtgctaggtagaggagtgaggaggaaaagtggtttaactgatgagcttctattttccagcccagtggttctcaatgtgtgtttccggaccagcagcatctatatcacctggaaacttggtagaaatgcaaattctcaggtattaaccccagacctacagaatcagaagttccgtgggtggggtccatcaatttgtgctcaactaaacctccaagagattataaagcctactcaagcatgagacccactgctccagcctataaatccatgtcctttcatcactcccttaaccatggcactgcacatattgttcccctagtgttcacccttccaacaggattaatatccagaagatagagccgaaaagtt

SEQ ID NO: 829144 - DNA, 601 bp, Homo sapiens
tatctattagaatagctatgaataaaattctgttaggatggctaaaaaactgaccatactgtatgctggtaaggatgtggagaaacagatactctcattcattgctgtggagatgcaaaatggttcaggcactttgaaaaatagttggcagtttcttacaaagccaagcattgtcttaccatgggatccatcaattgcactcctggatatttacttaaatgagttgataatttatgtccacacaaaaccctgcataaaaaatgattatggaggttttattcagaattgcccaaacttgaaagcaacctagatgtccttcaaaaggtgaacagataacatgtaaatccaatgtaatattattcagcaataaaaagaaatgagctgtcaagccacaaaagacttagtgggactttaaatgcatattactaagtaaaaacacccatctgagaaggctatgcactctatgattcaaactatattacattctggaaaaggcaaaactagakagacaataaaagatcagtggtttccggtggatggggaggcagagatgaataggtggaacatgggaattttggggcagtgaaactcttctgtagga

SEQ ID NO: 829145 - DNA, 554 bp, Homo sapiens
atttcaagaatcaaattttcctaaagatcagactacctttgacccatgccagctatgagtacattatactgttcattttccaatacaatattaaagaaagacaacagatctgaaaacctgttaaattctygacaaatttaaaccttgcttatgtaagctatgcacagtgaggcaagaaagacttcaaggatttgcaagggctgaaagaggaggtctctgccagggcaacagcagttcgaatgtgcaccaccacatctgtacatttggcacagtcatctcagtctccacttggcagctacggagaagggaaggcaggaagggaccatagagaaagaagcctatttcttaccataaaaccacaaggacagaataaattgcttttcctaggatgcagagaaggaaaaagcagcctgcagacttgcaaggggagagacactgctgacattcaatagccatagtggtctcaatactatccacctggtcactgccatcaatgtggttacaaaaatacggtgagtcatggaggcaaaggtgaaactctatgtagtcataat

SEQ ID NO: 829146 - DNA, 422 bp, Homo sapiens
ccaacccaagaacttttgagagcattccaaaactgcgttattttgtattcatgggcgtggggagaggggggatacttcttggcaatttatttcccctgaagaacagcactccctatccaggttcaccataaaaactgtgtgtcctccagagtctagggaagcatcgtcctgccagctctcccttctccccacaggcccccgcacataacagtggcgaaacagatggtcctccccctccccttctcctcgtcccttccgcagtcccacagtgtcctcccacccttccctgacaccttcaccagcgcttagtggccgaggccgcccgtcagggctcccaacaagtgcaaacttcggggaccttctctctgcycctctgcccccatctcatctgggttctgctgcagaactctcccacgacccca

SEQ ID NO: 829147 - DNA, 576 bp, Homo sapiens
tgtgccagacagttgctctagtcactttacrtgtattatcttgcttaaaatttaccagaatcctgtgaagaaattctactgtcttcacttttcagatcattccgagagattaaatgtctttaaccaagacacagctggtagagggtgctgtcttggaatgctgccctttggctttcggtgctggggtgctcaagcctactctgttcagcctgaacagtccacaggagtggaggctttgagtgacagtgtctgctgttataccttttacattttcttgatcagcactctttgcccagactcaagactttttggagagattataatttgcatttcggctaaataagagactccaaaactagtcagcctgctgcaaggcagtactagccactctctgaatccttaatgaggcgagctgtttcccttccccacaagatggggggaaaagaaagcacaattttagttttcacatttttcttgatcaattgttccaaagtggttttccttagtatagtgtattcaaatggactgctgtctttaggcagtgctaggatggtgcatcctaatgtgagacattct

SEQ ID NO: 829148 - DNA, 408 bp, Homo sapiens
attctttaagaaagaaaaatcaatgaaatttgtaagcttttagcaagactgatgagtacaagaagaaagaagaagataccaatgagatacatgatattatgacacaacttgcagcaattaaaaatataataagcaaatactaaaaacttgtgtttataaatttgacaagtgagaaggatgaaccagtccttcagaaaccataaataactaaaattcaactaaaataaaaatagactatctgggccaggtgtggcagctcacccctgtaatcccagcactttgggaggctgaggtgggcagmtcacttgaggtcaggtgttgataccagcctggccaacatggtgaaactccacctctattaaaaatacaaaaatttacctagcatggtgacaagtgcctggattccca

SEQ ID NO: 829149 - DNA, 562 bp, Homo sapiens
tctttttttaaggcttcaattgggaagaatagagcagacataaaccttgtttaagggttttaaaaaaacgtacctctgtatttgctttatcctgatgtagcttagctccttcttgatggagttgtagaatgctttggtctgaaataagatgagctgaggtgctctattgtgctcattctatagtgaacatccatgaattttcttgtgcttgctttcaaacaatttcaaggtgattagattttctagtgttatgtactgcagagaaaacagatagacggattacattttttcagcttagcaatgagcacaattgtcactcttttcagtaggtattaatatccttcatgggaaacccatggaacttatatacaaaaggagcagaaacattcaaagaaaagagtgaatgtaatttattaacaattccaccaacgcgcaagcttatcctttgcacaaatatttaamttctgcttgttatataatatgtatgatgagaaaatggtagagtgataaaatcagatgggcttcagggacaaactgaatacttttcaagtagcttatacca

SEQ ID NO: 829150 - DNA, 582 bp, Homo sapiens
tcccaaactctatctcaatgtaaggacatttccctacagataaggattgacaagggtttccatgcagtttcatgagtttggggtgaattaragttacatatttctgtgactaaatctcctaagggattaggcaaaggtaactttcactttgtgagatttcagttacacatagagaaagcctgccccctctgcccctgaggagggaactgcggccatatacacagaggagtgcttcttgaaacacattctctgcttacattttatgccctactgactaggggagtccctctgtgttaattaattgacagccaaaataattgtctaaagacatgctgtaactctcttaaaatatgattaagtcttccatgtgataatttcacttccatacctctcccactgaggaaaaaaaggattgtgttaagagcacattgtaggttttctgggaaggaatccaaatcaataatacatgtttctcctcctcagataatcattcttgacctatatagggcaacggagcccccaaggagctcagtgacatagatgcctctgctccttttctgctaagcaagcaggttcatggta

SEQ ID NO: 829151 - DNA, 434 bp, Homo sapiens
tgggagctgggtccaaaaacgaggcaccatcccatttgtggatggatccagatatgacagtcacaattccaactgtgaactgtttctgtgagtgagatccasgacctcatgagtggattatgttcacatttaattctaactgtggactgtgtgtgcatacaagggtcacaatcagaattttgagctgggccctgttttaacactctctgtacaatcttagggcatcatacaatatgcatgacagttgtagttctctgagacctctgtaaaagtgggaagcccaggatcttatctgttgccataagcctagatacaagagtcaacatctcttctattagttggaaccaggcttgagagacagtgacatgcctatgagctgggttcagaaatgagtcacctttccaacctgttgccagatccacatatgacagttc

SEQ ID NO: 829152 - DNA, 437 bp, Homo sapiens
agaaagaaacaaatatacgagaaaaacttcaatcccatgaaaaagtgggcaaaggacatgaacagagacctcaaaagaagacatgcatgtcgccaacaatcctatgaaaaaaagctctatgtcactrattgttagaaaaatgcaaaccaaaaccacaatgaaataccaccttacaccaatcagaatggttattattaaaaagtcaaaaaaataacagacgctgatgaaattgcggagaaaagggaacacttatacactgttagtgggagtgtaaattagttcaaccattgtggaaagcagtgtggtgattccttaaaaagctaaaaacagaactaccattcaacccagcaatctcatcaatgggtatatacccagagaaatataaattattctaccataaagacacacacatgcaaatgtttattgcagcactattc

SEQ ID NO: 829153 - DNA, 577 bp, Homo sapiens
ttctacagatatatcatgtcaaaaatgtttttaaaaagaatcaaataaacaaatttacccactttaaaattctactgtagactaaccttgcctttccccaaaaatcagatataaaacatcaatttcttaagataatgaggtctatatgggaagaaagcccctttaagatttagtcctggatatcctaaggattggggtgtactgaattaggccctaggtctaaagttagctatgcctggcaaatagaaggtgtatgaaaaagtatttttggttattcaaaaccatatattctcaaagtccatggaatatcttgctagtgattcctctttgcatatgtgatttacattttaaatattcaattattattcccagaattccttataccaacagctaaatttttttagatacttttttttcaattttctgtactcctcagatcaaagtaagttgytagcatacatttccatttttaaggtttctgccttactgctttcaatttctttttttcttttagacagggtcttgctgtcactcaggctagagtacagtggcatgagcatggctcactacagtctca

SEQ ID NO: 829154 - DNA, 608 bp, Homo sapiens
aagctgggcagagcccaccacagcttggcaaacccctgaagctagactgcctctctagattcctcctctctgggcagggcatctctgaaagaaaggcagcagcccccgtcagggacttacagatcaaactcccatctccctgggacagagcatctgggggaaggcgtggctgtgagtgcagcctcagcagacttaaacaatcctgcctgctggctctgaagagagcagtggaactcccagcgcagcgctcaagctctgctaaaggacaggcagcatcctcaagtgggtccatgacccccatgcctcctgactaggacacagctcccagcaggggtcggcagacacctcatataagagagctctggctagcctctggcaggtgcccctctgggacaaagcttcctgaggaaggagcaggcagcaatctttgctgttctgcagcctccgctggtgatacccaggcaaacaggatctgsagtggacctccagcaaactccagcagacttgcagcagaggggcctgactgttagaaggaaactaacaaacaaaaagcaatagcatcaacatcaacaaaaaggacaaccacgcaaaaaccccatctgaagttc

SEQ ID NO: 829155 - DNA, 447 bp, Homo sapiens
gttttttgaagatagagacacatttgccatgaagcttaagttcaggacccctcgctagcatgggcatctcccctggaatgtatccatatggccatatgtttctacaaaggctgcaaaggtgagattaaggtaagatcgtttgactacaattcctttccactctgattttcttccttacacttcccttcatgttaatacgatgttagcatgatggatataagtggctgaaagcatttttggggtctgaataagaggaagtagagctctgaatatatttagtttgggtttagtgggatatatttatgtggtttctaggctgtccatgtgtagttaagttatcattagccatcccagtagaggatggcttccaggaatactcctgcccactgtctgagtcacctgtggtggtgaygtaaaggtgcagaaccaaaggtcatctcatatatg

SEQ ID NO: 829156 - DNA, 603 bp, Homo sapiens
aaatggtatctttattgatgggttgtcgataaacctcctgctttatcctgtatccaattaaaatgatccctcgtcagtttttcctctgattcaaacattttaccccacattgtttctgcaattagacagaaaartaagcatctgtgaagtcaacctttttgctttttttactctgaagtgctgcttttttttttcagtaagttgtggttttaaaaaaatccagttatttgaatgacatttattatttttgcagttaataaatgtattttaagtttttaaatccacagtgtagataaggccctagaagcaagtgtagacttcgtccacagctgtactccatcggccactgacagtcttattgcattatttcaacggcacaagcaatcatttacacttgttattacccaggggcatttcaaactgttactgaaatgcatccatccctggagtaaccatctgtgaatggtaatgccataaggtagagagactaaatctaattgatatgcaaaaaggagaatttcagctgtccagctatggagattcaaattgaacctttaataggctgaggatttcagctaaatttttaaaatcatgatatctagt

SEQ ID NO: 829157 - DNA, 603 bp, Homo sapiens
aaatggtatctttattgatgggttgtcgataaacctcctgctttatcctgtatccaattaaaatgatccctcgtcagtttttcctctgattcaaacattttaccccacattgtttctgcaattagacagaaaaataagcatctgtgaagtcaacctttttgctttttttactctgaagtgctgcttttttttttcagtaagttgtggttttaaaaaaatccagttatttgaatgacatttattatttttgcagttaataaatgtattttaagtttttaaatccacagtgtagataaggccctagaagcaagtgtagacttcgtccacagctgtactccatcggccactgacagtcttattgcattatttcaacggcacaagcaatcatttacacttgttattacccaggggcatttcaaactgttactgaaatgcatccatccctggagtaaccatctgtgaatggtaatgccataaggtagagagactaaatctaattgatatgcaaaaaggagaatttcagctgtccagctatggagattcaaattsaacctttaataggctgaggatttcagctaaatttttaaaatcatgatatctagt

SEQ ID NO: 829158 - DNA, 512 bp, Homo sapiens
gtttttccctttgccttagatctgggaaaggttttttttcgtcatggtggggaaatgggcttctgtgcagtcaggggagaagccgatggaggaaaggagtagtgtggttatggaagaggctgaaggggagaaggtcgcgggcatctggaggcctgagatgtgcatgagcatccagtcctgcaccggcgctggtgctgcagtggtgccgtctctgtcactgcagtgctgttctctgagagctgttccgcagcgtgattttgggtgctgttcctcattatgaagcctctcagtcatcttcttcagtctgcactgtacctttcatagatttctgattcaattagctgcagattggtttttgtggcttcctacctgaacgamgatagaaaatgatgatatatatgatggtggacggtaagatgacaaaccagttttgaagtcctctaagaaacatgaaagtggatgtgagtggtagatcacaccagtgaggttgtgattttgattagagtgttgtg

SEQ ID NO: 829159 - DNA, 544 bp, Homo sapiens
cagttccacatggctggggaggtctcacaatcatggcagaargcaaaaggaaaaatgagagccaagcaaaagggtttccctttataaaaccatcagatctcatgagactcactcactaccacaagaacagcatgggggcaaccacccccatgactcagtgatctcccaccgggtccttcccacaacacgtgggagtaatgggagctataattcgagatgagatttgggtagagatacagccaaaccatatcagtgggggaaggagggagaaagagacagtagagagggagaagagagaaagagatggggagggaagaaaaataggagaaaggaaggaaaggaaggaagggggaaaggaggtaattaaagacaggctaagagacattgaccaatttaatgtatcaccttattcggaccctgattcaaacaaattattaaaaataattatgagacaattagtgaaatctgaacattgatagacatctaattgtgttaacaaactattattaacttagtaaatacaataaaggttgtgtagttactt

SEQ ID NO: 829160 - DNA, 584 bp, Homo sapiens
aaaatggctgctactttaagatattaaaagccttattaagccgggtgcagtgactcacacctataatcccagcattttgggagaccgaagcrggcagatcacctgaggtcaggagtgtgagaccagactggctaacatggtgaaaccctgtctctattaaaatatgaaaattagccggtcatggtgtctcacacctgtagtcccagctactgggtaggcagaggttgcagtgagccgagatcgtgccactgcacttcaacctgggcaacagagtgagacctcatctcaaaataaataaataattaaataaaatcctaatataaacctatgtttagagacatgaaacactagcgaaattaatctgtataatgtcttgctttacaaacaaaaataatgcaacttcataatggcacatttatacataatgtgattacacacctttagtagtatattttaataacataaaacacttaaagcacatttttaaaatgcaaaacctctggtaactatccttctactctttatgtccacgagttcaattcttttggtttttagatcccacaaataagtgagaacatgcaatg

SEQ ID NO: 829161 - DNA, 601 bp, Homo sapiens
gctaacttatttataattatttcgtagagacagggcctcactatgttgccagagctagtcttgaactcctggcctcaagtgctcttccagcctcagcctctcaaagtgctgagattgcaggagtgagycactgtgtctagccttgtccggtttaaaatggaatcactttgcttttctattgagttgtttgaggtccttatatattatttctagttattaatctcttgtcacatggagagtttgcaaatattttctgccattctataggctgtctcttcactttgttgattgtttctattgctgtacagaaggtttttagctgatataatcccatttgtccatttttgctttggttgcctgtgcttttgaggtctgtcttaggaaatctttgcctagactaatgtcttgacatgtttccccagtgttttcttctaggaacttcataattccaggttttagatttgagtctttaatttttatttgatttttgtgtatgctgagagaaagggatctagtttcattcttttgcatatacttatctagtttacccagcacatttattgaaaagacagtcctttttccatcgtatgttcttggcaac

SEQ ID NO: 829162 - DNA, 641 bp, Homo sapiens
ctgacattgtttgagcatctgggatccagctacgttcagatggctgggcttttccatgtactgagccaatgaatttcctttctctctttttaaagccacattgagttggatttccatttctgtcacttgcaaccctagcagttttgttggaacagtggccctcactgctgtttgattatggtgtgtccttcttggccctcccatcatcctgcgtgtgaaaccacacactgccaagtattgctcaatattcctgattgtgttgggtgggcatccttgctctgccctctctagctgacagcaagttagaaccaaggcaaattccttaattgctcagagctgtagtttccttgattgtaaaattgcgggtttgggtgggggtggggaagacaccctctatcaaggggctgttgggagaatgaaacgaagtaatgtatgcgtggcattaacacagtttcatattaaacatttgcatttgagtcatttttatcactgttactataaataaaaggcaggttatcacaggcagcaatcctacctttcttctctttgtatcttccacaatgcstggcttatagctggaggttggaaaaaattttaaagtgttaagggcttttgtgccagtttctaggaataaaaagata

SEQ ID NO: 829163 - DNA, 567 bp, Homo sapiens
catattctttggtagaaatatttgcttaaaagtgtatttctaaagtacttctgtagctttctataaactagtgtcaatattgaagtgtggatatatgccgatttttctttgtacaccttcactaacctataataaatccttataagctatcaaaaagagattactcttttaaaggtgccatctggagtaaaattccatgactacaatagtcattctcgctacgctttcttataatttctaaagtaaatctagtagttactcaaataacatttttcctctttgagttttttttttttttttttttttttgacaggggggcgctttgttgcccaggcaggtgtgcaggggggtgatgatggctcactgtagcctccaatcctggggtcaagcaatccttttgactcagcctctcgagtagctgagactacaggggtacaccaccacatccagctgatttttttatttcttatagagaggggggggtcactatgctgcctaggcgggkcttgaacttgggggatcaagggatcctccccctttggcttcccaaagggtggcaactacagt

SEQ ID NO: 829164 - DNA, 577 bp, Homo sapiens
tcaaaagtgtgccaaaagtgacagtgggtaaccaagagagagataaaagatgtccggaggtgttacagatacttggaaaagaagatacacaagtagtttcagaattctgtcagcagrgagagaaggctcaggttttttagctgaatagcaggaaagatcagtcccaggggaagagaactggctctgaatgaaggaagtatatataggtactaggccttgtggataggaagagacaataagaagagctagataattacagaattttatctgtcacaatattgcgtgcttataacatcaataaactaaaagtaaaatcacaaaaccaccaactttacagtaagcttctttgcaaattgtatggctttgtgtttaattaaagcttactaacgggttgggctcagatagttgtactcagaatacattttgacttctttaagcctaagataagaatgttcatcttcatttggatggcatttattacacaaacccaagaattccatgatcatatcaataaaaattaggagaatttcattaggcactataaataaccccttctcctgagacaagtagagaagcc

SEQ ID NO: 829165 - DNA, 577 bp, Homo sapiens
tcaaaagtgtgccaaaagtgacagtgggtaaccaagagagagataaaagatgtccggaggtgttacagatacttggaaaagaagatacacaagtagtttcagaattctgtcagcagggasagaaggctcaggttttttagctgaatagcaggaaagatcagtcccaggggaagagaactggctctgaatgaaggaagtatatataggtactaggccttgtggataggaagagacaataagaagagctagataattacagaattttatctgtcacaatattgcgtgcttataacatcaataaactaaaagtaaaatcacaaaaccaccaactttacagtaagcttctttgcaaattgtatggctttgtgtttaattaaagcttactaacgggttgggctcagatagttgtactcagaatacattttgacttctttaagcctaagataagaatgttcatcttcatttggatggcatttattacacaaacccaagaattccatgatcatatcaataaaaattaggagaatttcattaggcactataaataaccccttctcctgagacaagtagagaagcc

SEQ ID NO: 829166 - DNA, 586 bp, Homo sapiens
taaaattcccttttgggactctgtttttctttaggtaaatgcagtggttagtcatttaggtgagaaaagaggtgccagatgagacaaaggcaggagcagaacaaatccaagagmtgacttgcgctgcatcagaaaatatttgtgtattctgttgtcctcctgaagggaggggaaaagcaagctaattatccatattagaacctagaggtcaagtttattgaaatgagcaagggactttgaagcacagaactagttgcattagtctattctcccactgctgtaaagaaatacctgagacagggtaatttctaaagaaaagaggtttaattgactcacagttttacaggccgtacaggaagcatggctggggaggcttcaggaaatacatgatcatggcagaaggcaaaggggaagcaacacatgttacatggtgggagctggaggaagagagagaatgaaggagctcttttgctgagcgcacactccatgtggctgtgtgtggcatggtgtccctctcccctggtctgtgagtatatgtgactaatacactgctgttgatctcacttgtccagtgtgaagtattagt

SEQ ID NO: 829167 - DNA, 569 bp, Homo sapiens
aataaatgaatatgcttttctcttgctaatctatcttttattacagggttkttagctgtgacccttgtgaagggtgaggaaattatactactttctctctcctacggtaaaatgctgaaattcaaaaggggatatttgggggtaaaataattagacaactgaaaatttcaatatttatttccatgctaaaaataatgttaccaatgcttaaaagataaatttattctggaaaatggggtcactttatttctgaagtaatgttcagcaaaaggagaagaaaatttgaaagccatgtggagaaagatcactatgaccctggtggtcccatcaacattcctaacatgggtactttctaggacaaaattcttatgtcacatatttcacaatattattactcaatgtttcatcccccattggcttaaatattttagagggagatatctgaatatttaaatgtttcagctttgctctgctttgtgcacatgtaccctaaaacttaaagtataataataataaaatttttaaaaaatgcacttaagctacatgttgacttaacttacaacacaagc

SEQ ID NO: 829168 - DNA, 600 bp, Homo sapiens
gtgagttacagagatagggctggagtcattatgtactgagccataattccaggtattatgcatctgtaatttctgacttaatatcttaattaatcctccttgtactgctgtgaggttcacagtcacccccatgaaaacagatgcaatcatttcctacatagaactgggttccattgccatgtctgggatggggcccacctttcccagtgtcctgtctgcaggatctccagacccaactcagaacattcctttccatcttcaaacagtctctctgatcctttttagaggaaagcattccagaaaagacttctgcatttgaggttatcatttcctcacctctcattattcttcaccccacagcagcctggctagtccggccagttgctgatacagttatgataaagtcaccacggacccatatgttgctcagataactgaagatacaattgctttttcagcagacctcaatctaggtgaccgctgcctccctcatggaagctctgctgctactcctgtctgtkcattcacagccttctttgtgcttctttctccactggacagcatataactattctatatccccacagcttgactagaggc

SEQ ID NO: 829169 - DNA, 600 bp, Homo sapiens
gtgagttacagagatagggctggagtcattatgtactgagccataattccaggtattatgcatctgtaatttctgacttaatatcttaattaatcctccttgtactgctgtgaggttcacagtcacccccatgaaaacagatgcaatcatttcctacatagaactgggttccattgccatgtctgggatggggcccacctttcccagtgtcctgtctgcaggatctccagacccaactcagaacattcctttccatcttcaaacagtctctctgatcctttttagaggaaagcattccagaaaagacttctgcatttgaggttatcatttcctcacctctcattattcttcaccccacagcagcctggctagtccggccagttgctgatacagttatgataaagtcaccacggacccatatgttgctcagataactgaagatacaattgctttttcagcagacctcaatctaggtgaccgctgcctccctcatggaagctctgctgctactcctgtctgtgcattcacagccttctttgtscttctttctccactggacagcatataactattctatatccccacagcttgactagaggc

SEQ ID NO: 829170 - DNA, 549 bp, Homo sapiens
gcaagtgtgaggcgctggatcaagtcccttgaggagagcagggccaggcgggctctggccagagccccaccccacgctgtcttggggtgtctcactggctcacaggaacctcctgggcaggaaatgtctgtgtttgaccctgcaggcctggccctggagcttggaccctggtagggcctgaaggaattaggttggattgaactgggttccaggacctcacatctccatttcccatagttggggggcagggaggagacccctggttctggagcgtcagatctgcaaggcctcggacctctggctcaacacccccttgagaggcttctggcctcctggctctgctggagaaggcatggcctgtggacctcctgcattcccgaggcaggctgcgtggctagcatttggaggctggcagagactggctgattcctaaccaaagatgctgttggtgtcttctgatggaatgtgactttctttgcctagtaggtgttattcacagggatccwttagttaagcaaatttgcctaggccccctgttgggtcgtattt

SEQ ID NO: 829171 - DNA, 524 bp, Homo sapiens
tgtagtttagagcagaagggcacgggatcccactcctragtcctgcagtaaagtggctgtgtgtggcctggtcaagctgcccactgtggctgggactagggttcctcctttaaaatacaaggggacttaaactagaagcggcgtggagaatgactagcaccccagctcagcaccctggtggcttcccatgatttactcctccaacttctcggcagctccgagacacaggcaagtggactgagcagcttaactttacagatggcggcaagagcgtggctctcatgggagggggtgacctatctttgagctcagatctcttgacctgtggggtctaaaaaattaccaagacaagcctgggggagtgggccccagagaaggagggtgacccacaagtaaacaggagaagtggggtgtctttctaactaaccctcttatcaacgttcagagtatttgccctcaaatggttaaccaaagtgacacccaaggcagaaacgggcctggaaaggtccctgatgcacagaggc

SEQ ID NO: 829172 - DNA, 524 bp, Homo sapiens
tgtagtttagagcagaagggcacgggatcccactcctaagtcctgcagtaaagtggctgtgtgtggcctggtcaagctgcccactgtggctgggactagggttcctcctttaaaatacaaggggacttaaactagaagcggcgtggagaatgactagcaccccagctcagcaccctggtggcttcccatgatttactcctccaacttctcggcagctccgagacacaggcaagtggactgagcagcttaactttacagatggcggcaagagcgtggctctcatgggagggggtgacctatctttgagctcagatctcttgacctgtggggtctaaaaaattaccaagacaagcctgggggagtgggccccagagaaggagggtgacccacaagtaaacaggagaagtggggtgtctttctaactaaccctcttatcaacgttcmgagtatttgccctcaaatggttaaccaaagtgacacccaaggcagaaacgggcctggaaaggtccctgatgcacagaggc

SEQ ID NO: 829173 - DNA, 646 bp, Homo sapiens
gggtacttaccaccttcttattgggtactaaatgaagcactgtaaagttaacgtttattagacataggacccttttcatttcaaatggagtaagatgacactcatttgggagaatttagggaaacaccagtctgaatagtagaggaattgaatgagctacagtaacaaaactaagatagaaatgtcgcctattaggagtccttagggagctacaattacgaatatttaacgatgacttatttcctgtaacaattatttgtgagtgagtgctttggatgtgttgaaacaatgtattctctgatgcattttgatacttccccctccacatactgtttatacacttaaattgctgtgtgaaagaagaaaaggattgctgggtgtaaagttaaacttcagcctagtgtgaacgattccaaatcagccgattccaagttaatgaaattttaccttagttcacacgaacaggtttagtctgccaaaacgtgaactatgcttggggaaagggaagtggtgcasgcagtgtttcggggtgaatatactctgtgaggacagtcaacacaaagcacaattccaggagctctcattttctttgtgggtcacacacccacaacacacacaacacactgttaaaaattggtgggctcgt

SEQ ID NO: 829174 - DNA, 549 bp, Homo sapiens
gctcccatgaacaaggaacatgttttgcatctgctcctatgacacactagtgtcttttagagtggaaagattgtgtcarcgttgttagggtcattgaaaaattacagactctcccaaagagagggatgtttgcaagggacgtggcagttcacatcatgtagcgtgtgcgtggatgctgttagcccatgagaagctgtgaacgtactaattccaccataggttctcttccttgttcagtttcctgtcgcctctctgtgctgactaaatgatgagctgtgcccatgccacatggggccaaactggagcctgaggcaagaggaagcacatgcacccccatatgtacttgttagaatgtcctcccatattctgaaccaagcagaaaacgtgaatagaacctctggaatcaaaacccatgactagatatgaagcccaatgttgttctgtccgcacatgacttggtttggatgtttgtccctgctcaaatctcatgttgagaggtaatccccagtgttggaggccggcctggcgggaggtgtttgggtcgtgggg

SEQ ID NO: 829175 - DNA, 553 bp, Homo sapiens
ctccttggctttgcctctgtatgaagacctgttcttcagtttctactgcacgttcccatcagcattcaaactcctytcaagtaaacccaggacccttgtttgacctcctgtgcctctcaagctccttacaggagacctctgctgagatgcctcactctctaatcctctccaatcaatgcaggttggaagcctatactctatgaaactgctctgtgaaggtcacctctaccttaacacatcctgtgcaaagttcattctctacatcagagggatctttcagcaaagtctggcacagagctctgctcctttcttctagaaatagtttcccccatggatttgtgggacataaacaatcttatgggtgctgttctgcccgggttccctggccactctttctctcatagtgactccctgcattaatttcctattccgctgtgaaaaatcaccacaaacttagtggcttaaaacaatgtgaatttgatattttacccttttgtaggttagaagttcaacaaggatctttctgggctaacaccaagggggtggcagggct

SEQ ID NO: 829176 - DNA, 554 bp, Homo sapiens
aacacaagtggaatcaatgtggattttgtgttcctactaaagttaaaaaaattgatagacaaaaactactatataaatagaagaaacagaagacaattaaatggggatattaaagaaaacttacatcatgttctcattcacaaggattaaatttttaatcccctaatcaagtggtataacactgtcaataaagctgactgacatagcattgatccaaataaatcacatataacttaagttccataatgggaaatactatttatacaatcacaagttgtgttaaaaaaaaaaaaaagataaagagagagagttctctttatggacattatatagtattattggccttattttctaagactttggcaaattaatgagtaacttgatagcatgcaatagatttttctttaaataaatcagttaatgtgaacaacwaagtttttgtttataaagttgaatatttaataaatggttgtaaatattcctctttaggataagaataactattcatattaattcatccaaagttcagcaaattattatagttcctatcttgt

SEQ ID NO: 829177 - DNA, 604 bp, Homo sapiens
ttctaaccttttttcaaggttcttcgcttccttgtattgggttagaacatgcccctttagctyggaggagtttgttattacccatcttctgaagcctacttctgtcaattcatcaaactcattctccgcccaactttgttcccttgctggcgaggagttgtagtccttggaggagaagagacattctagtttttggaattttcagcctatttgtgctgttttcttcccatctttgtggatttatctacttcagtctttgatgctggtgaccttcagatgggatctttgagtggacatgctattcctttctgtttgttagtattccttctaacagactcttctgctgcaggtctgttggagtttgctggaggtacaccccagaccctgtttgcctgagtatcaccagtggagggtggaaaacaacaaagattgctgcctgttctttcctctggaagtttcattccagaggagcacctgccagatgccaatgagagctctcctatatgaggtgtctatcagcccctactgggaggtgtctcccagtcaggatacatggggctcagggatccacttgaggaggcagtctgacccttagcagagctca

SEQ ID NO: 829178 - DNA, 586 bp, Homo sapiens
ttcaattctataaatttttcagtaatgttccctctggacccaggcagtatctgcatacccacttatcatgtttctctcaccttgaaatacactcggtaatgttttcttggagtcctttttattcctgagcttgtggacaagtctgtatgtacgtccacagaatcctctatggccttgaatgcagaatgaaatttgatttagtgtctttagtcatgtctacataagcctagctttaaaggtttaaagcaagaaattctcctgtgttctacaacacaagcaaacacaaatgccttggatttcagctgcattagaaattgttcagcccagaaatgcttaagacaacaaatatctgtttccttaggatcaaaactttgtttcagccaaacattcctaggaaatcctgaaattgcattgcaaggcaacgatggcctgcaaacgaatgttgcctgagcctgcataagtggtcttgagattgtgactgccatgttggccacctgtagggcagtattggagaggcsactcctgacctctgctgtttttataatttattcctccctttcttttgtgttcacttgctaaggctcca

SEQ ID NO: 829179 - DNA, 637 bp, Homo sapiens
ttagaaaaaattcaacatcctgtttttatccatgttaaaaactctcaataaactaggtattatggaacatatctcaaaataataygggctatttatgacaaacccacagccaatatcatattgaatgggcaaaagcttgaaacatcccctttgacaactggcaccacagacaagaatgccctttctcaccaatactattcaacatagtattggaagttctggccagggcaatcaggtaagagaaagaaataaaagtattcaaataggaagagaggacgtcaaattgtctctgtttgcagatgacatgattttatatttagtaaatcccatcacctaagcccaataattccttaaactgataaacaacttcagcaaagtctcaggatacaaaatcaatgtgcaaagtcacaagcattttcttataccaacaatagacaaggagagtcaaatcatgaatgaactcccattcacaattgctacaaagagaataaaatagctaagaatacagcaaaccatggatgtgaaggacctcttcaaggggaactaccaaccactgctcaaggaaataagagagtacacaaatggaaaaacattccatcttcatggataggaagaatcagtatcgtgaaaatggcca

SEQ ID NO: 829180 - DNA, 528 bp, Homo sapiens
aataagggtagtatctggcatataagtacttagttattaaaactactatcctaggtcatttaatttgaagaatggtaaataattgtcagagatgtatagagctgttggtagaattgaggctaacatcatttaagccattctgggatcattaaagcctcagggatggggaacacaggaatgggatgagaaacctcttagctaaatgttaagtctacctttccccttcccaactcgtctgaaaaatttgatgctgaactgaaagggtgtgtgaaagggcctatgtaatattgaggaagaactaacacatattgtgagaaaggccatcttagctcatacatattctgtaggtgaactctgtgcctttctcttccttgattcctctctccttcctattttaaaaatttactcaagtgattcatgaatactygaattaattttttttttttttttttttgagacagagtttctactctgccactcaggctggagtacagtgttatgatcttggctcactgcaacctcagcctc

SEQ ID NO: 829181 - DNA, 511 bp, Homo sapiens
gcataggacaaccccctccataacacaacgaaaaattatcctgtccaaaatgtcaatagtctaaaatctatctggagatagagcaatatccatgggcaaagtcccatgccaggcacaaaaatctatagtgaaccaccttcttactacacactgtatggaatgaaatgagaatatggcttaaagtaaaaagactgggtttgaatatgggcctgtcccttactgtgtgttcatgggcctctcgtctacctccaatccatatactgagtatgtcccagcacacaaagtgtgattccttggaagctgctcacatactttccatgagcagcccagctcatgggaaaggaagatgtgtgtctcagtttccccactactggctgggtcacagcacatcgatcccgctgctggcagagggaaaacctggcagccagtgagctgcacacatgcctattcacaggacagrggtcccaggcacctctaaaagtctgcacttaccccataagtattcatgtgt

SEQ ID NO: 829182 - DNA, 561 bp, Homo sapiens
aattccattaccatgagataatcactttttgtgaatcacttttcagtttctcatgtgtgtatttatagacatatatatagacatatatttacatatagayatctatatttataataaactcaatcatactgaaaatacaattttgaatagtattccctgggttttattatggggttttcatagtttttaggcttccatcttgagttgatttttgtatatagtgtaaagaagggatccagtttcaattttctgcatatggctatccagttatcccagcaccatttattagatagggaatcctttccccattacttatgtcaggtttattgaagatcacacagttgtaggtgtgcagtcttatttctgggtcctctgttctgttccactggtctatgtgtctgttcttgtaccagtatcctgctgttttggttactttagccctgtagtgtagtttgaagtcaggtagcgtgatgccttcagttttgttctttttgcttaggattgcctaggctatttgggctcttttttggttccatacgaattttaaaatagttttctcta

SEQ ID NO: 829183 - DNA, 481 bp, Homo sapiens
aaacatgagaatagattataagaaataataagaaaaacaattgggatttttcccccaraaatctgggggcaagtgttgcaatgagaaaacataaagttactgattattgtattttattatcaaatatcatcttaagtcatattgaaaatgtggccatctgttctccagtgtcttcaaaatctaatagcccaatcccaatcctttcaaaaacattctaaaaacaaaggatgaaaattatttatattggtagagatagatactttaattgaaatcagtttataaatatgtaacatttgataaacaaatctgaacacataaaccatttttaactattataaaattattgatttctgcctccaaaattccagcgaaattgtccctaagccactaatcccatggttctattggtttatggcctgtttgagacatttttcttctcttttccactccctcttacaattttttcttcccttggctttgt

SEQ ID NO: 829184 - DNA, 619 bp, Homo sapiens
gtttgataaggcagaataaaagaagtggtgttattgtgattgtgtatttttaattttaaaatgtagattattttaatgttatattcagtaatatttttgaagtcgcttgtatgtgaytcagttatttatagcaggctgggaccagacctagaacaaaatcttcctatataggaggaacaggcgctgcttatagaaactgaatagcagatgctgaggggaaggacagtctgaaggacagaatgcagtattcagagcagtgtcctgataaggggtttgaggagggcatagagacaaattccaacagcagcattcaggattccaggagaaacgcctgaaggacacctgtcagcaggtagctcactggattgcaggcactggcctgagtttcaaggttaaactttaagcagggaacctggagaagcaaaataagccacagtcttagagaagctggggtcacagacatgtcacaaagactttttaggcacaagaaacaatctaaatatccagttaccaggtctagtatattgggaggacagtgagttcaaagaaaagcagtagttcaaagacaagttttgtggggaatagataatccttgcacactcttggtgggaatgtaaat

SEQ ID NO: 829185 - DNA, 626 bp, Homo sapiens
acctctaacaaagatcttagagaacataaaatgtaacagaagaagcacacaaggccgggtgtggtggctcacgcctgtaatcctagcattttgggaggtcgaggtrggcagatcacctgaggtcaggagttttagaccagcctggccaacatggtgaaaccccctctctataaaaatacaaaaaccagctgggcatggtggcacatgcctgtaatcccaactactcgggaggctgaggcaggagattcgcttgaacctgagaggcagaggttgcagtgagccgagatcatgccactgcactccagcctgggccacagagagagactccgctcccccatcccccacaaaaggcacacaagcattgattacagaaccaacttgtttgaaaaaccaaaaaaaaattccagatgtatctgtaatcccaatttgtaatgaatcctgatattttgtccattgtgattcaaaactcaaaaaatgttaaaccttccccctaatgtctagtcaccagttccccagtgttaaaagcaggtagaatacatacaactttctaagaagcgtcagtcccagagaacctgccttgtgcctacaacccccaggtctcgccagcaatctcaacacaatcagat

SEQ ID NO: 829186 - DNA, 364 bp, Homo sapiens
tctcagcctccagagcagctaggattataggtgcccgccaccacacccagctaatttttgtatttttagtagagatggggtttcatcatgttggccaggctagttttgaactcctgacctcaggtgatccacctgcctcagcctcccaaagtgctgggattacaggcacgagccactgcgtccagcctgagttctatcttgaccgtcatttttccctatgtcactgacggggagtttgcaattcaatgtaataatggtatttgccttacttttagaggggccaatgcacctrtactgaatgagaatgaaatgtggacagtcatgcgttttactgttggtccaagaggagatgttaagcttagga

SEQ ID NO: 829187 - DNA, 570 bp, Homo sapiens
acaaactcatttctctttggcaaaaatgtgttgattgtaatggatcctacttttattaataaagatgtgtttgagccaagttataattatataaaattcacggtccaaccacaaggacttttctagcaacctaatatttttgaatctcaaattatcccagtttttcatactcaatgtccagcattcagtaaaaaattgccacgcataccaggactaaaaagtaagcaagtgtcccagtttccttaggactaaggaatttcctgggatgcaagacttgaactgccaaaaccaggcgagtcctgagtaaactgggatggttggtcatcctaagtctaagatccaagagtaagtgaccaaaaacaaagaggaaaaaatgcacaataaaaatagactcatgggtgatcctgatactggcactgaaagatataaactttaaaataactgtaactaatatggtcaagaaaatatatgaaaagaatrtatttctccagagaaccagaatatataataaagaatcaaatagaaatttctccagaggactagaatttataataattaatcaaatagaaa

SEQ ID NO: 829188 - DNA, 582 bp, Homo sapiens
gaaacactcatggctgaggaatttaatgttgtaaaggaaaagaaactctgrctgacacatatctaaagtgagagtcctgtgctgagaaaagctaaagagattagctaagaagtgcctatatttagatctgctattgagctgggaagcggaggcacagttgtgctgaaatacctctgtaccccatgaaacagtggctgctctgagcttcttgggtccctcttcctctcaatcctggtgactgcagccccttccctgggacctcatccccaagatccaataactaaaggataactcgtggtatagcagggcctccgctggcatttgttccaatgggtaaatattcatgctatagtagttattaaatagtttggtgctcagttctgtgtttgtgaaaacactacacactacatcagcagaataggctaggttagctgcagaaacaaatggccctacactctcagtggttgatgacagcaaacatttatttgccactcacactccatgaccatcaaggatcttccatggctctgcttcatgtcttctccatgctgagacgaggttgctggagcagcctgtgtctgg

SEQ ID NO: 829189 - DNA, 587 bp, Homo sapiens
gccgaggcgggcagatcatgaggtcaggagatcgagaccatcctggctagcatggtgaaaccccgtctctactaaaaatacaaaaaaaaattagctgggcgtagtggcgggtgcctgtagtctcagctactcgggaggctgaggcaggagaatgatgtgaacccgggaggcatagcttgcagtgagccgagattgcgccactgcactccagcctgggggacagagcaaggctccgtctcaggaaaaaaaaaaaaaaattccaaaaaactcaaaatcttggccaggtatgtgggaggagtggtgagatcatagctcacacctgtaatcccagcctggaatgcagtggtgcaatcatagctcacagcaacttcaaactcctgagcactggggcaggaggatcgcttgtgcccaaaagtttgaggctgcagtgagctgtcatcataccagtacactccaggctaggtcacaaaaaccgtgtctcaaaatcaaaaacaaacaaacaaaaactcaagatcctcayagtagacgcaaacttcctttgttgtgacacagtattttgtaaaaaaaaaaaaaaaaaaaaaaaagtc

SEQ ID NO: 829190 - DNA, 609 bp, Homo sapiens
ttccacctccttcccaaagctacccaccacctctgtgtcctccccacccgcaggaaccacctgctacctacacawtgcaggcctcccatttctctagcaccttcacctggcacgctgggtgagcacacagcacgaagcctgcaggacctgttgtgaagctagatgtgctgaggctgccgggctgtgtgtgtgtcgggtctggcgggctgctgggctgtgtcaggtcgagagggctgccaggctgtgtgtcaggtcaggtaggctgctgggctgtgtgtaggtggggcgggctgctgggctgtgtgtgtgtggggtcgggagggctgctgggctgtgtgtgtgtcaggtcgggagggctgccgggctgtgtgtcgggtcaggtgggctgccgagctgtgtgtgggtcgggagggctgctgggttgtgtgtgtgtcgggtcaggtgggctgctgggctgtgtgtgtgtcgggtcaggtgggctgctgggctgtgtgggtcgggagggctgctgggctgtgtgtgtgtcgggtcaggtgggctgctgggctgtgtgtgggtcgggagggtggctgggctgtgtgtgtggaaagaacaaacctgggtgtacaa

SEQ ID NO: 829191 - DNA, 468 bp, Homo sapiens
tacatttttcaaggtgggttctgattgaggtttcttctccagaaggcagtggagccggggaaagccaaccsagttcctatcttgaccacacctctcgttagctgggccaccccttgtacaagccttccagcacctatctaactcagtattctcatctcaaaaaattttaagccattaattttgcaagaaaattgtgggcaatatgtgaaaaaaaagatcaagtttcagtataatggagacccatgatagatgtccaataaaagcagctaatgtttcacatggttgtccttgatctttaaaaatcctcttatttaaagaagtggagagatattttgtggtagaccgtcctactacttttttgagggaataaatccattctttgctgaaggaagttttagtgaatggatgaatggatagagggatggatgagtggatgagtggatggatggatggatggacggatggatg

SEQ ID NO: 829192 - DNA, 506 bp, Homo sapiens
agaccatccatctggctcctctacttgggtacatctgaccctgtgtcctggagggcaccaattctgacaccttcagggtcaaggggcctccctgtttggtgctgccccacccccaaccctgtcmgctctagaatcctctcttccacagtgctgatcacactgggtcccgctgttcccacgtctgcctccctaccagactgagctccaagctgccaggggcctcgtctccatctgggtcccagttcccaccatagagctgggcatggaggacagctcagggaagcttcttgggaaatgaattctgggagttccctctgccaaggacccactgtgttaagagctttaaggtgagtttaaccctagccaagaagttccctggatgcctccctagcccaagggggagctggccagggtgtcctgatccaggtgcaggcagagtgcctcagggtcctgcacatccacctggcacgcgctctcttgcatacctgcccagggctgggctttgg

SEQ ID NO: 829193 - DNA, 554 bp, Homo sapiens
ccacaatctccagattacttatatttaatacagtgtaaatgctatgtaaatagctgctataccgtattgtttagggaataatgacgaggcaaaaagtctatacttgttcagyatagacacaaccatccttttctttccttgaatattttctatccacaattggttgaatccacagatgtggaggaatgactgtatatggttttgtagttataaccgacaattcaaatgtgtaataaaacgtatgatacgtgtgttttctgtttttaaaagcaaatacacaattcttataaattaagtgtgtaatcagtgtgactgcacttagtgccaaagtacttgtggaaggcactggggcgcagtggaaacaacactggctttggcattaatcctggcctctatcacttaccagctgtaagatgctgggctagttctacttaccctctctgtttgctcatctgtaaaatgggattaagtcctaatttgtagggtcagctgtgagaaataaatgtgacaaagcacctagtccagtgctaggcacatagatgttgctgaacaca

SEQ ID NO: 829194 - DNA, 615 bp, Homo sapiens
taaggactcaggaagcttttagtcatgayagaaaggaaagggagccagcatgtcacatagtgagagagtgagcaagagaatgagaggagggaggtaccggactctttttaacaactggatatcatgtgaacaaataaagcaagaactcactcattattgcaaggagggcatcaagccattcataagatctgccccccatgactcaaacacctcccactattgccccacctccaatattggggatcacattttgtactagtcagagttctctcaaggaacagaattaataggatagatgtatatataaaggggagtttattaaggaatattgactcacaaaatttcaagtgaggtcccacaataggctgtctgcaagctgaggagcaaggaagccagtctgagtcccaaaacctcagaagtagggaagctgacagtgcagccttcagtctgtggctgaaggcccaagagttctaaagctgaagagcttggagtctgatgtttgagggcagaaaacatcagcccaggagaaggatgtcagccagaagactaagacagtctagtccttccccattcctctgcctgcttttatcctagtcatattggcagcagattaga

SEQ ID NO: 829195 - DNA, 574 bp, Homo sapiens
ttcccaacaagttcctcatttccatctgagaccatctcagccaggacttcattgtccatatctctatcagtattttggtcaaagccattcaacaagtctctaggaagttccaaactttcccacatcttcctatcttctgagccctccatgtctctaggaagtaccaaactttctcacattttcctgtctttttctgagccctccaaactgtttcaacccctgcctgttacccagttccaaagttccacaagatgtgacttgctcctcaccttcctccatgattgcgaggcctccacagccatgtggaactttaaatccaataaacttctttttcttttgtaaatttcccagtcttgtgtatgtgtttatcagcagcatgaaaatggactaatacacctcctcagccctgaggaactgtgagtcagttaagcctctttcctttataaattactcagtctcargtatgcctttattaacagcatgagaacggactaatacagcaaattggtactgggtagtggggcactgctgtaaagacatcttatgtggatggcagaaggcagagagattgtgc

SEQ ID NO: 829196 - DNA, 357 bp, Homo sapiens
aaagaacagaaggagacacatgcagaatgaccatgtatgtragggaagaggaaggagaagaaacagaagacataaagaaggggaaataaaataagtgttctgacccttttatgctgcttttcctgaactagagtgtcccttctgcaatttcagggagaaacttaggaaataaaatgtagtaattttccccctcctcactctcatctcttccactttcaggaggagagggataaactccctgaaagccacgcgagcaaacttaggaaagaaccatggatctcaatttaccccttccctgctttccatcttagctcctttacaggcttgaaaagacaccctggtgcccttagaccttcc

SEQ ID NO: 829197 - DNA, 520 bp, Homo sapiens
agcaggcatttgtgagcatatatgcgtgagtgtgcactgtgttagggtgtgtgtgtgtgtgtgtgtgtgtgtgtgagagagagagagagagagagagagacagagagagagaggcaggcttccccctgggccaggctgctgtcccctgaacggtggtgaacaaatctctaacaacaatcataataacaataaataatgaataataataataaaacagtagttaacagtccctccataacagaataacaataaaatgcaagaggaaatattttgaggtggagacagaagaaggagtcaggatcacagcatctgagggggagataggaaaggaagggaggaagaaagcttcttaatatgctcttggcggggctggggttgggaacccctttcccagacaagggayagaagaggggaaggagggccaggaggccactctttattgctttttttctcaggcttctgctttgtgtgatcagggaagggatcccacatatggggatggttaatggcttttgggact

SEQ ID NO: 829198 - DNA, 520 bp, Homo sapiens
agcaggcatttgtgagcatatatgcgtgagtgtgcactgtgttagggtgtgtgtgtgtgtgtgtgtgtgtgtgtgagagagagagagagagagagagagacagagagagagaggcaggcttccccctgggccaggctgctgtcccctgaacggtggtgaacaaatctctaacaacaatcataataacaataaataatgaataataataataaaacagtagttaacagtccctccataacagaataacaataaaatgcaagaggaaatattttgaggtggagacagaagaaggagtcaggatcacagcatctgagggggagataggaaaggaagggaggaagaaagcttcttaatatgctcttggcggggctggggttgggaacccctttcccagacaagggacrgaagaggggaaggagggccaggaggccactctttattgctttttttctcaggcttctgctttgtgtgatcagggaagggatcccacatatggggatggttaatggcttttgggact

SEQ ID NO: 829199 - DNA, 520 bp, Homo sapiens
agcaggcatttgtgagcatatatgcgtgagtgtgcactgtgttagggtgtgtgtgtgtgtgtgtgtgtgtgtgtgagagagagagagagagagagagagacagagagagagaggcaggcttccccctgggccaggctgctgtcccctgaacggtggtgaacaaatctctaacaacaatcataataacaataaataatgaataataataataaaacagtagttaacagtccctccataacagaataacaataaaatgcaagaggaaatattttgaggtggagacagaagaaggagtcaggatcacagcatctgagggggagataggaaaggaagggaggaagaaagcttcttaatatgctcttggcggggctggggttgggaacccctttcccagacaagggacagaagaggrgaaggagggccaggaggccactctttattgctttttttctcaggcttctgctttgtgtgatcagggaagggatcccacatatggggatggttaatggcttttgggact

SEQ ID NO: 829200 - DNA, 379 bp, Homo sapiens
tccccctgggccaggctgctgtcccctgaacggtggtgaacaaatctctaacaacaatcataataacaataaataatgaataataataataaaacagtagttaacagtccctccataacagaataacaataaaatgcaagaggaaatattttgaggtggagacagaagaaggagtcaggatcacagcatctgagggggagataggaaaggaagggaggaagaaagcttcttaatatgctcttggcggggctggggttgggaacccctttcccagacaagggacagaagaggggaaggagrgccaggaggccactctttattgctttttttctcaggcttctgctttgtgtgatcagggaagggatcccacatatgggga

SEQ ID NO: 829201 - DNA, 562 bp, Homo sapiens
agattgaggttggtgtaatctgaaatattttcattcttctgacatgaggtaatcacgaattccagtattgtctggattgtaactatctgctaagtttacatttgggattctcctcatcaaaactaaagaaaagctaatattagaattttaaattcacccattcaaaatctaagtccattatatcgacctctattcccccaactgacaagtcagcaacgccttattctcctgttcccatcaataatactatatatgtttgtcaactacatttagaattttagaattatgttttacatcagtcttcaattaaaataatgtggctgttataaacccatagatgtcatctctttaacactggccctactacccagcttcatgtgctgtggagaaatgaaaactcataaatgtgaaatctgaaggctccacattctgaagcygtcatctaggcaaacttcggcaagaagctgaacttctattcatttatcaacaaaagcagaacaaccataagttatgcatgcctatcaggattttgcaaagatcaaatggaaaaggatgtaaaaaa

SEQ ID NO: 829202 - DNA, 666 bp, Homo sapiens
ttgcagcaatttcacactctagctacacattacaataaactggggagctttaaaaatttaccaggtgccattaaatactattccataaggatggagagacaagatgccccagataaaataaaatagtttagaaataatctgaggcaattaatatgctgaaatgcaatacaaagatgagctcatagaaagtactgattattgttagcattgaagttttaaagaacaaggttcagaggagctggggcttgagttggaaagtgcaaaggatatcctcaggtaaagaccagagaagagggcttgatgagagaacagagtatgaacactatagacagactccaggtaaactcggagtggttgcggaaaaggaatgaggcaggcctggttagttttaatattaatttgagaagcaataggaattggtattacataactgggcaaattcagatgatggagatacttgaaaataacaccaagagttcatcctggagttcaaatgataattagaggctttcattggagaggaaggaaatgagattasaaagataggacagtgcccaaagtctctggggttcttgagggcaccacttgaagactgacttctgcagcaggtttaatgacttgaatctatcaccccttctcaatatatacctttcttgttgctcatta

SEQ ID NO: 829203 - DNA, 666 bp, Homo sapiens
tacaaaagtattaatttggggaactaataaatgtccataaaatcttcacaatccacgttcttctgtcatggcttcagctggtgacttcctgcaacactccgcctcccgggttcaagtgattctcctgcctcagcctccccagtagctgggactacaggcacccgccaccacacccggctaattttttgtattttcagtagagatggggtttcaccatgttggccaggctggtctcgatctcctgacctcatgatccacccgtctcggcctcccaaagtgctgggattacaggcttgagccaccgcgcctggccaaggttttcttaatggagggacataaagtcgatattagtcgaaaggggcaagtccccctcttttacaatggacacagagctgaaaagactatgagtgacaaaaactggtgataagtgaaacacaaaacaggaaaatagaaggagttacagtaacattgtttgaagtgttttgtttttgtttgagacggagtcttgctctgtcacccaggctggagtgcagtggtgcgatctcggctcactgcaacctccatctcccgggttcaagcgattctcctgcctcagcctcctgagtggctgggattacaggtgttcaccacaatgccygtatttttgtatttttagtagagatgggg

SEQ ID NO: 829204 - DNA, 529 bp, Homo sapiens
tttttgagacggagtctccctgtgtcacccaggctggagtgcagtggtgccgatggctcactgcaacttccgcctcccgagttcaggcctgaatagctgggattacaggcacccaccaccacgcctggctaatttttgtatttttagtagagacgaggtttcatcatgtgggccaggatggtctcgatctcctgacctcgtgatccgcccgcctcagcctcccaaagtgctgggattgcaggtgtgagccaccgcgccgggcctgagaaaaaaatcttataatcttcagatataagaaggttgcccagtttggagtgcagtggtgcaacctcagcttgctgcagtctttcaggcagtcctcccatctcagccgcctgagtagctgggactacaggcrcatgccaccacacccgcctaatttctgggctcacgtgatcctatcttcctgccccagcctccctaagtgctgggattgcaggtgagagccaccacacctggcctaattatttcttttatctcgctaattaca

SEQ ID NO: 829205 - DNA, 484 bp, Homo sapiens
ggagtcttatcttagtgtgtatcgaaaagaagacagctaaagcctaatcaatacccagcatggatttattatttttgttgttatttgttagttttwaaaaaactgaaccatctagcttccacctttatatcaaccaaaacttattgttcctctttatccacctagaggtttattttataaacatagaaagatgactaaatcatgtgcactgggattgtatttttgtatcgtcaaatgttagactaggaagtatgtgaatgaaaatgtacaactttccatccctctagcatttaagtattacttttgaggccaatttattttaaaacaaaaaagaaacaatgcacaataaggagataaaattacatttcagtgatgttcgatatcacaaaacattttattatcaccgaacaatgaagacacctgggcacatattcgctaataaaacccccctgagatcaagcctaatggctctactctatactaa

SEQ ID NO: 829206 - DNA, 616 bp, Homo sapiens
ccacagccacgggaaggggagttaaccgaggcagcccccacccgagacagacctgcacagggccaagaacttgccctgtggtagggctgggggaggagcggctggtggactttctgtgtcaaaggcaggtgtcactttcagctcattaatttcacttctacaggttctcaatccaccaaaatgagctctttacaaaggccaggacctgcccttctagaggacaggctcatacttcccaaagcttcaggacttggggtcctgtggctgcccatccgtcagcagaactgggtgaggccagctgtgacatcagacaagtcccctgcctctggcaattcctcagcggggggcatgacctactgtgcattccagggctggggcacatgtacttaccccttagccttggaccacaagcctcccccagcccaaaatggaatggggacagcctctgccacagggaggggcaggtggtgccgtgtgaggggcggtggcacccagggcttttctcacaaggaaaaggaacctcgaagtgtttctctctgcacactttgcctccctcaaakgcgggctccttcctctcccacccgcatcagcagctgaggccccagaagggcccacc

SEQ ID NO: 829207 - DNA, 452 bp, Homo sapiens
gttagctgcccaaattcggggggtccaccaatccttgggaaccctaagaaagccaacaccccaaaaagcaaatttctctctctccctctttcaataacctcatttcctcattttgagaaggtggtacttagagactttacctactgtgtgtttcaaaatgtagacttttttctccagaaaaagaaagaaaatctttctgctgacaaataaggagaaacttaaatcaaaatcttctccctcgtgagctgtctgggttgagtgaggacagccgcagacctctgactgctgaggctacaggcatcactgcaggctctgaagcaacagcagagagtaagatgcagtgatgyggccaattccattcctgccgctgttcaagctggggcctgggaggtttggtccatgtatttatttgatttgttttggttttttgggcaacgatcagcaataagaat

SEQ ID NO: 829208 - DNA, 619 bp, Homo sapiens
caactccagggcaccactaacatagaccagggtttggcaaacttgttctgtaaatggctggattttatatatatatatatatatatatatatatatatatatatatatawaaaatattattttatttttttttttccagacggagtcttgctctctcacccaggctggagtgcagtggcaccatcttggctcactgcaacctctgcctcttgggttcaagcaattctcctgcctcagcctctggagtggctgtgattacaggcgtgcgccatcatgcctggctaatttttgtatttttagtagatacagggttttaccatgttgcccaggctggtctcgaacccctgacctcgagatcctcctgccttggcctcccaaaatgatgggattacaggtgtgagctactgcacccagccaatagtaaatattttatgctttgtgggccaccatctctgctcttgtagcacgaaagtagcaatagacaatatgtaaacaaataagcatggctgtattccacttttcattttacttttaaattatttacatctgttcaaaaatgaaaatcattcttagttcatgcaacacacaaaaacaggtggtgggctggatttgtggattt

SEQ ID NO: 829209 - DNA, 598 bp, Homo sapiens
acagcatcattttaacttaatcacctctttgaagatcctatctccaaacacagtgacattctgaggttctggggttagggcttcaacatatgaatatggggtgagggagggacagaattcagcctgtgccaccacccttcaagtctctcctccagtggcatttttccgggagtgtcaccagaggcctctgcacagggctgtctgggcagttcgctgcaggtgctgcatgtctgagccttcttctgctggccaagacccttgcactgcgtggagctccacccatccagggaaaggagagcctttttctttgccagaggctctgtctgctcatgaagccatgcatgggctctgtctgccctgggagaaccctatctctaactctaatacaggacccccatgagcacctgaaaacacagatttcccctctctgcatcctgccacctgcaccctttcaactctcccgcatcaccctgtatgttttctgtgatgcatgccaatagmtcatcctggtggttcagggttctgctctgtatttgactgtcttaacctctggaaaggatctggccctattcagtgtcacatcctccttttagtgcca

SEQ ID NO: 829210 - DNA, 615 bp, Homo sapiens
cgtggacacggggcttcctcatcgaggattactgggcttattcacacccactgtccrggctcgttctgagagagatggggcgaagtcactttggaagaggtcacaacagatgtcagccaggacagccagctctgtgcagagcagaaccaaggccccagagccttcggagcagcccatttgcaggcgttccagcagtttgctgctgcttgcctctcctctccccacctttcccctgcagcctcagtttcttggtcctctgggctttccaaagcagcagggctggcaggctcctcactgcccccagcaggagaagtggcctggaaaaggcaacagtatgaacggccatactgagtcgatcatatttgccaagcccctgaccccccaaagtcctcgccttggtcagctctcaggtcagtgtcctctgccagtccttctaacctggctcccctcttcttcacccctcggccttctcctgacacactgaccttcctctttgccaaacctttcaagttctcctcctctcagggattttatacttaaacttctttctgctcgaccccaagccccctagccatccttcacgtggctctctctgcttttatatcacctcctcca

SEQ ID NO: 829211 - DNA, 631 bp, Homo sapiens
cccgtcatgttctaaataactccttccttatatatgtaccaacctattagcacaaaggcactatcaatcctcaaatgtcagtgatttgcagaccattgtcctaatctttatgtcttctgtatgtcttctgctattgcttacttaattgcttttatatctaaatcagtctacttttcatgtctgcatcagtcaggatatacctgattatgctgcagtaacaagcatccccacaaatcttagcagctgataataatgcaggattctagtctaaggtgaatttcctgtccacaaaagaaaaggtcatgtagaggaggtgaactgtgaacctaagaagtagcacctaagccaaaaggaaaaaaggaaaacactccaggcaaggggaagtcaggttcttcttgaacccataattgtctcacctgtctaatgggtgttagcaattatctctcccttgcttccttccaattgcccttcaagaatccaatgagaatgcgtagtcacttgaaaagattgctttttagctgctgcaggtgatcgcgttgatgttctsaccatatcctgtgggccttcccctttcttctcgccctgatcaactcccaactgctagtacctggatcattctgctcgaaagcgg

SEQ ID NO: 829212 - DNA, 623 bp, Homo sapiens
tgccatgggactatgcatgccataataaactactgttcagggaggtcaaagaagactaaggcttttagaygaaaaatgaggaggattacatgtttcaaggatcaataaacaagggtaacactggcttgaggttggacaggcagttgtgtttttcgcagagtcttctgtgatagtttttgttatcaggcatttatatatcataatgctctcttcctggccttttctgggcttatttcttcttttttttttttttaggttttttaagacagagtcttacccttgttgcctaggctggagtgcagtggtgtgatctccgctcactgcaaccttcgccttcccggattcaagtgattgtcctgccttagactcccgagtagctgggactacaggcacgcaccaccatgcccagctaattttttgtatttttagtagagacagagtttcactgtgttagccatgatgttctcgatctcctgacatcatgatctgcccacctcagccagtggctccgttttgattctgacaccttgcacaattcttatatctagggtaactgctgggagagggttcagcaaagccaatcgtgtgaaacccatagcagcacggctcccacacacaaggat

SEQ ID NO: 829213 - DNA, 623 bp, Homo sapiens
tgccatgggactatgcatgccataataaactactgttcagggaggtcaaagaagactaaggcttttagacgaaaaatgaggaggattacatgtttcaaggatcaataaacaagggtaacactggcttgaggttggacaggcagttgtgtttttcgcagagtcttctgtgatagtttttgttatcaggcatttatatatcataatgctctcttcctggccttttctgggcttatttcttcttttttttttttttaggttttttaagacagagtcttacccttgttgcctaggctggagtgcagtggtgtgatctccgctcactgcaaccttcgccttcccggattcaagtgattgtcctgccttagactcccgagtagctgggactacaggcacgcaccaccatgcccagctaattttttgtatttttagtagagacagagtttcactgtgttagccatgatgttctcgatctcctgacatcatgatctgcccacctcagccagtggctccgttttgattctgacaccttgcacaattcttayatctagggtaactgctgggagagggttcagcaaagccaatcgtgtgaaacccatagcagcacggctcccacacacaaggat

SEQ ID NO: 829214 - DNA, 560 bp, Homo sapiens
gtgcctagaagtccactctgcaaatagaagctggtgttgacccagcctctgcctgctgcctgcctttccagtccctgcatgtgggtgtacttggctgcctgccacctgtctgtggactggakttccccaaaggttctgggtaacccctcagcccagatccccagaccccactcctccaccccttcctttgctttttcaggcctgaagcgcccacatcagagctgtgggtcctcaccccgccggaagcagtgcaagaagcagcagctaggtgggtaccagtgtggggaggaacataaacagagagatggggttgcctgggggccaagacccggaccctggaccttgtcccctgccaataagcctccagaggcccagtgactcttgtctcgcaagtttccaggagaaaaggactggaggtcttgcacaggcagaggagaggcctgggctggcagcgaaggggctccccacccatctggctgcatggggacttctctgaagagggctccgctgaaggagctggaagcaccatacaggtctcagcttcgctgtccaggcttttc

SEQ ID NO: 829215 - DNA, 545 bp, Homo sapiens
cctcacagtatggcagcctcagggtagttgcacttcttaccttaaggctcargctccaagaatggaggttgagcaagtgaagggaaattccatggccttttatgacctagttttggaagctacattgtgtcatttctgccgcagctgttggtcaaagcagtcacatgcctgtccagattcaagggttgagatcatgggaagaaggtcaaaggatttgaggccatgttttctgttttattgttttattttttagagactctctctctgtcacccaggctggagtgcagtgctgcaatcacagctcattacagcctcaaattcctgtgctcaagcaatcctcctgcctcagcctcctgggaagggggcattacaggtatgcaccaccacacctggctaatttattttttttaatttgtaaaggcagggtcttgctatgctgcctaggctggtcttaaactcctggcctcaagtgatcctcccacctcagcttccccaagtgctgagattacaggcatgagtcacaacgcttggccctacacatacat

SEQ ID NO: 829216 - DNA, 622 bp, Homo sapiens
tgggaacataattttttataagtctactttaccaggcaatttttcaaggacgtttctaaactacattttaaaagacaaagtcttgttgggcagtgctactgtgatcgaatggaggatgaaatggtttgagtaataccgtcttgtttcttcctagactggcatctgccacaaggggcagcccatctgctccatccttggggaagaactaaatgagtgtcccttggctgagacggctgaatggaagatgccctgacatcagccaccatgtgtgtcctcaaatacatgtctctggtgttatgctacagatgcccacggcatattttgctctttgtctgagttagtggggcaaggttctaccccagggacgtttggcaaaatctggagacgtctttggttgtcatggatgggtgaagggggtgctactaacatctagcaggtagaggccagggatgctattaaacatcctacagtgtacaggacagcctgcacaacagataattatgcaatccaaaaggtcaacagcacaatcgggttgacattaaactcattgtaactcaatagtatgctctctgctgcttaaaacccaccacagcttcccagcwcaatggttaagcctagaggc

SEQ ID NO: 829217 - DNA, 606 bp, Homo sapiens
ccactggccttccttggaaagtgagaaaaattccttctcatcatagttatgtaatcatccttcataaatgtggagaggctcacatgtgctgctggtggtaacacattctcctgccactctctggctctctgtargcggctgtttgagaggttaaagataggatgaaggaaaaattcacaaaacactttgtatgcacgtctggcggataatgacacttaagaagctttgcttaaaactgatctgccttcgtgatgatttgagcttgctctttaattagcttttaggagcatatattgtttagtatgattattttattttgccaaatagaagcttaacacgctttagttcacaaaggagcgagatctactttataccagcttttaacgaccaattgagagagaagaaaatgtctgactgccctggaacctttttccccatgggtggtatgtgactttaagatttcacgatcatgggggacactttcggcagcaacagcaatgctcagcaagtattcccttggctcttctctatttccagccccctggcagttaggtggagctctgtgactagttttgctcactgaaatgtgtgacttgtccattgttt

SEQ ID NO: 829218 - DNA, 615 bp, Homo sapiens
ttctggctcaggaagtggggaggattctccaactttctgacataaatgattggatgctgttctttcccactctgtttgttgtcttggaaacaaatataggatacattgtttaaaaaaataggtaactggcatcatttggccctaaaattaggattaggggttttttttttttttttttttttttttttttttttttacgtataacaagaatggagaaacatcttgcttactaattggaaggaataagtttgttgctacaacgtactgagttttggctctcaaattctcctcttcttagccacaatttggctcagaggatttgcaccatttgttcatctgtaaaatggtgataataatagcagatactgtctaagtcttacagtgagatttaaatgagttaatagatataaaacacttacagcaatgcctagcacacagtaaatgttctagaagggttagctgtaatttttggttattatactcttagragaagcttcctacaataaccttatgagacctgctctccttgtcatgcttttggttgacctttcacagagtgtattttcaggttcgacctctacgtcagcagttccatatactttgatgcttgcttca

SEQ ID NO: 829219 - DNA, 563 bp, Homo sapiens
tttgttttttgagttagggtcttgctctgtcacccaggctggaggacagtggtgcgatcatagctcactgcagcctcgatctcctggcctcaagtgatcctcccacctctgcctcccagtcttgccttttaagagccttaggactcttaacctgggaaatctataaaattttttgttatgtataaggaagaacacaacttttcttctgtgagtactgcttcaaagacacagagtccaatgtacataggcaggtggatagacaagctcgctgtcaaacttgttacatagatgaaatgggacagatggggtcattcatctaaagggttcttggtaaaggtacaaaaagcaaaaccatgaggccaaaaacgggagcagaaacagttggcactcagtgagtaggctccaaagctctggctcaaggtgggaacatggaagccaatggtcaagtttgttgcacagtgcacttaataagatgaacagcagtgctagaatctggaggatcatcayccctggagcttgacagccaatatctagcctgcttgagagtgcagatgaagcgctcg

SEQ ID NO: 829220 - DNA, 564 bp, Homo sapiens
gaggctgcagtgagccgtgattgtgcctggggaacagcgcaagatcctgtctccaaaaaataaaaaatgccctagggaggccggcactggccctgggggtgagttaggggatactgaartgtgtaaacagatctgatcccttggacacgttgggatcactgtggctgtggctgtgctgggatcagatggtggtggagagctccggtctgaactaggcgacgttcttgatgtgtctggttccaggggagtctgccctgccttcggaattggatggaatggagggaattgcctcaagctgcggctcctacccgggcccctcaagcctgaccaaggactctcccattgggtggtgggaggaggacagtaggggaactagtggactggacctgaaatgtcctggggtgggagggtagggtggtggggaaggcttggggcactgagatagcggagagggctggggagggaagggagtcagggtgcagtggagttggtctctgagggctggggctgggagcctggcctataggcaaggggcggacactgagtcttggcttttcccaggca

SEQ ID NO: 829221 - DNA, 637 bp, Homo sapiens
attaaagatgtgacctggctttttctgaacaaatacagttatatgtgtacacaaagagatggtctgaaattggaacttatgtttaaaagggaagcagagtgtaaaagtttggaaaatttgaagcctgaccttttggtagaaaagaaaatcccattttgggggaagaaattcaagctaccagctgcagaaatgtgcttaagtaaagagaggtcaaatgttaatcgccaagacaatggggaaaatgtctccagggcatttcagagatcttcatggcagttcttcccaacacaggcctggaggcctaggagtgaaaagtggtttcattggctgggcccagggccccactgctctgtacagcctgaggacttggtgcccagtgtcccagctgtgccagctccagtcatggctaaaagaggccaaggtacagctcgggccattgcttcagagggtgcaagcgtcaggccttggtggcttccatgtgatattgggcctgcaggtgtgcagaagacaagaattgagctttgggggcatctacctagatttcagaggaygtatggaaatgcctggatgtccaggcagaagtctgttgcaggagcagagccttcatggagaacctctactagtgcaatgtagaggg

SEQ ID NO: 829222 - DNA, 499 bp, Homo sapiens
tacatgcacaagactcagaggcattaagaaatgactctgttcagtttgagagtatattgtgcaaactatgaaataaataatttttatttacccagaatattaaacttaggatccaagtaaaaacattgaagtccaaatagcagatgccatgacaaaagatagcatggtaatcactactaaaattgtattgggtgataagaaattggagaggaagatgttttatcatgagaactaaaaagcatttctggggagtggtcagaggagaatgttgtaagttaaaaggaatttagttcaaatttcaaccctgccacttactagctatgtgaatttaggcaagtttccttattcctctgagtctaaattgtctcatttaagaaatggrgataataatatctaccatattgagctattttaagcagtaaatgaataaaaatatgcaaagtgcatagcacatggtagataataaaggaagctatttctttctaagaatataacctca

SEQ ID NO: 829223 - DNA, 636 bp, Homo sapiens; identical to SEQ ID NO: 809546

SEQ ID NO: 829224 - DNA, 566 bp, Homo sapiens
attcattgtaaaccatgaagttcacttttgaagtctataattcagtgacgtttattatattccaggatagcaaaatcatcactackgtctacttttaaaatattttacttacacaaagaaaaatatcattccctaatcattcctctccctaatccctggaaaccaccagtctatttatatttctatgggttagcttattctggacattacatataaatgaaatcatacaatatgtgatcttttttacttatttcacttagcttaatgttttcatgttttcaatgaggtttcaccatgttatagcatgtatctgcatttccttctttttattgacaaagactattcccttgtaaaagcattccacattttgttcatccattcatcagttaatggtcatttggatcatttccactttgtaactatggtgcgtaattccactatgaccctttttgtaaaagcatttctgttaatgtgtgttcatttatcttgggtgaatatgggacgtggtttcatttatcatggcagtggagttactgggtcacatgagaactctaggctaaatattt

SEQ ID NO: 829225 - DNA, 660 bp, Homo sapiens
aagaaagagattgggaaagtcgattaaacaaacaataagaatgatccaattccatgctgtctccaaaagccacaaactgggtaaaagtgaaagagaaaaaattattacatgaaaatatagcagttccccttattagtggaggatatgttttgagaccctggtatttgcctaaaaccatggatagtaccaaactctataaagtcattccttgatatccatgggggattggtttcaaaatccccctgcagataacaaaatccacaaatgctcacttccctagtatcaaatagcatagtatttgcatataatctatgcacatcttcccatatactttaaatcatctctagattagttatcatatcagatataatgtaaatgttatgtaaatagctgttacaatacattggttttttaatttttaatatttttattcttgtattattatttttgagtattttaaatccacattggttgaatccatggatatggaatacagagagccaactgcatatactgtgtttttttcctacacatactacctaagataaagtttaatttgtaaattaggcacatcctttataaatggatattaaaastagattaacagctactattaaaagtaaattaacaacaataataaaatagaaaacttataacaat

SEQ ID NO: 829226 - DNA, 620 bp, Homo sapiens
aaataacttgccccaaaacacacaactgtgagtcattatataaggatttattccaagtctatctcaatcccartcccatgctcttctgaagagaatacactgctaggaaaaatgccttaaaaatcagtaatcatctgtcaaagccataggaatgtctgttccctcttctataccttctctacaccttccccgtgcttggcccttctcccatctatgacactttttctcatataagcaaatccaggataagtttcaactgataacagtgtttgagcgggagagggctccaatgtgtttgcctctggttctctccacagtatagggatggacaggaatgagggttatcccctagcaggatgctgatccttgacatctcgtttctccaggtaggagtaacgggaggcggtttagaatgagaagctgaagggaaagaaagtggtaaggatagcagaaaggaaggcaagagagcctttgggttctttcactgctggctctcacattctccaataccaatgaagttaatgattaaaaaaagttcaattactaataatggaaaagtgatctgcagactcacatcaatccagctccgcattgctagttatttttgtctgaaccatttg

SEQ ID NO: 829227 - DNA, 646 bp, Homo sapiens
tagtaaataaactcttaaacaataacaattcttttcatctttcatgcttactatttctatgtgttctatttttagtactattataattataagaatacaggattataatgtaayattttttcttttttttatttcaagtccttgaaatattccttccagacaaaagaccgtttgtgttttgtgatggaatatgttaatgggggcgaggtgagtcaagaagtaaatccagtatttgcatggtagtattttcattattttaaaaacattacttaaaatacaagttacaatatagcagttctccatttcttgataggaatttatgtagctcttaatactattgaacaaatgggagcgaaattatttctgatgagatgtaatgattgtttttatataactacatttatatgttggaaagcataatcatattcttctttttcctgtgtttttaaatgtaaaaagttttaacagaagtatgatttttgaaatcatgttattaaattttgaaaaccagaaatacaagatttattgtttcacaaagtttcttttcaagtaggctgtgaacatggtcaaaagttattttacccattctaaactcagtggaacaatagtccatgggcacattatggctgagttttctcttctttat

SEQ ID NO: 829228 - DNA, 612 bp, Homo sapiens
aacccggcactttggagaagtaagcaccttcctgggaaggtggtttatgcctgagtcatttgtctggctacattatactccaaggcctcaggcaggggaacaacgacgacattatatctcctatcctgctgaacacactaggggtactcaacacatcatatataatgacacggatgaggcaccaagtgggaaaactgagtgaaacactctaaaaacctccctcctgtacttggagctgtcacggagttgggatgtggccccgtttcctgcctgagcctctatgcaaggaactctaccctgtttgtaaaataacacgtgggtctccttcccagacacacaacttataaacactggcaccaataaccacacaacacagccaactgaggacacagcactgtgggctgcaaagacacaatctcacacgaaatctctgatcatgtgctaacaggccccacaggcctcctgggctacagggatccacccagcagctcccattggtttgagaatggcagcaaagacagcaaccccctgcccaggggccatgcctctaagaatakaggacacacacattcagagttggacacaaactcgaatctataaggtgtatacatc

SEQ ID NO: 829229 - DNA, 447 bp, Homo sapiens
ggaaaggaatttatggggaattttgtaagttttaaatctttttcaagttttcagtcataactacttyttaaaccctgacccacactttggccttaatctagtctgggaattccagcaggagtttgaactttcctttctgccatattagttaccctacatctcctcttaattttccatacatttgcttctgttatgtattgtctcttcctttcctctatcttcttgaatttctgattttgataatattccctttactataatctccgtgggattttggaggcagcaaacagaaatatacttattcaatccagcatgtttgatcttaatgtgtaattcctcagaaataagtcaacacggtaaaaataaaacaactttgggctaaggagacttagttcaaatactgagtctatgtcacactgatgacagcataataatgacgttacatat

SEQ ID NO: 829230 - DNA, 556 bp, Homo sapiens
gtataataagtatttaaatccatagaaatgagatttgtgggctgcacatgttggttcaccccataacctcagccctttggtaggctgagatggaaggatcacctgaggtcaggagtttgagaccagcttggccaacatagtgaaaccccgtctctactaaaaatacaaaatttatccaagcatggtggcgtgcctatagtcccagctacttgggaggctgaggcagaagaattgcttgaacccaggtggcagagttttcagtgagccaagatcgtgccactgtattccagcctaggagacagagtgagactctgtctcaaaaagaaaaaaaaaatgagatttgtggtttaattagagtgtattaaactacaaatctattgtttaataagagttttcacaacagttatatcattcctttaatactagcagtattggaaggctgagtcaggaggatcaattgagccctaggagtttgagaaatgacatttgtgaggtgtcacaagttatttatgatacttaaggrgaaattacatatatatatatacacacacacaca

SEQ ID NO: 829231 - DNA, 503 bp, Homo sapiens
tgagataatgcctcatcgtggttttggatacgcatctctctgatgatttgtgatgttgggtatttttccatgtttgttggctgctttatttcttcttttgagaagtgtctgttcatgtcctttgcccactttttaatgaagttttttgcttgttgaactgtttaaattccttacagactctggatattagacctttgtcagatgctgtattactgtgttctcactctgttaataacgacatacctgaaactgggtaattataacggaaagaggtttaattgactcacactttcacgtggctggggaatcatggcagaagacaaggaggagtaagtcacatctaacatggcagcaggaaagagagaagttgtgcaggggaactcctctttataaaaccatcagatcttgtgagacttactcactatcacaagaacagcatgggaaagacccaccccaagattcakttacctcccactgggtacctcccaggacacatgggaatt

SEQ ID NO: 829232 - DNA, 624 bp, Homo sapiens
tatacacacagtgaaatatttagccttaataaaggagcttctgctattttcaacaacatgaatgaacttggaggacattaagctgagtgaatgaagacatatacagaaagcaaaatactgcatgatccacttatatgtgaaatacaaaaatgtcaaatacatagaagccaaagagtagaaagctggttatcaggggcagaaaggtgggggaaatagaggaacattggtcaaagggtacaaagttgcagttatataagatgaataggtctagcgatctaactttcagcatgatgactataattaataatactcttttataccaaaaatttctgagagaatagatttcaggtgctcccagcaggaaaaccaatggtaactatctgaagagaaagatctgttaattcacttgactgtagtaatcaattcattatgtatatcaaaatatcatgctgtacaccttaaatatatacaattttattaaaaagtaaaaaagtgttagcatttaaaataatacaactgcaattttttttcattttcatagtcatatctttgtggctactakgtgcttattaagcattgctttcatgacttgctcaattcagaactaagcatctgaaagaacat

SEQ ID NO: 829233 - DNA, 480 bp, Homo sapiens
tttatataaaatgatgtgggaactgagagatgagggccatggggctcaagaagagaggccattagcaatgtcagggaagctgcacttagaagtaatacgtgagacggatcttaattaatattccataaagggaaggataggggaaatataattaaacagacttttaccgaacatcaaatgaagtagggaaaacctgaggcagagggtgaggaaaactcacagcaggttgaaggatggcaggttgcctgctgcagctagcatggagtcgcgcctgaggttgctgcaattcattctccagatctctgttttagcgacataaactcaggaaagtttttcagagccccaagaatatgtcargtctctcaggtataggctttccgagctctgagctccttcctctcattgcactgatctctccttgtgaataaacattttcattatttgattgtttgctccctctcccacatgggcagaaaacat

SEQ ID NO: 829234 - DNA, 545 bp, Homo sapiens
tgggagtgacttctctcatcaatggacacactgctttgtgctcggtttcctcccatacctctctgtcttttctaatggaattcctttgcatgcagcagcctagcacctcttactagatcatgtgtccagctgaactttacttaacagccaaacacacagttattttcacaacaatattttcaggctgtgtattaagcctatttcacagctgtgatcacaggtattaaagaacagatgtattgatttgcggggcacccatttttcattgtatttgatgtccttgtccacaaggcggaatggcaagaggcttagaaatctaaccatgtaccggttatgttgtatttgctttgagcctatatcctcattgaaaacagctgctgaactcagagttattatgaagactcctggagagaaagcagaatggaataaatgggaagagcacaggctttggagtttagagagagctggtgagaatgccatctctstctcccaccagctgtaggatatggggcaagttattttacctctctaagcttcatcttcaa

SEQ ID NO: 829235 - DNA, 587 bp, Homo sapiens
ataggattgaaggaggatccattaaaaaggtgtttattctagcacagctgaacacaataaagcctgaaccaggacagagccctgrgatcgggtggagggaaggggtgcaacagaaatctctggggagcaagttaaaacacagattcccatgctttgcccagagacccagatcttgtaggtctaaggaggggcccaagaatctgaatatttagcaagacctccccacagggtgctgctgttgcaggtaatcctcatggcccaccactgttattaagcccacaatcatcctcgcccccctcattattaatgcatctgtggcctgtgcctggaaagttcttcccattgcgctctcgcttggcaaatgccttctccttcaagccctggcagtgcaaatgttcataggtaaaccctttccgagtgcttgctttgggctttgcaccacattattactttataaagaaacactatttaattcttaaaaaaaaagaaaaaagaaaaaaaactctacagagtaggtctcctaataaaccccattttacagactaggaaactgaggcaaagcgcacttgactaactggcccattacc

SEQ ID NO: 829236 - DNA, 566 bp, Homo sapiens
aggtacaaaaaagagtgtctctaaaatttcagcacagggaaagggagagcccagagaggttgtctaatctaatggttgttgaacttcccagaatgttgctgctttagcacacttgttgrtgcaccagcacacttggccataaggacacttttttatcttctcctttttagcacatgggcggacacatcctctttttcttcgaacaaagccgtaaatgacctgaagtagtatttctgaaagcatgctcctctgtttacctgaggtgcttgttaaaagttcagatcgtcaagcttcattcttaaccccctgaacccgtctctttctgctggtgggatttggggatctgctctataaacagtctccccagtgatccatttatacctgagtgactcagaaccactgggctagagccagaaaggggagagttttactgaggttccagagtaaatcatgaaaatcagtaaatgtaaaatgggtaaaattacaaagttcgggctctggatgcagcaagatcctgaacagagacacctaaatgtccagctgaggtctggctgccttggaagacc

SEQ ID NO: 829237 - DNA, 566 bp, Homo sapiens
aggtacaaaaaagagtgtctctaaaatttcagcacagggaaagggagagcccagagaggttgtctaatctaatggttgttgaacttcccagaatgttgctgctttagcacacttgttggtgcaccagcacacttggccataaggacacttttttatcttctcctttttagcacatgggcggacacatcctctttttcttcgaacaaagccgtaaatgacctgaagtagtatttctgaaagcatgctcctctgtttacctgaggtgcttgttaaaagttcagatcgtcaagcttcattcttaaccccctgaacccgtctctttctgctggtgggatttggggatctgctctataaacagtctccccagtgatccatttatacctgagtgactcagaaccactgggctagagccagaaaggggagagttttactgaggttccagagtaaatcawgaaaatcagtaaatgtaaaatgggtaaaattacaaagttcgggctctggatgcagcaagatcctgaacagagacacctaaatgtccagctgaggtctggctgccttggaagacc

SEQ ID NO: 829238 - DNA, 615 bp, Homo sapiens
tatgtctcaccgtgtgggctgtttactttatgaggktgcccagccaagggggcgagtggggctaaaatacagctctggctctgtgtgacaagtgtgtgcttgtggtcacatcctcccagaggagactctgtaatttacacaaaggctcctgtgggctagcagcgtctttgtggagggccttgcaggtcttgcaaaggctgcatctctatgtagggcagtggttctcaagcttttctcattagagtctcccggaaggctgcttaaaacacagattgccacaggtcctccctacccttagggtttctggtttgtaggtcttgggtgaggcatgagattttgcatttcttttatgttcccagtgatgctgatgctgctggttcgggaaccacactctgataattactcatctgggtaacacgaagccactggaaagggttagataggagaagcagagccaagccacaggtaaaaggggtgttttctaggattaaggtttctgatagcccttgtgaacaagttagggcagctgatatatggagagtaggtacacactatcccccatcttgtcctgtcaggtgaggtttaacagccctattcattcaagtgggacttcta

SEQ ID NO: 829239 - DNA, 615 bp, Homo sapiens
tatgtctcaccgtgtgggctgtttactttatgaggttgcccagccaagggggygagtggggctaaaatacagctctggctctgtgtgacaagtgtgtgcttgtggtcacatcctcccagaggagactctgtaatttacacaaaggctcctgtgggctagcagcgtctttgtggagggccttgcaggtcttgcaaaggctgcatctctatgtagggcagtggttctcaagcttttctcattagagtctcccggaaggctgcttaaaacacagattgccacaggtcctccctacccttagggtttctggtttgtaggtcttgggtgaggcatgagattttgcatttcttttatgttcccagtgatgctgatgctgctggttcgggaaccacactctgataattactcatctgggtaacacgaagccactggaaagggttagataggagaagcagagccaagccacaggtaaaaggggtgttttctaggattaaggtttctgatagcccttgtgaacaagttagggcagctgatatatggagagtaggtacacactatcccccatcttgtcctgtcaggtgaggtttaacagccctattcattcaagtgggacttcta

SEQ ID NO: 829240 - DNA, 626 bp, Homo sapiens
tattagaggggctgcagagctctgagaacaaaaagaaaatcataacagcaacgagagaaaaaagacaaattgctaataaaaggacaytagattgacgacagtcttcttaactgcaacaatagattctagaagacaatgaaagactattttcaagagctgagggaaaataactgtcaactgagaattctgttccattatcactcaagagtgaaggttaagtaaaagcgtttttaggtgaggactgtataaattaccactaactgacccttccttaaagaactagtcaagagcacatttcagaaaaaaatgaaaacaaacctaataggaagaagtgggatgtagaaaaatgacaatgagcaaataaatcattacagttttgggtatatacaaaggatacatccctccttactgtataaaatgagaaaaataacaaccaattcctatggtatacaaataatactggtcagtgataacataaatgataaacaaatgtaaagttaaaatatattgttattagtaagagcagtaaaacaatatatatataaaacttagatattgttaaaataagtatgcatgttcaaaaattaagagtaaccactataagaactgatagatggtaggcctta

SEQ ID NO: 829241 - DNA, 626 bp, Homo sapiens
tattagaggggctgcagagctctgagaacaaaaagaaaatcataacagcaacgagagaaaaaagacaaattgctaataaaaggacactagattgacgacagtsttcttaactgcaacaatagattctagaagacaatgaaagactattttcaagagctgagggaaaataactgtcaactgagaattctgttccattatcactcaagagtgaaggttaagtaaaagcgtttttaggtgaggactgtataaattaccactaactgacccttccttaaagaactagtcaagagcacatttcagaaaaaaatgaaaacaaacctaataggaagaagtgggatgtagaaaaatgacaatgagcaaataaatcattacagttttgggtatatacaaaggatacatccctccttactgtataaaatgagaaaaataacaaccaattcctatggtatacaaataatactggtcagtgataacataaatgataaacaaatgtaaagttaaaatatattgttattagtaagagcagtaaaacaatatatatataaaacttagatattgttaaaataagtatgcatgttcaaaaattaagagtaaccactataagaactgatagatggtaggcctta

SEQ ID NO: 829242 - DNA, 626 bp, Homo sapiens
tattagaggggctgcagagctctgagaacaaaaagaaaatcataacagcaacgagagaaaaaagacaaattgctaataaaaggacactagattgacgacagtcttcttaactgcaacaatagattctagaagacaatgaaagactattttcaagagctgagggaaaataactgtcaactgagaattctgttccattatcactcaagagtgaaggttaagtaaaagcgtttttaggtgaggactgtataaattaccactaactgacccttccttaaagaactagtcaagagcacatttcagaaaaaaatgaaaacaaacctaataggaagaagtgggatgtagaaaaatgacaatgagcaaataaatcattacagttttgggtatatacaaaggatacatccctccttactgtataaaatgagaaaaataacaaccaattcctatggtatacaaataatactggtcagtgataacataaatgataaacaaatgtaaagttaaaatatattgttattagtaagagcagtaaaacaatatatatrtaaaacttagatattgttaaaataagtatgcatgttcaaaaattaagagtaaccactataagaactgatagatggtaggcctta

SEQ ID NO: 829243 - DNA, 462 bp, Homo sapiens
ttggagaactggttggtgcagggggaaaaaaatcctacccaattgctggccagaagttttgtatgtgaataaaaaggaaatgagaatttttccctatacacactccaaggagcacaaacttacaggaaaagccacattgctcagtgactttctagttctcatcatctttaatgaaaaaaaaaaaacagtttgacagtacatgctatgtatataattataagttggagcaggtcttgaaagctacttagctcaactttcttatattacagatgagagaactgatgctcagacaggataagtggcttgtcttacgtcatccaccttactagtggcagaccaagaattagaacttggctcactgagtcttattcccaactactcggcctttcttcctctctggctaattggataaagaggcagaacacaatccasatttaaactccaggaaaaaagtgatggaaa

SEQ ID NO: 829244 - DNA, 550 bp, Homo sapiens
cctcggcctcccaaagtgctgggattacaggtgtgagtcgccgcgcccggcaaaaaaaaaaaaaaaaaaaaaacttttcaagaacaaagttgattgaggtaggaaaaaactaaggagacactgttcaacagtattctaggcaggacctcgcctaaaatagctgagatttctattttctatgtgagttcccccaaatgactgtttcaaactctgtcgcgggtgtgtgccaatcctcttcccataccaacactgttactatctcttggtttcatctgcctaagcagggttttggatggcaggaggatgggggtgggggaagcaagggaagaactggaaggaagtgtgactttgcgctatatgtgagaattcgcctttttagggaagacccctcaaaatcaagagacttatctgtcagcctccagattaatagcaggcgaattaraaagggggagtcttgaggctggggaggaaggagtgaactgattaggggtgtatgcaaatttaggatcccgcttcagctcccaggaggaggggctgtctgcagcctttt

SEQ ID NO: 829245 - DNA, 504 bp, Homo sapiens
  misc_feature 1, 2, 3, 4, 5, 6, 7, 8: n = A,T,C or G
nnnnnnnnccatgtaaatggcaatgtagatataataagcaaatgatataataataagcagattgatataataagcaaattgcaatgggaaggggagaagggaaaagatattcatactcaccagactatggaggattcaccaccagactgggaagcaacagcctgggtcggctccagagtcggccacttgtccgtgcacagacaaggaagaggtctcatgaagctttggcacaatctaggaccctagctcttttgtaacgagttgtttggcatgaggtccaggcacgaaggcccttcgtgaccaggctcaaggaacacaaaaaggtcaacttgtttttgcgattgtctgttgtttttcttatatacttatttatttattttttgagacggartcgtgctttgtcacccaggctggagtgcagaggcacgatcttggctcactgcaatctctgccttcccggttcaagtgattctcctgcctcagcctcccaaacagctgggatta

SEQ ID NO: 829246 - DNA, 567 bp, Homo sapiens
aaaattaatgtacacaaatcagtagctctgctttacaccaatagcaatcaagctgakaatcaaattaaaaactcaaccccttttacaatagctgcaaaacaaacaacaaccaaaaaaacataggaatatacctaaccaaggagatggaagacctctacaaggaaaactacaaaacaccactgaaagaaatcacagatgacataaacaaatggaaacacatcccatgctcatggataactagaatcaatattgtgaaaatgaccatattgccaaaagcatccacaaattcaatgcaatttccataaaaataccagcattattcttcacagaactagaaaaactaattttaaaactcatatggaaccaaaaaagagcctgcatagccaaagcaagactaagcaaaaagaacaaatctggagacatcacattacctgacttcaaactattctacaaggccatagtcaccaaaacagcatgatactggtataaaaataggcacatagatcaatggaacagaatagagaacccagaaataaacccaaatacttacagccaactgatctctga

SEQ ID NO: 829247 - DNA, 567 bp, Homo sapiens
aaaattaatgtacacaaatcagtagctctgctttacaccaatagcaatcaagctgagaatcaaattaaaaactcaaccccttttacaatagctgcaaaacaaacaacaaccaaaaaaacataggaatatacctaaccaaggagatggaagacctctacaaggaaaactacaaaacaccactgaaagaaatcacagatgacataaacaaatggaaacacatcccatgctcatggataactagaatcaatattgtgaaaatgaccatattgccaaaagcatccacaaattcaatgcaatttccataaaaataccagcattattcttcacagaactagaaaaactaattttaaaactcatatggaaccaaaaaagagcctgcatagccaaagcaagactaagcaaaaagaacaaatctggagacatcacattacctgacttcaaactattctacaaggccatagtcaccaaaacagcatgatactggtataaaaataggcacatagatcartggaacagaatagagaacccagaaataaacccaaatacttacagccaactgatctctga

SEQ ID NO: 829248 - DNA, 479 bp, Homo sapiens
tgagtgtgtatttgccttatacatttatgttaacgtaaccatactcatttctatcaacattaagcaatgcttctagatgttrataaatatgaacaactcatttcaagacactgtgctgttggtgtctgcagatgtgtgatctatgctacttttcctatggtgggttcttgtcatatttgtgaggtcttttcatgatcataacctctctgacttgcctctactgtttttggagatgcacaaggaagatctgtctagacacaatttgccaattctcatgataccgttgtccgggacatctgtgggtcttaaatggcctttagaagaaaatgagacattttttacatttcacctgctttagggcatcgaagaatggtgctttctgttcttgcccatcccttgctttgagttgtcagaaggatcgtggggcatgggtgggatgtgttctgtcttccaggcttttccttgaccaaagcttttga

SEQ ID NO: 829249 - DNA, 594 bp, Homo sapiens
gagttttttgttgtaggttcttttgacttttctccatagacaatcatgttattggcaaataaagacagttagatttcttcatttttagtctggatagattttatttatatttgttttaatacactaacttggacttccattgaattagtacgttttcacatggctacataaaactacttgagaccgggtaatttatgaagtaaagaggtttgactcacattctgcatgcttaacaggaagcatggctgggaggcctcaggaaactgataatcatggcggaaggtgaagagaaagctcttcacatggtgggaagagagagagagagtgaagggggaagtgtcacagactttcaaacaaccagatcattaaattttaaagctccaaaatagtctttgaatccatgtcacatatccagggcatggtgattcaagacatgagctcccaaggccttgggtagctccacctctgtggctccaaagggtacagtacccaccactgcttattcggatggcactgagagcctgtggcttttccaggaacactgcrcaagctgtcagtggatctacatttctgggttctgaaggatggtggccc

SEQ ID NO: 829250 - DNA, 583 bp, Homo sapiens
tatttgtagccatgttgacctaatatcttgacagagttttggatgatgaccacagagtcaaaaatttatatacattaaccttgtatgcatttaaaatacctgacttaatcctaggtcaaatgtgtaatcattttatttttaaagctatgatttttaggagatttgcatttgaattaatcaaagagagatgtaggagtggtgtttattacaaacacagtttttttggggggccatactttagacccactgaataaatattctagattagaacattaaaatacacatgctcctagatattagtcagttcataaatatagcctgccctgtattaggtaatgagggaaaaggcagtggatctaatgtgtgccctaaataaaaatattaaaattaaaatggaatgatttaaattaaaaataaaataaccaattattatcaaacaaggcactcctgaaggtagtggttaccttgtagtctctgagtttgggagacttgtttatatactttaatgtcccaaactcatyttattctttcattttacagtgtgagggcattgctttatattgaactgaaaagtatgaatggt

SEQ ID NO: 829251 - DNA, 616 bp, Homo sapiens
gtatcatgccctgataatattaattggaaatataactctggaatggtgctaagggctatccagtgtttcttcagcacactctgatagagctaaattagcaggcaccaatgtttagtggtggtgaagttagatttcttaccagttataacaaaatgctactataggtgatatattttaagatgtaaaatgtctgtaaaattgaatgtaagtttgccacttatattgagaaaatagacaatgattattttattgggtagggctgaaacatgacagaattattctgaaggcatttgatggtgttttcgcttctttgaatgccttgatttccatgctctgatgatttagttttatagcactataaatcactttggtctttagaagagattttaaaataatttatgttagaactattttctttcatttttattttaacattatttatggtattatattgtaagtcagtattgtgactgatttcgttgctggcttctctgtatttctgttagactgcaaactctgaaaagacaggaayttagcccagagtttgacgcaaaacataacactttttgtgttgcttgactgatacatttaagcctcttaatgtagtagcttaagg

SEQ ID NO: 829252 - DNA, 603 bp, Homo sapiens
ttagaaaacattgttgccactttcttatcagaattccgttaaaaaattaccttgctataatgtgaatttctactgcaactacttttaatrgtttttctaaaaagttaaaaaaattttaagaagatgaacctgaaaagggcacatcaggacaatattttttgtttcattaagaagcaacaacaacaaaatgtgatcggcagcactattaaggataattggaagtgtaattattccagagaattttagatttaattgtcacttcactgcacatgttattcaaatacctgccagtctctctccaaagatgtcaaaatcaatggcaaaaataatatctaattaattgatttgtgaagctgtatatttcaaaattaacatgtgacccagtatgaattttatttatgaattttttatatttcaactatttccagaagacattgagttcattgtaattaaaaattattagctatatattaataaaatccttttccatgaaatcttctatttatgactgagattattgaaacttagattacatttattaggttttaatattcttgtttgcaaaatgaaaagtgaaataagtttcgattctaatagagtcag

SEQ ID NO: 829253 - DNA, 545 bp, Homo sapiens
ggctctcccttcaacaaaagcaaagarggagagagatttgaagagaaatcgtgaattgcaagaaggggacaacaggcatctcattcttgactaaatgtttattgagctgcagaactggtagagccacccgacacatcccctggacagaacatgagggagatctcaggagatcttgatgtttgttccctggagttaggggtccaaatgtgaacatgaagactggtgcttatttctcagccggtcatttcataaggcagaagcctcactggagcagctgcatcagtggagtcaccagggttgtaggttacatgggaggaacatgaagggaacatggccacctgatggactaactcctagtccatcaggggtcccacacaaggacctcaggagctgccatggctcaagatcctgtctcaaagaaacaacaacaacaacaacaacaaaagaaggtgcataacacttgagaaagaggcagcagaagatgtagatgatatggagctgttcagatgatgccctcccttatggaggggtttggaggcataggt

SEQ ID NO: 829254 - DNA, 565 bp, Homo sapiens
tgttcatttcccctttcttttattccatttcatgttgggtcctgccatatcctgttcacttcccccttgaaacaaatcaccttaaatatttcttcttggcctattctgtaatttcaaaatcctaagtagtttcagcaggaagaatattaaacacagctgtggttctgtcaccttttcttgttatatcctgaaaaattaagaaaaagatggctgctgtggctttaaggaataaatcaagttagctgaggaactcaacacgcaggagtgctttgaaagcaaatgatgagtctctcgtgattctcaagtaaagcctgagaaagtagatttaaatgccctggtgtactatagaagaggctgaaaaaacactgacacaggcattcaaacactgacacaggcattcaaatcagagcatcctcaattcacacctgttttttaaacccatgcgtgcgcrcacacacacacacacacacacacacacacacacacacgttacatggaacgtttcctaatagcctgtaaactgaatataggctaaaaaggtagaactattaataaatttagacct

SEQ ID NO: 829255 - DNA, 589 bp, Homo sapiens
ggactcttttttttgagacggagtcttgctctgtcacccacgctggagtgcagtggcgcgatctctgctcactgcaagctccgcctcctgggttcagcccattctcctacctcagcctcccgagtagctgggactacaggcgcccgccaccatgctcggctaattttttgtatttttagtagagacggggtttcaccgtgttagccaggatggtctcaatctcctgacctcgtgatccacccgcctcagcctcccaaactgctgggattacaggcgtgagccaccgcgcccggccaggactctttaactttaacttcaagttcattatatttccttctgcaatgctaatatccaaagataccaaagaataccttattcagatcttcagagttatttctctgtacagatctgtcttatacagcactctcgtccagcaaactctagtaactatattctcttggactgtkagctctgtctcctcaacccaggagatcactgggttcccctccctacaccacaacctggaaacacactcaaggttctaatgttgtacaccttgttcatttcctctctcccagtaatcactgtg

SEQ ID NO: 829256 - DNA, 611 bp, Homo sapiens
tttactcaattatttcttttttattataaatatctgtcatatacatttttgtacttaaaaatccttgtgtgcatttaaaactatttctttatagtcttaaaaatggcgttctggatgaaatacgaatttttgaaaaggctattggtaaatatggtcaaattatctaaactgctttctggaaattttctactaattaatcttccactaaaatgggtttattttaaagtttttattgcaattaaaagaggtaaaccctttgcaaatagatagtcatgggctgcaaagtcaagctggctattcaaactcaatgacaagtttttttttttccctctcaacccactttctgctgctctcccatttcacatacacaatgtgagatgaaggtcaggtgagataagggtattaggcatgacttacaaaagctataggcacaggatagctagctgacttctggtatggtaataacaatattggtgttactatttctattcctacttgcttttggcacaaatkacagccagttctgcaaatgctaaagctgttttccactgccaacatgttctactaatgatcactgcaaaaatgccagctgcagctatggagggaagtat

SEQ ID NO: 829257 - DNA, 558 bp, Homo sapiens
cactctgaattaaaaccctgaaggtgacgaaagccccttcctatcaatttattcttgtccgtagatatcaccagccacagtgctctgcagacaaggggttctctaccttagcaagcttgccagtcacagcccctcctcctccaaccatgccgccctctttctggggctggctcagccctgtgcagtggcaggccctttttgtaaatggaggatctctggtgagtcctagtaaattgaccatcaagtactaagaccaaggagccacagcccagaggccagaaaagaactggaaatcagaagtcaggccattgtgctgctggggaccccaggctggtctcatgtctggctcagtttccctgcctgtaagtaaggttcaccaggaagctctggctagttttgttagaaaccctgtcccccttgagggacatcacagytgtctccagaaaggtaggtgatgggatgatggtgaaatacaggatcaagtactcaactccaacctgatggccatacccaggacaaatgctgccacatagttggagatctggcccatgcctacaa

SEQ ID NO: 829258 - DNA, 645 bp, Homo sapiens
gaacttgtcccagaccatgaccctccctgctgagaaaacatgcagactcacagtttttttgcatctcgaggagcctgcagtagtgatccagttccttcaaagggtctgtggattctcttggctttcctggtatgttcctgcagtagttcttggagcaaaagttcaggatgtgagtctccacacactgctctgtttgtctgagcaggagctgcaagctagtcctgcctcctatctgctatctttatcagtattctggcaattctatatttaaattctctagcttttcatcttttttttttttttttactttccctctattttcttgaacattttcatcataattattggaagtctctcatttctgaaacacctgtgggtctatttccattgtctgccttttctcttgatttttagtcatttggccctgtttttttgtttgtgttttgttttgttttttagcatgtctcatacttctctattagatgacacacattttggatgaaaagttggaaagtctctgggtgatgttgtattcatccagaaagagagaattaagttgacttctggaaggcagagtaccaaataaataccctactcctgtcaaggctttggtttatgtcatgktttggctggtgtggttctttt

SEQ ID NO: 829259 - DNA, 559 bp, Homo sapiens
ccatctcctctaggttttctggtttatgtgtgtgaaggtcttcayagtaaccttaaatgatcttctgtatttatgtggtgttggttgtaatagctcccgtttcctttctagttgagcttatttggatcttctctcttcttttcttggttaatcttgctaatggtctatcaattttatttatttttacaaagagtgaggtttttgtttcatttatattttgtatttttgttgttgtttcaatttcatttagctctgctcttatcttggtttgttcttttcttctcctgagtttgggtttggtttgtccttgtttctctggttccttgaggtgtgaccttagattatttatttatgctcatttagacattttgatgtaggcatttaaggctattaaacttttctgttagccgtgcctttgctttataccaaagattttgataggttttttcactattgataaaaattctgcatacatttcagaaagaatacttgtcttctgttaatgaacagaacattctgtaaatctcaggtaggacaacttgtttgacaatattattta

SEQ ID NO: 829260 - DNA, 634 bp, Homo sapiens
attacatagagaaggaatgtggagtttgtctggaattctggttatttactgaatatctcttgccaattttctgcctggtgtcagccaaaatgagcaatggaaacaatcatgatgtcacaaaggcatgrtcagcacgaagtcagacccatcgtgggtgcaggtcacagcttgcaagcaagcaagctccactagcagaacagaactgttgggtgtggctgaggggaatctagaacacaggcagaggagggagagtataaatatcaactaacgctcagcaccaaatgcagaagtggtgaacgctgcttggtctaccatcctcttgctgtaagtttcgataactgcaagaagacaccacttgaaaaaccaattatcaggatatcctgaacttaacatgggaccctagtggctctgagcattgcaagggggctctagtcggccctggcagcacctcactcatcctttgcattctcatgcttcctactataaggacatgtgcttctcagcctgtgtgctttcttgggctgtaggagtaggtgtattagtttgctagggctgcacagactgagtggcttgaacaggatttttctcacggttttggaggctgaaagtccaagatcaaggtgttagcagagtt

SEQ ID NO: 829261 - DNA, 613 bp, Homo sapiens
agagtgagactctgtctcgaaaaagaagaaaaagaaaagaaaagaaaagaattatctagaagcatcaattgtaagaaaagactagaggtgagtggagcaacaagactcctgtaatagtgaaaatggaaattatgacaattaaagagtagttgcagcatcactgccaacaggagggaaagacccacttgataatttaggagggatttagaaggaatcaaagacacctgcaaaatagtgaatctgggtgacttacagaataaagaagccattaatcgctttgaaagatgagggagacatgagaggttcactttgaatatattgcttgacagctggcaggttatgtcactccatgtgttccacagatattagacaaagcataccttatctggagacaaggtttgactggataaataggaagggtccatctgtgtaatagaactattttagaatgtaggaatagataaagtatcaaaggaatatatggagatyaaaaaaatggctcctggaatcagtaatgtgctggttttcaggagttaaaaaattattgactcgggtatatcctagtgaactgacaaagatacattgttttaaatatataaaaactattaagaaa

SEQ ID NO: 829262 - DNA, 599 bp, Homo sapiens
aactgactaggtccaggatgagattgaatctgataattaactggcttggatccagttataggcckcttatgtctgactcggtcagaaagaaactggtagtaaatggcaatattgcagggggtgtaaaatatgacttttgaaaattcatggggatttttctgttctcctctttgtttcatttttcttgcatgcttatataggaaaaaaattattagccaagttgattaagggaaactgatatccaaagccaatatttcaggtaaagatagaacccttagttttggaagaactgagtaccttctggcttatacatgctgtgaacccacaatatctgagacaggtctcagttgatttagaaaaagttaattttgccaaggttgaggatgcagacccgtgacacagcctcaggaggtcctgacaacatttgcccaaggtggtcagagcacagtttggtttcatacattttagggagacatgagacatcaatcaacatatataagatgaacattggttaactctggaaagacaagacaactcaaagccaggagggagcttccaggtcatagatagataaaaaacaaatggttgcactcttttga

SEQ ID NO: 829263 - DNA, 595 bp, Homo sapiens
tatagtttttctttgctggttggattttccaatcacatgctatgtttataacagcctttaaactgctgtatttcaggttccttcaggtcgtctacttcaaatcttccatgtttgtccctgaaacttagttctcatgtgtggttggagtatttggccacctctgtggtatcatttgaaaaaaatggaaaaatacatgaaattttgatatatcccaattaggcctggagtttatatgccataagattcactcttagagagcgtatttaaattaaaagcattttctacatatcccgtagacatacacccaagagggaagtatcttaaccatggataatcaataatgcctaaatatgcactaatttatcaactaccctttacagggacattcagtgaaaaaagaaactaaattatccagaaatcacttctttacctctaatttatccatcttaatggcaataatgctgccatgtctttttgtctctgttcctcccacagtataattgtaggtttttctccaaactmatgtatcataatgtgttttcaaacaacataaatcttgtctttagcagtgaatataattaagtagaattacttt

SEQ ID NO: 829264 - DNA, 483 bp, Homo sapiens
atggtgtatatgtatcacattttctctatccagtctaccattgatggacatctaggtagatttcatgtctttgctattgtgaatactgctgcagtatacatgcacatgcctgtgtcttcatggtaraatgatttatattcctttgggtctatacttggtaatgggattgctgggtcaaatgtatttctgtttttatctctttaaggaatcaccacaccgtcttccacaaaggttgaactaatttacactcctacccacagtatataagtattccctttaccccacaatgtcaccagtatctgtgggtttttaaaaatctttttaataatagctattctgactggtgtgagatgatatctcattgtggttttgatttgcatttctctagtgatcaatgatgttgagcttttttatgtgagtattgtctgtgtgtctgtcttcttttgagtttttgtttgttttttcacaaaattttctggaagt

SEQ ID NO: 829265 - DNA, 503 bp, Homo sapiens
ttctagcttttgatttaaagtgacagactcttcctttcatttgaacacttagaggccactgtattaattggcctcatttctttttcttttttgagatagagtttcactcttgttgcccaggctggagtgcaatggtgagatcttggctcactgcaacctctgcctcccgggttcaagtgattctcctgcctcagcctcctgagtagctgggattacaggcatgcaccaccacacccagctaattttgtatttttagtagagacagggtttctctatgttggtcaggctggtctcaaactcccggcctcaggcgatccacccacctcggcctcccaaagtgctgggattacagtgtgagccactgcacccrgcctggcctcatttcaatattgtgtctcagggaataggcaggcccgaggagagggaaaatgatgggggaatggtgggttggtggagcagtcagaagacacacaacatttattaagtttgccatcttctatggg

SEQ ID NO: 829266 - DNA, 604 bp, Homo sapiens
gggtccctcaccaagtggatcacacaccaggcaggcaccacgccaggcgggtcgcacaatagagtgggatcatatatcgggcgtttgtttctccatctgcaaagggctcttmtgaagcaggtgactcctctgcctcatgtttcccagctcccccatgcagagatgaaaaaaataaatacatatatacataaggattgcaacatgtgaaaaatgagaagccattaaggggcaggagccctggaggaaaggcccacccctcatccaccatagtgcaagtgcatgcaggtggtcacctgtgctctccacacgcttcctgcttccatgagggcatgagggcacgtgcaggctcagagcaggtgcacagcctgatgccaaggtcctgctggagcggagggtgacagacctgctgagtggggagcctgtggcgggagatcgcttccagaccattcattgttcagctcaaggcagaaacagagaattcatggagatgtcagtcacaattttcttttactttatttggaaccagtgtgagctaatagagtgtgttttgtgtgttgtgtgcatatgtatatgtgtgttgtgtgtctatgtgttgtgtacatat

SEQ ID NO: 829267 - DNA, 631 bp, Homo sapiens
atgtaattttatacttttttgatagttacttgactagttctgtctctttcattagcctgtaagctcaaaagagtgtagaatatgtctagttagcaaaattttccagcatataataagtgctcaataaagtaagtatctgtcaagcgtataagtagcagaattaataaattcccaggtcagtacttttctagttcattttcattctattcagcaaatttgaatgatcacctaccatttaccaaatagtatttaacagtatcctgagaatactgttaaatatctttgctcagatgttgtctttcttaaaactggttatctttgttaaaaccctaacccataccatcagaacttgaggcaatttggcagagtaatatccccactaacgtcattaatccaatgagtatatattcaggactgtgtataggcaaggaagtgtgcagtaggtttggagcaggaggtggtgtgtatggtaatgaatagaatgactaaaagtacagggatatcagttttttctgtcctggagaaatctccagtctctactaattaatattttaytcagcattgagggcttaaataaatatcacttccactgggaagccttccttaactctctaagccagattagactccc

SEQ ID NO: 829268 - DNA, 635 bp, Homo sapiens
atgtaattttatacttttttgatagttacttgactagatctgtctctttcattagcctgtaagctcaaaaaagagtataatatgtctagttagcaaaattttccagcatataataagtgctcaataaagtaagtatctgtcaagcgtataagtagcagaattaataaattcccaggtcagtacttttctagttcattttcattctattcagcaaatttgaatgatcacctaccatttaccaaatagtatttaacagtatcctgagaatactgttaaatatctttgctcagatgttgtctttcttaaaactggttatctttgttaaaaccctaacccataccatcagaacttgaggcaatttggcagagtaatatccccactaacgtcattaatccaatgagtatatattcaggactgtgtataggcaaggaagtgtgcactaggtttggagcaggaggtggtgtgtatggtaatgaatagaatgactaaaagtacagggatatcagttttttctgtctggagaaatctccagtctctactaattaatattttaytcagcattgagggcttaaataaatatcacttccactgggaagccttccttaactctctaagccagattagactcccttgtt

SEQ ID NO: 829269 - DNA, 641 bp, Homo sapiens
ttaagaaattattttagacagatagggaggaaaagggtccttgggaagttayttttcttttaaagcagctccagaaatgtttcttgtctagcaggaaagccctggctcttaaagctgggctggcaagctttggtatgcaaatacaggccattagaaactgtgtccacccaaacattgcgattcccgctgtcttcttgcccttgccccaacatctgtctgacaacatggccgcccccacatatccccatgtgtgcagaacatcatggcgccctgaatttgcatattaaaaggctagagtgggagggcaagtcccccccgcccaggctacatgaatgacatgcctggtcaaaccaatcccctgagccctatgcaaatcagacaccacctcctccaaccttctcatataagcagctacttctccccccacaaacgaggttttctctttgttggaatcccccctctttctgtgtctgtatgggggagctgtttttcttccttccttctttcttgcctactaaacttttcgcactttaaaaccactccatgtgtgtccatgtcattttatccaaacccgtgtgagaccaagaaccctgatgttcctccagtcattggagccatattattaccaggggtccttgctc

SEQ ID NO: 829270 - DNA, 309 bp, Homo sapiens
caaacacggaccagaagagtgcagttgcaagatttaatagagtgaaatagagtgaaaacagagctcccatacaaggggaggggacccaaagsgggttgcccttgccagctcgaatgcctgggtttatatcctgatccttgtccctcctgctgtgctctcaggcaatagatgattggctatttctttacttcctgtttttgcctaattagtattttagtgagctctctgattggttgggtgtgagctaagttgcaagctctgtgtttaaaggtggatgcggtcaccttcccaactaggcttagggattct

SEQ ID NO: 829271 - DNA, 562 bp, Homo sapiens
agcaaattgcagcagcctatacaaaagaaggacctgactattgaaagaaagacaaacaggcagaaaacaacaacaactgcatcaacgacaacaaaaggcccccccaaaaaccctmcccaagggtcagcagcctcaaagacccaagctggacaaactcacaaagataagacagaatcaatttaaaaaatgctgaaaacccaaaaggccagagtgccttttctcctccaaatgatcgcaacattttgccatcaagggtgcagaactggatggaggatcagatggatgaattaacagaagtaggcttcagaagatggtaacaaagaactatgctgagctgaaggagcatgttctaacccaatgcgaagaagctaagaactttgataaaagatttgaagaactgctaactagaataactagagaggaatgtaaacgacctgatgaatctgaaaaacacagcatgagaacttcgtgaagcatatacaagtatcaacagacaaatcaaccaagtggaagaaaggatatcagagtttgaagaccaccttgctgaaataagacatgcaga

SEQ ID NO: 829272 - DNA, 478 bp, Homo sapiens
catctgttgatggacacttaggttgtaatttatcttttagtcttcctacttggtaagagtaacttacacatgatagttacrgtgttgtaatattctgtgtttttttttttttttttggtgaacttacaattaccagtaagttttgtaccttcaggtaattattggacattaatgcccttttctttcagagtgaaaaactctctttagcatttcttgtaggacaggtctggtgttgatgaaatccctcagcttttatttgtctgggaaagtctttatttccccttcatatttgaaagatatttttcactgggtatattttctagggtaaaaagttgtgttctctcagctctttaagtatgtcataccactctctcctatcctgtaaggtttaccctgaaaaatctgccaccaggtgtattggagcacctttgtatgatatgtgcttcttttctcttgctgcttttaggatcctttagtt

SEQ ID NO: 829273 - DNA, 478 bp, Homo sapiens
catctgttgatggacacttaggttgtaatttatcttttagtcttcctacttggtaagagtaacttacacatgatagttacggtgttrtaatattctgtgtttttttttttttttttggtgaacttacaattaccagtaagttttgtaccttcaggtaattattggacattaatgcccttttctttcagagtgaaaaactctctttagcatttcttgtaggacaggtctggtgttgatgaaatccctcagcttttatttgtctgggaaagtctttatttccccttcatatttgaaagatatttttcactgggtatattttctagggtaaaaagttgtgttctctcagctctttaagtatgtcataccactctctcctatcctgtaaggtttaccctgaaaaatctgccaccaggtgtattggagcacctttgtatgatatgtgcttcttttctcttgctgcttttaggatcctttagtt

SEQ ID NO: 829274 - DNA, 584 bp, Homo sapiens
tagccagccatatgcagaaaacagaaactggaccctttccttacaccttatacaaaaactaactcaagatagattaaagacttaaatgtraaacccaaaatcataaaaaccctaaaagaaaaccttggcaataccattcaggacataggcatgggcaaagacttcatgactaaaacaccaaaagaaatttcaacagaagccaaaattgacaaattgggtctaattaaattaaagagcttctgcacagcaaaataaactagcatcagaatgaacaggcaacctacagaaaagttggattctttaagctacagtatactttcataatctaattcaaatagttcagattacagataagataattaaggattagagaggaaaaatggcttgtataatgtaagagacaaaaacagacagagctagatgaaatttcatgtttcctgatgcctatttcatttcacattgtattcttggcacaaaaggggctgagaaatgttgtaattattaagaaatttggtattagcaatctcagtctccttaattccttaatatagaacataaattcttataatatttttacatattta

SEQ ID NO: 829275 - DNA, 589 bp, Homo sapiens
cttaggcctctctcatcagcttgcaaatggctgtcttctccttatgtctctccacagcatcttccttcccggtgtatctctgtgtctaaattccccctttacataagaacactagtcatattggtttagagtctgccctagagaccttattttaactttattacctctgcaaaaactatctccaaatgaagttacatctaatgtactagagattaagatttcaacacataaatttggaggcacatattccaacctattacatttacctaatttatttggaagattcttgtccactctgggttttagttcattgtcattatatggatttttttttcatacctcttattggtatttacatttacccctctccaatttcttttaaataatttatttagattaatcctttttctttatggcatctggactattcttaggtttctccaacccatgttatttamaagtttatgtacatttataaaaatgtatcaatttttaatttttactaaactacccaattgatttttgtatctacatataaacatatatacaaatatatatgtatagtaggaaggggtactataacttaaat

SEQ ID NO: 829276 - DNA, 465 bp, Homo sapiens
ttcaggtgttgataaacacaatgaagctaatacggtaaggttatgtgatacacaatagtcagtgggaccagctgttgtagcaggtttytctaaaatgcagcaacattttagctgaatcccaaataatgaaaagtaggtaaacatattgaaatttgtggaatgagtttcaggaagaattaaaagcaagtccaaaggcactgaggtttcaagtcttggtgtgttttaggaatgtctttgtgactgaagagtagtggacaaaaagggaataggaaacaaatgaattcagaaaaaaaaaaaaaaaagacagatttgggccatagaagaccttggaggccatagaaataaattttgacttatattgagtgtaatacaaaatatttaagaattgtaagcaggcctgtattataatcagatttacattaacaaaatgattctattcatttgtgaagaatggattatggaggg

SEQ ID NO: 829277 - DNA, 624 bp, Homo sapiens
tgaacgccagcctcgaaagctcaagctggaagctccytcattccactgcatctccctgatgtgaaagagaagaccaaggaaagtaacattttatttactttttatttatttatttttgactgtcctgtgaatgcagtagaaagtaacattttatactaccaaccacagcaggccctcattataaatttctagactgttgttggtagtagtggtgaaacaggcttatgttttatgtgccaaggcatttatttgctctgctacagaggaggcagtgtggtctaaaatagtagtatgggaattatgaaaagaagatacgagttcaagcgctagcattgccacttactagctgtgtgactgtgggacagtcacctgacttctctgagacgaaacttatcttcagctagagcagatacctgtgagatggggctaaaaataacctccgtctcagaggattacagataatcaaatgaaataatttaccgagacaagactgtaaagcactacagaaacattcatgctgttaacagaacaatacaccaattcctaacaatgacagctgtcaggagtatggagaccaggagcagattagtggatttcctagtggataatgttatggggtgctgg

SEQ ID NO: 829278 - DNA, 624 bp, Homo sapiens
tgaacgccagcctcgaaagctcaagctggaagctccctcattccactgcatctccctgatgtgaaagagaagaccaaggaaagtaacattttatttactttttatttatttatttttgactgtcctgtgaatgcagtagaaagtaacattttatactaccaaccacagcaggccctcattataaatttctagactgttgttggtagtagtggtgaaacaggcttatgttttatgtgccaaggcatttatttgctctgctacagaggaggcagtgtggtctaaaatagtagtatgggaattatgaaaagaagatacgagttcaagcgctagcattgccacttactagctgtgtgactgtgggacagtcacctgacttctctgagacgaaacttatcttcagctagagcagatacctgtgagatggggctaaaaataacctccgtctcagaggattacagataatcaaatgaaataatttaccgagacaagactgtaaagcactacagaaacattcatgctgttaacagaacaatacaccaattcctaacaatgacagctgtcaggagtatggagaycaggagcagattagtggatttcctagtggataatgttatggggtgctgg

SEQ ID NO: 829279 - DNA, 591 bp, Homo sapiens
ttaaagaactaaaagtaagtctaccatttgatccagcaatcccactactgggtatctacccagaggaacakaaatcattatgcaaaaaagatacttgcatatgcatgtttatagcagcacaatttgcaattgcaaaaatatggaaccagtcagaatgcccatcaattaacaagtggatgaagaaaatgtggtgtatatatatatatacacacaccgtggaatactactcatccattaaaaagaatgaaataatgccattcgcagcaatttggatggaattggagactattattctaagtgaagtaatttaggaatggaaaaacaaacgtcatatgttcacagtcatgtgtggaagctaagctatgaggactcaaagacataagaataatacatgggactttggggactcaggggaaaacggtgggagatggcaagggataaaagactacacattgggtacagtgtacactgttcaggtgatgggtgcacaaaaatctcagaaattaccactaaataacttatttgtgtaacaaaacatcacgtttcccaaagatctattgaaataaaaaataaaaaatttaaaaaataaaa

SEQ ID NO: 829280 - DNA, 416 bp, Homo sapiens
actttcttattcttttttggaattaaaaagtatatatttgcccttcctgatcatgtcatgactttgaaacataactgtttcctcagtgagcctttttttttgagacggagtctcactctgtcacgcaggctgaagtgcagtggtaccatgtcagctcactgcaacctccgcccttcagtgagattttaattacttcctctcataattgtgacttgcataggcaatggcttgtcatgagcctgactctgtccctaagtctgtgtgaccttgcaactccagggccttgcattkttcactcaattgccgttttcctggctgacttcaaactcttaagaggcagatactgccatcggttgctgtctattcagaagtttggctaattagaatctaggtaaagaaactctttgtaaagaact

SEQ ID NO: 829281 - DNA, 416 bp, Homo sapiens
actttcttattcttttttggaattaaaaagtatatatttgcccttcctgatcatgtcatgactttgaaacataactgtttcctcagtgagcctttttttttgagacggagtctcactctgtcacgcaggctgaagtgcagtggtaccatgtcagctcactgcaacctccgcccttcagtgagattttaattacttcctctcataattgtgacttgcataggcaatggcttgtcatgagcctgactctgtccctaagtctgtgtgaccttgcaactccagggccttgcatttttcactcaatygccgttttcctggctgacttcaaactcttaagaggcagatactgccatcggttgctgtctattcagaagtttggctaattagaatctaggtaaagaaactctttgtaaagaact

SEQ ID NO: 829282 - DNA, 519 bp, Homo sapiens
catctgcactcagactagccccatttttcctggttacatacagacttcagctctgctttctgctcaagatatgtttccctttatttggcaggaaaagggtattttgaagatktctctaataatttctgtatgaggatttcagtttctccacatatgcaccaacagttgatattgtgtgtctttttaattttaaacattttgctagttgtattatggtatttaattatggctttaatttgcatatttccaatgacaaaggtgagcatctttttcttgttgttagtcatttagatacttttttgtgaagtgcttgtgcaaatcttttgctacatatttttcattgttaatgactgtgcagtagtccatcaagtggctgtatcataagttatcatttcttattgaaatatcaggtaagttgagaaaaaataaccaaaaaaaaacttctttatgatctgtgtggtggtgaactttgaattgtgtggaaatggatgaaatacattcttttaaatgtctgatggc

SEQ ID NO: 829283 - DNA, 533 bp, Homo sapiens
gaggactccccaacccccaaccaggaatgtcaggcaaccatcaggtgatggtcaggcggttgttaactgtctttccaaaataataattggtcaggtgcagctagtgccagggaaaggcagtcycccgataagatagaaaatgcctgaaactggtaatcagcagcttcccaataagacctcaggagttgggcaagtgagctcaagcatgagcattaagaagcaaaatggtagagtttaaatggtatatgaccttctagggacattcgactggtaaggggagaacgcctcaagagagcatgcgtacaactccactaaacacaccactcatgttcccctcccaaacgctagcaggccactgcctatgtggacagcccaccccacgggaagaatcagggaagtaatgcaagaccctggaagtcagaggtcaaagcatgcatttgatctctcaagtcgcctgtttggccctcttcctttcattcctgccctaaagctttttaaattattaataactttgattcctgctctaaaacttg

SEQ ID NO: 829284 - DNA, 442 bp, Homo sapiens
tgtgggtcagagtgaaatggggcaggcaagttaggaggcttgaaatttcagcaattcagtgagaggatggtggcttgccccagtatagaaatgctgaagctgaagaggagtgggtggactcagtatatgttttgaaggtagagtcaataggactgcctactgggttgtatgtggggggaatggggagaaagaaaataaggatctcttatctattttagaaatagaattggtgaagagcccatttatgggggtagggaagaatgtgagagggggtaggttgcaggtgacacatgtggcgttctatttgggtcatgctaagtttgagatagatcagatatctaagctgaggggccragtagaaggctgaatatataaaagtgtgtggttctgcagatagatcaaggctggagacatgggttccaggaccatcagcccaaagatg

SEQ ID NO: 829285 - DNA, 595 bp, Homo sapiens
gtctaaaattttaaatcattctaatgatakatcaactcagatcatatgtattaaaaacattatataaccgatatcaaagttatattacaaagatcatattttgagatatctcagttgaaaaaaaatcctacaatgaaaagcatcatccacacatgaagaacacaatgtcacagcaaaaaaatcactgcaccattgctttcataaagaattaacttcagatgggctttggtattgcttatgtacactttagctgattaaaaatgtttcatattctttgaaaaaaaagcatgtatcataaaaatttatataaatgcttttaataagaagtaaaatgatattttttaaaaaactgttagatgacataggtcatattttaattgactatttaataacgaacaactaatttaggtaaaactagaatcttgtataagtaattcactttcactttattttctttcaaacattgtgaaagattaaaaaaaaacctcaagagaaaaacatgtatcttttttttgtaaaaggtaaacaaaatgtacttttaaaaaaatcctagtcaaaatgttattctctatgaaaaggcattttcctatcctga

SEQ ID NO: 829286 - DNA, 578 bp, Homo sapiens
ttgagtccatgaagtattttgagtttgcaaagtaagttgaaagaaattttctggatatcacaggactgagaaattaacttgaaataatttaagaagctctcttaattaatgcaggaaatgttttaaattatctacaatatggtacatagtttcaaattattaaacatctctatgtaaagtaatttaaatccaccaacttttggtaataaattgaagatgagagacattggacgcacacagctggcttcatgaaatttttaaggtaaagttacttaatctgtgtagttgatcaaaaagaccatcatggttcattatatctaattgtaggaaaatgagaatagaatttgcttatgttatgtcttccacatgactgacaggaacatatgctaataaatatgccatgtcattactccttacactttaaataaagtaaaagaaaacaagaaatcttacttattctggtgccttcttgtcaaaaaaaaaaaaaaaaaaaaaaacctcagggaaaaaatacggggttaaaaaatggagtttgggattttaaaattttkgcaaactggatgctttttttttgaacc

SEQ ID NO: 829287 - DNA, 604 bp, Homo sapiens
ctctggtaaactcacagtagacaaaagttagagtccctggagagattgaactagaagcgtactgtatttaggaaccaaggcacrgaagtagaagaaaattgcgtcggctaactgaaaagtacaaccacagaaactcccaatcaccagctccagaagtcaaaggaaacttgtagaccatatccaggcaggagatcggaggatcctttctggagaaactgaactgccacagagaaattacccagaaactgacaaatgaaggtctctgtgagaaagcaagatggccacacagttgccctacactaaaacccacccaccaacaagttccacccaaacacacatgatggcttaagctgaattatgatatccaaggatgatcagcctttaagaaaagtctctggtatagaagagagagatcaaaattaaacagaaagccaaaacttagaggaaaaagagatgatgcaaaaaagccccaagactttagatgcggaaagatagaatttaaaaatggtaaagagaaaattatattaatatataaaattcttactaattatataggaagtattttcagaactgaaagacctaagtttccagattgaaagggtct

SEQ ID NO: 829288 - DNA, 588 bp, Homo sapiens
aaatgtggtaactgggtgcaggagtagcaaaaatctggtgtacccttaccttgttctagctcccttacctgtagcagacattattagtggatcacagaactcctttgagcttaggtttagctcaaatcctttccaacacagtactccaggcagccaccacaatagttggcttcaaggatgaatctatttgttctccctggagatggcatgtcagtgtcgacttttttctttgttagtatctggcctcagttctatgccaatcatagctatgaccttgcacttctttctcactctgcttcagagaatatattctgaaaatgggtactcaggccaaaagctactttcattccaaaacaatttccctagacacaagggctgagggaatcacagctagcccatttactttgcatgttcagaaaacctcaaatgactggctcaagctcacacagctgggttcgtgatggaaccaagaccaaacccyaggctggctgactgcttgcccagagctcttttcaccactctgcctatctgactctgggctttgtcagacggaacaaagaaaatgttcctgggatctgacacttgtaa

SEQ ID NO: 829289 - DNA, 626 bp, Homo sapiens
tatagttaggtcttttttttggatccactctgaaaatttcttttaattagtgcacttagaccattgatattcaaagcagttgctaatatcattgggttaatatctatcatatttgttactgctttctatttgtggcccttattatttgttcttgtttttgtcttctgctctttgcatccacttcatggttttaattaatacatgtatacaatatttacatttagtatttatataagtattatgttataaaaatatgaatgttttatataatataaatgtattatatatatattcttttcttttctttcttagcaaatgtatctcttttttaaaactctttttagtgattgcaatatacatttacaatatacatttacaactaatcaaagtctactttctaataacactgtactacttcacagttaatgcaagtaaattataataaaaatatattcataattccttcttgcctgttccttgtatcatttctgtcatacattccacttgtatataagcatatatatacacacagaatacattgttgstggtattattttgaacaagaatattattttgatcaatttaacattttacaaataaaggtttacattttactttcattcatt

SEQ ID NO: 829290 - DNA, 604 bp, Homo sapiens
ttccaggcttgctttttgaccagtgaccatttaaatgtatgtcttaatttgattttttttctttgctacttaccaaggacaatactcttgaaakccaatacagaaagagtgaggcctgacatgttccccttttaatttctcagtattgatgattttatggttagacctgcgtgcagagaaaataaagggagaaagtcatgcaaaacaaattattacctgtcaaactctttttttttttaaatttaacattagagattatagccccaacaaatggattttttccctccctatttaaaagcactctcttctgattgatatttaatgcttacagtgaccacacgggacatgtattgtttgcagccatgtaaactgccttcatttaaagggttcaatataaaagcccagaaggacaattcatttatttagttgcctttggtcaaaactgaaacagttcctgggcactttaaaggaatattgatcattcaacccactatgctatttgcagaaaggcagatgaaaccactttgtgcctttcataaaaatcctttcaattatagttgaaagagctttatttacacctgccaatgctgccttttatgtctct

SEQ ID NO: 829291 - DNA, 525 bp, Homo sapiens
agtgcttaaatatatttatgaattcatctcaatttctcttyatctctttttaaagagctgtggtatatgtgaaaacgtttgtagcaggtagaggtttttgaaaattggctcatttttaacccagtcgatactgttgtttcatgtcaaaagcaggatatgatgcagtgccctgatagatctgatttactgttctctaggactctggggttgtataccatctatactctcccaaatttgatggtgtcaatatgacctaacgtttaattatttgcatagcctatttaaaattaaaatagcaacaggctctgagttcttttcaagctttaatacactctccctttaaaaatatatttttcataaattactctgctgtctggcaggccatcccattcttcagttcctgtaataaaaggggatggtgtgatgtgggtgtgaaacgcagaggagagcaccatggttaaacaagagcggacactgatcaaatccattaatcaaagtgccttttaaatctctgcaagttgagaa

SEQ ID NO: 829292 - DNA, 581 bp, Homo sapiens
agatgtttcttcattggcttagggtaaactcaagtccatttccagaggtcatttatagatcaagactcatattgactacgccattgtaaaaacatggtttccaaggttgctgtcgtcttggctattcagttttgcaggaagaagaaagagtgtagaggagtgtccacgggggattttattgaccatgccagaaagtaggacacatcactatcacttatatgttatgagtgggtagaaataatgtgtctcactcaccagtggaatgcaagtgttcaccccagtggtgagggaagttgggaagtgccattagccatgggtttaacagttttgccacatgggtactttagattttctcttagcttatttgtattttctgattttgcacaatggatctatatttctaatacaatgtaaatataaataaattaataaatagagaacaagcagtaaggaagtaagggtagggagtatagacaatcccttctaagaagttttgcaggtgccattactggagtgagaaactaggttaagaaaaggtttytaaatatgaaggttctggcatatttttgaaagaattatcc

SEQ ID NO: 829293 - DNA, 575 bp, Homo sapiens
taagtgatttgataaaatttaaaaaactaaaatactgaaaaaagtgataatttgtaaaaatggaggcaatgaccaaagttaaaacattctgaaaaccttataatgtttgggtagaggtagagatttgaaaacttcagatttggttaaatatgctattgtagacatggctagctatccaccaagaatttgttctcagacatagtatagagttgatgctgggagggatgcctgtccaccaaagactattattctatccagtaaaatataaaaggtaatgatgttggtcacccagtggccatggctcttaagaagggactcagtcttcttactctgttaaatgaagagatcacctacatcctggggatgatgaaggtacaagagcgaaaggaccttgattcttattttatcctataaagaaaagccatttgctgattaggaacacttgcattgggctgacaggtgtctaaggaacacatttacattgtattaagcaactgaaacaagaagactagttacaaaagctagttttatactacccawatgcatgtattatataactacctagccattggtgg

SEQ ID NO: 829294 - DNA, 618 bp, Homo sapiens
cctagtgctgaattttgctggtgttccacagtgaagttagatacttacttcattcttacttcattctcttttttctaggtgaagagtatcttcyttgtgctacctgggttcagggaattggtgatgtgataatgtgaaactgttcttactcccatcaacgcctctttttttttttaatttctgtgctccactgaaacaatctaacctctcacctggattctttagctactatgaaaacattttcatgcatggatagttgattgaatttatgtttctgcaaggggatgagtgctagaaagtctttcctctccatcttgctgatgtcactccatcctaatagcctttaataagatgtttatttattccatttattgtgtcagacctgtcctagagatagaagagcagaagcacaaatgttgcctgagtccaatatgactattgagctgccataccaatggtgaaatatttacatcaagacttttaagtgagaaagtaatagatgtttatcttatttaacccattttattttgggtatctattacatatgactatgtattataactaacagtcacttagcattactaatttcactataatgtagtatatgtatatatacac

SEQ ID NO: 829295 - DNA, 438 bp, Homo sapiens
cagttattttcatgttgtatgtatgtctggatttatgatagtgcccaatcacttatcttctgcaggttcctggggagcagagcaacgcagtgaaactgaaattattaagttgtctgaattcataatagttggacttgcccctccatgaaatagcactgcacagccaattggaattcatggccctagccctttattgcatcatcatggtttatagtccataacaaatacaaatacagaaaggaaccataacaatatgatacatctgacctgccagcctaccttctggggctttgcttgatgggcttgcattctcaatgcatgggacaaaagcaaagggaacactctctgtttaccccttytaaggcctgaccttgggtccctagtccgtatctttgaccttgtcatcaccaccacaggcagccaatctcaactgggaaa

SEQ ID NO: 829296 - DNA, 280 bp, Homo sapiens; identical to SEQ ID NO: 827589

SEQ ID NO: 829297 - DNA, 280 bp, Homo sapiens; identical to SEQ ID NO: 827590

SEQ ID NO: 829298 - DNA, 584 bp, Homo sapiens
agaatatgtggctcatgcctgtaatcccagcactttgggaggctgagactggtggatcacgaggtcaggcgttcgagaccagcccggccaacagagtgaaatcccgtctctactaaaagtacaaaaaattagccaggcatggtggtgggtgcctgtaatctcagctactcgggaggctgaggcaggagaattgctttaacctgggatgtagaggttgcagtgagccgagatcgcgccactgcactccagcctgggcaacagtgtgagactccatctcaaaaaaaaaaaaaaggaaaaaaagaatatagagtgattgtcttcacttcctttctgccaattctctcaagtccacatcaatagtaagcagtgcatccttactatttcttagaactactctcgtacacattaccaatatgatgaaatcaataagcaactatcagctcttatcttttccaaattwttggtgttatttgatacatttttgtatttcctccttgaaacattttctttacttaaggatcaggacattagtgtctcttgttctttgtggggtggaggaaattatgtgtctctcttttttcgtc

SEQ ID NO: 829299 - DNA, 623 bp, Homo sapiens
tttattgtattgaggtaaattccttctgtacctaatttattcagtattttttatcataaaaatatttaattttatmaaattcttgttttaatctaacaagatgatcatattattgtcttattcacttaatgtgatgtatcacaatgattaatttcatattttgaaccatccttgtacccagagaataatatcacttgatcatggtgaatgatagtttgaatgttttgttaaatttggtttactagtatgttgttgaatgcttttgcatccatgtacatcaaggatattggcttgtacttttcttttgaagtccttgtcttgctttgtgtattaatccattttcatacttctatgaagaatcacctgagactgggtaatttataaagaaaaagaggctaatggactcatagttgcacatagctggagaggcctcacaatcatggcagaaggtgaaggagaagcaaaggcatgtcttacatggtggtagaaaaaacagcatggccaagtgaacggctctttataaaaccatcagatctcatgagacttattcactatcacaagaacagcatggagtaaagcccacccccagattcaattacattccactgggtccctcccatgat

SEQ ID NO: 829300 - DNA, 593 bp, Homo sapiens
  misc_feature 432: n = A,T,C or G
atcaggtcatggaatgtattcaggcaatgtgaccctatactatctggatgacggaagtagaagtcaattcattttttagcrgggaaacataataaaggacttgaaatcaattatttgacttactttaaatctaattagttataaattgttaatatgcactttataagtgtatattctcatgaggattcaattacaacgctatctaaaatggcacccttcctccaaaattttcctttaactctttgctatttagtccttatctctaactcattatgaagtttagttttcatgtggcttttctgtctccctgcaatgcaatgtaagctggccatgtgcagaatgttttgcttattgtatcccaacatgtagaacagtagcatggcctagaattggcactcaagaaatatttgtgcaataaaagatattcatttntaactgacataataccctcatggttacaggacctgagggaattatgctagcagtctaacagtgattattatatcttcttgatgggggattgtaatcttttccttgaaatttatttttcatattttgtaccattaccatgtattatttttgaaagcaccttt

SEQ ID NO: 829301 - DNA, 578 bp, Homo sapiens
gaaaatttttattaaaattcatataaacatgtaaataaattattaattttcttgttttagtttaaaactattaagmgacagtattatttttcttgcaccaaagtcttttggtaagctagcatttaatatttaaataaacaatagagacagattaccagatggagaggggttgaacattaggcctataaccatagcaatcaaagagaacactttaagataattttataggtagtgtgttcactgcaatgcaaggaaaataatagacagatgtctcattagctcatgcactttgtatattccttatctgtaattcttaaaagcattacccagcattgcgaataagcaaaatattgggctattggtgaaataaaacacaacaatatagagagttaactgagttcatctttcattccagacagatgactgtcattcactagaaaatgtattgcacccagtttaaatttcatggtaatttaaatgtgcttggcatctctccagggccaccaggaagttaacttcagcatttgtgaacaaagctgaaattactggaagtaacctttgaactggtgtgacttggg

SEQ ID NO: 829302 - DNA, 579 bp, Homo sapiens
ctccatcctgggcaatggagcaagaccttgcctccgaaaataaataaataaataaaatttaaaactgagagaaagaaactaacttcccatagtgttctgggtctctggaaagagtagagagcgacagagaaagaaagagaacaaacagacaaaagcagagaaattgagaatggagtggagtggatggatgaatgagtagatgtgggtgaacatatgaatgaatacatacgggtaggtgaaagtttattattatgttaagtgttgagtgtggaattccttttagtgagagagtctttagggtttaagagactgtcttgctgacatctctaggtataaaagaggaagcccacagacatagccaggcagaaaactgaattgctttgttaaaaaaaaaatgggagaaaatatgatctttgtagtgtctaatgttttaatatgaattattagactccagtttgaaagggaggggcaaaacaacttctgattagatacatkaagaaggaaaaatcaaggagatgacaaataaattgagaaagtgtgtggagtccaaggtctagcaacagggtgagaggctggggg

SEQ ID NO: 829303 - DNA, 496 bp, Homo sapiens
attcaaattagtacttcagggaccaaaaaacagacagaaaatttatgaccatagtaaaaattcaatctcaataatgattacctttactcaaatattttcttccacagaaactactttaaacaaaccatgcaggtcatcatttggaactcagcttccctttgattaggtatacattcgtgataatcaatactcatattaaagtgtattagaaatgttatttttcatttcaataacagctcttcagtcctcagtggcacttattttcattatattctgtccatttcaccacaagaaattaatttaaaacttatgtaacagaaatccatttttacagtgacctacttagagaaatatcatctgacctgcacgttgtgaacatgtaccctaaaacttaaagtataataataataaaattwaaaaaataaataaataaataaagtatagaagacctctttcagttgtcactttgtaaatatttgcaggtacaagacatgaa

SEQ ID NO: 829304 - DNA, 624 bp, Homo sapiens
tatacccagtcaggggattgctggatcctatggraattctactttcagttttttgaggaaccttcatacttttttccaaaatggctgtactaatttacaaaaccacagtcctgtgtttccttttctccacatccttgccaatacttgttatcgttcatgtttttgatgatagccactgtaaaaggcatgagatgatatttcactgtggttttaatttggcacttttctgatatttagagatattgaggaatttttcatatatatgttgctcagttgtatgtcattttttgagaaatatctattaagtgatttgcccattttttgaatagagtgatttgtattttttttttgagtagtttgagttccttcattattttggatattggcccttatccgatgtacaattttcaaatattttcttcaaatcatgtattatctcttcattctattacttgatttctttgctatgaagaagctctttagtttgatcattcccacttgtctatttttgcttactttgcctattttttttagttatagacaagtaatctcagcctagaacaatgtcatgaaggtttcccctcaatttcttcttctagtagatttatcgttttaggtcttaca

SEQ ID NO: 829305 - DNA, 532 bp, Homo sapiens
tgataataatatcagataggacrggaggtggcccaaatccctccacaaatttcattgaaaagtccaaaagatgtgaaagccaaaaataataaataagtggaggtgattgttttaaaatccagtgttattgtgagaaagaaatgttaagcattcctagaaaagtatgtaactctgatttttagttctaaggtcttaaatacccatattcagtgagaagaaccttagacatcatcaagccttccacatgcagcaagttaactccaaaaattatagacattgatctaaaactaacagtaaactttccaggtattcgtatttccatgagcaggatgcacgattctgactgtccagctcttataagccaagagggaccatttttgtccacccagttgctgataggcagcaagtatgtaccatttctaggacgagttatttaaattttgatggggcttattgataaattagtcataggcaaattctcacttgttaatgtaaaggaggaaggattcaaggaaagaaaaagtttaatgtg

SEQ ID NO: 829306 - DNA, 583 bp, Homo sapiens
acaagatatcaatagaaatattccagtccctaaatctgtgcttattctaatatggccctgtaggaagctgatgtttggtgagcccaatcattggtcaggttattttagctcactaacgtttattttgttatttattttttaaatttatattgtgaagtaaattaactcttacaaatgtaaagatgacattatgagtgcgataaagatgacattatgagtatggtcagggacctagaaagtgttgtattctcatcatatatcacagtttttgggaaaaagtactttctaagtaaaggcctacagaacatttctgcagtgggtaacaccatcttccctctgtgcaatctataatacagctgtttggtaattcgaattagttttctgttgttgtgtaacatataataatatgatttctgtaggtcagaagtccaggtgggctcaactgggttctctacttaaggtctcaaaaggctgagatcatgtgccagctgggatgarctcttctccaatggctatgagattcttactggataataaactttccttcaaacttacatgctatcacacaattttccctttatgt

SEQ ID NO: 829307 - DNA, 541 bp, Homo sapiens
ctcaaagtctctctgccttggaggtgacttttgggatccatccataggtcaagtttatttagctgtccatgttatcccagttaagatttggaaaagagaatgagttggaaatcgattcttaggctataatttctgtcacctgatatcccttttcagatggctactaagctggcctttcctttccctgcagtctgtacactcaaactttcattaacagttcgtactgtgagaacataattctttgggaagaattctttgggaaggatatgtagcaggcatgtaaaagtaatagaggcaacaagtgcctgagaaacagggaatattggttgaaatggtgactaatcctcagagattttggagagaaacttggatttgctaggtacatgagatggggttctaacccaatttaattaaatttgaaagarcaaatatctgtagcattcaaaggaatatccaggcagcaatcatcttcatgataattagactatcattgaacggcatcctttctctgaaactccatttatgtcccaattacttaatg

SEQ ID NO: 829308 - DNA, 546 bp, Homo sapiens
actgggaatacagatttgattagatgmaggctttattttttgacatgaaaataatatacatagatggtgttgtaaattgcatctcatcacgtggcacacaatgtctgtttctctttttgtgttattaaaattgatccttgggtccagatgttgtcagcttgatctgttgtaaagtttcacatcagcttttttcctaatgattttaatagccattgataattattgcctgggtgtaatatagatgttacatgcagaatttagaagcttctgaatttggaaaagctcacctatttccaccttctcactcctgatttgttctggcatcttgaccatttattgtctctttcttaatctttaatagacttctaattcttgaatgaactattctccagctatgttacatggaacacaacgctgtcgggtacactgtgagaaaaggctccctgagtttgggggatgctgcatactggtttttgctctgagagatttataatacacatgagcctattaaagttctgagggatctgttgattaacaaacttgatt

SEQ ID NO: 829309 - DNA, 563 bp, Homo sapiens
aactcctacacctctaaggagtcaggcacatccacagacataagttttcccagtcttgccatgtctctacatgtcactaattacagcctgattctgtgarggtttcagtctatgaatggggcagtttaaaacaaaacaaaacaaacaaacaaacaaaaaacaactaggtgaaggctgcaggcagcactcttccatcttagaaatcagacatcttttggttgtgctattaagagccatagagacagggaaacagggacaaattggatcaatgtgaatttatcactatctggggagaaaacttaagtctgcatcttcatttccgcattgtcctctacaactgcgacctaaagttcactcacccttaaacatgactgttaaatctgttgtatattccatgtttcttgtcatttgaggattatgtccatttatctcatcggagaaagcatttagtgaggctacagaaagtagtatttgccatttgaatcaactgtgattgatttttacatctctgggtattaataagaaaagtgacttattaaatataattctgtttgccttttctt

SEQ ID NO: 829310 - DNA, 563 bp, Homo sapiens
aactcctacacctctaaggagtcaggcacatccacagacataagttttcccagtcttgccatgtctctacatgtcactaattacagcctgattctgtgagggtttcagtctatgaatggggcagtttaaaacaaaacaaaacaaacaaacaaacaaaaaacaactaggtgaaggctgcaggcagcactcttccatcttagaaatcagacatcttttggttgtgctattaagagccatagagacagggaaacagggacaaattggatcaatgtgaatttatcactatctggggagaaaacttaagtctgcatcttcatttccgcattgtcctctacaactgcgacctaaagttcactcacccttaaacatgactgttaaatctgttgtatattccatgtttcttgtcatttgaggattatgtccatttatctcatcggagaaagcatttagtgaggctacagaaagtagtatttgccatttgaatcaactgtgattgatttttacatctctgggtattaataagaaaagtgayttattaaatataattctgtttgccttttctt

SEQ ID NO: 829311 - DNA, 646 bp, Homo sapiens
  misc_feature 342: n = A,T,C or G
atttttagataaggcaagaggtmggatccagtttcatttttcttcatgtggcttgccagttttcccagtaacatttgctaaataggatgtccattccccaatttatgtttttgtatgctttgttgaagattagttggctgtacatatttgactttatttctgggttctctattccattccattggtctatgtgcctactctcatatcagtatcatactgttttggtaactacagaggctaggattattctgataacaaaagaagacaaaggcattacaataaaagaaatagttattaaagagttattttttaatatattgcatttatcaaacagataattanataaaaggacaaatacttccgttaaatattgactgaaaacagcttaccaagattttggtaaattgaatccaataatacatatataaaatcttcaggacaaaataagttttattccaagagtgcaaagttggttcaatatttaaatattaactaatataattaatcatattaacaaactaaaaaagaaaatttacttgatcacaatgggcattaaataataatttgataaaagtcaacattaattcattataaatgttcccagcaaacaaggagtagaagaaaattattttggcaatcagataaa

SEQ ID NO: 829312 - DNA, 454 bp, Homo sapiens
aatccaaactttatataattatcttggaccctcagctcacatccttcctaacattcagaataaactcaagcatctgctcatttgacaatattctctaaccaaacatatcctgctctcagtcaagaaggtgctaagtgcttttcctctctatccctgcatgttgtttttctaaaataatacttcacatttctgcaatcattggtttgcttgatcaatctcttccatacgaggataagaatcatgtttgactattcttatagctcccttgtcttgcaaaatacctgacacaaaatagtatccgcgccccgcccccccaaaaaarcaagtaatctgatgagacagaaaatgaaaaaaaaaaaagcaagtaatctgatgagacagaaaatgagtcactttctggagcttgaaataagactggggctagaatggctgcccaaatctataattaaatttg

SEQ ID NO: 829313 - DNA, 481 bp, Homo sapiens
ttagcgccactatcaaggacttgaaagacgcaggggtggtgattcccaccacattccggttcaactctcccatttggcctgtgcagaagacagatggatcttggagaatgacagtggattatcataagcttaaccaagaggcaactccaattgcagctgctgtaccagatgtggtttcattgcttgagcaaattaacacatctcctggtacctggtatgcagccactgacttggcaaatgtctttttctccattcctgtccataagacccaccagaagcaatttgccttcagctggcaaagccagcaatatacctttactatcctacctcaggggtatatcaactctcctgctttctatcataattttattcagagagmccttgatcactttttgcttccacaagatatcactctagttctttacattgatgacattatgctgattggatccagtgagcaagaagtagcaaatacactgga

SEQ ID NO: 829314 - DNA, 657 bp, Homo sapiens
tattaaaataaggcagttgtaatgttttcttattttgtaggatctgtggaggcartatttaatttgtaaagcatattttttgttagtttgttgaaaaaaggtatggtcagttggtatgaactgcccttgctatcaagaagtgtaattttatagatcttcagattgttagaagagaataagtacagtcatatatcattctgagaaatgtattgttttacaattttgtcattgtgtgaacgtcatagtgtacttacacaaacctagatggtatagcctactacacactaggctacatagtatagcctattgctcctcagctacaaatctatacagcatgtactgaatactgtaggcatttaattgtaacatggtggtatttctgtatctaaacagaaaatgtactgtgaaaatatggtataaaatatttaaaatggtacacctgtatagggagggagggaaggagaaattggaaataataaccacaaagttttggttgtagaagtcctcagaaaactatatatactatagctttttaatagttaactttatagttaactgaccatgaatggagcttgcaggactggaagtcactgtggctgagtcagtgagtgggtggtgagtgaatgtggaagcctaggacattactgtacactactg

SEQ ID NO: 829315 - DNA, 578 bp, Homo sapiens
cagaggcaaggtctcgtttggttgctcagtctgatcttgaactcctgggmtcaggtggtcctccccgcttggcctcccagagcactgggattataggcttgagccaccatacccagcgagattttaattgtatagaggttgaatgtgcccttctgggccgggcgcggtggctcacgcctgtaatcccagcactttgggaggccgaggcaggcagatcacttgaggtcaggagttcaagaccagcctggccaacatggtgaaactccatctctaccaaaaatacaaaaattagccaagcgtggcagccacctgtaatcccagctactcgggaggctgagtcaggagaatctcttgaacccggcaggcggaggttgcagtgagctgagaccgtgccactgcactccagcctgggcaacaagagcaaaactctgtctcaaaggaaaaaaagtgcccttctggcagtttctcccagtggttaatcttacatactatcgcataatatcaaaactgggaaacagatcctggtatggtgtgtgtacattattctatagcagtttattacatctagatttgtgtaa

SEQ ID NO: 829316 - DNA, 468 bp, Homo sapiens
gctatctatctcattttttaggtctattagcaattgttttatgaatttaggacctscagtgttaggcacatgtatgtttagaattttgatattttcctgttggacaaggattatataattatataatgtccctttttgtctccttaactgctgttgctttaacgtttgtttcatctgatctaagaatagttacccctgctcgcttttggtgtccatttgcatgaaatgcctttttgtacccctttactttatgtgagtctttatgtgctaggtgagtctcctgaaggcagcagatggttggttggtgagttttttattctgcattctgtatcttttaagtggagcgtttggaccgtttacattcagtgttaggatggagatgtgaggtaccattgcattcatcgttctctttgttgcctgtgtaccttgggttttgttttttgtttttgctttttaacttatattttt

SEQ ID NO: 829317 - DNA, 568 bp, Homo sapiens
tatgagttaagtcaaataggcatgatgatacaggcttgcacgcatctcaggcaagtacctaacaarcatttacagcagtttctcaatctttcttaacccactctcttctaataaatattacattgttactcccgtctcctcccttccctcattagtttcacaaacactagattctgatatgtcattccacagagtgccctttccatttcctcctatatataatcccatctgccatgcccttccctttgtaaatgcgtgctgtaaatttaaccttgagattttgacatatatcctatttcttttttcacccttgataattactgatttaggagatttaatatttactgaatgtctaagtatgtagtggctctgttgtttaattctttacataatattgctctaaataccatagtgttattttgaagtagacatcttattttttatattatagatgaattaagactctgagacatatgataacttaaacttattgacaagcatttgaaatctagtgtgtcagagataaggctacatgtttactgtctatttcatttttctctagtacatt

SEQ ID NO: 829318 - DNA, 635 bp, Homo sapiens
ttctttacaaaaatctgaaacacaaaatctaaacttattaccagatgaaatagaatgtgacaatagtcttccaaagaaastcttcctttttaaagagactcatccaggaagagctaccataacgagccttttgcgatggtatttaaaaatgggatttacaacataatgtttcagaaacatatagtatcctggcatctcaatgctgtcattcctctttcattttgagaaccccaggggaaatgaaagctaaataatttgtcttacagctaaccaacaattttacttacactagaaaattcaaagtgactgggaattatgaaagttctcaagagagaacttctttcctccggagcaagctttgacaagtaaaattattctcaaaaagtgactccacttcatttagttcaaggaaatggatttacaaatcttgagcattctgtcattggcttttctacattatccctagggctattccatcactttaggatatctctggacaccacaggctaacccagcctttgagcactcccgtagcatgttaggtccacagacaggctacagaggagctgctgctgctcctcacttttgcctaatgggatattgattttccccccagtctcagcaggctttctcaa

SEQ ID NO: 829319 - DNA, 599 bp, Homo sapiens
ctctgtcgcccaggctggagtgcaatggcgcgatctcggctccctgcaagctccgcctcctgggttaacgccattctcctgcctcagcctcccgagtagctgggactacaggcgcccgccaccacgcctggctaattttttttgtatttttagtagcgacggtgtttcactgtgttagccaggatggtctcgatctcctgacctcatgatccacccgcctccgcctcccaaagtgctgggataacaggtgtgagccaccatgcctggcctattattcttaatattaagattcgcatggtcttgttttgacaattttatgatgactgataatgataggtaactctgcagtaacaacatgttcttgattagatatcttagaaaaatgatgagaagcttgtttttgctttctaaaaatgaaatacccaggagttcctaagagtgggttcctaatgccacactgcacaatatccactaaaaaggagttctcagtgcttcccttcagtcttcctttgaggcctctcttattcttggcaacccagattaaacaccaaagaagctgcatcactcacaggtgggrgtaacagctttttcttcagctg

SEQ ID NO: 829320 - DNA, 351 bp, Homo sapiens
cacagcagcttcctagaaaaactattggaaaatgtatacccccagggccctgatgtgatttagctgtgtccccacacaaatctcatcttaaattcccacatgttgttgtagggagctagtcagaggtaaytgaataatgggggtagatctttcttgtactattcttgtgatagtgaattagtctcacaagatctgatggtattaaaaggagagtttccttatacaagctctcttgtcttgtctgctgccatgtgagatgtgcctttcaccttccaacatgattgtgaggcctccccagccatatgcaactgtgagtccaataaacctctttcttttgtaaatggcccagtc

SEQ ID NO: 829321 - DNA, 567 bp, Homo sapiens
gcgagctcccggtgggcacgagctcagtgggcccacacttggaatggcccgccagcaccgctggctctrgggaagtgaggggcttagcacccgggccaggaggtgcggagggggtgccgggtcccccagcactgccagcccacccgtgctgtgctcgaattcttgctgggcctcagccacctccccacgggggcagggctcaggacctgcagcccgccatgccggagggccccccagggtgggctcccacgtggcccaagcctccccgacgggcaccaacccctgctcagtggtgcccaattgcatcaccacccaagggctgaggagtgcaggcacatggcacatgactggcgggcagctccaaccacggccctggtgcgggatccactaggtgaagccagctgggctcctgagtggggtggggatttggagaacttttatgtctagccggaggatcgtatatgcaccaatcagcactctgtgtctagctcagggttcatggatgcaccaatcagcactctgtatctagctaatctggtggggacttggagaacttttatgtctagc

SEQ ID NO: 829322 - DNA, 590 bp, Homo sapiens
atgatacacaaatgcagcaactgatgaaagctgaggatgaattcaggaacaccagaaacaagcctctgatactccaggccccatactaaacacacactggaggatttgaaagctctggtgtattgagactaatggtaccaacaaaacagctcaattcctggctagaatcattcaacctctgacattacagcctcacaggagaggcatgcccattgtaagtcataagtacaatttacctacaagtctacctttcatacatacacaatgtccaatattcagtaaaaaattgcagaacccaccaaaatgcaagaaacaaatctcattgtcatgagataaacagtctaccttaccaaaatcagaaatcagcaatgattcatatgctggaaataccagacagtgacttcaaaataatatgttaaaaaatctatgggggaattttgaagaaagaggaagcttgtagaaagagtcaagtggaatttgctagaaataataaaygcaataccaagagaaacagatcctcactgtgttcatcagcagactggacacagccgaggaaacaatcagcacacctaaggataggttgatagttt

SEQ ID NO: 829323 - DNA, 590 bp, Homo sapiens
atgatacacaaatgcagcaactgatgaaagctgaggatgaattcaggaacaccagaaacaagcctctgatactccaggccccatactaaacacacactggaggatttgaaagctctggtgtattgagactaatggtaccaacaaaacagctcaattcctggctagaatcattcaacctctgacattacagcctcacaggagaggcatgcccattgtaagtcataagtacaatttacctacaagtctacctttcatacatacacaatgtccaatattcagtaaaaaattgcagaacccaccaaaatgcaagaaacaaatctcattgtcatgagataaacagtctaccttaccaaaatcagaaatcagcaatgattcatatgctggaaataccagacagtgacttcaaaataatatgttaaaaaatctatgggggaattttgaagaaagaggaagcttgtagaaagagtcaagtggaatttgctagaaataataaacgcaataccaagagaaacagrtcctcactgtgttcatcagcagactggacacagccgaggaaacaatcagcacacctaaggataggttgatagttt

SEQ ID NO: 829324 - DNA, 283 bp, Homo sapiens
cagccgggcgattcttcccctcatttgttgcattgtttgcattaatatgaatatcttgttctgtttgttttgtctcctgagagccaataaagctgtgttttttctttmcaccaaaaaaaaaaaaaaaaaaaaaaataggaataagtagcttatggcacagtgacacactggtagaattaagttatggtggtagcagtcgctgactggggaagccatatttacatcatcctgtttccttgatgagtcctgtgcctgccccctctccagctgattcataggaagt

SEQ ID NO: 829325 - DNA, 624 bp, Homo sapiens
gaagatgcatgtggcttcatgggggccaacggagttgggattaaccatgtcaatgtgtcagggagataaacaagacagtggaaattcccactggacttatttaattagaccctgcttttttttttttttttcaaatatagagagatatagtattgaacacaactcttatttcaaaaggtataacccaaggattaaaaatatagtgatagtttttaaaaaccaatttttgtaattctagagttataaaagatgaacgcagttgttcatctattaaaacatagtctagacgatgagaaataacatcaattccaaaggaggcttgaaaggaacacactgaaatattgtggctatgataattggaggtacgatgtgttcattgtgtgtatcatgcatgtcagagactgttataagtgctttacatgtgtcaatcacttggtccacataagagtcctgtgtggtaggtgcttttataatctccattatttgaagtgagaaaaggtaagaaacttgctgaaggmcacttagctagtgagtggaagagctagaaaaggaggtgagagagtctgtgtcaggggcaagagctctactgctcagaggacggtaaacctttaagaccctcatatg

SEQ ID NO: 829326 - DNA, 625 bp, Homo sapiens
ctaagccaaagttcctcaactgactgtgccctgtagggggaacattagtcaatgcctggatacgcttttggatgtcacaactcagaggaaggtacactactggcatctagtgggtggaggccaagaaggctgctaaacatcccacaatacacaggacagacttcgcagcaaagaatcttccagcctaaaatgtcagtggtctgaggttgagaaaaccttttctgagctagtgttactgatctgtttaaggaagtctcataactaacatctcagttgtgtgtcagcaaatgggtggtgctatgtgatgcaaaagctctacaaataccttttctcaacttcctaaatatttctttcacatagtcctgcttacactataggcgtactgacgtctttaattcagagaacaaagagggtaaaccttgttcctagtctaactcacctccacggttattaggaaactcaaatgtgggggactgagtttctgacgctttattatacaaaatcattagctcttttttaaaacctctaaatggtgagtcrgctgtcctaatctcatagcagaagaaacaacagccctaaataagaactgtcttattagaaatactagattccaaagacagtaatt

SEQ ID NO: 829327 - DNA, 564 bp, Homo sapiens
cgatggctagggtcctctctgtagtttaagtctctccctccttcccatgcttctatggacagtgggatcaggcctctgaacaatgtgtgtctgggtctcccagmgggccacaaaattcataccctctagccaccaccttaacaggctcctcctcaatgccgccatttcttcctgcccaggccacttccctaaatcctagctgtgggaggaacagtgatgcaggcttcactggaagtcagggcagaaagggtttgctgaattcttgtgctctgcatttccctttgacatctttcctcccagagtcgttcttctcatcaatacggtgcttagggggaatgccagagcctccagcttgtccccagtgtcttcacgaggcacagcaaatgctggattgtatttccatcagctcttacgccctccactttccaccccaagctaagcattctaggccacatcctgtgggtcccgatcaggggctgggtggactaagaatgtctacacagaacctcaaactgattttaaaaccatcatgactctgcggtatgaggttatgttttgtttttt

SEQ ID NO: 829328 - DNA, 517 bp, Homo sapiens
caacattattttgacacttgactctattccagagttgttgctatacaaggcatgtggcagaacaaaaaaaaagctggtgttgatataagagctttttacccagtattgacagtgagcaactttctttctttttttttttttttcctttttttttttttgagatgggttcgctctgttgcccaggctggtgtgcagtggtgcgatctcagctcactgcaacctccacctcccgggttgaagcgattgtcttgcctcagccttccaagtagctggaattacaggtgcccgccgccacacctggctaatttttgtatttttagtagagacggggcttcaccatgttggccaggctagtctcgaactcttgacctcaagtgatccacctgccttggcctccytaagtgctgggattacaggcatgagccaccacacctgtccgacagtgtagcaactttctaaaactgaaaaatctcaaaggagatcattggaactgacttgttcatttattttttgtttt

SEQ ID NO: 829329 - DNA, 511 bp, Homo sapiens
aggaaaaagggcagttgtcttaaatctctttaaacagatgaagtaagcttaagatctttacttgctccaacataaaatyccaacaattaaatgtttggcttgaggaacagcacttctcatatgccagagaaatcaagtgactgtcctgtctttgatcctagagaattttttttctccagatcagaccgacatgccccaatgcctacatgattaaaaacaaaggtgacaaaattacaactgaaaactaattgaaagtaacttaaaaataattactgttggctctgtatgcctaaaattaagaaaagattggtatcagaattaagcaaggtgagaaggatcgcatgggaatcaacagaccttaatgaaaaatttaaccttttacttgaacaagacaaagcctagagcttcatagctttccccagaaaacttggaaacttaatagctacttagggagaaagaagtatgaaatgcattataataagactgttgcatcagaaagttaatttactat

SEQ ID NO: 829330 - DNA, 609 bp, Homo sapiens
gtgagcatttagtgctatagctgcttaacactgctttagctgtgtcccagagattctgatatgtggtctctttgttctcattggtttcaaagaacttcttgatttttgccttaatttcattatttactcaggagtcattcaggagcagattgttcagtttccatgaaattttgtggttttgagtgagtttcctaatcctgagttctaatttgactgcagtgtggtctgcaagactgtttgttatgatttcagttcttttgcatttgctgaggagtgttttactttcaattacatggtcaattttagaataagtgccatgtggcaatgagaagaatgtatattctgttgatttggggtagagagttctttagatgtctagtagtgtgtccagagttggttccttctggtgggtttatggtctcgttgacttcaagaatggagccacggaccttcgtggtgagtgttacagctcttaaagatggaatggacccaaaatgtragcagcagcgagatttattgtgaagagcaaaagaacaaagcttccacagtgtggaagtgagcaggttgccactgctggctggggtggccagcttttattaccctatttgt

SEQ ID NO: 829331 - DNA, 635 bp, Homo sapiens
agttatctattaatctaattttttttcaaagtttttaacttctttgccattgkttcaaacttccgcctttagctcggagtagtttgatcttctgaagccttcttctctcaacttgtcaaagtcattctctgtccagctttgttctgttactggtgaggagctgcattcctttggaggaggagaggcactctgatttttagagtttccggtttttctgctctgttttttccccatctttgtggttttatctacctttgttctttgatgatggtgacgtacagatgggtttttggtgtgggtgtcctttctgtttgttagttttccttctaccagtcaggaccctcagctgcaggtctgttggagtttgctagaggtccactccagaccctgtttgtctgggtatcagcagcggtggctgcagaacagttgatactggtgaactgcaaattctgctgcctgatcgttcctcaggaagttttgtctcagaagagtacccagccgtgtgaggtgtcagtccacccctactgggggatgcctcccagttaggctactcagggttcagggccccactttgaggaggcagtctgcccattctcagatctcaagctgcatgctgggagaaccactactatctt

SEQ ID NO: 829332 - DNA, 570 bp, Homo sapiens
ctgtttagagaccattgatgtgtgacactgatttggctccagattgattttctgttattcatatgtaatttgttattttgtttgcctattaaggaattttggaaagccaaaattcaaaaataaaatgaaataaaacttttccagaaacatctattgtattatctttcttttttatctaagaagttgcatttcactaccctgttcttgtcagcttattcaatgaaaagtgaagatttctttctgacatttctcttgggagaggaggtgaagcaggtgaaagtcacagcacagagaactaatatacttttcttgcatcagtgaaatgaagaagagcacctgtctgcaaacaatgagaagctcaaaatgagtagtcataaacctcccagccagagatctatcttaaagatagaagagttgtgttcaaatggcgatgtgccaatcttttcagcaagactcgtgtgacttcataygattgaaaccatcattttaaagtgcatagaataagacaggtactgagttaattactcagaaggaaaagaaaaagaagaaaatatgtgttattgtcatgca

SEQ ID NO: 829333 - DNA, 578 bp, Homo sapiens
gtgaaatgaaatttttaagtgcagggatcctcccaccacctatgacttgttaacaggcacctactgtccacctgaaacagtattaggttggcggaagatttaaaatcagagatatctgggtatgccccctagttgaaaaaaaataataaaaataaataaaaaataaaatcagagattactttcaaatatgttgtctaatggctaatgaggtcatccaaaacaacagaaggcaagcagggcagggattgccatttcattgtacagagagggaaaaaggttcaaaggtaaagtgatttgctccagatcaaagttcaggtcttgcttttctcacttccttactagcttgcctaaacttaaagagcatatagtcttttggttaactagtactcttgactaccaagacaatcatatctatttcatcaaccaaggtggatgaggtcaggagatgtcacattcaagatttttaaagatcatgactagtgattgtattggtttaaaaatcatgactagtgattktattggatgctgtgatgccccaccctgacctcccttcaggaatggaagagtcactcccagct

SEQ ID NO: 829334 - DNA, 627 bp, Homo sapiens
ccagaattggaagggcattcctttccctccctccttttttccctcccttctttcctttcttcctctctcaaagaggacaccaagggccagtgaaaygagacgaatctccagggtcacacagttagtggcagagtcagagccaaaactcaggtttcctaattcttactctttacaatatactattgtggtgccttcccagtaagcaggggaatagtaagaaaaaatttcaattaaatatactggagaagttaattgcttagttctcaaaaagctcagtgctagtgaacagctagccagagtgtcacccaagagatggaaaaatggacatttccagctgggcacagtggctcatacctgtaatcccagcactttgggaggctgaggtgggcggatcgcttgagctcaggagctcaagaccagcttgggcaacatggtgaaaccctgtctctacaaaaaatacaaaaattataaaaattagccgggcatggtggcatatgcctatagtcccagctacttgggaggctgagttggaaggatggcttgagcctgggaggcagaggttacagtgagctgagatggcgccattccactccagcctgggtgacagagccagaccctgtctcaaaa

SEQ ID NO: 829335 - DNA, 623 bp, Homo sapiens
aggagactacatcatgatcatcctcttcttgctttatggttggaagtggagcttcaagaatatagccattttcacagataattagtaaagtactttcaggctaaaaaagaaaaattgaacatatttacatttaggcaaatttttaaaagcatagtttaaagagattataaataaaaatataattactatgtatattagccatgtttaaaacacacttaattcctcactgcagttattggtaaaaagtcaagtttattaataattattatattgtcatagtactaattattgttatatcattattaagtgattaaagattaataattattaaaattagatttacatttggttcctttatagatgctataacatatgtgattcatatatgttttctgattttctgatgaatatatgtggttgtgaaatctgttagccgaaaggaccagatattaaaattaggactgccaaggaaactctgcgtgtgtggatggcgtagtcagtcccatcctactttaatggctcatcctctatctgyctcagtttaacaaacgtggatgttcccaaggtttttgtcctcttccctcttctctgcctccataagcattttctgggaaatcttacaa

SEQ ID NO: 829336 - DNA, 607 bp, Homo sapiens
tgctgctaataaacacatacctgagactgggtaatttataaaggaaagaggtttacttgactcacagttctgcatggctggggaggcctcaggaaacttacaattatggcagaaagggaagcaaacatgtccttcttcacataatggcaggaaggagaagtgcagagcgaaggagggaaatgtcccttatacaacatcagatcttgtgagaactcatacaccatcatgagaacagcatggaggtaacagcccctgtgattcaattacctcctaccaggtctctcccatgacatgtggagattatgggaactacaattcaagttgagatttgggtggggacacagccaaaccatatcactcttcttaaattattttatttttttagtacctcagcaaacccctgctccagctgtggaagaagcagaggaggaagttaagaagaaaatatcagagagcttcttctatgattatatggagcttgcttcgatgccttttgtgactytggattcaaacataccactggatcttctcacacttgtgtatccaccctggctaaatatgtataattttgggattttcatttcttaggtcagaggtcagcaaacta

SEQ ID NO: 829337 - DNA, 444 bp, Homo sapiens
aggatcactgacctgaaattcttgactctctgaaagttgcctttaggttttgttcacttgtgatcctaagtattggtcttcaagctgaatttcattaaatactgacacttgaaactacaggaaacatctttcctttgacaagtctttgagaaggactcgacaacacttgcaaatactcatttcccaacacatttttaagataaagaatcaccacaactgccaccaccacaccatcaccatcaccatcaccaccctgcaaagcaggcaccagagaagcgaaactgagggaatcatcccctcagaaatcatactatatggtaatcaaatagcaaagaaaggatcaaaagaaaaaaatgaacatggaaatcttaaaatttaatattgtttrtcatcagcaggctaaaccatcggcctaggtttaaaaggcaagaaagcacagaacaa

SEQ ID NO: 829338 - DNA, 502 bp, Homo sapiens
aattcctacatatataaccagaagaactgaaaataaagactcaaatacttgtactacaattaaacattattcacaatagccaaaaggtggaaacaatctagtgtctatgaatagataactgcataaacacaatgtgatatatacttagaatattcagccataaaaaggaatgaactgccaaaacacgttacatgagtgaacctcgaacacagtatgctaagtaaaacaagccagacatgaaaggagaagtaggttgattccacctttatgaaatatctaaaccaggcaaattcatagagacaggttacattgctagaagttggggaagggaaagaatggggaattactgcttaatgggtacagagtttatattttgggtgactgaaaagttttggaaatactaatagtaatgaccaacactgtgaataaaatwaatatcactggatcgtacacttaaaatagtaaaacttcataatttgttatgcagattgcataataaaaa

SEQ ID NO: 829339 - DNA, 502 bp, Homo sapiens
aattcctacatatataaccagaagaactgaaaataaagactcaaatacttgtactacaattaaacattattcacaatagccaaaaggtggaaacaatctagtgtctatgaatagataactgcataaacacaatgtgatatatacttagaatattcagccataaaaaggaatgaactgccaaaacacgttacatgagtgaacctcgaacacagtatgctaagtaaaacaagccagacatgaaaggagaagtaggttgattccacctttatgaaatatctaaaccaggcaaattcatagagacaggttacattgctagaagttggggaagggaaagaatggggaattactgcttaatgggtacagagtttatattttgggtgactgaaaagttttggaaatactaatagtaatgaccaacactgtgaataaaataaatatcactggatcgtacacttaaaatagtaaaacttcataatttkttatgcagattgcataataaaaa

SEQ ID NO: 829340 - DNA, 681 bp, Homo sapiens
cgtatctctagatacacaatgctcaaggtgttttcctgaggcccttaaaggcaacagctgtcytattcatatctctggtctcctttcatggtgccagatttagcatgaatcaataaaagtgtttatttacaaaataagggaagcttaacaaaatgattaataaagtcctctctacaaataataaacagaaagacaaacccttcctataagttagcaaaaatgactggctttcctttttacctgaatatgacactgaagtaaattaaggggttccttccatttttcctttaccccttcctcctcaacacagtatctgtggttaaatctacccacattaaagatttaggatgtaagagccactctcaaagaagaaatgtatcctgggagctttataacactgaaacagaataaaagtcactgtgccaaaagaaacctgagaaataatcatttccgtttatctgtgtgttaaaggaggctactagagagaacttttgtcagacactgaagttatgaaaaaaactgagtctacacttcagagcttttcagaacattctgctatgtactgaaaagcaaggaaagtaagagcggcaaacacagctagaacatagtaaaggaaccaatacaacccataaagttatttgatgtccactatttcactggatcccccaaagaaactatgag

SEQ ID NO: 829341 - DNA, 510 bp, Homo sapiens
ccagtgcctggtcttgcggccgcataactccacgtatccagtgagacaaaccttttctttctacggcatkcttttgattatactgccaggttatccctattttctcagtccattctttttttttttttttttttttttttgagagacagagtctcactctgttgcccaggctggagtgcagtggcgtgatcttggctcactgcaacctctgcctcctgggttctagcaattctcctgcctcaacctccctagtagctgggattgcaggtgtgtgccaccaaactcagctaattttttgtattttagtagagatggggtttcaccatgttgcccaggctggtctccagctactgagctcaggcaatctgcccgcctcggcctcccaaagtgctgggattacaggcgtgagccaccgcacttgggcttctcagtccattcttatagcattttaaggtatgaatacattattattagcatttgataaataagaaattgaagctgaaagacatc

SEQ ID NO: 829342 - DNA, 510 bp, Homo sapiens
ccagtgcctggtcttgcggccgcataactccacgtatccagtgagacaaaccttttctttctacggcatgcttttgattatactgccaggttatccctattttctcagtccattctttttttttttttttttttttttttgagagacagagtctcactctgttgcccaggctggagtgcagtggcgtgatcttggctcactgcaacctctgcctcctgggttctagcaattctcctgcctcaacctccctagtagctgggattgcaggtgtgtgccaccaaactcagctaattttttgtattttagtagagatggggtttcaccatgttgcccaggctggtctccagctactgagctcaggcaatctgcccgcctcggcctcccaaagtgctgggattacaggcgtgagccaccgcacytgggcttctcagtccattcttatagcattttaaggtatgaatacattattattagcatttgataaataagaaattgaagctgaaagacatc

SEQ ID NO: 829343 - DNA, 486 bp, Homo sapiens
tgtgtaaaaatcaattctagactgattaaagtcttaagtgtaaaaagcaaaattaaaaattttaagacaatatacaaaacaaaaatcaatatgactatgggatttaggaagtttttttattatyattttttcgaatgtctttttaaacaagacacaaaaatacacaccattacgtacatgtaaaagattgatatatttgactatatgtaatttaaaaaacctgcttctcataaaaaatggaaagtcaagtcataaaatagaagaaaatatttgaaacataagaaagcagctaagtgtttagagtgcagcatatatatattcttacatatatgtatgttatattttagcatatgtataattttatataagaaaaatacatattctattaaagataagtgagaaaatgacagttgaggaggggcaagtgctcggaagtttctcttccggccatttgtgggccatatgctccttagatggggtgaactc

SEQ ID NO: 829344 - DNA, 486 bp, Homo sapiens
tgtgtaaaaatcaattctagactgattaaagtcttaagtgtaaaaagcaaaattaaaaattttaagacaatatacaaaacaaaaatcaatatgactatgggatttaggaagtttttttattatcattttttcraatgtctttttaaacaagacacaaaaatacacaccattacgtacatgtaaaagattgatatatttgactatatgtaatttaaaaaacctgcttctcataaaaaatggaaagtcaagtcataaaatagaagaaaatatttgaaacataagaaagcagctaagtgtttagagtgcagcatatatatattcttacatatatgtatgttatattttagcatatgtataattttatataagaaaaatacatattctattaaagataagtgagaaaatgacagttgaggaggggcaagtgctcggaagtttctcttccggccatttgtgggccatatgctccttagatggggtgaactc

SEQ ID NO: 829345 - DNA, 607 bp, Homo sapiens
ttttaattatttcaatcaatggtgttcttatgtgtactctttggaactttaagcaaatggaataatgtagaaaatccaataaataagtaaagggagatgaagaacagagaacactgtgtttttcagggaaaagaacaatagcagcagtggtgtcaacagagactcctcttctctgtggccttgctggcttgtgctgcagagatactggctcagttctcttggccttgtcacctaaggtcaacaccagtctctcttctgttatttggacttctttaagtagctaaaggtctccctgtggctgcttaatttcagccatcactacagtgcttctgagcgacatcatggtcctacagatgtcacttatgtgtgtaaaccacagatctgcacctgggcaaactggtcctcatggaaccacgtcttgccgagacaaccctacaaacaggaaactcacctgtgtttataaacaccatcttacttagcgatgggtcaagattcccgggcaktcctaggagcaaagtcccagagattcctgcatcgtcgaatcttatttgccctgaaaacaacaaattacattactaagtgaagggaatacactcaaattatctct

SEQ ID NO: 829346 - DNA, 566 bp, Homo sapiens
ttattaatttataatattaggaaaaagcacaaaactaatacaaataagaaacttacaaaattattaataattttaaaatcccagaaaacgaatagaaatagaagttgaaatttgtgacttgctacatkctaggcactgcgctgtgggttttgttaaagctaactttagttaagctttgcattagtctttcaaggtggggaagatgacccatgttctacaaaggaaaagctgctatttaattatcagtctactgccctgatgcttccttttctagaaactgttgtaaagagtacaactatatcccattgccctctctcctcacccttcattcactccttggtccccaccattctaccgaatggaccttcactgtctatgtactaatcttcagttcaataaccttctctttaggtaccatccccgcctcctcctattttgaatggaatcccctttcaccctcttgaaagcctccattccttcttctcttctccactttcttttggttttcccttttctctgatctttcctctccctcccaacttgagtcttctgtctgcttcctaaaa

SEQ ID NO: 829347 - DNA, 636 bp, Homo sapiens
  misc_feature 266: n = A,T,C or G
tatggcagggcacgatggcctttgaatgcatggctttgaagtttggatcctaagctgactgttttaaatcggtagctaacacttaagttctctttaatttacatgaactcaattatttgtatatttgaatgttgctcaaaggcaatttaccatgaggagttagatttaaaaaaaataaaaataaaccccagcaaacacacatatgtgtcatggtaagcccacttgatctagcttctgaacctgagaataaatcacctatttggggngaggatagcacattgcacaaggaaggtggggatgatagtgaaggattttccattcccatctgaaaggattcagaaggctgcattctactgcagcccaaactgccccactttcttgtctcctcaccaacagaaaaatgccacctgggtcatgccgcctggctctggagtgagttaactgataatgtcagtgcatgtcattaactatcttgcacatctggaagcagatcttgcagaaccaaatgaaatgtggtaacgcgaaacttaagaaatcaaggggagcggcgctgtgcttggttgatacctgcaagtcacccataaatgtgcytgtcgtcaacaaagggcaaatcttggaaaaatggcgtgcaaccct

SEQ ID NO: 829348 - DNA, 429 bp, Homo sapiens
aacatttggaaactcataataattttttaaaaatccagagagaatatagcattgttttatcatggccaatttgagaaagtttttttttttttttttttttgtttgacaatctctgttagagtttggattgttgaagggattaatggagtattttataggccagtttaagataagggatcatattgaaaaagaagtaaaggaaagtgcctggtcctgtttaggcaatattcctctgcaagctggtgtcaacggtagctccacgtctccatcacaccttattaggaaagctgcaaagcrcgattcacatttaacttctaaaccagaatttgctaatgcaaagaaacagagctgcttgctgtatgtttttcttgttttcctaagtgttttgcatgaaatactgtgtaaagattaatttgccgggagcagtgg

SEQ ID NO: 829349 - DNA, 611 bp, Homo sapiens
  misc_feature 43: n = A,T,C or G
tctttattttccattggaccataccagccagtcagaatattcntcgcactctctaatccacactcatccacaaaaacacacatgcattcaatattcacatgcccaaaagctatctccacccattgttcaatttatataaagtcactattctatttccaatagtcatccatccactcattcgaaccaaggttctcagttaactgtaattccatgagctgcaaagttcttcacctttgaagatgtcacattgttttctagaatttctccttcctcctaacagtcttgtcaccatacgcatcttgctccagctgccttctggagcaggtgatgggatgagagaggaagaagaatccctcctcccatctctcagaagtgcagcttctgccaatcaccatgaaacagcaggaacactgggctgaaaacaagcactgaaggaaccaaagagtaaataaatatcagcacagacgcagaccttgatatccagctcatcaaagcgtgctgcaccctcccaaaaaacagtcccttacttgaaagagcgttagaattagagasgagcctgtgacgcttggcaacaccacagctgctctcagcagggtgccacagcacaaaag

SEQ ID NO: 829350 - DNA, 552 bp, Homo sapiens
cgttggggtattttggtttggcagacaccgataaaatgtagaaatttctattcgagtggttaaaatattcagtcagtggtgtctttaacaagaagcaatctgtacccctgagtagttaactgtgaacttgacaaacatcaaatgcttatgtcttgtataagaaaatgacattttagccttaagtaaaaatttaagatgtcttcataacttaaaaataattgtatttcatttcctttatttaatctgaattgaagaccccattttttgccaagatccatgttgaagaagaatgtctggagttgtgaatgaatgaatgagttttctgtttacattctgtggccatggtacagattgtccagaatggcccgctccccattctggacaatcacctgaggactgagtcccaggttccatgtctgttatggtgataataatakgtcactttaggggagtctgtgaggatgaccttcggtgacccgtgtgcagaatctctcagaattgtgaggctcagaaaacaagaccccaaagtatggcgccagagcatgtcaagtg

SEQ ID NO: 829351 - DNA, 534 bp, Homo sapiens
taataaaaataaataaaatttggccggacgcggtggctcacgcctgtaatcccagcactttgggaggccgaggcgggcggatcacgaggtcaggagatcgagaccatcctggctaacaaagtgaaaccccgtctctactaaaaaaaaatacaaaaagttagccgggcgtaatggcgggcgtctgtagtacccacctactcgggaggctgaggcaggagaatggcgtgaaccccggggggtggagcctgcagtgagccgagatagcgccactgcactccagcttgggcgacagcgagactccgtgctcaaaaagaaaaaaataaataaataaataaataaataaataaaatttatcaaaaaaataggaagtccattgtcatctctattgtattaaaatatctatagtgaaaagttcacattaaaagaaaagaagaaagagaaaaatgaagkcaagaagaaaggaaagaaagaaggaaggaaaagatagagtgacaaacatacataaaataatcactcaggcttaacataccctgc

SEQ ID NO: 829352 - DNA, 605 bp, Homo sapiens
tctgtagttagattagactcaacctgaatattgtcttctttctttttttttaaaacaatttgtaattgtggtaaagtatacataacaaaatttrtgaccttaaccacagttcagtgatattcaatacattcataatgttgtgctaccatcaccaccatctatctccataactcctttcattttgtaaaattgaaatgctgtattattccctggcaaccatcactcttctttttgtcgctatggtgttgactattctaaacacatcgtattagtggaatcgtatagtatttgtccctctgtgactgacttatttcatgtagcataatgtcttcagtgttcattcatgttatagcatatgttgaaatttccttcctttttaaggttgaataatatttcattgtatgtatatactgcattttgcttatccattcatccatcaatggacgcttggattgtttccatgttttagctattaaaaataatgctgctaaagtcttgagtgtacaaatatctcttatttgtggttcccatggagattacatttaataccttatagttataatgctctaatttgaatttatagtagcttaactttaataacatac

SEQ ID NO: 829353 - DNA, 605 bp, Homo sapiens
tctgtagttagattagactcaacctgaatattgtcttctttctttttttttaaaacaatttgtaattgtggtaaagtatacataacaaaatttatgaccttaaccacagttcagtgatattcartacattcataatgttgtgctaccatcaccaccatctatctccataactcctttcattttgtaaaattgaaatgctgtattattccctggcaaccatcactcttctttttgtcgctatggtgttgactattctaaacacatcgtattagtggaatcgtatagtatttgtccctctgtgactgacttatttcatgtagcataatgtcttcagtgttcattcatgttatagcatatgttgaaatttccttcctttttaaggttgaataatatttcattgtatgtatatactgcattttgcttatccattcatccatcaatggacgcttggattgtttccatgttttagctattaaaaataatgctgctaaagtcttgagtgtacaaatatctcttatttgtggttcccatggagattacatttaataccttatagttataatgctctaatttgaatttatagtagcttaactttaataacatac

SEQ ID NO: 829354 - DNA, 642 bp, Homo sapiens
atatacatattcaacaagctataggaggagcatgaatatatatgaaaggagaaatgtacgcacatgcagttgagcttcatgccctttcatgggtctcatgtgacaaaaatagcagcattagcatgatctaagggtggagttttcagccctctgctgtcaaaaggtgaagcagagtacatgtagggctttactgtgccctctccagactggccagagccactccatggtcagtggtctcttatcaggcaaaaaaggaggggcggcatgaggttgttagttgatatcagtgtggagtcttttgaaagagttagtttctgttgaacccttagagaagaaagtctaatagaagttaatgaaggagagggcataaggaagcatgccccatcttcttctatcccactgtggccaagaactcagttttcaaggttactctggggtccccttggccaaagaaggtccattcagtcagttggggagcttagaattttatttttattttacagtggacaggtagattgctacagatatctgaaaggtaggttggcagtatctattagattggtgcaattgtggtttttgtcattacttttaatggaaaaaaacacaatcacttttgcaycaatctaatattaaatgcatgta

SEQ ID NO: 829355 - DNA, 572 bp, Homo sapiens
atagcccataagggttcaatatattcaaatcaataaacataacccagcatataaacagaaccaaagacaaaaaccacatgattatctcaatagatgcagaaaaggcctttgacaaaattcaacagcccttcatgctaaaaactctgaataaactaggtattgatggaacatatctcaaaataataagagctatttatgacaaacccacagccagtatcaaactgaatgggcaaaaactggaagcattcccttcaaaaactggcacaaaacggggatgccctctctcaccactcctattcaacatagtgttggaagttctggccagggcaatcaggcaggagaaagaaataaagggtattctatcaggaaaagaggaagtcaaattgtccctgtttgcagatgacatgattgtatatttagaaaaccccaacatctcagcccaaaatctccttaagctgataagcaacttcagcaaagtctcaggatacaaaatcaacatgcaaaaatcacaagcaytgtgaagaatcaatattgtgaaaacggccatactgcccaaggtaatttatagattc

SEQ ID NO: 829356 - DNA, 671 bp, Homo sapiens
tgtccccaccatgccctctccagagcagattcttcctagtgtttccactcggggttaaccatttggtgtgctgactctatgtgggagctctgacttgacctttaccctgtcttgggckctgtttcctgtgctccctacacatgcctggttaaaacccacactttaggcctttagaggttaacagataccacggggaccaatgcttgttccaatggtcacttacccctcctgacacatagtgtcttgtcattcctaccctccaaggaattcccttacatttctgccagctcagccatgcttttaaaactactttttttttttttttttctatcaaatgtggtttttttattcaacaactgacaagcacttttctacagctgcacttgtggaacatcacatggcaaaaacaggagttttttcgctagacttttttctttttaaccttattaaaaatgagattggtcctaaaaatatagaaagaaataaatttaaattcacaaaaaactgtacattatcaaaaagtcactaaaacaccacatttggttatataaaaagtcccttttgctgtaaaaggaacacagaaacttgttggtgttgatggtgtggtttcttcctgtcaaccagactgatgggagggaagcaaaagggcagggggtgggttgtctttttat

SEQ ID NO: 829357 - DNA, 595 bp, Homo sapiens
atttaagaaactgaatgcttacataactcctatatcttagatatttctggagagaactggaatctgatacttctacgaataagaagtatggtaactaaattatagaacatcactcagttttatggtgggatttacaatacgtggaaagaacgaactgatttgttgagggttaggagatggataaagaaaagtatgcacagttaaaccacagatcttaagaaaaaattgcttcaattagttctcttgctaagacaaaatgaaaataaaaagcagatgtaaaaactgcaaccacatattattcacactacagaaagagcagtaatatgccattctttcttttgactgtgaccacaagctttgttttatgctaaggaaatcagatacgtaaaagccaaatgctgcttttaaaacattgccataaagttaagtgctgggccagagcatctatatgagaacatcacaatcagtgagcccataaggaaaagaagacttcttatcygcccttttcacaaagaccaacacctccttcatctctgagccacattcctagagttcctcaaactattctgacttaaccacattgactcaaccacat

SEQ ID NO: 829358 - DNA, 613 bp, Homo sapiens
ttcgccatattggccagggttatctcaaactcctagccccaagtgatcctcccgccttggcctcccaaagtgcagagattacatgcgtgagccaccacgctgggcctaaaaacaattgyctttaaaaatctcaaaagagagctacatggctaagcagcagaacaacatggttgaaacccaacttagaaaactgtagaaggagctcgtatgtacaaaatgacaaaaacgattaacattatgagaaagatgttataagacctggaagagaaatccaagaggtcctatagccacctgtggcagacactgtctactgactgacatgatccccatttctacctctactacaaaaaaagagtaagtcatatacctgaatcccccttctcacttgcagcaacatactgaacaaatggctacgcgatacagcttggccgctgagatgcaggtagaagtcctggggacaccattccatccccagtgaaaaagcaaagcctcagaggacagtctctttgctttttacccttccctctttctgtctgcttggaaaatggacacactgcctacagatgtagcagcaatcttgcaaacctaaagacaaaatccgcataggaatgta

SEQ ID NO: 829359 - DNA, 652 bp, Homo sapiens
tattcatttttaaaatataggacttgtacaaaattctggagaagaaaagaaagtcatcatcattttctaaataacgattagtatatttagtttaatgaggttcccattgtcaatttttgtttttgttgctattgtttttgagaatttagtcataaaatctttgcctaggccaataaccagaagagtatttcctaggttttcttctagaatttttatatatttaaatccttagtccatcttgagttgatttctgtacatggtaagttagagatccagttttatctctcttcctatggttagcaagttttcccagcaccactccttaagcaggggctgcaaatagcaatctctttccaaagagtagagtgtggcaaaggatggtgaaatatggtaacttacagtggaaaaatcttacaaatatttcctcagccaggtgaacagagttaacattaatagcaatgttatgttaataatatgatgtaatgtaatgaaaatgaccctgtaactccatggttttcctcccaaaaacacatactytcagtctaatcatgagaaaagcatgagataaattccaactcttggacattctacaaaatacctgaccagtactcctcaaaactgtcaaggtcattaaaaataaaaaaagtctgag

SEQ ID NO: 829360 - DNA, 384 bp, Homo sapiens
aagggcgataagggaaatctcccattccactttgtttcctgaaaaccataatcctgagtcacctgacctaacagtgagagttgatctcatcccaaacatactctaaatcacagctctcaaactttttctcagctcccctttacggccttaaaaatagtttaacttttcttatgtgagttatagctattgataatgaacatattagaaatcaacactgaaaagtaaatatttacttattaattcactttcaaaaataaaaaacatgctattactaattatgttaacataagtatcacattttataacaaataactatattctcaaamaaattagtgagaagagtggtattgtttaaatttgtaatatctggatgaagggaagaca

SEQ ID NO: 829361 - DNA, 182 bp, Homo sapiens
actcaaaaaaaaaaaaaaatacatacagargagcaaaaagccaaggatagttaagacagtcctgaaaacaaacaatatggaagagccactatcagatatcagtaattattacaaagctgtaagagttaacacaccatatagtaatgatgcaggactagatgaaacaaaactatattttgtac

SEQ ID NO: 829362 - DNA, 555 bp, Homo sapiens
gccctttcctcaccataaacttcarccgaatgtaacaatatggtaggagagggatctcattaagcctcatatcgtagattctacacactggattttgtgtataatagccattcctactggagagcagataatagtgtttaccactggatagttcccatgtcctgtgaatctatgcttagtgttattgaaaaactgcatttacaaagtgtttcagacttgccttccaagcatcatttcacttcattcataacattctatgagtcggcactagtattacctggatttagagttgagaagcagagcacctaaagggtaagtaattgtcccaaggtcgttggggaactaactggcaccgggattccaacctaggttccaaagcctgccctccatctcctcaggggtccgaattctagaagaggagatacttgtgtccactagatggtgctgattgtcctcttaaaaaaaaaaattggcagccactttcagaaacacgttcctttggattttaggtgtaattcaagaaaccactgaactgaagtatcttgtatgtctgaa

SEQ ID NO: 829363 - DNA, 336 bp, Homo sapiens
gttactgtcttgcaataacatagcatactggaaatattctatcagaaatccaagagaagtctttttccaagatgaagaaaagatttagattgcttttttttttttttwaaaaaaaggccatttgccataaactgcaatgatttgattacagtttttaaacaatgcctttagaaaaaagggcaagttaagattgttctttggtctataaaatgtaaagaaattaccaaggtccgcataggaaagcttgctaaactgtagcctctgtccccaagaactcaccttctctattcataccactcaagttcccaacaagagtacagggatcaaccttatata

SEQ ID NO: 829364 - DNA, 625 bp, Homo sapiens
  misc_feature 329: n = A,T,C or G
ggccattgctcttcatacactcacatacactccatgatgtgtatatttcataaaaccatttgttatgttgagaaacttcatgactgcttttccttcatttcatacaaattagataagttagacaaaatatgcatttatatgtaaagcatattataaacttgtatttccattttttattctcattttgttaatgatagccttctctgagtcaagaaatagtcaaaagtagagcggaagacagtgcagaaaatatctttttgcagcaggacagtactcctatggacaagtgtgggactagggctcatcgctgtgctatctaaataactcangaagctgcagagagaagtcagttcatgccattaaaccagagaaagaagacatctcttgaaatatggaagtttctcctctctagaatgccagaaattctgcctttgatatcttaaaatttgcaaagccccttctgtaatttttagatatcttgagttctaaatgtgctgatagccagcgctcatgtgttaactacacakgctcagcatgaggattgcgctaggaagaacaaaaatattatacaaggaggcaaaaaagaactttttctcaagaggcttacagtctcgttagggagaca

SEQ ID NO: 829365 - DNA, 597 bp, Homo sapiens
acaggtacactctatccgcctatgggtctatatgagccctgaggaaaaaaagatggagtttctggtttagattaggttattctggcaacaaaaaggaaagggcacgggaggagaacattatcagtgtccttcaagaacgggcaacttcagagggtatgcacataggcaatagctataggggaaaaaaaattcacactggcatccaaaaaatgtaacttaaattaaggatgttacgtcattttccacctatcagaagggcaaaatgaaaaagcatgacatatccattactgaatatctgaggaaagagacaccacacaccactattaaaaggagcaaaaatggtcttcccacttttggagaccacctgtatccaatatcttcaaaacgtgcatatcttaaggtgcggtaattcccttctgggaactctaaaataagacttgcacaacattttccaatatgaatatccctaaaggtktatgaatgaccacattatatagcttatattttgggcttcaggaaataagaaaataaggacagaattcaaccaccaaaaggcgtctaagaattaaggaaaatgttggtggaacctctaaacct

SEQ ID NO: 829366 - DNA, 597 bp, Homo sapiens
acaggtacactctatccgcctatgggtctatatgagccctgaggaaaaaaagatggagtttctggtttagattaggttattctggcaacaaaaaggaaagggcacgggaggagaacattatcagtgtccttcaagaacgggcaacttcagagggtatgcacataggcaatagctataggggaaaaaaaattcacactggcatccaaaaaatgtaacttaaattaaggatgttacgtcattttccacctatcagaagggcaaaatgaaaaagcatgacatatccattactgaatatctgaggaaagagacaccacacaccactattaaaaggagcaaaaatggtcttcccacttttggagaccacctgtatccaatatcttcaaaacgtgcatatcttaaggtgcggtaattcccttctgggaactctaaaataagacttgcacaacattttccaatatgaatatccctaaaggtgtatgaatgaccacattatakagcttatattttgggcttcaggaaataagaaaataaggacagaattcaaccaccaaaaggcgtctaagaattaaggaaaatgttggtggaacctctaaacct

SEQ ID NO: 829367 - DNA, 595 bp, Homo sapiens
tcagacacccacgtgggggaaatctgattccctgagcaaatctgacatccctggggaagggtcagcaagacctcgggttgagatgagaggtgacaggagctcccagactccatgagggggagcctgcttggtttmtccggaaactgggattgggggtggggggcctccccttgccctcacctggacaacagctgcgccctctggcggtgaccgcatggaccaagggggtcccacctcagtctgggaacaaatgtcctcccagagaggctgagcctggcgccatgttcctggggaagtgcctggatcatggtccccctgggccattggagtcattgagccttaaatccacccccagcaaggcctgccccagaaccacccatcaccctccagtgcagtcaggtggaccagaggtccctagagaagtggcaggagctcagacttaggttgagtcctggctccgcttcttgctagctacgtggccttaggtgaattacttggcttctctgagcctcagtccttcatctctaaaagggcaagatgatcctgacctcattgactgttaggaagatccaaggacatctcacatggaatggag

SEQ ID NO: 829368 - DNA, 580 bp, Homo sapiens
gaaagtagtgtggcagtccctcagaaattaaaaataaaattatcacatgatccagcatttccctcctgggtatatatccaaaagaatggaaagcaaggtctccaakaattacttgcatacccatgttcatagcagcatgattcaccatagccagaaggtggagccaacccaagtgtccctcaatagataaacaggtaccaaaatgtcttctgcccagatggcggaatactattcagccctaaacaggaaggaaattctgatagatgctgcaacatggaagaatcttgaggacactgtgcccagtaaaatgaggccatcacagagggacaactgccacatgatttcactggtataaagtgcttagaggaagttaaatcatgtagacagacagttgatggtatttggcagggcctggggagtaggagaaggaatggggagttagtgtttaatggggccagggtttctgattgggaagatgaacagttctggggatgaatggtcgtgatggttgcgcgacaatgtcaatgtatttagtgcccctgaactccgcacttaaaaatggttacaatcatcaatttta

SEQ ID NO: 829369 - DNA, 629 bp, Homo sapiens
ctcttagttttattattttcttctgttttcttagatttactttccttttcttcttctaacctcctaaaaagaaaatataattgattttcatttttctttttctttactatatccatctaacactataaatgtccctctaagcactgttttaggtacacccaacagattctgacgtgttctgttttcacacatactaaactgctgtgtgtcttcctacccactgttttagttgaatctcataaactttgatgtgttttatcaaatgcccatttgttttgcagctgtgcttgtttcaaattttagcaattgctctagtaatcacatcacgcattactaacttatcccagtgtacctaatatcatatcacttcctgtatgacagtcttcctccctttcagacctgagtcatatatttctatgtgtgttataaaactcacaataaatttttaaattatttttgtttaattcagtagattctcattaagaaaactggcaaaaaatagtatttctatttatctgatatttatcatttccactgctcttcattctttttacaatcasttagcctttctaatatatgggtctcatggcaaattatttccttagcttttgtttatctaaaaatatatt

SEQ ID NO: 829370 - DNA, 510 bp, Homo sapiens
ctagccatgctttggtggcctctggtaccttggcttgcccattgcgtgatgttgctaagtgagaagcctgcaaaaatcacagcctaatctacctggaatacctggcttggttaatagtcgtttggtagctgacatatctagtggtaccatttgctattaaataaaattataatattcatcaaacaggaattagaagttaccctgaggctactcttttgaaggcatgttatttctgttgagattgtatacaaaaaataatggatcttccattgttttaggcatattctcccttccttttaaagacacatttcctgaaaccaaaataggcacatactccaaatcttcaaatcaaattgtcttctgtgtcctgtttcctgtctcccattgttcttgtctcttttatttctcccaaagtcttgttttcccctattacgcaactcaggttcatgcagattagttmtgcagcctttttccccccattcagctcaatcctgggggaatagtatcctt

SEQ ID NO: 829371 - DNA, 507 bp, Homo sapiens
attccttgggcctactgaatgccctgccattatctcaaattcagtaaatctaatgctgaattaataatctcttggacttagcttctttttcagtagactgactagacaatcacctatattgcagcagaagtttcctaactgtgctgatcatcagaataattttggtgtgggacggtgaactgggtagtctgaacagctcttcaggtgattccaatgattagccaagttgaaagcactggtctgaagacaggattatcatagtaattgatctaaggtctcttgtagtctaggatattgtaagtcaattttgtacaatctcttcccctaaattggcactgatatttaatagcaatgtgatcctgggcaagctattttgtttccttgagcctcagttctytcatttgtaaaatgaatatgaaaatatctgttgcaatgagtgagattagatgtgtgaaatacactgtttagtgacatatacatagcaggagctttctaattcccttgcct

SEQ ID NO: 829372 - DNA, 617 bp, Homo sapiens
agcagggcttctggcgttttgaaagcygtgcagtgtgagagaaggatgtcaagaagcagagtttggcggcttttggctggttgcgcgtgcaacccggggcgtgttagcactgcaaagggcgcctggaaagggtttgcagttcctcctaattctcagctttcttttcttttttttttttcgacagagtcttgctgtgtcgcccaggctggagtgcagtggcgcaatctcagctcactgcaacctctgcctcccgggttcaagtgattctcctgccccagcctctttagctgggattacaggctcccgccaacacgcccggctaatttttttgtatttttagtagagacggggtttcaccatgttggccaggctggtctcgaactcctgacctcgggtgatccgcctacattggcctcccaagtcctgggattacaggagtgaaccatcgcgcccggccagttctcagaattctgacactggggccgggagactagaagaatcttccagcgcagggcaggtgccaggaggccctgatacgggctgcatccttggaaatcagtgctgcccctcccctgacagacgggtcacagaggctggccggccctggggatggggtc

SEQ ID NO: 829373 - DNA, 591 bp, Homo sapiens
tttctcccatgtgtgggggctttcctcagatggctggtgacccaggggtctgatcccactgaagcactaaggttgacaggaagccttctgtggggccagcgccatcactaactttccctctgcagggtgcctgggggtctggcaggcaggagctgtaggacacttctctgggggcattcaacctccctcagcagggactccccacctcctgcctggccagggaactgactgctgggccctttgctcattcgggatgcccagtttcaggctggtgcctcaccctggcctgtctctagtatcccatgctgaagcttccctgggtcaggtgctcctggaattaaacatgaggtctccttcaattgttggcaagagccatcatctggccaagtgggccctgaagtctctagctgacactccctagaggttttcaaccctccccccttgttcctgtcccccgatcactcccacctcttgcctttcctggtacctgaacagatggtcttscttctcaccaggatgccctgttctggcacagagatttctgaagcttccctcagcaggttgccaccctccctccatgtccatcttcca

SEQ ID NO: 829374 - DNA, 646 bp, Homo sapiens
caccaatttgtcaatggtttcttagctttgacacctaaagcataagcaaccaatgaaaaaacagacaaattggatatcattaaaacgaaatatcatcaaaacgaaatatcatcaaaacgaaatatcatcaaaacgaaatatcatcaaaacgaagtatcatcaaaacgaaatatcatcaaaacgaaatatcatcaaaacgaaagacttgtgctttgaaagatgctatcaagaaaacgaatacacaacttatagaatggagaaaacatttgtaaatcacgtatctgataagggcctagtatctggaatgtataaagaaactcttacaactcaacagcaaaagacaacctgattaaaaaatgggcaaaggacttaacagacaattctccaaagaagatgtatgagtggctaacttaatgcacgtaaaaagatgctcagcatcactaggcattagggaaatgcaaatcaaaaccatgatgaaatgccattcacactcattagaaatggctataattttaaaaaaggaggggggataacaagtgttggcaaggaggtagcaaatcagaacccttatacattgttggcaggaatgtaaaatggtttagccatygtgtaaaagagtttggaggctcctcaaaaagttaaacta

SEQ ID NO: 829375 - DNA, 569 bp, Homo sapiens
tccaggttggtcctttcattcaaggacacgtgcatttcctcagctataggaaattttcttctatcatttctttagtgagttcctctcttagattctctttcttctggatgtaccctccaygtttttgtcatacgtttaatctctttatcctgttattttttctggaggagtttctctactctacctctttgctaagtctatcttatgctgtgtctatctgctggtcagcccacctgctgggttttgatgactttcatttttgaaggttagttcttttcttagttgtaattcatcctctctgtcacagtaagggttttcttcaaatctttcctggtttatgattgtgtattcctttctgatttgagaggcccagaaggtgtgtctgagaatgcactgcgtctggcagtagggcaggacatggggccgggcaggtgagtcagtggagtcttctggacaagatgcttcccctccttctgggtgaggccaaccaccagaaacattgctctctttctctgtgcaaacactgggtatggacgcctctggggcttgctgtgcctactgtttggcat

SEQ ID NO: 829376 - DNA, 587 bp, Homo sapiens
caaatgaaactcagccttcagcttgcaaaatgatgtctttataattaagtaaacaacagaagacccatgcaagttgcttctttcttcctggagatgttaggaggataactggaatcctaggagctcctctgtgttgaatttgagaggcagaacaaaaaggaaagtggcctttccattccaaatcatggaggtaacgtgtagagaagtgatagccacatttcaagaatagggaaggtaactgggtaaaagaagcaggactacccactctaggagacagcatagagacacttgccaagtcctgagttcagaattttgcttttgagatgaatataaaagcacctaaaggtcaaggaaaattttcttcctgtgataaggaacacaaagcctgtttggtggtctcttcatacggacacacatgacactttgctttagcgtagatgagtactgcccactgtaaggtagggacgaagactgttcggttagttcctttcctctggccgatccctgttttttcttctcctcgcacagtccaacagatgcactcggcctcccgggggctgcccrcccccagcccagaggccagttta

SEQ ID NO: 829377 - DNA, 615 bp, Homo sapiens
ttttttcttttcttgtgttcatatattcttatcmtttagctcccacttataggtgagaacatgtagtatttgcttttctgtccttagttggtttgctaaggataatggcctccagctccatccatgttccttcaaaggacatgatctcattttttatggctgcatagtatttcatggtatatgtgtaccacattttctttagtctaccattgatgggcatttaggttgactccatgtctttgctattgtgaatagtgctgcagtgagcattcatgtgcatgtgtctttatggtagaatgatttatattctcctgggtatatacctaataatgacattgctgggtcgaatggtagttctgcttttagctctttgaggaatcaccatactgctttccacaatggttgaaccgatttacactcccaccaatgtgtataagtgttcccatttctccgcgatcttgtcagcatctgttattttttgaattgttaatcatagaattgacctaattttaatattcttgtgtttcagggaatacaggcctgaggagaggaatagtgatggggaatggtcagtggagcagtctgaatacacacatttaccaattaagttcaatg

SEQ ID NO: 829378 - DNA, 612 bp, Homo sapiens
atttaattcttcaaagacataaaattctatacaaattgtatacaatgtatacaagttactctatgtgttttgactcctaagccatgctagatgaaaaactgacactcatctgctatgtatctctaggtaatgaaagtccacaattgctcttattaacatatttaagaattataaaacttttccagaaaacctttcaaatgtcctcatccgaaattagatgtaagtaaatgataatgctgtaggtatgtcttactttgtgatttctcggctattattttggtttcttatttgcttagagtgacccagagttgatcatgtctgataatgaatagatcaccttgatggttgggtgttttctacaagtgtgagaatcccatgctttgaaccaactatccatagatagagagacaaacatctaacttggattggaatgagagactgcagtggataacatctgacatttgaaccttcagctcaggtgtgagaatgccagcttgtgtccctgagctttgagattataggctgtgtcattatygtgcagacttcttgtgggtctgctgcctttgctgctacaggatcctttaatattccaactgctgggtaggtcctaag

SEQ ID NO: 829379 - DNA, 512 bp, Homo sapiens
tagaacaaggactatgctgaagtaccagatatctgatcaccgtttgtatgtcttattcatttcccaatgtttcagactttaaaatattcaagtagctaacatcagtwtttcagcacatgagcattggaactgaaagtgaattgaatattttcagagaatcagagttacattttgcactaattaagacattcacatactcaaaaccttgtaataacacctcctgatatgctactattgccctaaatttgtatagaataaatatatgtcgaatagtgcttttattaaagcagttattaaactgctttattttaaagtgcagttattaacctgcagttgaatatgccagacatcgcctttataatttcaagtctcataaccctgtacctctgagaccctaagaaataggaagggcctttgttgggtttttgtagaagaaatctttattgtttactctcactttgagctaaaacataagatatttaggtagcaagctagctaccttatctgtatgg

SEQ ID NO: 829380 - DNA, 628 bp, Homo sapiens
ctccaaaattgcaggtcacatttcaatatgtgatttgaaggagatatatatccaaattatgtcaactggtagaaggtataaactctaaatgagacatgaataggaatgtttgagtagagggaaagcagaggacgtgagataaaagactagagcagagaaattgctaggaaacttggcaaagttaccttctgggtctgttgcctcctttatcaaatggagttaataatattatgtacttcttaggccactaggacaataactgagagtattccttcatttaaatcagttagcatagtgccagtaagttagcattatgcacttacatgataaatgtaggatgagtaatagatattcttattgttttctattgttgttgatgtttttagaggctggaatacgaggagtgagaagaaaacaataccacccatgtcttagtcaattttgtattgctataaaggaacaccagagactgggtaatttatgaagaaaagaagtatttttggctcacagttcttcaggctgtataagaagcatggtgccagcatctgctcrgcttctaatgaggcctcaaggagcttttagtcatggcagaagaagaagtgggtcacatggcgaaagagggagcaag

SEQ ID NO: 829381 - DNA, 334 bp, Homo sapiens
cttcatcaacatcctgacaggacgcctcttcatcaacaccctgaaagatggccaaattactaccatataaggcagccaagcacattacaaaccctttaggtcagcattgaagcccttcaaaatatgaccaaatgtatctattcacatcacagcattactctcaagcccttattctcttaactcttgcttatgtaaaatacaaggcatgctttttgaaatcagcccagatctaacagatctctcttcttcttagtgatctaccagatattttggtatttgaattatttaaattatttcactataatwatttatatgttaattatttttctgtaaa

SEQ ID NO: 829382 - DNA, 519 bp, Homo sapiens
aaaaaacctaaagatttagaaaagggttagggcagcagagtgattggctctaattcatgaagtgccatgacactggtgattggaagagcagttgtaaaaggaagaacagaggctgcatctgccatttygtaaaagtgaccttggaagcaaccccttgagatttctcatctgtaaatagaggctgattcatttattttaagaatcaaataagatagttaaaattaattacctggcataaatcttaacacatggtatattagtccattctcacattgctataaggaaatgtgggtaattttgagactgggtaatttataaacgaaggaggtttaattgacttacagttcctcatggctggggaggcctcaggaaacttaatcatggtgaaaggtgaaggggaagcaaggcacctttatcacaaggcagcaggaaggagattgaccagaggaggaacttaccaaacacttataaaatcatcagatctcatgagatctcactgtcacaagaacagcttggggg

SEQ ID NO: 829383 - DNA, 543 bp, Homo sapiens
ctttagacgcataacacattaagccatgattagacattcacacttcacgtaacttcttagatatatttttttaattataaggtaactacagttctggttaatattataaaaaactcgaataacatgaggatgcatctttaaaaaaaagaaatttcatggaagattcaccaagaaagacaatatcctggagcttaaaataaacctcaacaaatgttaaagattgaaattatactctggcctaatggaatcaaactacaaattgaaaacataagataacacgaaaatcttgagatacttagaaataaaaacaaacaaaatcaataatacatgcctaaaatagtctcagaaattttaaaatacgtaattgagaatgaaaatacaacatactaaaacatgtaggatgcagttaaaaccacgctgagagaaaaatttatagtaataatacttatgttacgaaaaagaaaakgtgtcaaatcaatcatctaatgtcccactgacataagatatgacattgagtgactagaaagggaagatctattttat

SEQ ID NO: 829384 - DNA, 470 bp, Homo sapiens
aggaagagagatgggggaggtgcacmcacttttaaacatccagctacctgagaactcactattctgaggacaacagagaggagtaaggagtggtggtgttaaatcatgagaaaccactcttatgatccaatcacctcccaccaggccccacctccaacattgggaattacatttcaacatgagatttgggtggggacatagatcaaaaccatattacttgtgatttttaaaatatctattattaacccacattacattttgattaaaaagtgtaagtctaaaggttgtttaaaaaaaggctgcaatcatattcaagactaacaaaatactaaatgtatttttttattaactatttcaattttattgtttatctcctcttaggagatactacttgagtttttcattttattaatgtaccatattttgtttatccaatcacattgtattggatatttaaacatttttacaat

SEQ ID NO: 829385 - DNA, 592 bp, Homo sapiens
ccttgcatgcctgcctagctacctracatttcccccctcaagagtgtgtgacccaattatttgggaaaatagacagagatcagtcttctgtaactgcttcctgctgacaaaggggcagtggcagttgttccatgggtcttgacctcttgatagctgtcagggcagtgtggctctgtgagttggtgaaagcggtattcagccaggttcaagggagacaggggcagaatttcacctctgttgtgtcccactgctgggtattataggggtcctatatagaagggtggctcttaaatattgagaggccagtatccctcactgaggattatctggagcttgatggcctaaagatgcgaagagacaaatcacattattagatttagaagacacggaccaaaaaggagcaagaataagagagtaacaagtaggcctaaaaagagaagaaactgggagaaccatttccaggttctttcccaatttgaccaacactaagaggcttgtccccataaagaggcttcatttaggagttgtttgatgttgtcgtgtgcatctgctgattgatttacctaaaagcaacattcttcatctaaggcta

SEQ ID NO: 829386 - DNA, 609 bp, Homo sapiens
ctcctctgagacaaaacttccagaggaacgatcagacagcagcattcacagttcatgaaaatccgctattctgcagccaccgctgctggtacccaggcaaacagggtctggagtggacctctagcaaactccaacagacctgcagctgagggtcctgtctgttagaaggaaaactaacaaacagaaaggacatccacaccaaaaacccatctgtacatcaccatcatcaaagaccaaaagtagataaaaccacaaagatggggaaaaaacagagcagaaaaactggaaactctaaaaagcagagcacctctcctcctccaaaggaacgcagttcctcaccagcaatggaacaaagctggatggagaatgactttgacgagttgagagaagaaggcttcagacaatcaaactactccaagctacaggaggacattcaaaccaaaggcaaagaagttaaaaactttgaaaaatatttagacgaatgtataactagaataaccawtacagaaatacagagaagtgcttaaacgagctgatggagctgaaagccaaggctcgagaaccatgtgaagaatgcagaagcctcaggatccactgcaatcaactgga

SEQ ID NO: 829387 - DNA, 641 bp, Homo sapiens
tccaaaagagatcagcatttgaattgttagggtaagaagatcccttctcaccaatgtaagcaggtatcatccaaacagartaaaaaggaagagaaagagcaaattaactctctcttgtcctagagctctcaccttctgctgtactgggacataagagtccctggatcttgggccttcaggttccagggcttataccagcacatgcagtacatttctccctccctctctacgcttctccattcttgggcctttggccttagaacaaattacacctctgctttttctcattctttagtttggagaacatatcatgggaattcttggcctacgtaattgcatgaggcaatttccataataaatcctgtattatatatttatatatacatatcctgttggttctgtctctctggagaactctgactaatacaatttgaaaagtaataacttcttctttgcttatcgtccccacacataaatttaatattgtcctaaatatgctcctatctgtgatatagagatgcaaccattaatggtttgtcagttgtattaatgtggcgatgctagctgctgaaacaaataaaaccacaaatcacaatggcttaaccaaatggaagtgtatttccattaaccaaatggaaatg

SEQ ID NO: 829388 - DNA, 644 bp, Homo sapiens
gttttaggttttatttcttttgtctattgattttatgcctttatttccactgatttttactttgagttttttttttttcttttcttttcttctgcttactttgggtttaaattgctgttctttttctagtwtcctaagaaggaagctttgattattgatattttgtctttcttcttttgtattatatgcattcagtgctgtaaatttccctgtaagcactgctttcactgtattccacagatttgggtatgttatattttcattttaattttgtttaaaatatttttaaatttgtaaaaatatttcttcattgattcctatgtcatttagaagtatgttgtttaatctccaagggtttttggtattttttagttttctttctgttattggattgcagcttaattccaccatggtctgagagcagacattgcataatttatattctttaaatttggttaagatgtatattatagcccagaatgtggtctgtcttgtgaatattccatatgagtttgagaagaatgcgtattcttctgtttttgcttgaagtagtctacacatggcaattatatccagttaatggatgatgctgttgagttcagttatgtccttagcaattgactgcctgttggatctgtctattt

SEQ ID NO: 829389 - DNA, 486 bp, Homo sapiens
ggttcatcacttttattcaacatagtactggatactctatccagagcagttaggcaagaaaaggaaataaaagacatctaaatttgaaaagaagaggcaaaattatctttgttcacagataatacgatcctgtttttagaaaaccaggagtccagaaaaactgttagaattaattaatttagcactttttcctaaacaatacagtataataactatttacataacatttacattgtgtcaagcataggtaatgtagagattatttaaactacataggaggatatgcataggttatatgcaaatactatgctattttatatcagagatttgaacttctgtggattttgatatccataggaggtcctggaaataatcccacattgataccaaaggatgactttgtaaaaattaacttaaaatatatccagtacctaaacataayagcaaaaactgtaaaactcttagaaaaaaaaacataggacaaaa

SEQ ID NO: 829390 - DNA, 554 bp, Homo sapiens
cccaaagtgctgggactacaggtgtgagccaccgcgcccggccctcttcytcttcttataagggcattaatcctatcatagtggctcagcccttatgtcttaatttaaacctaattacctcccaaagatcctacctcctaataccaccccattgggagttagggcttcaaaatatgaatttgggaatgtttggagaggacataaacattccattcacaacagatatcagatcattagacagaaaaagtatgctgccttgaaacaagatcaatataaaaatgaaatgctttaggaaatcacttttttcagaagagttgttttatcagattgatacatttctccacaattacagaaattacacacatatgcgcacacacacacacacacaacatcagaaaggacactgccaaaaatcacattgttgatttagacatttcaattgtctgtgccacagagagctagaacatagatattgtctagttcagcaacctcctttttaaaggggagcaaacaaaccatgagagttgaagggcctacccaagacagcttcaact

SEQ ID NO: 829391 - DNA, 576 bp, Homo sapiens
aaaaaaatatttttcaatttgatcagaattgtgttaaacctatcaattaatttgaggaaaattgttcattccaacatttttgaacccttataattttcaagacattgtgctaagaactttaccaaaacaagtgacaatgtattcacaagacctgtgggaaataccattgtatccctaacatacggatagtaaaattgagtcttaggaactttaagcagctactgagtagaggggcaagaatcctagcctgggtcagtttgattccaagcccatgatcttaattatcatgatatactaccttctcatcaattactacaatacacctctccatccattcaagaaccccttcatatggataagtaaaatgtgacaggttttcttatatttctttacatttcatgagttgattcctaaatattttatgattttttttctgtagcaactgtgaatgagattgccctgttgttttrtctaattgggcactatactgataataatggtcaattttgtatcattttcttgaattcagccagtttaatgaggttgcttaattctaggctacctacatttgaaata

SEQ ID NO: 829392 - DNA, 259 bp, Homo sapiens
tatacagcagcactactgaccacasccccattcctgaaacctccgttttgctttttgagttgtaccttttcttaattctcttccattttctctaccacttatttctctaccacttatttccatttctctaccacctctctcattttccttcattgttattctttctcttaaaatattattgtttactgaagtcacatgatccatcctcatctcctcttcctgtacatactctcacatttatcttgtggatcaacaaagt

SEQ ID NO: 829393 - DNA, 621 bp, Homo sapiens
catttggtattgtctataatagttgaagtttcaggcagacctgctgaagagtagaaggactgggccatctttcaataatctgggagactgtgaaagcagtctagttaacagtcacctgcagcatagcacttakcagacaaagcctctgggtgcctccttgggggtagcagaaaaagcccaactggggatgatggagtatatgtgtctttaaaaataggggttttgaagtgaataaaataattgttgtggctgggcacggtggctcacgcttgtaatccctgcactttgagaggccgagggaggtggatcatgaggtcaggagttcaagatggacctggccaagatggtgaaaccctgtctctactaaaaatacaaaaattagctgggtgtggtggtgggcacctggaatcccagctacttgggaggctgagacagggagaattgcttgaacccaggaggtggaggttgcagtgagccgagatcatgccactgcactccagcctgggcgacagagcaagactccatctcaaataaataaattaattaaataaaaaaaattgttatacaagattgagtaagactgtgaacaaataccacttacaaagccacataaggctctca

SEQ ID NO: 829394 - DNA, 504 bp, Homo sapiens
aatatgtacttgctgtaatggcaggtttatcaaatgtaytgatcctagttcctgcggaggagaaatagttaactgtgcctctgaagacaggatttctaattttgcagagcccaccaaagtggtaatactcactaagataaaaaaaaaaactgatgctttacttggctgtatatttacccatcttactattgtgaagtaggcagagacctgcttcagacatagtttctcttttgctcccctgtattttttctcctcataggcccctccattctgtcacaacttaatttccccaggttttctctttaggttaacaaaacaaaacacactgtgtgtgcatgccctttgtaaattgcccattaaagtaaatactatttaaattagtcttgtcagaacttggcctgataatttcatgaattctgactttaccaaatataaactaatagataatcacaattcagctatcgaaaaaaggcatcattaattagtctgcatagataaagccat

SEQ ID NO: 829395 - DNA, 628 bp, Homo sapiens
ccaaggggatcccagagaaaccttaaaaactgagttttcagtcataatgggaatggaggtcggacaaacctcattatactccctccactttagagtttaggagcaacaacttcccagcattaatgttaaaatagagactctaagacagaacagactctttgtgacaataaagtaccaaattggaaacaagatctaaggccatgcaaagcaagaattaggtcacccttgcccaccatcaatcatgctacatagcatccttatcttaccttaaagcattcttttctgcagattccaaattttagacagaaccatactcctttaaacaactgcaaataaaagaatctatgaatccacctataacctgtaagcccctgcttcaagatagtctgctgaaactatgtataccttccaagtattgatttatatctgcctgtaactcctgccttcctgaagtatataaatccacactctaattcaactgccttgggaccacttactcaaggcttcttgggtttgtgttttcactggaccagagtcarctatattggctcagaataaattgctttatttatttatttacttatttacttattttgaggtggggtctcactgtgtcacccagactgaa

SEQ ID NO: 829396 - DNA, 679 bp, Homo sapiens
ggagtgaacatatgacccagcagttctgctcctaggtgtttacttgaaagaaatgaaaacatgtccacacaaagacttgtatataaatgttcgtggcaacagtatttataatagctaaaaagtgaaaacaataaaaatatagataaactgttgaacatatgaaaatattatgtatccatacaacagaataatatttgtcaggaataaagtactgatttctgttatgaaatcaatatatctcaaaaacatgctatgtgtaaaaaggtcataaattatataatttcatttacacaaaatgtccagaaatggagaatctgtaaagacagaaaatagactattggttgcctagagctggagatggggattggcagtgactgcaaatgggtaaaaggttcctatttgttgttaagaaatgttaaaaaaaaatttggcgatggacatatcactgtaaatttactaaaaatcattgaaccacacatttaaaataaatgggtttattgtatgtaaattatattgcaataaaattattaagaaatagaattaagcaccctacattatctgatyttcattgccccaacttattcttaattttcccccatatagtggttttggttttctacacaccgtggtcccttttgacttcagtcttgatgatcagcttgcttggaaaatatttccc

SEQ ID NO: 829397 - DNA, 547 bp, Homo sapiens
tctttaccagactaagtaaggccagtgtgcaactaggaaatgaattgaataaaaaacaaaagagtaagagttctctgattaacacaaaacccaaactacaagtgtattcatttaggcattgaaggaagttactatttatgtaaaacattttgatgtaatgaatcgttattcatttaattagtaactcccagttcacaactagtttactcaatgtttcctatacaatgttaaaacactctggtggaagaaggggacaaaaaagatccctcatggggtttcgttttgtttctaatgcagcataataataatttagagcacagtctgcagagctagattagatgtgttcaaatgttttttgtttgtttatttatttttggttgtttgacctaggtttaattaccttcttgtgtctcagtcccttaacttacagatttttagtatgcaytgaaatgagtggatacatgatgaatgcgtaagccaattcctggaacacatgtgcatgctattaagagagtaagtgaatgtgtgtgcctctgtgtgtgtatgg

SEQ ID NO: 829398 - DNA, 616 bp, Homo sapiens
agaaatccttaacaaaatacttgcaaaccaaatctaacaacacatcaaaagatagtatttctaatcaagtgggatttatctcaaggatgtaaggctggttcagcatacccaaatcaataaatcaataaatgtgatgcattacatcaccagaatgaaggacataagtcttatgatcctctcaatagatgcagaaaagtcatgtaacaatattaaacatcccttcatgataaaaactctcaataaattaagtatagaaggggcatatctcaacataataaaggtcctatatgacaaacccacagctaaattatagtgaatgggaaaaaacaatcaccttccctctaagaactggaacaagacacaaatgtcaactttcacctctcttatttaccgcagtactaaaagttctagccagagcacacatgcaagagaaagatctaaaaggcctcctactttggaaagaggaaatcaaataatctctctttgcaggtggcatgctttaagatatagaaaaacctaaagaccaccaaaaaytcctagagctgataaatgaatacagtaaagttgcaggatacaaaatcaatatacaaaatcactagtgtttctatacaccaat

SEQ ID NO: 829399 - DNA, 539 bp, Homo sapiens
actgtcattttataatgcccctctgtttagtatatatttttttactcttaagtccacttttcctgtttactagagtcgtcactcctacttttgtttgattattattttcctgactttttttgtacyttttactttattaaaaaaactgttcatattttgtaattgaagttaggtctttttctaaaaataatattctatgaatttctgtgtattaattgttgcaggtatattaatattgaatgtaattagtaatatattaaggcttaagtctgccattttgtttttctgcttgttgattctggtttcatttttctgatattctttttctgcgttcatatatagacattttttagaataccagtttaatttaattataatttttagtgtatctctgtttctctttctctctacacacactcacacacacacacacacacacacacacacacacacattagtggttgttcttagtattacattatgattttttaaaagtctattggagtccaccagtttgagtgaagtttagaattatatct

SEQ ID NO: 829400 - DNA, 539 bp, Homo sapiens
actgtcattttataatgcccctctgtttagtatatatttttttactcttaagtccacttttcctgtttactagagtcgtcactcctacttttgtttgattattattttcctgactttttttgtaccttttactttattaaaaaaactgttcatattttgtaattgaagttaggtctttttctaaaaataatattctatgaatttctgtgtattaattgttgcaggtatattaatattgaatgtaattagtaatatattaaggcttaagtctgccattttgtttttctgcttgttgattctggtttcatttttctgatattctttttctgcgttcatatatagacattttttagaataccagtttaatttaattataatttttagtgtatctctgtttctctttctctctacacacactcwcacacacacacacacacacacacacacacacacattagtggttgttcttagtattacattatgattttttaaaagtctattggagtccaccagtttgagtgaagtttagaattatatct

SEQ ID NO: 829401 - DNA, 539 bp, Homo sapiens
actgtcattttataatgcccctctgtttagtatatatttttttactcttaagtccacttttcctgtttactagagtcgtcactcctacttttgtttgattattattttcctgactttttttgtaccttttactttattaaaaaaactgttcatattttgtaattgaagttaggtctttttctaaaaataatattctatgaatttctgtgtattaattgttgcaggtatattaatattgaatgtaattagtaatatattaaggcttaagtctgccattttgtttttctgcttgttgattctggtttcatttttctgatattctttttctgcgttcatatatagacattttttagaataccagtttaatttaattataatttttagtgtatctctgtttctctttctctctacacacactcacacacacacacacacacacacacacacacacacattagtggttgttcttagtattacattatrattttttaaaagtctattggagtccaccagtttgagtgaagtttagaattatatct

SEQ ID NO: 829402 - DNA, 579 bp, Homo sapiens
ctgtttgcctaggtgtcagcagcagaggctgcacagcagcgaatattgctgaacagcaactgttgctgcctgatcgttcctctggaagcttcgtctcaaaggggtacatggccrtgttaggtgtcagtctgcccctacggggtatgcctcccagttaggctactcgggggtcaggaacccatttgtggaggcagcctgaccgttctcagatctcaaactctgtgcggggagaaccactcctctcttcaaagctgtcagacagggacatttaagtctgcagaggtttctgctgccttttgttcggctatgccctgcccccagaggtggagtctacagaggcaagctggcctccttgagctgtggtgggctccacccagttcgaacttcctggccgctttgtttacctactcaagcctcagcaatgacgggcgcccctcccccagccttgctgccgccttgcagtttgatctcagaccgttgtgctaggaatgagcgaggttctgtgggcatgggaccctccaagccaggcacgggatataatctcctggtatgccgtttgctaagaccattggaaaagtg

SEQ ID NO: 829403 - DNA, 591 bp, Homo sapiens
cgacatagcttttcaaactggcttctttcacttggtaatatccatttaagtttcttccatgtctttttatggtttgttagatcaagtcattttaaaaytcaataatacttcattgtctagatgtgccactgtttattaagccactcacctactgaaggatatcccggttgcttcaagtttaagcagtttttttttttttttaagctgctataaacatctctgttgcaggattttgtgtggataaaaaatttcaaagtatttatatacatacaaaaagtgctactgatgcatcatatagtaagggtatgtgtagtcttaggccaggtgctgtggctccatgcctgtaatcctagcactttgggagactgaggcaggaggatcgcttgagctcaggaatttgcaaccgacctgggcaacatggtgaaaccttgtctctacaaaaaatacaaaagtttgtcaggtgtgatggtacatgcctatagtcccagttactcaggaggctgaggtgggaggatcacctgagcctggggaggtcaaagctgcaatgagtgtgatcacaccactgcactgcagcctaggtaacagagtgag

SEQ ID NO: 829404 - DNA, 618 bp, Homo sapiens
tgtataattatttttatacattgttggatcctataatgttttcttgagaatttttrtatctatgttgatgagagatattaatctatagttttcttctagtatcttttttagtttttgtactgtaataatgctggcctcatatgatgaattaggtaggattccctctgcatctattttctggaagagactgtagagatttggcattatttctctcataaacgtttggtatattatgtatattgtttactcttcatgtattttgagattttcatgcttgctttctgttattgatttctagtttaattctagtctggtctgaaagcagaatcagatgatttttgttcttttaaatttgtgtttttatggcccagatgtgaatctatcttggtgaacattccatgtgaacttgagaagaatttatcgtgctgttgttggataaaactgttgacacatgcgcattatatcatgtgattgatatttcttagttcaactctttccttaatgattttctgcctgctggatctctccatttctgatagtgttgttgaactgctccatgttaatagtaaatttagctatttatctttgcatttctaccactttctgcttcacatatat

SEQ ID NO: 829405 - DNA, 586 bp, Homo sapiens
aaatactgtaaactgagcagcttgaaacaacacaaatttattatctcatagtttctataggtcagaagtccaggtacaatgagcctggattctctgctcagggtttcaytgggctgaaatcaaggtgttggccagcactgtagttctcaactggggcttagggtcctctttgagattgactcgttgttggcacacttcgtttcctcgcagttgtaggactgaggtccctgctttcctgctggctgtcatctggggaatgctcttggcaacaagaggctgcccaatctccttgccgcatggacagttcacagcatgggtctctactcaggccaccagagtacatctctgtgacttccccttctgccatcagctagagaacactctgctttcagaaggttcatgtgattatgtcaggcccaaccaaccgattggggaccttaattacgtcagccaattcccctcacagcaggactcagattagtatttgcttgaataactcggcgaagtgaatatacaccacttcccaggaatcagggctgggaagggtgggggatgacttagaattctgcccacacagtgatcaata

SEQ ID NO: 829406 - DNA, 313 bp, Homo sapiens
ctgtatcttaggaatcagaatttatatgtgccattacttgctactttaaagcaacctttaaagctagaattctgcctaggagagatataataaactctgaagcacataccgttatcccccccgctcccgcccgccaccgagctgacagcccggagctgacacccggacttctaaatatacactacactgttcacacataaaacagtgttcccagtgtttccacacatcaatctattggaatgaacaagccrgaccaaccctgctaatgttaaagaggcatgcttccctgacacagacacacggatgggaacag

SEQ ID NO: 829407 - DNA, 611 bp, Homo sapiens
ttgtatggcattttaaccctctgggtccctggtgttcaactttgcctttattgtactgcaatggcaactgggaaccatcccttcctttcaacatgactgaaatagtacataaatgtygaaccatttctgcaagcgactttggagatggacagggggctggaaatatcagcattttgtgatacttaccagctttcagttcatttagtataaaaagttagccctatggagacagaatatttcaacctttaactgtaatttgatagttgtcaccagataccaaggtggaaaaccagaaaaggtacaataaacagctgagctgagtcattacaacagactcttatcttgtagaaactgcagacattatgatgattatcctcctacctaccaaaggagggttgtctacaacagccctggcagccactaacccaggctatatgcttagcccatagtaggtgcttggaaaatatggctattattttaaaattcaatgacatacaattgctctcacagatatatttttattaagatgatgatataagttacacagttcacaaggagaaaatcacaatagggagatacactgtgggggaatgtttatcctcatgtagctg

SEQ ID NO: 829408 - DNA, 594 bp, Homo sapiens
ttaataagcagttgcctagtaaacatttatttagtacctactatgtgcttgctaagtatatttgcactggctaaaattcgttttcttagaagtgctgcaatttgatacagtgattgagtatattttartacctaatctgattcaatatattgttttgaaaatgcaagatggaaaaatctttgcttatgcccgttgctcatactttaaggttagtaattgaagtcacatatcattaaaaaaaaaatcctctctttaaatttccaagggggtatgtgataaatggagtatgggttacagaaacaaattgagtttgaatccaaatttagacaagttgcttgatttccaaagtccttgtttcctcagctgtaaaactgaaatgaaagtaactatattagtcatagtattgctgtatatattcagtgagacaattgaagtgtaaactttccagcataaagttatggcccaaataaaagtcacgtgaaaagaaacagatgaacacagaaaatgaatattcattaactcttcaacttttcttcccaggaaagcattttttaaaaatttcctaacctcgctcaggaatatacatgatagtaa

SEQ ID NO: 829409 - DNA, 602 bp, Homo sapiens
aactaagaagtgatggtgcaaatttttcatscaaggcctgtgtgactcacagcattcctaagccaacctgctgccgtcatgccacattgtatgtttctcatgtctttcctctctcctttactctccaagttctgattttaattttattgtatccatattaatttctttcttcaatactaagaacagtattattgacataataaggtggtcaaaatatttgctaagttaattattgatggatgtcttatataatacaaatttaactgaaatatgcatacagaaaattacataactaaaggtgtatagctaaacagttattaacaattaggcacatttatgtaactagtatgcagaataataagcaggatattaccagcaactcagaatctccttggagctctttttaatcattatccattcgtgtctctcccaaagtcatactacctggaattctaacaccatatattagttatattagttttaatggttttttatctttgtataagtataatcatataatatgtattatttcaatggggcttcatatattccacattatgttttggagattcataaatatgggtatatgtaataataattta

SEQ ID NO: 829410 - DNA, 359 bp, Homo sapiens
gggatagtatggaagaattcatggcacactgattcagctgagaataacataactttttatgttstgcaattaaaatttattgttacagcaacctgttgcctgtaaagtgctaagggattactgccatcatagcaatataagggccttcagatagcttgcttgctgctttctatgctatttacgtagttcacaattacatttactccttcttcatcaggaggaatatgttaacttattactttccaaaccacactaatcaatcctattcatccctctcctcctaaaaacaagcaaacaaaacaaacagttggcttcatggcttataagggaatgccatttaccttttcttgaactctttc

SEQ ID NO: 829411 - DNA, 535 bp, Homo sapiens
cagagattgaactacatttgtaagtttttagcttttttattcttagaaacaaagtattatggtgtagtgaagtagactatcccttatgttttcaaatgaaaaacagatttacatataacaagacaagaacttccattccaagaaggctaaaatatatagtttaatcatactttgctgtttaaacatagtatttagcagtatttccccacaatttcacataagttcttttattcttttcctacccaattgaaacacatggattgagtattctatattcaattgaaattaaaattaactttctacatgtctattttagatttataattatatttgaggactatgtttataactactagtcagcatttagtttcctatttcctctttgttttatataatataaataaaatttaagtacgtataagtatgtatatgcaaaatcatatgttaaaacaactatagaaacattgttgtccagtaaagatggcagctaccaaattygaaacatcaactgtcaggttgtgttaccagaaagtta

SEQ ID NO: 829412 - DNA, 588 bp, Homo sapiens
tttatacatggttattgaatacctagtctggccatgaaatttctgaatcctgagtatacagcagtgaacacacctgaaaatactcctgtccttacaaatcttatactgtaatgggaaaaagatggctattaagagcttaagcaaaatatatgccatgtttgatggtaatgagctctacggaggaaagtcaaggagtaagagggcatagggagtgcagtgggatagagacagagaggtcccagtttagaagagtcagggcaggcctcgctgagagagtgacatttgagtacaatttgacagaattgagggagccagggagatggaagagcaacggcgagtattgtcttagtatcattaatttggaaagttgtatttttatcaaaaatttatttcttccagtctagtgtcttttggatcctgtattataattgttaatttttaagtttcacgtacttctaaatatatccttttttactgactgactttccccactcgtttttttttttttttttcttggagttattttctatattccttccacccaaatgaggcwtgtgctgttaggaacacatagttcacaagcaggaa

SEQ ID NO: 829413 - DNA, 234 bp, Homo sapiens
cttaaaatgatttaaaataggtatttctatctagtaaatcaatagctaacaatgtttaacagtgggtagaattattaaattctaagagaaaaaatgctgtcaaaattattttttgttattctaaatgagatacccatgcaattaagtaggaaaagaataaatggyaaaactatcattttttgatgatatgagcacttatgtgacaacttatcagctgaaaatccatgggaatat

SEQ ID NO: 829414 - DNA, 528 bp, Homo sapiens
aagaactttaattcctatataagaataatttattctcattcatacttgtaaaaaaagtgtatccattgttttagaaaaggggaaaatagaakacaggttaaaaaagaaaactaaaaggcatttggtgttgcttagatgtacatgttttgtagtatatatatgtggttttgatcataaataatgtatcaaagacatataataccaatttctgttcttttttctgaaatcttagaattgagtccttagaagaaataccaagctaaagggcatgtgaatttctaagtttcctggcacttaattccaaattgttattccaatttctagtgtgccatactacatctttattagcattcaggattatcttcttggttaatatagtaaaatatcattttgttgtttgaattttcattgctttgataattgatgatatttaaagatgtttaggctctttttttctttttcatttgctcagcttttctgaaaacctttaggagacaagtttctcccaaattttttctactgagattt

SEQ ID NO: 829415 - DNA, 590 bp, Homo sapiens
aatattttgaaacatatataatgattgtttaggtaaaaaacttagctaggaaattcaaagtgaacaagactttgtttaggtaaataacttagctagggaattcaagactatctcactacaatgacaggctgcagattggatgttaatttctatgccaagtgaagtttcttgtcctgagatgaacttacaataaaatatctttcccttataaattttattgtaagatgaacttacaataaaatatttccctaaatataaggacaccaaaatcatgtttaaaaatattaaatgaattcctttttagtttattgtgtcattttgtaatgcgagctcaagttatgcttacttatttgggaggtagataaaaacatttcctctgcaatagcatgcatacattacaatggcaggaggcaatgacttcacgtttaatgcaatagtaatatgtgcatcatggatagaaattaaattcaggaatgaggcagatgagcttcctggaatcacgcatatcagatgtgattttcaccaaccatcaaaaggcctttgacttgcaggcwtctgcaaggccacaggtaacaaccttacttatgttt

SEQ ID NO: 829416 - DNA, 594 bp, Homo sapiens
gttccttctgagggctgcaagggaaagattgttctgggtccttctccttggcttgtagatgtctgtcttctccctgtgtctctccatgtcattttttcctctatgcatgtctgtctctgtgtccaaatttttccattttaaaaggacattagtcattgctgggcacaatggctcacacctgcaatcccagcactttgggaggctgagagaggcagatcacttgaggccaggagttcgagacgagcctggccaacatggtgaaacgtgtctctgcaaaataatacaaaaattagctaggtatggtggtgcatgcctatagttccagctatttctactcaggaggctgaggcatgagaattgcttgaacccaggaggcagacgttgcagtgagctgagatcatgccactgcactccaacctgggtgacagagtaagactctgtctcaaaagaaaaaaaaaaaaaaagggcattagtcattggattasggcccaccctatggaactcattttaacttgatgagctctgtaaagaccctatctctaaattatatcacattctgaggtgctgggaggtaacactccaacttatctttat

SEQ ID NO: 829417 - DNA, 589 bp, Homo sapiens
tgaaatctttacctaggatatgtcagccagtattctagacatctggtatacatcatagaacaaaacagtcctgcccccatgaagtttcattctagcttacccctagtatatgccaggctctgaactaagtctaaaacagatgatccctgcccttccagctccctgcaaagccagcattaataataggagggctttttacagaaaatgaaactgtgacttgtttaagttacaacctgtgagtgttgaagtcagagtaccagtctttcctgtataccttaccacctatttgaaaaatgatggatagttatcttaaacggtgaagaattagtgtaagttcttaaacaaaatagtggcgatattaagatcatgcttgagaaacctaattcttgctgtctccttacatattttaagtttggcctaactctgtctctgtgcatagtgagctgtaatgtaactggatgtgtaaayagattgtagcctactcttgtgccaatctccaagttttggccaatcaaaggtggccaaccattcaaaccatgttcaagtaaggcaaacatcaagctgtaaccaacccaactatttttgtacc

SEQ ID NO: 829418 - DNA, 584 bp, Homo sapiens
tttagggattacatttcaacatgaaatttgggcaattgtccaaatgatatcagaaggtgatccaggcgggacatttcacaaccaccgacatagcaacacaaggtggttgagataggcctgtttcttaccctactgaatacaagttctgccaactacaccaggtgaatctagaagaactggcaaggagactgaatgggaagctccactgacaataagcagccattgggaagcacacttcttcctcttggacctgacacctcttccccaaaccagaggaactctgtagccaggggcatcaacaatgggaattatgccacaacaaatgtccctagcttgggaaacacatttttcttctcccacaagtatggggagtcagcaaaaacaagtaccccacttgggaatggctctttgttcctgcaggacagaaactcccttcctcaacctagaggcatcaggcagcccaascagcagtaacttccagtaacttctcctaaagcagcaaggaccagtaggagccacagtggcactggataaaacaagcagaccaaaatagcaccaagaagactctgaaaattaggctgtcg

SEQ ID NO: 829419 - DNA, 539 bp, Homo sapiens
ggggaatagaggaactacaattcaagatgagatttgggtgaagacaatgccaaactatatcatatgtaaagattattgtgagtgattaagaggtagcataagaacaataaacaggcaactacagtgactttcctatttcttttgagagacacctcgcactcactgaattatcagataaaaaggaaaagaaaaagagcaaataacattaataaccatagttaccttttcctataggtttaccatttgccaggccctgtacacttaacactaacaagatgtctgtgaggtagtaatactattatcctcattttatggctgaaaaaactgaagcatagagaagttagtaatttgcattgtcacacagttacaagttacaaggtcaggactaaacacaaaacatatgtaataccaaagtccaggcacttaaktgctccttcatactgccttataggccaaatagtctaaagttttagatagatagaataagttttttatatctatctatattacacagcgtggtgatgatagttaatatattg

SEQ ID NO: 829420 - DNA, 533 bp, Homo sapiens
gtccttcatgaaataatgactattaataagtagtgtctattgtgtggaacaaccttgcagagtagctattattatccctacttcacagataaagggtgatgggcctrgagaaaatgtccatcctccctaaataggagccacagagaggctgtgttctcacagctcctcccaatacctactttctttcttggccagcatagaggcagctgtttacagctggctttggcccccaaccctacaaggccaggtggactcctttccctttgcagatgctactgaccccagcatcatcaagtcaaccccaagtcactgaagcttaactttttggaggcttggagaacaaataaataacatgtctgacctcccaggtaaaattgttagaggtgggatttgaacccaggtcgtctgaccccagagctcatgctctctaccccattctcgctctccctttggtgcagtttcctgttatggctggactgctccttcccaggactagactctcctggacagatgctgtcatctgcttaacaggc

SEQ ID NO: 829421 - DNA, 562 bp, Homo sapiens
ccttttggctcctgtgtgtgcatgctcgcatgtgtgtttgtgttttcacttcgattttgtaagtgaaaagcaaaatgatttgtaaataggtacatctgtctaaatgatcagcctggtccatatttgtcmtgaaaaaccaactggcagttcagttttaagacagacaacacacactagaaaaggaaagaactgggatccgggaaacctatgccagttccatctctggatattagctatttgtgggatcttgacaagtcttttaatctgtttgaatctaagtttccttaagtatagaacaaattatccagctacattatatctaagtccctatttgctctaaaattctgtaattctaaggatgccatctgtataaatgttatctgttcttttgttaagaacagtacttgtaataagaaaactgaatacacagagaaatacataaacacgttgccagacaaaatacaggtaactcaactacattttaaatttcagatacacaataaacaaatttcagacattctaaaaatattagttgtgtacatgtgaaattcaaatttaactg

SEQ ID NO: 829422 - DNA, 596 bp, Homo sapiens
ttgcatagtctgcaaagcttaggtaagagctgcactagcaatgaaagacttttaaagttcaaggctgcttaagggactttgtcaacatcctactgattttttaaatgaatttcrgtatctaatttgaagatatcaaggcacttctgtaataaattttggtaaaacatgataaaacctgaagagtctgttataaagtttcctctgtttgctgttcataaccttgcctcacgcaagttcagatggatagataacatctgaataactcacaagccttagtgagaatctagttgctccttatgacattgttgctgagaaagaacacacaggaaaatacatcacatactcatgtccctgctcccacatagactgtggggtgtctgacctagtgtaaaagatggaaataaataactgcatgatctcactcaaggatactttattttcaattagcagtacctaacacaaaataagaggatgcaaaagaaaaaaaattagttttacctcttacaactattggactagactaacctggagttaactctaaccctaaagctaaaagaaggcatggggtgctcagaagcaggtgaagaatcctaaag

SEQ ID NO: 829423 - DNA, 472 bp, Homo sapiens
gatgggcccgagttgggggcaacaccccggggtgggtgatgctgaatggccccgccaagattgggccctggttaatgcatgcggggtgagggtcgcggtgcgcagaatttatgcaacctggggtgctggcccatgtgcttaccctggatgcttacttaatctactgagtaatgttctggcggagggggagcggggcagagctttgcaagacaggatgggtgagtttattaagggggttgacttactgggattactagagaagaaaaaggtttgactagagaggctagaaatggagcatggagattgtgggtagaacattcccttgaccctctcgccaacacatgccyacacaccaggttagcagtttacctctttgtaaatctgaagcggtggtagtagtgatggtggaaggagtgaataagggcctaacctggctagctttctgtttgcctgtcttgcaaatggtccagca

SEQ ID NO: 829424 - DNA, 621 bp, Homo sapiens
ataatagtgataaaaatccaatgtctttaaacattccagttaccaaattctctagtataggaytcagaaactatagcgcaggagtcaaatccaacctggtacctgcttttgtaaataaagttttactagaattacagctgttctcattcatttatgtattgtttatggctgctttttcactaatatggcatagtcatgtcattgtgatagaggatgtatggaccacaaaacccaaaatatttgctatctgactttctacgaatcttaaaagtggatgctatttaagctcagaagacatttcaacatcctagtagaaagtatctgtcaaatgataaaataactggtgattttgaaatggctgggcttttcttccctataattttataacttctacacagataactccatatttctccatttaaggcagggcaccagcaatatttgctaatactaattttagctgggctgtggaatcaaaagaaaagtataagatgggagctccaaggacagctttcactgcaggatgacgatgattcttagctgttaaattacccacacatggacagtcttgtgcaggcatcttcttactctttgggtgatattaaatctgatgctgaacaa

SEQ ID NO: 829425 - DNA, 580 bp, Homo sapiens
tcatcttgtttgataagatagctcatcatttttatacacaaagtcattatatcccatatggttttgaaaagccctctgaatattacccctcatctccgcttcggtggtatctaaaaaaatgtttaccattttctagcctgttatcctaattttatagaaaaatacaatttttcagaatatgtagctcctaaaagaaagtgaaattcacgtggcagtgttagaaaccgaaactgatatatacacggtaaaaaaatctagctattttccattttgctgggtaaaaactgcccccccccaccacaaaatattatcaacatctgtaacccgatatctacactgagtaactatgaacttaagcatgaatttttagtgaattgttattcctcaatatggaaaagccagtcttatgtaaatctctaaatactgctaaagtaaaaagtttttataaaatccataaacgttacttgygtacaataagcaagatatgttttgtgaaatttctcaatagagtcatatatagcatgtggccactctagcagatctcctcggtctgtcattacctcaatgttatggaaatctt

SEQ ID NO: 829426 - DNA, 542 bp, Homo sapiens
aatatttatacttaaatattttgttgttgatgttattaaaaaccatattattctttacattctattccttttttattgctagtatataaaaatacaacttgtcaacttgtatattaatttttatcttgtmatcttgttaaactcatttataagttctacaagtttttgtagattttattgtatttccacatacatgatcatgtcatctacaaataaagacaatttttcatctgacttttaaacctggatgcaatatgtttctttttgttgttttattatactggctagaaactctcctaaaatattgaatagaagtgcttagagcaggcatccttaccttatttctgacattagaaaagaaaaatcaacttttactattaaatatgatgctaggtgtaggctgatcattgataccttatatcaggatgagaaaagttcattgtatttccacttagctgaataatatcaataacgaatgttgaatgttgtcattttttctgtttatattgcaattaggtgctttttaaacctataaatattta

SEQ ID NO: 829427 - DNA, 542 bp, Homo sapiens
tcaaggtctcaagggtgaagggaagggcctcacasaaaaaaaatcataaataagataatcaataaatggaagccagcattgttcatttgattagttcactcccttttggtgtggggggccaactaatagtttaaaagtcaatcaaaagtcttaaaatgaatgtgctcaagaagttaggcagggggataaattcctttcttctattttactgaaagttttaccaaagtattgtgaccatgtttaataaaagattaaaaaatgattaatcagcttcttcctctgccaataaccctcaaataagctcatgcagtacagcataggggatgacggatgtgtcaatcaatttgattgtgctaatcattatataatatatatgtatatccacttatcacatcatacttcttaaatatatataattcttatctttcaatgaaatattttaaaattataaagagaggggtctgatagaattgactaagctggtctctatgcaacacggcatatttattctcatgaaagcttcacagtttgccaaagtgtgg

SEQ ID NO: 829428 - DNA, 501 bp, Homo sapiens
acctaggttttaagccccgcatgcattaggtatttgtcttaacgctctccatccccttgccccccamcaccctacagacccagtgggtgatgttcccctccctgtgtctatgtgttctcattgttccactcccacttatgagtgagaacatgcggcatttggttttctgttcctgtgttagtagtttcctaagaatgatggcttccagcttcatccatgtccctgcaaaggacacgaattcattcttttttatggctgcatagtattccatggtgtatatgtgcaacattttctttatccagtctatcatttttgggcatttgggttggttccaagtctttgctattgtaaatagtgctgcaataaacatagctgtgcatgtgtctttatagcagaatgatttataatcctttgggtatatgcccagtaatgggattgctgggtcaaatggtatttctggttctagatcctgaggaatttccacactgtcttccacaatgg

SEQ ID NO: 829429 - DNA, 501 bp, Homo sapiens
acctaggttttaagccccgcatgcattaggtatttgtcttaacgctctccatccccttgccccccaacaccctacagacccagtgkgtgatgttcccctccctgtgtctatgtgttctcattgttccactcccacttatgagtgagaacatgcggcatttggttttctgttcctgtgttagtagtttcctaagaatgatggcttccagcttcatccatgtccctgcaaaggacacgaattcattcttttttatggctgcatagtattccatggtgtatatgtgcaacattttctttatccagtctatcatttttgggcatttgggttggttccaagtctttgctattgtaaatagtgctgcaataaacatagctgtgcatgtgtctttatagcagaatgatttataatcctttgggtatatgcccagtaatgggattgctgggtcaaatggtatttctggttctagatcctgaggaatttccacactgtcttccacaatgg

SEQ ID NO: 829430 - DNA, 638 bp, Homo sapiens
gcaggtggatcgcttgaggtccggagtttgagaccagctggcaaacatagtgaaaccccatctctactaaaaatacaaaaaattatctgggcatsgttgcaggtgcctgtaatcccagctacttgggaggctgaagcaggagaatagcttgaactccggagtaggcagaggttgcagtgagcctagattgtgccattgtactccagcctgggcaacaagagtgaaagtccatctaaaaaaaagaaaaaagagagaaaagaaaaagacatgggggaaatcttaaattaatactactaagtgaaataatccagtctaaagaggccacatactttatgaccccaactataagaaattctggaaaaggcaaactatggaaacagcagaaatagtcatttccaatagttgtgagtagggttgaatatatggagaacagaggatttttacagcagagaaaatactctgtaagatattaaactcatggttacatgtcataatactttttttccaagctcatggaatgcgccacaccaagagtgaacccccatgtaaacaatggatgttgagtgataaaaatgtttcaatgtaagttcatcaattgcaacaaagaagtcgctttagtgtatataattctaatttag

SEQ ID NO: 829431 - DNA, 469 bp, Homo sapiens
tgcattgaatctaaaaagagtttattttatttgacactgatacggttattagtcttctttaaaaattaagccattcagtctagtggctggggtgcaatccaaaatgtatgaagcaagagaggagcagctaatgtagagaactcttttaagaaacgtgtgggcagcataatagaaatgacgatgaaatgcagagaggattgtttgtttttaagctatagggatttatactacagggcaaaggaataatgaatgaaacaaggtacccaagcaaaaaaagcaacaagacccacagtacaaaggataagaattttctagtcacttggagagaaacattctttgttttcttattatgatagaaagaagaaattatyacaggatttctagaggtgtgctgatataaatatgagtgagttccggtttgaaggtttctatttctgtttaaaagatggcaaagaaaaagcccttctca

SEQ ID NO: 829432 - DNA, 545 bp, Homo sapiens
accaagaatgtaaccacacatgaacagaccctttcacaagatagtgcctgtctttccactcatttattattccaatgaaaactatttayaagttaatttctagtccccatcctatcattctccctagtaatcatttattgcccctcaacagaattctctttctccccactcccataacctgttttataaggatcaagcccccatttttttctgtaacctcaagacggtatcaaagcttctgtatctcattgggaagctggatcttcattctgaaggcccttgtatacatgtaaccgtaataggttcattgcccaatgcccacgcaagtcaatataccgagacacctggttggagcagagaaagaggtttaatcatagggtcactgaacaaggagatgggagaaaaactcaaacacatctccaggaggaatttggagttagggttattaagggttttggagtgggccagtgtggaggtcatcagttggtagaagagtgtagcgtgacatcatgggacagggagatgaagcagctattcgctcatgc

SEQ ID NO: 829433 - DNA, 667 bp, Homo sapiens
gtttgctcatcgtttaaggaactcaagaatctaaagaatccattcagtcttccctggttcggacatgaagaacacggggctcttcacatatatattttttttattccaggcagtcttctttgacttayaggtggctgggatcagttgatacaaaaagacgtagctagaaagtcaatctcaatcattctctctctttcactctatctctgtctctccctctatctctctatctctttctctctgtgtctctctctctgtctttgtgtgtgtgggtgagtgagcctgaagacaagaagacacacacacactgtgtgtgtgtgtgtatgtgagagagagagggagagagagagagagagagcatcttcagacttcatgaaattcaacttttctgaagattaatttctcagcagaatgtatgtttcattctgggctctgatgattgttagtccactgtgaattgcctcacaagaaacaaatttaaaagttcaaaagcggctgtcaccttcgtgaacagacttctggtgagtttttggcttgtttccatcacactctcttcagcctccatatgacgatttgttacagaatcctggtacttctacattccggaaaggaaaaggaaattctccaggcgtaggagcaaaatctcggggatgtaaataggacttca

SEQ ID NO: 829434 - DNA, 610 bp, Homo sapiens
tcctcttgtttcttaatttactagtttcctatctgcctctcccactagaataaaagcttcatgagaatagtcttagtcacagctctakcctcatgtctgaaacagtgtctggcacacagtaaacactcagtaatatatgttggatgttggatgaatgaaaggtggctaacctccaagtttcacttaatctctctcaatcttcatttcctagctacaaagtggcattataataaaaattacatttagtccagaggattggtttaagaattgaataacagtgcatgcaaaaacatacctcataggccaggcacaatggctcaggcctgtaattcatcactttgggaggctgaggtgggaggatctcttgaggccaggagttcgagaccagcctgggcaacgtagtaagaccctgtctctacaaaaaactaaattttaaaaattagctgggcatggttggtgcatgcctgtagtcctagctactggggaggctgagctgggaggactgcttgaggccaggagttcgaggctgcagtgagctatgatctcaacagaatgacaccctgtctcttaaaaaaaaaaagttcatagtagacattcaataaatgttaat

SEQ ID NO: 829435 - DNA, 553 bp, Homo sapiens
gaaagaagccaatctcaaaagaccacgtattgtattattccatgtatataacatgtccagaataggcacacccatagtaatggaaattagattaktgggtgccaggggtcagggggagtgagggatgggaattaactactaatgtgtacagattttcttgtggggttatgaaaatgctctggaattagatagtgatgatggttgcacaaccttgtgaataaaaacttttattgtatgtaaattacatcacaaaaagatttttttatggttttaaagaaagcaagattagatacattagatacatttcaagaaagaagtgtttagctctgtcaaatgctgacactgtaggatgaagactgaaaaaaggtacattctttttacaagccagatgtcactggggaccttggctcaagcaatattagttggggaaaccatgcgggaagaacatcaggcaggagtgagctgaagagtgaatgagtggaataaatacacacatccaactttgctccctcaaactctactaataaagagattttttagaaggcataaagct

SEQ ID NO: 829436 - DNA, 602 bp, Homo sapiens
ccaaagtaagttgcatctgactaaggtttaagaaatttaagtgatttttcgcttttagaaatatttatgttttagtgttatcttttagaaagtatagaaattggcttatatgcaacattgtcactctgctgaagtgagctacaagaaaacagtagtggaactatccttgtctctggatctctagcttctgtgcttctgcctttctgcctcaaaccacaaatacagatatcgtaactacattttctgttttttcttttttacttttttttttttctttgacacagggtctcactctgttgcccaggctggagtgcagtggcacaatctcggctcactgcaatttccacttcccaggctcaggtgatcctcccacttcagcctcccaagtagctgggactacaggcactcaccaccacgcccagctaatttttatattttttgtagagatgaagtttcactatgtggcccaagtctcaaactcctgggctcaagtgatccactcacctcrgcctcccaaattcctgtgattacaggcatcagccactgcgcctggccaactacattttcatatccccgcacaaccattatagagtgggctttaa

SEQ ID NO: 829437 - DNA, 600 bp, Homo sapiens
ttaaagtcattacttgtgtacctcttctttttgctctttcccctccaaaagctttcagaaactatggtaatcaaaaacatgtaacatgcccttgtgacatgaraacagaacagttcctctttcttcttgaaggtaatctgttgaagtgctgacaccttctatgaggagatcctttgcactggggaatttataaagcaatttcatttagcttaatataaaatgttaagcgagagctaagatggagcatttctagaacccttttggacttatgtttcatttatattatcaattaacaaactgtaaatggcttctttattttaatggaagtgctttgttgcttagaaaacaacaactggccactgagtataaccggaaacaagttctccgacactgctttacagaatggcagcattggcatggcgccgagctcctgaagagagagctggctctcacaaaagaggaaactaggaagaagatggatgcactgctgcaggcagcatcactggggaaactcagtgccaatgggttatcaggcatcagtctacctgaggaggcaacagccatggtgggtccaccagtaaaaaatggacaggtacgttg

SEQ ID NO: 829438 - DNA, 651 bp, Homo sapiens
cacttgtcctttttaaagtttactatgctaaaaatatataggatatatttgaacagacgatctctagaatgttcctttggatgatcccactgtgataaatgctatagtgaatgactagcaatccaggaaaagtcaaagaagggaataaaaattctcaaaataattcctttgatctaagaagtagctcgtagagaataaaccaggtgtatgtatgtatgtgtgtgggtgggtggagataacacacatacagactagtcgagcttcctgtcctaaatattacactaatctggctcattcgttcaccagacttgtcttactcaaggaccaagtatctgattgctgatatagctcgtggtaccttccgaggtacctggaagtctggaagaatttcaactaccttcctacgaagttgctgtcgcctttcttcttttactactttcctctttcataaattttacaaacttcttccatgtgcgaagggggatccacaggatcctcctttaagaataaagaaggaraaaagtgagatgttgagaaaaagttggctttccatctatagcacattaagaactctataaaaataattcttatgttaataaaatgctgtataaaaggtgtggaaatcacactcgggattatgacagagtgaaa

SEQ ID NO: 829439 - DNA, 500 bp, Homo sapiens
aaccaaggttgcctctcatgctttgtctctttcaaacgtgttcccaccatgtgatggcatccatcatattatgatgcaacatgagaccctggccggatgagaccacctgatcttgaactttccatcctccagaaccatgagccaaataaatctcctttctatataaattacccagtctaggtgttctgttatagcaacagaaaacagggtaagacagaaaattgggaccaagaagtagggttgttgctattacaatacctgaaaatgtggtagcagctttggaactgggtgatggttagaggctggaagaatttggaggagcaggctataaaaagcctagattgctataaatgggtcattaagagaaattctggtgatggcttagaaaacaagaagattagggaaagtctgaaacttcttagagattacttaagtggttgtgaacagaacgtctgtagaaatgtgsacagtaaaggccattctgaagaggtctctgatga

SEQ ID NO: 829440 - DNA, 497 bp, Homo sapiens
gaggtggtagagtcacagtcggagcccaaggccccaacgactctggtatactgaatcccaaaagagagatggtgtactgtgttggtcaggtggaacactgctcaagttttggctgcactaggaatctgaagcaggagaatcacagttctgctctagggtgcttcactgatcccgtagaggttacagagacaatgatgtcacatagatgggttaagaccaaaatgcaaatagcgctaatacagggaataagtgccaggagagagatatctatagataaacgcaatgaggatttaaacagttaaaggtcatgtgagggtggaaaggtagaggtggagtttgattggggctttggaggaaaaataatttcagaagtcagaaattcatctaagagtcttcaaattcctgtgctgtcttacgaaataagtagtttggttgagcatgtrtctgaagaggaagagtgagaagtaaagtttaaaggtagataggggcttggatca

SEQ ID NO: 829441 - DNA, 575 bp, Homo sapiens
ttatgctggagtggccgggcacagtggctcaagcttgtaatcccagcactttgggagactgaggtgggtggatcacctgaggtcaggagttcaagaccagcctggccaacaaggtgaaatcccgtctctactaaaaatacaaaaaattagctgggcatggtggcgtgtgcctgtaatcccagctactcaggaggctgagggaggagaatcacttgaacccgggagtggaggttgcagtgagccgagatcacgccattgcactccagcctgggtaacaagaatgaaactccatctcaaaaaaaaaaaaaaaattatgctggagtacctgtagccagatgccagggtattttggggcttggaagcactgcaaatggatttctagttcaggttgagcttctgtgaggagggatgcactggggctgatagaaagtttctagctaaatacctgcatcaagccaaatttaagtcccctgtggtcccagccgtcttgcaggacagatccsccatggctttccctggagatgatggctgcgatgacagcagggtccacgcaatgtctctgcccgacttttttg

SEQ ID NO: 829442 - DNA, 542 bp, Homo sapiens
aattggcctgaggcaggaatgggactgcctcttccattgtaacagaaagaaaagagaaaaaaatcagatagcaatgcagttcagtgtatagagttgataggagaaaactgagggagttatctaatgatttttaagtcctttgtgaaacaggaggtcaaatcatgtgctgagagtaaaaactacgtggacttagaaaacggagagcatgtggaaaagctacccggtagaattggagagacagctgaaagagagccaaaaagatgagtggggtttacatatggactagttgagattggagtccataaatgttcatttggaggtattgaaatgctggggtctgacacggcaacctaagtacagacaaggagaaaacagagggctggagtggtccagggctgaggtgcagctctgcgggggccatgcaaggaggatacasggacaagtgagatggagtttggcaaaggaatggcttaagtaatggcaagtggattggaaatgaagggaagaaagtaaggggctatcatggggccagtgggaagatt

SEQ ID NO: 829443 - DNA, 566 bp, Homo sapiens
ttcagttttctgcatatggctagccagttttcccaacatcatttatgaagtagagaatcctttccccattgcttgtttttgtcaggtttgtcaaagatcagatggttgtagatgtgtggcgttrtttctgaggcctctgttctgttccattggtatatatatattggtatatatctgttttggtaccactaccatgctgttttgattactgtagccttgtagtatagtttgaagtcaggtagcatgatccctccagcttcgttctttttgcttaggattgtcttggctatatggggtcttttttggttccatgtgaaatttaaggaagttttttctaattttgtgaagaaagtagatggggacagcattgaatctataaaatactgtgggcagtatggccattttcacaatattgattcttctgatccatgagcatggaatgtttttccatttgtttgtgtcctctcttatttctttgagcagtggtttgtagttctccttgaagaggtccttcccatcacttgtaagttgtattcctaggtatgttattatttttgtagcaattg

SEQ ID NO: 829444 - DNA, 645 bp, Homo sapiens
ctcctccagcggtccaacagcaagctatttttcttacacattttttttaattaggggaattggaaaatactctgttgtgatgctatatcctggctgcctcctggagtccttgctgctagaattcataatatgagatgcagtttctcagcttgtgttatctttagaagaacttcagtgtggggaagcaattcacttattcattggaggaagatgtgacaggctgcaattgatagtatttacatcaagatggcaagactgtctgaatcacaacaccaattgtgttctttgaaaacagccggattttctcagtggcaaggagcaaacagagcagaagataacagagaattgggtaagggaatgggtgaatctgatagaaatagttaagaatgaactcatttactattttatttcattacatgttccttagggcaggagatgcctcacttattcaagagatgtttatctgcctggaatagactgtccctctcatcttttctttccttccccacctttggtgtttctgycttgattgacatttctacctggcggttggagaaaacaaagaagagcttaaatgcatcaactttgcaactcattagaaattagcagctcattggcatgttctgcatatgtatctcagaactt

SEQ ID NO: 829445 - DNA, 575 bp, Homo sapiens
ttagagcagcactgtgcaatcggactgtctgcaatgataaaaatgttctgtatctgcaccatgcaatataatagccacttgacacaggtgtctactgaacacttgaaatgtggctagtgctactgaagaaccaaatgtgtacttttatttaattttaattaataaatgtagataaccacatctcaccatattggacagcacagacatagtgttttctcatctataaagtggagattgtaagatttcttctctcttatattattttttcttttattgagatggagtttcactcttatcacccaggctggagtgcagtagcctgatctcggctcactgcaagctccgcctcccgggttcaagcgattctcctgcctcagcccgccgagtagctgggattacaggcacccgccaccacccctggctaatttttttgtatttttagtagagacgggkttttatcatgttgggccaggctggtctcaaactcgtgacctcaggtgatctgcccgtctcagcctcccaaagtgctaggattacaggcgtgagccaccgcacccagccatctcttacattat

SEQ ID NO: 829446 - DNA, 627 bp, Homo sapiens
aagttcatctctcatattcttgtgtaggcaaattacttagagcagcactgtgcaatcggactgtctgcaatgataaaaatgttctgtatctgcaccatgcaatataatagccacttgacacaggtgtctactgaacacttgaaatgtggctagtgctactgaagaaccaaatgtgtacttttatttaattttaattaataaatgtagataaccacatctcaccatattggacagcacagacatagtgttttctcatctataaagtggagattgtaagatttcttctctcttatattattttttcttttattgagatggagtttcactcttatcacccaggctggagtgcagtagcctgatctcggctcactgcaagctccgcctcccgggttcaagcgattctcctgcctcagcccgccgagtagctgggattacaggcacccgccaccacccctggctaatttttttgtatttttagtagagacgggtttttatcatgttgggccaggctggtctcaaactcgtgacctcaggtgatctgccygtctcagcctcccaaagtgctaggattacaggcgtgagccaccgcacccagccatctcttacattattaaacaatgtagtaag

SEQ ID NO: 829447 - DNA, 579 bp, Homo sapiens
gggctttttagtttaattagatcccatttgtcaattttggcttttgttgtaattgcttttggcattttcatcatggaatctttgcccatgcctatgtcctgaatggtattgcctagatttccttctagggtttttatagtttggggttttgcatttaagtatttaatccatcttgagataatttttgtatatggtataagaaagggtccactttcaattttctgcatatggctagccagaactcccagcaccatttattaaatagggagtcatttcctcattgcttgtttttgttggatttttcagagatcagatggttgcctgtgtgcagtcttagaagagttctctattccattgcattggtctatgtgtctatttttgtaccagtaccatgctgttttggttactgcagcattgtagtatagtttgaagtcaggtagtgtgatgyctccagctttgttctatttgcttaggattgtcttggctatatgggctcctttttggttccatgtgaattttaaagtagtgttttctatttctgtgaagaatgtaaattgtaatttaatgggaatagcattt

SEQ ID NO: 829448 - DNA, 579 bp, Homo sapiens
gggctttttagtttaattagatcccatttgtcaattttggcttttgttgtaattgcttttggcattttcatcatggaatctttgcccatgcctatgtcctgaatggtattgcctagatttccttctagggtttttatagtttggggttttgcatttaagtatttaatccatcttgagataatttttgtatatggtataagaaagggtccactttcaattttctgcatatggctagccagaactcccagcaccatttattaaatagggagtcatttcctcattgcttgtttttgttggatttttcagagatcagatggttgcctgtgtgcagtcttagaagagttctctattccattgcattggtctatgtgtctatttttgtaccagtaccatgctgttttggttactgcagcattgtagtatagtttgaagtcaggtagtgtgatgtctccagctttgttctatttgcttaggatygtcttggctatatgggctcctttttggttccatgtgaattttaaagtagtgttttctatttctgtgaagaatgtaaattgtaatttaatgggaatagcattt

SEQ ID NO: 829449 - DNA, 630 bp, Homo sapiens
cctaatgtttttgttgttgtatctttggtatcaggatgatgctggcctcatagaatgacttaaggaagagttcgtccttttcaattttttggaatagtttcaatagaaatggtaccarctcttctctgtacctctggtagagtttagctgtgaatctttctggtccttggctttttctggttggtaggctatctattactgcttcaacttcagatcttgttattggtctattcaggaattcagtttcttcctgattcagtcttgggagggtgtatgtgtccaagaatttatccatttctcctaggttttctagtttatgtgcatagaagtgtttatggtattgtctgatgattgtatttctgtggggtcagtggtgatattccctttaacattttttactgtgtctatttgatcttctctcttttcttctttattagtaaagctagcatctatctatttttttttcaaaacaccacctcctggattcattgatgttttgaaaggtttttagtctctctgtctccttcagtttggctctgattttgcttatttcttttcttctgctagctttggggtttgtttgctcttagttctctgttttttttagttaagatgttagtttgttaactt

SEQ ID NO: 829450 - DNA, 630 bp, Homo sapiens
cctaatgtttttgttgttgtatctttggtatcaggatgatgctggcctcatagaatgacttaaggaagagttcgtccttttcaattttttggaatagtttcaatagaaatggtaccaactcttctctgtacctctggtagagtttagctgtgaatctttctggtccttggctttttctggttggtaggctatctattactgcttcaacttcagatcttgttattggtctattcaggaattcagtttcttcctgattcagtcttgggagggtgtatgtgtccaagaatttatccatttctcctaggttttctagtttatgtgcatagaagtgtttatggtattgtctgatgattgtatttctgtggggtcagtggtgatattccctttaacattttttactgtgtctatttgatcttctctcttttcttctttattagtaaagctagcatctatctatttttttttcaaaacaccacctcctggattcattgatgttttgaaaggtttttagtctctctrtctccttcagtttggctctgattttgcttatttcttttcttctgctagctttggggtttgtttgctcttagttctctgttttttttagttaagatgttagtttgttaactt

SEQ ID NO: 829451 - DNA, 624 bp, Homo sapiens
ggaatcattcctgacccatcccttccctgttgatcttaccttttaagaataggtaacttctatttaacatcattaagmattcctgcgcatcgaatgttctgcaccaaaacacgaatcagcagcctatttcacattatttcaagtgagaaaaatacaatgagctacatcaaaacaaaagtccccaactaaatttctaaaggactaaagcatacctaaaatacagcaaaagttgttagattttgaaatctttcatggtaaataatatttatccaaaatatgcagggaaaaatgtacaataaaaattagacaattctctaatacatacttaccaagtgagttggacacttgaggcttggcaaatgttgagaaggaaaaagggtaaaagattaaagttatctttgtcacttactttagaaggtggtggtactgacaatttgggtaatgaatggccaatttcaggcaaattatcaaactcagaggaactggtagagattctctgtcatttgggtatttgtagagacatttgaaaagtcaaaacttgaaaaacagatttgatatgtttagataaaaaatgcaaaatcgatttttatttacatttccattattttttgaacaaagctataa

SEQ ID NO: 829452 - DNA, 483 bp, Homo sapiens
ccctctgggacctgccaggagccggctctccaggctgcccggctgmcaagtacctaaagcaggtagacttcagccgctatgacttcttcctgttggtctccccccgccgctgcggggccgtcgagacccgcctggccgctgagatcctgtgccagggcaagaagttctactttgtgcgcaccaaggtggacgaggacctggcggccacgcgcacccagcggccgtcgggcttcagagaggccgctgtcctgcaggagatccgagaccactgtgccgagcggctgcgggaggccggcgtggctgaccctcgcatcttcctggtgtccaacctctcgccggcccgctacgactttcccacgctggtgtccacctgggagcacgacctgccctcccaccggcgccacgctggcctgctgtcgctccccgacatctcgctggaggccttgcagaagaagaaggccatgcttcaagagcaagtcctca

SEQ ID NO: 829453 - DNA, 495 bp, Homo sapiens
agcacgatctgcgccgcctgccgcccggtcagcgccacgcgccagtcccgcagcccgttgtcggtcatgaacagctgccggkaaggggccaagaagggaggggtcaggagcaggtcaggcgcaggtcaggcggcggcccgcgcctgcctgcgccctgagataagtggggtgtgccgcctggccaggagggagggagtgcagggcgggagagggatagggagggagcgggacaggacttgaggaagacatctttccactttttcctccttccccaccacccaccccactagtttcagcccacttccagcctttgaacactgactgagcgccgactgtgtgcctgacattgttctatgtgctaaggatacacagtgaacccaacagacccccctgcctccctagagcttgcattccacatgcctggagctcgctcctactcccctttcggttgacacgcgtaataactgtaataataatatcagcaataacaaagcc

SEQ ID NO: 829454 - DNA, 495 bp, Homo sapiens
agcacgatctgcgccgcctgccgcccggtcagcgccacgcgccagtcccgcagcccgttgtcggtcatgaacagctgccgggarggggccaagaagggaggggtcaggagcaggtcaggcgcaggtcaggcggcggcccgcgcctgcctgcgccctgagataagtggggtgtgccgcctggccaggagggagggagtgcagggcgggagagggatagggagggagcgggacaggacttgaggaagacatctttccactttttcctccttccccaccacccaccccactagtttcagcccacttccagcctttgaacactgactgagcgccgactgtgtgcctgacattgttctatgtgctaaggatacacagtgaacccaacagacccccctgcctccctagagcttgcattccacatgcctggagctcgctcctactcccctttcggttgacacgcgtaataactgtaataataatatcagcaataacaaagcc

SEQ ID NO: 829455 - DNA, 615 bp, Homo sapiens
gccaataatccccattttacatgcaaagttatgataggagagggggaagaggggaaagggaatggagcaacaggatctggggcaatgggacaataggggatgggatgtgtctgggtgagacccaaggtggggtatggatggggagagctcctgggtctggggcaagagggaggttattggcacagagatagggtgattaggagtgggcacccctgggaccggaccaggtgcagtggctcaagcccgtaatcctagcactttgggaggacaaggtgggcagactgcttgagctcagtagttggagaccagcctggacaacatagtgaaaccccgtttctactaaaatacaaaaaaattagctgggcgtggtggcatctgcctgtagtcacagctacttgggaggctgaggcatgagaattgtttgaacccaggaggtggaggttgcagtgagcagagatcgtgccactccactctagcctgggcaacagagcaagaccttgtctcaaaaaaaaaaaaaaaaaaaaaaaaaaaaggagtgggcagccctaggaccttaggttgcttgrggactggattggggatgccatgtcggagcacagagatctgggaagctga

SEQ ID NO: 829456 - DNA, 612 bp, Homo sapiens
tgcagggaagacctacaaggccaactaattaaaatatttaaaaacattcatttttacccacaaggaaatcgtaggtttgagccacaacatttaaccagatttcttggagctcaaaggcagttctgcagtcaaatttatactcttttaactacacgcaaattaagggacagatgatgcagacatttctaggaaaagagtggtaacttctaggtcatcaccatggaaatgggtggtaacttccgggtattgccatggcaatggtaaactgacatggcacactggcgggagtgtcttatggaaagctgcttccacccaggccctgttttagctggtcctcaattaggtctggtgtctgagccccacctccggaatcaagtcccacctccgacctcataaagatattaaggacactgtaagaataaattcctgccccattcaggagatgtcttgtgtaattacgttactatgaggtagctggctggtctccttgagaagcagttgcatatcaagtgctcaggatcagcctctgctgctagcagattgggtactcagtagcggyggtaacttgattagtttcagtgaaaggtagcccctgcatggtgccctcccaca

SEQ ID NO: 829457 - DNA, 517 bp, Homo sapiens
tctgattacagattatagatgtgagccacygtgcctggctggtattacagatgtgtaattgttgggattacagatgtgagccaccgtgcctggctggtatcagcttttctttgtgcccctggtagaattcagctgtgaatccatctggtcctgggctttttgttgttgttgttgttgataggctgtttattactgtctcagtttcagaactcgttattggtctattcagtgtttcgatttcttcctggttcagtcttgggagggtgtatgtgtccaggaatttatcagtttcttctggattttctattttatgtgcatagagatgtttatagtattctcaaatggtagtttgtatttctgtgggatcagtggtgatgtctcccttatcatttctaattgtgtttatttgattcttctcttttttcttctttattagtctatcttgcagtctatcaattttattgatttttttttcaaaaatcagctcctggacttgttcattttttgaaggggtttt

SEQ ID NO: 829458 - DNA, 615 bp, Homo sapiens
tttcttatctattccatttttcatttcattgtattttttagctccagtttgatatttgatttctgtttgatatgttctataatttcaatctctcaytaaatttatcattttggtcattttattgtttgcctgatttgattgaattgtttctctgtattttcttgaagttcactgagtttccttaaaacaattattttgaattgtctgtcaggcagttcatatatctccattcctttggtatcagctactaagagatcactgtattctttttttttttcttttttttttttttattgatcattcttgggtgtttctcacagagggggatttggcagggtcataggacaatagtggagggaaggtcagcagataaacaagtgaacaaaggtctctggttttcctaggcagaggaccctgcggccttccgcagtgtttgtgtccctgggtacttgagattagggagtggtgatgactctcaatgagcacgctgcctttaagcatctgtttaacaaagcacatcttgcaccacccttaatccatttaaccctgagtggacacagcacatgtttcagagagcacagggttgggggtaaggtcacagatcaacaggatccc

SEQ ID NO: 829459 - DNA, 527 bp, Homo sapiens
tactaatctctatcacggaaattcatgtctttgctagtataatatatgatgcataataaagattagtccattttctccatacaattctactctgtgtatttcattaccgttttctcaaaaaattccatatttaaatttcacaattgtttttactatacgtatggttacttgagtgatgaaagacaatatttggtaattttttgttggtatttttactgcggtgattgtttatgctgagaccttattgaatagttttggatgaacatacagatataagaaagaatagcttagtccagtttctttgaatatcacaatcactatactgatattgacgcactccacctaggctcactcagattttacttgtactcatgtctgtgtatacatgtacttacttccaaacatttttcactatttkcatcatttaaaagtggcttctagtatattcacaatattgtgcaaccatcaatgcgatgtaatactagttctatacaattttagtgcatgtgtaggttgctgtatccacc

SEQ ID NO: 829460 - DNA, 639 bp, Homo sapiens
aataccgtgtgtttggggcatatttctgcagtaaattcttggaaagaatgacaccagtgtgatatactatagttctcaaccagacctatttctaactgctaatttcttttaaagaacttttatgaaagatgacgttaatcatcatagaaaagttattttgagcaacatctttaaattaaactagtctgttcccatgtaatttaacaaatcaatcagtttacaagggaatctagttagacccaggagtaagggcattttgtagtattaacataggacagcaagcacagttccttctgccaacactacttcctgcacccccactgcgtgatgaacaatagacgctgaagtctctgctgctttctgtttggtttggttttgcctgtgtgatgctggaatgtctataaagagacacgcgctgtttgaacttagctatttgaaatatgttctgaaaaataagtaggctctcttggaaagccactctaattttacaaaaagatcagcgtgggactagaatatatgtgcccaaatatatgatgacatatatttttattttactgtkaatactaaacttcccaaatatagtgttgtagcctcgtaaaaatggcacagaagtaagttttctgtcttacactggtgaat

SEQ ID NO: 829461 - DNA, 568 bp, Homo sapiens
gagaaaatacctgaaatcacatatmcgacaaaatgcttatagtctgcttttgcactgttataaaacgattcctgaggctgagtaatttatagggaaaggaggtttaattggcttaggttctacaggaagcatggtgctggcatctgcttctgatgagagcctgggaagctcccaatcatggcggaaggcaaaggggaagcaggcccatcacatgggggagcaggcacctcacacagcaagagaaggagtgagagagagaagggggacatcccagattgttttaaacaatcagatctcacgtgaactaactgagcaggaaatcactcttcactaaggggatgctgctttgccactcatgggggttctgcccccagtatacacaatcacctcccacaaggccacaccctctaacgttaggaatcacatttcaatatgaggtttgaaggggacaaacatccaaaccatatcagtactagtatctagaaaacataaagaacactcaaaactcaacagtaagcaaaaaatcaattagaaagcaagcaaaagacatgatgagatatttcaccaa

SEQ ID NO: 829462 - DNA, 464 bp, Homo sapiens
aattctttcctggaggaagccgagaacccatgtggcctctctggccgaatcccaattttggggttcacccagtaataaaccaaagagttgttttgttttttagactttagacaaactggataaagaatatcaggaggaaatgatttttccattgctaaagataaacaatatcctcaagttcagtgatattaaaaaaagggcaataagaaatttacatcagacagaaaagtacagagattaagagcaggggtttaaatcgtcactcccccacctactagccatgtgaacttggagaaagtatttaaactttatgggcttctgcttcctcttctgtacgatgagggtaatagttcccactcgtgatgactaagcaagtttatacatgtggagcacttagaacagcatctaaaatrtaagtactcagtaaataatagctgactcaagtttataattaagaaggctaa

SEQ ID NO: 829463 - DNA, 650 bp, Homo sapiens
gcacaaacccagacagtgaagactacaataaatacctaactcttcaatgcccagacatagacaaatatctacaaggatgaagaccatccaggaaaacatgacctcgcccaaagaactaaggcaccagggccaggygcggtggctcacgcctgtaatcccagcactttgggaggcagaggcgggcggatcacgaggtcaggagatcaagaccatcctggctaacacagcgaaaccccgtctctactaaaaatacaaaaaattagccgggcgtggtggcgggcgcctgtagtcccagctactcgggaggctgaggcaggagaatggcgtgaacccaggaggtggagcttgcaatgagccgagattgtgccactgcactccagcctgggcggacagagcgagactctgtctcaaaaaaaaaaaaaaaaaaagaactaagacaccagggaccattcctggaaaaaaacagagatatgtgacctttcagacaaagaattcaaaagagctgtggtaaggaaactcaaagaaattgaagataacacagagaaggaattgataattctatcagataaatgtaacaaagagactgaaataactaaaaagaattatgcagaaactaaaaatggaattggcatactgaagaatgcatcaga

SEQ ID NO: 829464 - DNA, 611 bp, Homo sapiens
ctttttctaccatagtggctcccagctcagatacctagttatttcttaaaaatttgctctcaaacttgacattaaaaaagagagagaaaaagagaaacaacattctggcatttagaaagcagcatytatgcagctacgcaccaggtagcattcccaagtatgccccttggaactggtgttgtaggatgttaacaggttgtattttgcagaaaaaataaggagttgtgtgattaaacacatttagaaattctaagttaaacacaactaaatacattttttactctgtaagaacatccagaaactttaatactggtaattttttttctgattctctaaaaggagatatattttgcataagggcccaaattttggctatgtgagcttttctagaagaaacaactcttcataattaagctcctggatatactggtttgggaaactctgccgaaaggggctgcctccaagattttggtaccgaaggtgacttctttttcctctttctataagcactgttcaaagaggtggactaatggttttaaaatctaggataattgatcttaaatctaaatgaaattcctctcagatttggtctgtgggttgactgagttccc

SEQ ID NO: 829465 - DNA, 669 bp, Homo sapiens
aaagttttccttaattcgttagtcatcaccttagcctctgcatttaaactgggggaaggctttttcatgaaatacttagaactgctaaggagaataaatttgcctctggcttttgctatacattttctccaggttgggagaaactagagaagtgtactagattgttcagagaaagtaagtctacaagtgctgattttgttaacattagacaatgcccacatgtggatcaacagggactgtgggttggcagacttttgctctaagatggctgctttccccaacatgtggcaatcacctgatacggcataattgcttttaaacatgaaagagttgtgctgtagaaatagatctccaacttgttaaagtttatatctagactgttttcagttgggagtgatgtaccaaagtgggagaaaggcaccaacaaggatgtttttcaaggcaggaaacaggagatatcaaccaggacccaccatgtttgacaaggaaaatatatttatcatttcaacaaacaaatgtgcccattagaatcagaatctggaggaaagtagtatacattgtggtttcaataaaccayggtaaagagttgtaataaagccagttcatgatgaaattttgtacacttactttttgaacaaacctcacagtttcatctagattgtgccccag

SEQ ID NO: 829466 - DNA, 526 bp, Homo sapiens
ttacaacactcaagtgccctaaaagtgctgtgcaccctgactgacagctcatgtgtaagacagtctgtgctttggtcaytgaaattcacaagggttcagggatgtccccagacttatcgtaatctttatcagcccaaatgaaggggagagcttggatggtggtgaaacttgcaaaacctagttttaccttacttgttgagtcaaacccatgttctcttcatttgcaagctgccctcctcaagttttcctcctaaagattatgttgtagtttcctatttgcatctcaaaccgcaactctctacctagttttcaagaagttcactgatgcgactccaatttatcagccttatttcttaatatcagcctattgagagacagccacactccaagtcaaccttctaaacaaaacaacttgctcattcctcctctgggcttttgcatttgccatttatcccaacttgaattccatctctcttcatgattactattccacatacactaatcctgaaaaacctgattgcaaact

SEQ ID NO: 829467 - DNA, 526 bp, Homo sapiens
ttacaacactcaagtgccctaaaagtgctgtgcaccctgactgacagctcatgtgtaagacagtctgtgctttggtcattgaaattcacaagggttcagggatgtccccagacttatcgtaatctttatcagcccaaatgaaggggagagcttggatggtggtgaaacttgcaaaacctagttttaccttacttgttgagtcaaacccatgttctcttcatttgcaagctgccctcctcaagttttcctcctaaagattatgttgtagtttcctatttgcatctcaaaccgcaactctctacctagttttcaagaagttcactgatgcgactccaatttatcagccttatttcttaatatcagcctattgagagacagccacactccaagtcaaccttctaaacaaaacaacttgctcattcctcctctgggcttttgcatttgccatttrtcccaacttgaattccatctctcttcatgattactattccacatacactaatcctgaaaaacctgattgcaaact

SEQ ID NO: 829468 - DNA, 603 bp, Homo sapiens
ctgataagaactctctgcagagtccgaaggtagtacagggcatcacatrgagagagggctgagcatgctagcttaagtctctcttgcagttcttatagccaccagtcctactctcatgataacccattaatccattaacccattaatttatgaatggattaattcacccatgagggtagaaccttcatgacccaattgtatcttaaagaccccagctctcaacactgccatattaaggattaaatttcaaatgaattttggaagggagaaattttcaaaccatagcaaacagtattgccattactggtgtttttaaaaatgcaggatctcaggccctatctcagacctgtgatccaaaatctgtacttttgcaagaaagtatatatgctcactaaaatttgagaactgccttaaaagcaactgaaatccacaagacaagaaatagctaaaaggaatcaagtttattaacttcaaaatagcgtatggcaattcctggtttatcatttccaaacaaagaaacttcaattattttcttggtatatcagattatttttatctgtcagtttattagagaatatcaatacaaattgagatgtttagaca

SEQ ID NO: 829469 - DNA, 656 bp, Homo sapiens
tctagctttttgatgttggtatccagtgcaataaattttcctgtgaacactgctttagctgtgtcccagagattctggtatgttgtctctttgttctcactggtatcaaaraacttgatttctgccttaatttcattatttacccaggaggcactcaagagaagattgttcaatttatgtgtagttgtgtggtattgggtgagttttaaaattttgagttctaatttgattgtgttgtggtctgagagactgtttgctatgatgtcagctattttacatacctgataagtgttttacttccaattacgtggttgattttagagtaagtgccatgtggcactgagctgtctgtttgttctgttgttttgggatggagagttctgtagctatctgtcatgtccacttgattcagagctgagttaaagtcctgaatatccttgttaattttctgtctcaatgatctgtctaatattgacagtggggtgttaaagtctcccactattattgtgtggaagtctaagtctcctcgtaggtctctaagaacttattttatgaatctagatgctcctatattgggtgcatatgtaagacagttagctcttcttgttgaattgatccctttgccatcatgtaatgcatttatttgtctttttaaa

SEQ ID NO: 829470 - DNA, 491 bp, Homo sapiens
ttcatagaatgcttttgtcaattattgccaaatgctttcatatagcctatctctgtttgacattcaaacatgatttcacaaatggaattgcttcccaatcctttaactcattatccaawaaatttattttctttgtatttcatatgtgttctactgttaaactaattctcaccctcaaaaatattatgttgattaaactgaaacctctttcacttcagcactatacaagacacctgtattaaattttactccatatttttataagtctagaaaatcaacaaaacaatgaataaagccttatctgttgcatttatcaatttcttgctattgtctgttttaatcaaccaaaccgacatcactgaacacagagtttggaagaagtgtgcagtagctcaccactgtataatattcctatcatacagatcaaatagatgtaaataaccctcaagagtatagataacagtaaaatgtagtaacattattggaaagta

SEQ ID NO: 829471 - DNA, 547 bp, Homo sapiens
tttcctgtatcaccaatcactttgggatagtattttaaaaaattcattctctgacacccagcattttcatgatgccattgtttgtcctgcagctctcaagtggtgaatcattttctcctatagtccttctgttactgggtctaaacatatggtaggtaactgctctttattgtgacttccataacatattttcatcttcctgaaatgttcagctttaaatctcatatcatcaaactacacctaaacaatctcacttgtaaatcccaaggcactcccaataatttcttgaaaataatagttcccaattcactgtccttcttcaacggggaaggaacacacaaatatgctgtctagtggtatgattcatgaccataaatttcaagtgaagttgtaatgttacttggaaatcagactataatttccyagattattaattctaccattctccaagaggcctgcttctcacctttacctcctcaaacttccaacactatctcccccatgtttactctctgctaatgaccatgcttcctacctagaaggcaga

SEQ ID NO: 829472 - DNA, 587 bp, Homo sapiens
cactgtattgcccaggctggcctcaaattcttggacttaagtgatcttcccagctcagcctcctgagtagttaggactacagacatgcaccaccactgtgcctgctaagattatagattatttttttwtttttatttttatttttttttttgagacaggcttttatacccaggctagagtaccaaggcacgatcttggctcactgcagcctctgcctcttgggatcaagtgagcctcccatctcagcttcctgagtagctgagactacaggcatgcaccaccttgcccagctaatttttacattttttatagagacaggtttcaccatgttgccaggccagtctcgaactcctgggctcaagcaatccacctgcctcggcctctgaaaataataagattattcttgattacaaaataaaactggtctaattagatttgacttgattatttatttaggtgtagtcataataataacttaccattaagacctttctaaatttgctttactgaatgttttcaataaggatttaagaattagattagacttttaaaagcttattgaagctagaaagctaagccaagaagct

SEQ ID NO: 829473 - DNA, 591 bp, Homo sapiens
accatatgtgcaatgtatttgtaagtgcccagcataattcttggtcttacaaaacttcattaaggccaggcacagtggytcatgcctgtaattccagcactttgggaggctgagacgggtggatcacctgaggtcaggagtttgagaccagcctggccaatatggtgaaaccccatctctactaaaaatacaaaaaaaaaaaaattatccgggagtggtggtggtcgcctgtaaccccagctacttcagaggctgaggcagaaaaatcacttgaacctgagaggcagaggctgcagtgaactgagatcacaccactgcattccagcctgggcgacagagtgagacagcgtgagactgggttttaaaaaaaactacattaaaacatcatctagggaaaaatcagtgaccttccaagcaggtcctcaccacaatgtggttatcatgacagctttgtatgtctagaaatcctgtttgatggttatcattgtccaaagtttatttcatcatctcccccaaagtagctcctcctcctccacctttatttcttatgtcaggagaaccatcatccatctacgtcattgtccattccag

SEQ ID NO: 829474 - DNA, 599 bp, Homo sapiens
aagcaccacatggttatcgactcactgcccttcaatgggattacaaattctgtgtaagcwgcagaaagactcataactaatgttttctttaaaactatgaacatactgaccacagagcactttatagaacaagggaaagaacataaagtcaaaataatgacaagctttataagcttcggtttttaaatctggcaaacatatgtaagtacatgttgagtatcccttatctgaaattcttgggaccagaagtatttcagaattggggttttcttcagattttggaatatttgcattatacttactggttgagcataccaaatctcaagaaccgatatctgagatgttcccctgagcatttcctttgggcatcatgcgcatgctcaaaacgtcttggattttggagcattttggatttttggactagggaggctcaacctgtatgtaaggatgcttttgcaaattgtattctaaatataaggcattatgttgtggtagtatataccatctagctaagtcataatcataacagcaagtaaatcagcaaattggtacagtatccactatctgacttatcttaataaaggttggatttcattata

SEQ ID NO: 829475 - DNA, 611 bp, Homo sapiens
tttttttttttttaaaaatagagatggggtctcactatgttgaccaggctggtctcgaattcatgagctcaagtgattctctcatttctcaygaggctgtggagaaataggaatgcttttacactgttggtgggagtgtaaattagttcaaccattgtggaagacagtgtggtgattcctcaaggaagtagaatcagaaataccatttgacccaatgatcccattactgggtatttacccaaaggattataaatcattctactataaagacacatgcgcatgtatgcttattgcagcactgttcataatagcaaagacttggaaccaacccaaatgcacatcaatgttagactggataaagaaaatgtggcacatacacaccatggaatactttgcagccataaaaaaggatgagttcatgtcctttacagggacatgcatgaagctggaaaccatcattctcagcaaagtaacacgggaacagaaaaccaaaccccatatgttctcactcataagtgggagttgaacaatgagaacacatggacacagggaggagaacaacacacaatgggacctgtccgggggtcgggggcaagggaagggagagcatt

SEQ ID NO: 829476 - DNA, 611 bp, Homo sapiens
tttttttttttttaaaaatagagatggggtctcactatgttgaccaggctggtctcgaattcatgagctcaagtgattctctcatttctcacgaggctgtggagaaataggaatgcttttacactgttggtgggagtgtaaattagttcaaccattgtggaagacagtgtggtgattcctcaaggaagtagaatcagaaataccatttgacccaatgatcccattactgggtatttacccaaaggattataaatcattctactataaagacacatgcgcatgtatgcttattgcagcactgttcataatagcaaagacttggaaccaacccaaatgcacatcaatgttagactggataaagaaaatgtggcacatacacaccatggaatactttgcagccataaaaaaggatgagttcatgtcctttacagggacatgcatgaagctggaaaccatcattctcagcaaagtaacacrggaacagaaaaccaaaccccatatgttctcactcataagtgggagttgaacaatgagaacacatggacacagggaggagaacaacacacaatgggacctgtccgggggtcgggggcaagggaagggagagcatt

SEQ ID NO: 829477 - DNA, 611 bp, Homo sapiens
tttttttttttttaaaaatagagatggggtctcactatgttgaccaggctggtctcgaattcatgagctcaagtgattctctcatttctcacgaggctgtggagaaataggaatgcttttacactgttggtgggagtgtaaattagttcaaccattgtggaagacagtgtggtgattcctcaaggaagtagaatcagaaataccatttgacccaatgatcccattactgggtatttacccaaaggattataaatcattctactataaagacacatgcgcatgtatgcttattgcagcactgttcataatagcaaagacttggaaccaacccaaatgcacatcaatgttagactggataaagaaaatgtggcacatacacaccatggaatactttgcagccataaaaaaggatgagttcatgtcctttacagggacatgcatgaagctggaaaccatcattctcagcaaagtaacacgggaacagaaaaccaaacmccatatgttctcactcataagtgggagttgaacaatgagaacacatggacacagggaggagaacaacacacaatgggacctgtccgggggtcgggggcaagggaagggagagcatt

SEQ ID NO: 829478 - DNA, 510 bp, Homo sapiens
aattcctacctcaccagcagcaaagaaagaacacagaagaagtttatatatttccaagtatcatttcctactaaaaagaaccagaactacttggagaaattgctaatttttatttcaggcttgaggtaggagaagtagaagtctgggataccttgttccagaaaggaaaatgataggaatccctcaaacaaacacaacagcctgtgtgaagaggccctcagctgccaaaactgagaaatttgtgcaccaaaatgaataataatagtactaaattataaaccactgaataagtacacatctataatttcattttgatatttattgtgccacataaataaaagcacaaatggggagaaaaaggagcattacagactaccaaatacaagtgtgaagttctagaacactggktagtataccacattttcccaccatcattatcataaattaatccgacaaaaatcaatagatactacaactactgagtgaaagctggctagcgaataggactat

SEQ ID NO: 829479 - DNA, 622 bp, Homo sapiens
tcatcagttgttggactgaataaactttttttctactaagactttgctggagaatgaataaactttttaaagcatgtttgagtaaattaccctaatccttagctataaaagagtttactgtagaagcagactcatctacaatacaaaattaaaataaggccgggcatggtggctcatgcctgtaattccagcactttgggaggctgaggtgggcagatcacctgaggtcaggagatcgagaccagactggccaacatggcaaaaccccatctctactaaaaatacaaaaattagctgggtatggtggtgggtgcctgtaatcccagctactcaggaggctgagacgggagaatcgcttgaacccaggaggtggaggttgtagtgagatgagatcatgccactgcacaccagctgggtgacagagtgagactctgtctcaaaaaagaaaaaataaataaaattaaatcagttaattcccaaaacaccttttgatttgaatgggttcaaaagagcttgtgtaattaaaatttctggaagaatattttctgtacaagatctgggatactgtggcttctaaaatatgtcacttyatttcagagggttgatgtgaggatttaatata

SEQ ID NO: 829480 - DNA, 611 bp, Homo sapiens
tgatgggaaaggaattgctacttgattcacttgggcaggatccctggtgtctttgcatgctaattcacaaccytcagcaacactgaccacagtgcccgaggcccgtggggctcctggggaaataagccttggaaaggaacccacagggaaaggaactcatttcctttccaaggcttatttcgaaatttcaagaagcaactcgagaaggaacacaccataaccccactggacttctcggagcaggggagaatgctgagtcttaatctttaacctcactaggcattcagtatacattctcttggacctaaccatcattactcaagtaactactgccagctgtagggcccccatcctggccactggaactaaacgttattatgcagtggcttgagggtcttttggtcctgaatcctgccttgaaaaaaaaacgaggtccctagtttcaaccaatagcccatcaccaccccatcttatcttgacccagcctgcttccttcattaatgttgcctgcctggcccctagaggcattttagtctgtaacttctattctagacacatgttttgcaaagcgtattctgcaggactagggtgtttgattaatctagttagga

SEQ ID NO: 829481 - DNA, 522 bp, Homo sapiens
tgatctcaagatgatcaccgagctgtggctcttccttgcttcctgaacacagctagaagtggcctctgagtgtgggtgtggggtggcttgagcctgagacagacccrttatcttatagattaatgcagttggctgcagggactgagaacgtgctaatatggattcaaatccttcaccacttcaacttgaaatcatatttgctgaaggaaaagcaaggaatcattggtgtatacaaaaaaggttgaattataaggatctgaaaaggagaatcagtctctgtacactctggctaatacctggctactgtttcatatctgttgagcatttactatattctggacaatgtataaatattttcatatttattatatcattgtgggactgtgaatgttatattggttgtaattttctataccatcaggaaagagttcagcccaagtgggtgtgtatacgtgtatgtatgtgtgtgaattcattcagtgaaggggataagaaatttgctttagcacacaatggtaatta

SEQ ID NO: 829482 - DNA, 479 bp, Homo sapiens
ttattgttgatatttttcaataaaaatttgggttttaggggatactttctttatttgccaaagtctagggagttgtatttccacacatatgggcattggattcaaacttaccctttcaggtaaccatcttttggtagctgagtttttaaatgttttaatatattatcctgccctctctataacagtatatcaacatgattaaaccccaaaaaggtgttctcttatttccttggagttgtattaatacgagttgtacgactcattatttaaaccatttttttgaacctctctttgtagtctctaggagttcaataagcataaatcctttttttttttttttttttttcaratggagtgtcgctctgttggccaggatggagtgcagtggcatgatctcggctcactgcagcctccaccacccgagttcaagtgattctcctgcctcaccctcccgagtagttgggattacagccatgcac

SEQ ID NO: 829483 - DNA, 583 bp, Homo sapiens
attcactcatctgccactataaaacccagatggaatgtggaggatgacactgaacttccasaaactcaaccaaatagtgaccccaattatagccactctgccacctcaggtacatggtaagcagcaaccgatagggcaaatgtaccttttctatccctattaggaaaaaaaatcaaagacagtttggattcacatggacaagagtatacatgtacagcttccgcctcatgccatctgggaatctggcagcaaatcacactggtccactttatcaataacattgtcaatcaagaaaaatgatgagacaagtctcaatcattttagatttatttgccaaagttaaggacacgcacccaggagacagacatctttctctgaagatgatttttgagggcttcaaatttaaaggggaaagggcaggatattgagaagtacacaattttcaggtaagggggtgggtgggaaaagatagtcatgcctttgtctggctccatgaatctgcatgtttttacataagatgacataaacggggcagaagaaaaacgtagggaatctgcattctacataacacagacaaaatggg

SEQ ID NO: 829484 - DNA, 623 bp, Homo sapiens
acttcaagtttgcctaattaatcttttgaaatcctatgtaaaagaagagttcttgtacacagasgagaggacagagaagagtttttattacactctcaaaaatatttgtgacacaaaatggttactacttactattccacccctccatttcaactttctatatctcattatttacaactattgagcactagcctcaaccaagatcaattacaatttaaattctgcaatttttgaatgcagatattgttggtggtgataatattaaaaacaatgatgagaatgataataacagtataagtgggtacttaccatgccaggttatctattaagtccttacacaaccttcaaaataatccttataaatataatttctattatacaagtaagaaaactgaaacattgaaaaattaagtaacttattcaatattttatagctagtaaatggtgaagccaggatctggaccgaaaaagtccaactttataggtttattctcagcattaggttatgcaacctcccaggattccttattttttagtacacaaacatctaaattttgggaatttttggttaccataggataaagacggcagcctatagctaaatttccccaaataatctccaa

SEQ ID NO: 829485 - DNA, 626 bp, Homo sapiens
aattttactaaagtatggcttctaagatctagtccaactccaggattgtatgattcctggaggaaaaaaatacaagagaaaaccctgaagtcaaagcctaccactctgttcatcgtcctaatcagcctcataactacagtattaccctgccataaggtataaaaactagtattactgatagccagtaaaggtttattgaattccctctgtatgtacatgcagacctccattgcactatcgagaaaaattgtagaggtgttcagtctcaaaagaatgatatgaattgggtaaagttaaatagggaaaaatgggagttttacaggtaagcaaacgtatatacttgtggaaaggattaaggatttattaaatggggggaaaagcaagtataaaggcactaagttgaaagcaaaggcagccctggaggaaaagtaaggttacaaatagcattagaccatgtgaactgcaaccacagctgcaaacctaaggacagaccaaacttatattcagtatgcagagacttacagrtcacaatcttgatttcatttcgataagatgtaataaatacacatagaatctgagtcatttataaatatcaatctcaataaacaacatctaggtacctattc

SEQ ID NO: 829486 - DNA, 612 bp, Homo sapiens
tgcttcttcctcatttttctcttgccaccaccatggaagaagtgcctttcgccctatgccatgattatgaggcctccaagccatgtggaactgtaagtcaaattaaacctccttttcttcccagtcttaggaatgtttttatcagcagtgtgaaaatggactaatacactacactgctgttgagtgaccacagtatggaattcaatgccataaaaagacagaggcaggctttcattttatctctgctctctcttaacatctcattaaagatttttaaaaacaaactcagaaggatgaagagagagacaaaggagtagatgagacatgtcagcaaacatttttaggttgaaaagcaaactactggtaattcagcaacccagagagaatggaaacatgctagcaatggagaaaacccagaagcagacagattactgtttatggagaaacctataaagattagtagaattgcaagacaccactaaaaaaarggggcaggccagatgcagtggctcacacctgtaatcccagcactttgggaggccaaggcaggagtatcacttgaggtcaagaattcaagatcagcctgggaaacttagcaagaccacatctctg

SEQ ID NO: 829487 - DNA, 321 bp, Homo sapiens
ttgttagatagaggtttatcattttrtagttttttttcctgcaatagttttctatatttttctattttcagttttattgatttctgctctttattttttcccatccttctgcttgattgggtttattttgttcttttcttgatggataaattttattttctactttataattcattactgtttattttgttattcagattgttgcagatttggctaatagaagctcttactttggttccagtgtccctttgacatggcccatttttgttgttgtttctgagcactttcataccttttagagccacaagatgctctcctgcc

SEQ ID NO: 829488 - DNA, 321 bp, Homo sapiens
ttgttagatagaggtttatcattttatagttttttttcctgcaatagttttctrtatttttctattttcagttttattgatttctgctctttattttttcccatccttctgcttgattgggtttattttgttcttttcttgatggataaattttattttctactttataattcattactgtttattttgttattcagattgttgcagatttggctaatagaagctcttactttggttccagtgtccctttgacatggcccatttttgttgttgtttctgagcactttcataccttttagagccacaagatgctctcctgcc

SEQ ID NO: 829489 - DNA, 552 bp, Homo sapiens
gggtacaggcattgggtaaatgcacctgttccaaatgggagaaatcgatcaaaatgaagaggatacaggccccatccaattctgaagtccaatagagtggtcattaaacattaaagttacaaaataatctcctttcactccatgtcttatatccaggtcattgctgatgcaagaggtgtgctcccacagccttgggcagctccaaccctgtggctttgcagggaatagcccccctcaccacctcctggctgcttttatgggctggcattgagtgtctgcagcttttacaggcacatggtgcaagctttcagtggatctaccattctggggtctggaggatggtggctcacttctcatagctccactaggcaatgcctcagttggggactctgtgtggggctccaaccccacatttcccttctgcactactctagcrgaggttctccatgagggctcttcccttgcagaaaatttctgcctggacttccaggtgttcccatacatccactgaaatctaggtgaaggttttcaaaccccaattcttgacttcta

SEQ ID NO: 829490 - DNA, 603 bp, Homo sapiens
cctgtggtatatatcaatatgattaagtaatttccactattaaatgttattggtatttttaaatggcacattataatatatagaaatatatagaagtgagctagaaggaatttataatctaagaagagaacagtggttatctgcaggtggtagaggcagctttctgttttattcttatctctatattcttaatgttatttaaaaatatgatacttttgtaatcataaaatcttattccgatgaaaacaggctttaaagaactactgggtctgggcatggtggatcacacttgtaatcccagtgctttgggaggctgaggtagtgggaatgcttgaggccaggagtttgagaccagcctgggcaacaacatagcaagtctctgtctctaaaacaaacaaacaaacaaataaacaaaaagctgctgggtctacatcttgattaaagtcttaaagtatggcatcttagaaaagcactcctggacttttctrtcagggccacccaccaatgtctcctttcttttcaaccttttttccttttgcttaactcctgttacatacattttggctggtggtcataataaaaaaagactaagaaaaatggctt

SEQ ID NO: 829491 - DNA, 584 bp, Homo sapiens
aattttagactatttcgtcacctcaacccatattcatactttatttttttttgagatggagtctcgccctgtcgcccagtctggagttcagtggtgcggtcttggctcattgcagcctccacctcctgggttcaagtgattgtcttgtctcagcctcccaagtagctgggactacaggcatatgccaccatgcccggctaatttttgtatttttagtagaaatggggtttcactacgtcggccaggatggtctcgatctcctgacctcgtgatccacctgccttggcctcccaaagtgctgggattacaggcgtgagtcactgcgcccagcgccatatccatactcttaatccacacctcctttcactcagtactgagcaaccattaatttgttttctgtttctatccatttgcctatcctggatatttcatagaaatagaataacaccgtatgtggtcttttctggctggtttatttcacttactgtgttttcaaggttcatcaatgtcgtaacatgcatcawtctttcttttttattgccaaataacatctaattttgtggatagaacacatcgtgtttatc

SEQ ID NO: 829492 - DNA, 633 bp, Homo sapiens
taaagatatttaaaagacattcycttaccgttttctttaaagttttaaagttttgtcttcaatgttttcttttccatatggataaccaattttcctcacaccatttactgaatagtctatcctttttccagtgatctctaatgtcggatctgatataaattaggtttttatagacgcctggtctgtatcatattctgttgattcagttgtctgttctcacaccaataccacactgtcttaataactttcactcaaagttttcccatgtggtaaagcactttgttcttcctttttaggagcatctgggcttttcttagctattggcttttccaaatgattttcaccccaccgaaacattttgctattaaaagtccaaaagtagagttaaaaggattttacagtaaacaaacactcatgaacccaccacctagattctataattcacattttattatttttccttgtcacataactatccatctttctatctgtccattaattctacgtgagatttttttaaattagcttttaatgtcccttaaaaaccttattggactgtgactgaaattaaattgaatgtatagaataattaggggtaattgacattgttataatatatacctattcatataa

SEQ ID NO: 829493 - DNA, 658 bp, Homo sapiens
ttgaggcttatgtccgttaagggagacccattatttatttgtactattcaaaatttcattggtgatttttggaaatgttcccaaattctttgacacttytttcactccaagaaatgaaagtaaattcttctcctcttgtgggtgggctggacataacaacttgcttataacaaattgaatatggtggaagtaatggtatacagcatatatggcgagatcatagaagacatttatctttctccttactctatattaaatcacttgttctgagagaagtcagaaaccatgttgtgaggacactcaagcagcctaaacagtgagaaatggaagcctcttgtcaacagctactaaggaactgaggcttctagcccacagccatataagtcagtcatcttataaagagatactccagctccagtcaagctttcagataattacagttcctactgacatattttcttgaattttcaccaaagactttaccataccactcagctaagctgctgactgaattcctgaaccactataaagtatgaaataatagatttttgttttctaagctgctaagttttggagtaatttgttgcatagcaattaatatttaatataagccctcataaaaattgtcctctcttttggaaggtggaaaagtaaattt

SEQ ID NO: 829494 - DNA, 587 bp, Homo sapiens
agtactcaagagttattttttggggtcctctccctcctcccaccctccactctcaagtagactccagtgtctgttgttcccttctttatgttcatgagctctcattgtttagctctttcttataaacgagaacatgcagtatttggttttctgttcctgtgttagtttgctaaagataatagcctccagctccatccatgtttccacaaaagacatgatctcattcttttttgtggctgcatagtattccatagtgtatatgtaccaaatttttttttatccaatctgtcattgatgaatatttaggttgattccatgtctttgctattgtgaatagtgctgcaatgaacattcatgtgcatatgtcatttctttatatattacccagtttcaggtgttctgttataggcaacagaaaataaattaagacattcatctttacctaattctggaaaattcttggttattattttttgtttcctcacctctattatacttttttctatctttttgagaccacrccatggatatacttgcacttcttatttatccttcttaccattattttttcttttttttttaatttt

SEQ ID NO: 829495 - DNA, 625 bp, Homo sapiens
gcattttccaacctcagtggacttaacaccaattaagttgtggagttttatatctctttccccaatcctggagtgtcatacttttaaaaatttttaaatgaattaaaagtaactttggacttgagggtkttttaaaagtccttgagagaatttgtagcactgttagagtgtgatgaaaaccatggttgggaataacactgtaggaagcaactgaaagtaattttcattctgaatatccaagtttccatgtcccactgctagagccatattaaaactccaaagtaatgaaactcctcaaaataattctgtaaattactgtcttcagcaaaatttcagttcctaaaagaatgcggagcgagctcggctatttttgacttgttctcatgctctgtcccacagtgtgtagctgcgtttgctgtatctgctgttgcttctcagtgggaacggactggaaaacctttcaacccactgctgggagagacttatgaattagtgcggtgaggcctttcacttgcatgctttatacagcgttgcagatgaagaggagaaatacatacatattggtcatcacgaataacaattatataggactggagcaagttaacaattttgatgtttgtttcta

SEQ ID NO: 829496 - DNA, 604 bp, Homo sapiens
cacacctctagagagaaaggatctgtctaaagaattgggtggttttggaagaatacaaattggcaggacctaktgagaaatgcacgctgtctggggttgagaatagagaacacatcacattttgatgtaataaaaagcaaatgtgtgtgtcacagtgtcacagttgccagcagaaaggcccaagactgtagagacagtattcctatgtattctgtacttctgtgaatacactgtggccgcattaccttgagttatgtggtgtcttatatcctgaattatcagagattttagagttatatgtgtttatagaatgaacatttaatgaagcttttgagtataaatttgattataatgtacagcagagagcactggcactcagtataaaattttaaaatcaagagaactgtgactaaaaggcatctagtcttagttccttaggtgtgtgtaagcccgttgaattattagctgtcaccaagctttataaattctgtcactctaaatgcatgtaaatctagtttcatccccaagttttcagaatatacactgcgtctttttttgtttttgtttttgagacggagttttgctctcattgctcaggctggag

SEQ ID NO: 829497 - DNA, 604 bp, Homo sapiens
cacacctctagagagaaaggatctgtctaaagaattgggtggttttggaagaatacaaattggcaggacctattgagaaatgcasgctgtctggggttgagaatagagaacacatcacattttgatgtaataaaaagcaaatgtgtgtgtcacagtgtcacagttgccagcagaaaggcccaagactgtagagacagtattcctatgtattctgtacttctgtgaatacactgtggccgcattaccttgagttatgtggtgtcttatatcctgaattatcagagattttagagttatatgtgtttatagaatgaacatttaatgaagcttttgagtataaatttgattataatgtacagcagagagcactggcactcagtataaaattttaaaatcaagagaactgtgactaaaaggcatctagtcttagttccttaggtgtgtgtaagcccgttgaattattagctgtcaccaagctttataaattctgtcactctaaatgcatgtaaatctagtttcatccccaagttttcagaatatacactgcgtctttttttgtttttgtttttgagacggagttttgctctcattgctcaggctggag

SEQ ID NO: 829498 - DNA, 539 bp, Homo sapiens
gagttttctttttccactttccattttttccttctttytcaatattattttggctattttggggcccttgagtttaggatcagtttgttaatctctgcaaaaaaaaataaaatgctgtgattgtgacagacactgcattcaatctgtagctcaattaggaaagtactgccatcttaacaatactgagagttctgatacaaaacatggatatcttttcagcagtatttttaaaaatgttaaactgctttaatttgtatcattatggaaataaaaataggcaaacaaaactatggggtagagtagataccatgcataaaataatgaataattatattctggccccctatttcttgagaatttctcatcatttaagagctacacagagctgtttatagaccttgattttagcaatgctaccactggagctataatctaataaggagctaaaaatatatatactgaaatatttattgcagtacttgctatcacattgaaatattgggaaacaacagtcaaatatcccagccacaatttcccaa

SEQ ID NO: 829499 - DNA, 610 bp, Homo sapiens
tctccacaatgatgcttcccatgacacccagagttatagacaatcatcaatttctccatgttactgtcataaaatatacctgwttacatttttgctcttttcataatgtcttggctttagatttattacacgtccctcctattagtcaaaaaacaggaaactatgtcatattcagcactgatctccaatgccttgctaagggcttagctcatacaggactcagtaaatatttgagatggagttattgttgaatacatattcaagcaactgattgaaatgaaaatggtttcacttgatacttatatgctgttggctcccagatctttgttgccagtcctttcctgaattctagacctatgtgcagctgttacctaaacatttccacttggatacaataacttccactcaacctattcaaacttacctcatcaaacctgctccttcaacttatgtaggtaaatggcatcacctagaaacacaagttcagaatctgaaacttattttaaactttccacaaccctgcccttcagcttctgtcacctcccctccaatctgtcacaaggtccccctgattccaattccataacttctcttatatgtgttcccccat

SEQ ID NO: 829500 - DNA, 673 bp, Homo sapiens
cactggtcattagagaaatgcaaatcaaaaccacaatgagatactatctctcaccagttagaatggcaatcattaaaaagtcaggaaacaacagatgctggagaggatgtggagaaataggaacacttttacactgttggtggaagtgtaaattagttcaaccattgtggaagacagtgtggcaattcctcaagcatctagaactagaaataccatttaactcagcaatcccattactgggatatacccaaaagaatataaaccattctactataaagacacatgcacatgtatgtttattgcagcactgttcacaatagcaaagacttggaaccaacccaaatgcccatcaatgatagactggataaagaaaacgtggcacataaacaccacggaatactatgcagccataagaaaggatgagttcatgtccttcgcagggacatggatgaagctggaaaccgtcattctcagcaaactaacataggaacagaaaaccaaacacctcatgttctcattcataagtaggagttgaacaatgagaacacatggacattgggaggggaacatcacacactggggcctgtcagggggtggggkgcagtgggagggatagcattgggagaaacacctaatgtagatcatgagttgatgggtgcagcaaagcaacatg

SEQ ID NO: 829501 - DNA, 600 bp, Homo sapiens
tcaaaatgaattaattataggtacacaaaaccacttggatgctgggcgcagtggctcacacctgtaataccagcatttttggaggctgaggtgggaggatcacttgaggtcaggagatcgagaygagcccagccaacatggtgaaactccatctctactaataatacaaagaaattagatgggcatggtcatgggtgcccgtagtcccagctaattgggaggctgaggcatgagaatcacttgaacccgggaggcagaggttgcagtgagcagagatcatgccactgcactccagcctgggtgacagagtgaaactgtgtcaaaaaacaaacaacgacaagaaaagcaacttggatgaattgcaagagaattgtgttaaattttaaaaagcaagtatcaaaaggttatatactttaaatactgtacatatgacttcatttatataaaatttttgagataacacgttagaaatttggagaacagattagtgatagccagggtttaaggaaggtattgggttttatgttaagcaaaaaagaggtagcacagacagcggggatgtgatagttacatgcacacacatgtaataaaactacatag

SEQ ID NO: 829502 - DNA, 559 bp, Homo sapiens
aataagggcagtaaattattaaaattctctactccaaaaatgattaaatataatgggttttcaaatgttgaataaaacatcttaattcagaccactgtaccaaaaatttwaaaaaaagattaccgtaaaaaatccaaaatgttagtgaaatatatgcaggtgttcaaccaaatggcccaaaacataactattattttggttttgcttaaatgttcttcataatttaaaaagctactatatttttacacacatattatggtaatatcagaggtgttttatggaatatggagatttccatatcactacgtgaatttctacttcgtttaatattaacctttcagttatacactgggttgcatcttgtctaatgtaatggatcactctctcagcctctggaatcccaataatcattgaatcctgtcatttctgcttcctaaataatttttagatcatccatttcttttcttttttattttcacaatcttagtacatgttagattctttgtcacctggaagatgggcattgtctccagattgatggctatcagagcatagagca

SEQ ID NO: 829503 - DNA, 596 bp, Homo sapiens
tattatagtacaaaacatttgcccaatataaccgaatttggtgcatttcattttattgtaaaatgttgatattaaaggccatatctgcttgcttttgtgagtactagttctgcarttcagcctggtgctttgcacatactaggcactccagcaacaataaaatgtttgctaaaatagctcatttacaataaaatgctaattcagattatcttcagctgaatacatttaaaatatttacacatattgaaagggatcatctgcgatgtaattgtttattggtgaattctttctggcttaaagagattagcagcccctcccctgtccaagcaggaaactgatgatgccaaaagaaactttgccctcaggacactgggatgattgcagagacagaccttcatggactttggccagcagaagtttcctggctattattatcttgaaacatctaaaaacataaatttatgcttttataaaaagagagttattaaaaaatgtttatagacaatgtgtctaaatgaccttttgttaattatgtgggttgcagaaaaatacattttgttctgaatttgattttacatccctcatattcactttag

SEQ ID NO: 829504 - DNA, 516 bp, Homo sapiens
ttctcacttataagtggaagctcaatgatgacaacacatgaacatgtataggagaacaaaaacacattggggcctatcgragggtggagggtggaaggagggagaggatcaaggaaaaataactaatgggtactaggcttaatacctgggtgatgaaataatctgtacaacaaaccctgatgacacaagcttacctatataacacacctgcacatgtacctctaaacttaaaattaaaaatataaataaataaaataaaataaagacaaaagaaaatagactctgcctctgataacagaggagcaataatttggccacaaataggagagctctaactcaagattaacaagtaggcaaatttgttatctcatgtaacttagaagcccagagatagagtatccttgaaaattattgatttaggagctcaaaaatgacataaacattctttcaggtcttttctaacttgaagaaatgctcatggcatataaagacctgtaaaataatgaccagagcagg

SEQ ID NO: 829505 - DNA, 565 bp, Homo sapiens
taatttattatatccagcctttcatctcaccctaaaagattatagttcattgtgctagtacattgaatttttagctaataggyatttcatataccatgaaacttctaaattaggaggtagggatggatttgagtgaatcttgggaaataaagtttaaaactgagtttaaaggtcaggaaggtatgagcagaaaacaggaaggcaaatgaagtgtaatgagatagaagtatttgattctaggtcacattgtttttactgttctttattactgttaatgttaactggttacctatagaggttaaataacaaaaatgctcccttcttcatcaggtcttgtcattttggatgaattgtaacttttcccaagggctccaaataaaatacctggaaatattgtagtgtaatctcaaattcagcagactagttcacatgacacttttcctggcccatatccttcctagcaagcagacactagcattatctttatcagtacattttgctgcctttcataagctcagctttctgtaagcctacttattttatctaacaacaatgtgattttaat

SEQ ID NO: 829506 - DNA, 565 bp, Homo sapiens
taatttattatatccagcctttcatctcaccctaaaagattatagttcattgtgctagtacattgaatttttagctaataggtatttcatataccatgaaacttctaaattaggagktagggatggatttgagtgaatcttgggaaataaagtttaaaactgagtttaaaggtcaggaaggtatgagcagaaaacaggaaggcaaatgaagtgtaatgagatagaagtatttgattctaggtcacattgtttttactgttctttattactgttaatgttaactggttacctatagaggttaaataacaaaaatgctcccttcttcatcaggtcttgtcattttggatgaattgtaacttttcccaagggctccaaataaaatacctggaaatattgtagtgtaatctcaaattcagcagactagttcacatgacacttttcctggcccatatccttcctagcaagcagacactagcattatctttatcagtacattttgctgcctttcataagctcagctttctgtaagcctacttattttatctaacaacaatgtgattttaat

SEQ ID NO: 829507 - DNA, 611 bp, Homo sapiens
aaaagcaggttgctgtcttctccactcgaggctgatcagtggtaaatagagcttgaccagggaaaggcacataccatattaaaatagagtgataaacccctcctcaagggaactgactttattttgaacaaagtgtagagaagttcaagcttaagggcactctcaaaaagaatggagatttaatggtaagcaatgaagataaggccagaagcttcatcacagcagcaacttatagtcagttactttgcttctttactatttgctagagtgaatcaggaaattagacatttaggaagacattttatgaagcaaaaacaaaacaaagtaaaaacttaaaccctggcttcaacataatcaggtaaagagacagagaaccttttaaaagccactatcatttttttaaaagacatataaattatataaagtaataatcataataatttattgagtttggatcttacaaacacttaagatgcataataataatggyacacaaaatgaaaggaaagaaatatttgagtaatattttgatatctcactggaattaaattaatttaaatctgagatagcttctgataaattgaaatgcataagataaaccctagagcaac

SEQ ID NO: 829508 - DNA, 611 bp, Homo sapiens
aaaagcaggttgctgtcttctccactcgaggctgatcagtggtaaatagagcttgaccagggaaaggcacataccatattaaaatagagtgataaacccctcctcaagggaactgactttattttgaacaaagtgtagagaagttcaagcttaagggcactctcaaaaagaatggagatttaatggtaagcaatgaagataaggccagaagcttcatcacagcagcaacttatagtcagttactttgcttctttactatttgctagagtgaatcaggaaattagacatttaggaagacattttatgaagcaaaaacaaaacaaagtaaaaacttaaaccctggcttcaacataatcaggtaaagagacagagaaccttttaaaagccactatcatttttttaaaagacatataaattatataaagtaataatcataataatttattgagtttggatcttacaaacacttaagatgcataataataatggtacacaaaatgaaaggaaagaaatatttgagtaatattttgatatctcactggaattaaattaatttaaatctgagatagcttctgataaattgaaatscataagataaaccctagagcaac

SEQ ID NO: 829509 - DNA, 646 bp, Homo sapiens
tacacactaattccttatctgtaaaatagatacattcaaagtgaatttaatgagaataagtattatggaaattaatgatttaattgattttaaataacagtacactatgaagatcactgtrtccacgatatttggatataaattttagaattaaatgtgagtactaaaataacttagaatatgtgcaccacttccttgaccaatgcatgcgctggggtctcatcaaaatcagatatatttcatactctagaaaaccattagcgttcctagccagagactataacattaaccgcatcagtgatataaagagagaaaataaatactagaacaagagaagagcttatcatttttagtttgactaaaatgactaatttttctctagaagtttacattcctataatcttcaacttaaattggtaaatattttctattgagaagctgaaaaatatttaccctatacaaacttcttcaagatggtatttaaaatacttatattttctggaaatatttggaaatgagtaaagatatcacaattttccaccaccaaattcctgggtctttcttggagtacccttttcctctcagattccataacatatttcaacctgaaatcaaatagttttctttttattcttttgtggttcag

SEQ ID NO: 829510 - DNA, 603 bp, Homo sapiens
aaaagcagaaaaattattctttacaatgaatgcctaagcatattttgaaagtttggatatacatagaacatgtcttctgatctatctgaaattaagccagaaaataaaacaaaatcatagctattgtttataaaattgtattgtttaaataaattgttagtgttctattataaattaaatacaggtcaaagaacaagtaaaacattaaaattaaaatacttttaattgagtgatcataaatgggacatatcaaaacttgtgttatgcaacgtaagtcatgtgcacaagacaaagtcttaaatgtatatttttaaaaagaagaaagtctaaaaaatcatggttttatattctagcttggaagtttaaaaagtaacatgaaattaaaattgaaactgagtaggaaggcaataaagatgagtttgaattaatacattttaaataagtgcacatttttacaaatatacacaacagaataaaacataaraattatttttctgaaaaaaaaaacctgataaaatagacaataacctagcaagaatgactgtaagacaaacatgaacagatttatttcataaagatagaaacaccctaaacacaatattg

SEQ ID NO: 829511 - DNA, 660 bp, Homo sapiens
atttcctttgcaggcccaccaggttccctcccactcttctttttttctgtgaaggtaagtttgtgtggcctaatccaattccaggtggtgttaataggagcatatactattacattcaaacaagtttacatgctacccactttgcattcagcacctagattaattaaattggtatgtgttgagggaagtcagggaccccgaatggagggaccagctgaagccatggcagaagaacataaattgtgaagatttcatggacatttattagttccccaaattaatacttttataatttcttatgtctgtctttactgcaatatctgaacataaattgtgaagatttcatggacatttatcacttccccagtcaatactcttgtgatttcctatgcctgtctttaatctcttaatcccgtcgtcttcataaactgaggatgaatgtcacctcaggaccctgtgatgattgcgttaactgcacaaattgtttaaacaatatgaaatctgggcaccttgaaaaaagaaaaggataaaagcgatgttcagggaacaagggagataaggttaaagtctggctgcctgtgggccgggcagaacagagccatatttctcttatttcaaaagcaagtaggagaaatatcrctgaattctttttctcagcaa

SEQ ID NO: 829512 - DNA, 544 bp, Homo sapiens
agaggtgttcaattttttcttgttcaatatgatattagctgtggtattgtcatatagggcctttattatattgaggtatgctctttatatacacagttttatgatgtttttaaactggtgttgatttatatctaattctttttcagtgtctattgaaataatcatatggcttttgttcttggtttagttaatgtgatgtattgtatttacctatttgcatatgttcaaccacctttgcatccctgggataaatcccagttgataattgtgagtaatctttttaatgtgtagttgaattgagtttactcgtattttgttgagaatttttgcatctatgttcatcagtgatattgacctatggctttcttctttaattgtgtccttgtctggtttgggtttcagggtaatgctrgcctcacagagtgaatttgcaagtgttccttcctcctcaatattttggaagagtttgagtagaattggtactacttcttatttaaatacttggtagaattttgcatttgaagtcatcagaacctaggctttt

SEQ ID NO: 829513 - DNA, 634 bp, Homo sapiens
ttgcctgcacacttaaatgtaaccatgcacctgtatatacacacattcacatatatctgtgttttgtttctaaagaaaaggtgagagtgggtgtttgtataagcatctagctatttctgctttmataggcttttggtatttgtaaactgtctttacctgtaaaataaggacatttctaaccattatttcacttctagaataattaatttatctgatcattttatataacattttaagtgtcttgttaatttttttgttgaagctattcaatatgtattgaatataaaaacacatcattcctagtaaattatagggagataattttgtctttgtttaaaaaaataagcttgctttctcaaggggggcttaatatttcaaatttcatagcagccatttattgtcagcaacttaaagactgtttctgttttaagaatacatttttcttcgaaataaagtcagaaattggagcatcagccatcttacatatctccccatgcagtataaattaatttccagactttcggggacaaactttcatcctagaagaccggagtgtcagcagtgagctagggagagcagtgggctgttacatgacaccactgttcaaagtgtcaggtcacatgtagcactttat

SEQ ID NO: 829514 - DNA, 634 bp, Homo sapiens
ttgcctgcacacttaaatgtaaccatgcacctgtatatacacacattcacatatatctgtgttttgtttctaaagaaaaggtgagagtgggtgtttgtataagcatctagctatttctgctttaatakgcttttggtatttgtaaactgtctttacctgtaaaataaggacatttctaaccattatttcacttctagaataattaatttatctgatcattttatataacattttaagtgtcttgttaatttttttgttgaagctattcaatatgtattgaatataaaaacacatcattcctagtaaattatagggagataattttgtctttgtttaaaaaaataagcttgctttctcaaggggggcttaatatttcaaatttcatagcagccatttattgtcagcaacttaaagactgtttctgttttaagaatacatttttcttcgaaataaagtcagaaattggagcatcagccatcttacatatctccccatgcagtataaattaatttccagactttcggggacaaactttcatcctagaagaccggagtgtcagcagtgagctagggagagcagtgggctgttacatgacaccactgttcaaagtgtcaggtcacatgtagcactttat

SEQ ID NO: 829515 - DNA, 634 bp, Homo sapiens
ttgcctgcacacttaaatgtaaccatgcacctgtatatacacacattcacatatatctgtgttttgtttctaaagaaaaggtgagagtgggtgtttgtataagcatctagctatttctgctttaataggcttttggtatttgtaaactgtctttacctgtaaaataaggacatttctaaccattatttcacttctagaataattaatttatctgatcattttatataacattttaagtgtcttgttaatttttttgttgaagctattcaatatgtattgaatataaaaacacatcattcctagtaaattatagggagataattttgtctttgtttaaaaaaataagcttgctttctcaaggggggcttaatatttcaaatttcatagcagccatttattgtcagcaacttaaagactgtttctgttttaagaatacatttttcttcgaaataaagtcagaaattggagcatcagccatcttacatatctccccatgcagtataaattaatttccagactttcggggacaaactttcatcctagaaraccggagtgtcagcagtgagctagggagagcagtgggctgttacatgacaccactgttcaaagtgtcaggtcacatgtagcactttat

SEQ ID NO: 829516 - DNA, 544 bp, Homo sapiens
aaaaaagatcattcaaggctgctatgaacacttttatgcacataaactagaaaaactaggagatggataaattcctggaaaaacaatccttccagcttaagtcaggaagaattagataccctgaacagaccaataacaaggagtgagattgaaatggtaatttaaaaattagcaacaaaaaaaagtccaggaccagatggattcacagcagaattctaccattgaaagaagaagtggcaaaaatccttttgacactattccacaagataaagagggaaccttccctaattcattctatgaagccagcatcaccctaataccaaaaccagcaaatgacgtaaccaaaaaagaaaactatggaccaatatccctgatgaagatagatgctaaaatccttaagaaaatactagctaaccaaatccagcagcatatcaaaaagagaatccaccatgatcaagtggatttcataccagckatgcagggatggcttaacatactcaagtcaataaatgtaatacaccacgtaaacagaatttaaaacaaa

SEQ ID NO: 829517 - DNA, 471 bp, Homo sapiens
tcacccctttcactctgcacactagtttcatacaaattagatcagacaaacatgctaaatagcacacaggaatatgtacagcccacagctctgctcaacakcatctggctgcctctgagagaaagaagtgagctttcagtctctagcaataagtcttgtactgtgcaagtgtaatcttaaattatccattttaccttctgtaaatcccaattttgtttcaaaaatcaagacaatctacatcaacccactctgttacaaagaggaaaggataagcacatacatgtgtaatcaaagcccatccccatacactgatgtggcatttaaatgaagaagcatagagacagaaaggacagtagcagtcattgagcctaagctttagaagaaaaatggacaacccaagattgtccttaagttttaaatatggcttaacccaagattggcttaagttttaaatatgtatacaacaatcaa

SEQ ID NO: 829518 - DNA, 610 bp, Homo sapiens
ttcttttagagtatggaaccatgcatattatcttttaattagatgatttagttagatatgtttttaaagaactagaaatataattgattttcttgttttggctctggagtggagtggggaygaaacagaatggattcacactgtttagatttactaaaatggaaggattgcagcaagatcatatccctagtctccccatagcaaatgtcacctgctagctgtttttttttttttttttttttggagggggaagttttgttctgtcgcccacgctggaatgcagtggtatgatctcagctcatggcaagctcacctcctgggttcaagcaattctccctgcctcagcctcctaagtagctgggattacaggcctctgccaccacgcctgcctaatttttgtatttgtagtaaagttggggtttcaccatgttggccaggctggccttgaactcctgacttcaggagattcacccgcctcagcctcccaaagtgctgggattatgggtgtgtagcactgcacttggatttaatgggatatttcactacagactttggtaaacagaatattatcatttttggggtgctttttattttactcatactatttttc

SEQ ID NO: 829519 - DNA, 593 bp, Homo sapiens
gagtagactgtactgcctgttcctcttccttagcactggtccccacagtccacccattttctgaataatgtctgttttcctactagtctgtatgcttggcwagagcagagaccgcatcaggattggctgatcacttaatccccaaactggcggagcagagccagaactgagacatgagcaggctggcccccagggccttgtgtgctcaccctctgctctcatggaaggtgagtctgcaaagctgagaagtgggttcctgggaggtgggcaggcccttggggtatgtatgggtcaggaaggcagtggaagagagagttttaggaggaaaagcagtcatcggcaccacgtgctgccaagacaccaaggcttcacccacatagagcttacctagtgccaatgagggtcattttggtggagctgtagggccagaagacagatggggcaagtggaatgtgtgaaaggtaagggtcagagtgaatgtgtggggacaactcactggagttgaagggcagtttttattttattttattttattttccacgagagagacacagaagcagacgggaaggatccagttgagcatgagaggttga

SEQ ID NO: 829520 - DNA, 463 bp, Homo sapiens
tctctttgaagcaattgtgaatgggaattcactcatgatttggctctctgtttgtctgttattggtgtataggaatacttgtgatttttgcacattgattttatatcctgacaatttgctgaagttgcttatcagcttaaagatattttgggctgagacgatggggttttctagatatacaatcatgtcatctgcaaacagggacaatttgacttcctcttttcctaattaaataccctttatttctttctcctgcctgattgccctggccagaacttccaacactatgttgaataggagtagtgagggagggcatccctgtcttgtgccagttttcaaagggaatactttcagtttttgcccattcggtatgatattggctgtgggtttgtcataaatagctcttattatgttgagawacgtcccttcaatacctagtttattgagtttttagaatgaaggt

SEQ ID NO: 829521 - DNA, 564 bp, Homo sapiens
tcagggcaaggcaggtagcgccctgccccgtcttgactgcagtggctggaggggaacgcagagcatctttcctgctcccctgcagctccatccccrtcctttccctctggtctccttttccgtgttacgttctgcatctgcagaggctcccgtctctgtcatcaacctaactctccttgtgagatgaggaagctgagccctgtgcccttgtcacttatttgcccctgggcggacagtggctggggtgcattatttctctcctttccatcatcgtgatatctgtgtctccatcctagctacccttttccttatctcttccttttctctcattctttctctctctcatcctggcgtgggtgggtatgcagggaattctagggatataattagtagccagggagaaagcaactccagcctgccttcattttttcttggaccagttgtgccgagataggaccagcactgtctgtccatgggatgccatgagtaccccagggttgtggaaagggatcaggatcctgcccatggacccttcctactgcctctgaccccagatatattgtg

SEQ ID NO: 829522 - DNA, 496 bp, Homo sapiens
taatatatagcctaatctcagaagtggggaggaataacaaaagtgaaagggctttataagttttccaaatctatrtgaaggcaatatatgagtattattattcccagggaatctttttatgttatttctttcatagaaattccttagtcctatttcccagtccccattgctctataaacacttgttaatattccttgaggaatgaggtacctttaacatgagatgaagtaaaagaccatgccgctacagtgtagcactgcttagtgtgtgatgctgacatccctcctctctctgagataatgccttttggttaaactcattggttccacttaggtatcttccttgtttttttctggacaatgagttagttcccagagattgcctgatcctttgcagccttaactacaagcttctctttttctagctacccaaagattctcacactatcaaaaggtgtccattgtcattctttcactctatacctgtctcatggccc

SEQ ID NO: 829523 - DNA, 606 bp, Homo sapiens
aagagtatgtatgtgatgatggaggctatgcataattccaatctttccatctctatctcaaccctttttttctcccatgtaagaatatgttaaaayggtgataatgactgtgtttaagggacaagtttcaagtagctctggcttatgttttaaaaagttaatgatgtggaaaattgagagtagtgttttgtgcacatttatgagagattctaaagcctgatacttaaatactgctttgaattgtagagacaattttcacatctttttccatgtgtgaacattggtcattattttcttcagttcatgttaatattaagttttaaaggtgatagagaaaaggaacaggagaatagtctggcttctggctaaatgatcacttctccacctaatgtgggtccagtggggatggaggggagtagattgttgccatttttaaatgagataatttgtagaagtgcttgacatcatctttattttagaaagagtttaacagatgatattttgattccaattttggagtggctccttatttaaagagtagggttaatgctgtgctgagtgttcacatggatgtatgagaaaactgctgctaaacaatagattaaa

SEQ ID NO: 829524 - DNA, 270 bp, Homo sapiens
tggtctaagaatttggggggtttctcagcgactttgagacttcaagatagtggatgayggagaattcttataagataaggatacaatatttgcaaaacctgtgttttgagtcttatcctcttctgcatcccagtagtgacataatttcttgccctatttcatcaaacccattgtcggaagtctatagagttccaaggaaattttatatgtgaccctctataatgagaaggcatgcaaactctgttctaacttccaccaacacacatctag

SEQ ID NO: 829525 - DNA, 630 bp, Homo sapiens
ttctttcaaatctggtctaagaatttggggggtttctcagcgactttgagacttcaagatagtggatgatggagaattcttataagataaggatacaatatttgcaaaacctgtgttttgagtcttatcctcttctgcatcccagtagtgacataatttcttgccctatttcatcaaacccattgtcggaagtctatagagttccaaggaaattttatatgtgaccctctataatgagaaggcatgcaaactctgttctaacttccaccaacacacatctagaataaaggggggccgactatcggcacttttagctgatccgatccagtactgctctgtgagaatgattttccagcctagactttggtgaagcaaggatgaatgggtagttgtctgctaagatgaggagtaccaggagtagaatgtgtacatggccatcttaggtctgaagtgctgggcatctgattgggctacgcagagaaggaagaggctccagtaagaagaaacagwaagttaaacacctagcagctgaggagttagtaccaagtgaccaccctgatcatctatgggaatcaaggaagctgctagaggatttccagaatttacgaaagtcaaacaatgtgggcttac

SEQ ID NO: 829526 - DNA, 578 bp, Homo sapiens
tatccaaattatgcttggagaatattaaacatgctttagggaataaaaatataattattgggttaggttgtagtttctctattgtattcattatcataatcatagatcatatggaaaaatattcacagggaaattatttgccatgtccccttgtaatttttcatttggtcaaatgctcattgtctccctccattctgtgccttccatcaaccccagccgtccccatccccaccctctcacacccagccaagaatctgatttaatcttcaaactaggattggcagaattcatgaaaactcagattgtatgcgtggaaatactgaagtaaaaaggacccagcattttttcaaatgagcctttctttgtgaggctctgctgcctgaatttaaggctgccatcccagtgggagttaaacacactcaaatgctcctaactgtgttgagtggttgatgatgacgaaacagttactatgtttgcccacattttctcctgtactgggacaaaattgcagtctcctagatcaagaggtaagctctgattgatctcaytgggagctttgccagtgaaaggacaatagt

SEQ ID NO: 829527 - DNA, 618 bp, Homo sapiens
ccagcttactcattttataactgcaggtttgaagcgtctgcttttggagtaagaagctgcattactttattacaccacaactcctccaaactgcatttactacagtttgaagctttcccccaagagattcctaggacccttatcaaagagaaagtagtagcagttttttcaattgagacctgttctgacctttctttccacagcttaatctttcttccactaattttttaaagttttgattgttactgagatgtaataaaatgtaataatataaaataacctttcagataagatttaaagaaataaaggacctatattagtttcctgtggctgctgtaaaatttgttactctgaaacatcactcatttattctcttacagttctagaagccctaagaccaaaatccatttaggctacataaagttaaagggtcacaggtctgtgtccctctggaaattctatgtggttccagttccggtggcakttcttggctcatggtcccatggtcccttccttcctcttttattttttgtttgattttttgagatgggatcttgctctgttgcccaggctggagtgcagtggtgggatcatagctctctgcagccttgagttttt

SEQ ID NO: 829528 - DNA, 602 bp, Homo sapiens
aaataaacatttccccaaagaagatgtacgagtggccaataagcacatgaaaacatagatgctcaatatcattagycatcaggacaatgcacatcaaaaccacaatgagatgccacttcccacccattggatggccacaaccaaaaagacaaacagtaacaaatgttggggatgataaagaggtcgagaaatcagaactctcatacactgctggtaggactataaatggtcagctactttagaaaagagtctgggagttccccaaatgattaaatatagttaccaaatgacccaggaattccagtcacaggtatgaacacacaaaaaatgaaaacatatgtgcacacaaaacacatatacaaatgtttatagaagcattattaataatagcaaaagggggaaaagcccaaatgaccatcaactgataaatgaataaacaaaatgtgagctatgtccatacaatggaatactatttggcaaaaaaagaggcaccgacgcatgctacaaaatagataaaatctgaaagcattatactaagtgaaagaggtcagacaaaagaggctgacttttggggtgataaaaattttgaaaactgtggtgat

SEQ ID NO: 829529 - DNA, 589 bp, Homo sapiens
gtaaaataatgccccttataagcatacatttagcggaaactyatgcatattcacctgagagttcttcctctaaaacttgttttagaaaagcaaatacccagcagtttccacaatttagagctgctggaaatgttccagtattaagtatctgagtagcattgacctcttccttagttagttctttgcagtttcaaattgtatgccagcctcatttattcggtgatatataaatcagacagctcaatggttcctccaggattttatccattcaaagaaatgtaaccaatgctctcatttttccacttttcatctactaaatttgtacctcctaaaaataaatctagtgctggcaagcgtgtgatgaaactggtgctcttcttctgctggtgttggtgaaaattggttcagtccctgtagaaaatatctgatggcctatttcaagagccatattgctgttaataaccttgacttggtaattctgctcctaagaatctctcataaagaaatcatccaaaatatagaatatgttagatgtataagcttatttatacttctcagaaattggaagcaatctaaaagtctaccaaca

SEQ ID NO: 829530 - DNA, 612 bp, Homo sapiens
cagctcctacccctaggagctttgtgtcacccatgtcatcagccgaagtgctggcttaatagacggaacttgttctaaaggtatgagaagagtaaattggagatggtaattgcaggaagtgatggcagagggaagaaagaggtggtgttttaggagtagggtctggagctgttcccataaactagggccatggaggaagcggctgcccatgagggttgtgaaaccacagaggtgatgctgctacaggcagatatgccacccctccacaagcccagactctcaggggtactgcagacagttatctgggctcattccctaaggccccttttaacgagagagtctcaagacagcggagctgggagcctgtgaggcaggaagaaagttccagctaaaaagacaatccccattagttcagctgggactctcaagaagatgagcgctttcctaaatgcaatgaaggcaaggaataagaaggatgggctttcctcccaaggctgctgggagctcacttggtgaatatraattggtctccttgccaggcggggcctcagctccccgacctgtagcatgggatgactgggttggctcaaaggtgttacccatccatgttat

SEQ ID NO: 829531 - DNA, 615 bp, Homo sapiens
atttggatgggccataggtataattcacagctcagggtaggctggctggcctggcaatgaaacagagctggaaatgaaaggtgctgcctattctgtcttcccatgtttccagkgccaaaccacaccccaaaacatccacggacacgttgatgtgggaaagacctcttggtctccccttccctctctccttcctctctctcttcctcttccctcttccctcttcttttttgctctcttcatttttactctttcattttcagaacatgaatgcctggatctcccaaccattgccacaccaaaactccattcactggttctgggaaggcacatggatgtatgatttttataaaataagctcacctaagaattctgatgcacatgagattcaggtgcctgggaagggccaatggcctaatttaaagccaatatttccagataacataatgaagacttagaggatgtaagtgtcctgcccaaggtcacacagctggccagatgcagagaacaccaggttcagtgctctttccatgaccaggggctgctgccaactcgaggacattagagaattcagtgaccctctgacatctctcagtttagaaacctttctcttttaat

SEQ ID NO: 829532 - DNA, 569 bp, Homo sapiens
cgttattttacacatgcactccattgaactccactgttattctatctcacccacctaaatccagagcaaatgtctcaccattcggaaaaattacatgagagaaaaccccagacgcgtgcatggggctccctgtgaaattgagtcttagtacattgagtttaatccaaatgtatttcgaaaacagtggtttcaattgttgtaaactacagaacacatggagaatccctggagaaacagatgttagatcttctgatagcagtaaaacatccaaaaaaaaaatcttgtaaatatgaacaaacttgactaatagagtatttggcagttaaggagataggaatgcatggtgaatgtcacctgactttctaaaatagtggcatgagtgtcattaaaaaagaaatactcttttaaatgtctgttatttagttttaaaatgaaaaatattgaatagttaaaatttattaagtgtaaaattggtttttagagtgctttggaatggtagytaccagaaagcaaaacttgagaagtcattgatagcagctgctcagtaaaaaaaaaaaaaaaatgataat

SEQ ID NO: 829533 - DNA, 432 bp, Homo sapiens
tttctcatcctcttaacaatgtctttcaggaagaaaatattttaaattttgactaagtgcaatttattratttatttttatttgatgaattgttataggtgtcatgtctaacaagtgttcaccaaaatcttggtcctcaatatttccttatatgtatcttttttaaaaatttataattttacattaaatccatgattgattttgagtcaattttggtagatttagatcaaggtgtgagttttatatcaagatttacttatttatgcatagtgatatctaatctctagcattatttatcgattcaattgcttttatatccttggttgaatttgaaagtggctatttcttattttgctattctattcactaatctatctgtgaacccctccagcgacagcacattgtcttgattactgtagctatataataact

SEQ ID NO: 829534 - DNA, 557 bp, Homo sapiens
ccccaccctcagccaacatctatcctctctatgagatcaaaatcttcactatttcagtaactacagtctctcccatatttcaaaagaaaagataatctaaaacscttctttggttccacttttcccttcacctacaaacctatatgtttcttctttatagccaaatatgctttaaaagctattaatatacatggtccctgtttcttctcctcccatcaagttacaacccactttaatctgccaaggctgctcctaggcttactcacaccgtgtcactaaacaccgaaggtgtttctcacttctcagccctctccttcttcatgcagcagggctgcccactctcctcctccaggagagctttcttcccttggcttccactggactttcctcctacctctcaattttccttgcagctcatcctctttctttcaccattagctttgggaatttttcaaggttcttttcttacccaattctctttttacatataacctttcccaaatggatgctactggtgactacaattccaatgacctctgtggctgactcttcactga

SEQ ID NO: 829535 - DNA, 572 bp, Homo sapiens
attcttctttaagaacatggaacatcattaggcaaattaagttattgctggttatctgctctctgaaaaaaaaaaaggcccctattctaacactggaactccagatgcagctcatggaatcagcatgtrttgaactaaacgtagagcacatgacaggtgagagctgctgggagacgtagggaatggccacgcgtgggagcaaacaatgagaccaattcctctttggcaataataaacagtcttgtttgtctgagacgcagtctcactctgtcacccaggctggagtgcagtggcgcgacctcggctcactgcaacctccgcctcccaggttcaagcgattcttgagcctcagcctcccaagtagctgggactacaggcgcgcaccaggatgcccagctaagatttttgtatttttagtaaaggcaggatttcaccatgttggccaggctggtctggaactcctgatctcaagtgatccgcccacctcggcctcccaaagtgctgggtttacaggcatgagccaccgcgcccggccaataaacagagtcttaaaaatgtaaattcaaaatcat

SEQ ID NO: 829536 - DNA, 564 bp, Homo sapiens
caaagacgccttgacctgataaatgacttcagtaaagtttcaggacacaaaatcaatgtacaaaaatagtagcattyctttttttatgtctttttttttgtcttcaacttttattttaagttccagggcacatatgcaggatgttcaggtttgttacatagctaaatgtgtgccacagtgttttgctagacagatcaatccatcatctaggtattaagccaagtatccattagctgttcttcctgatgctctcccttctcacatgcaccaacaggccccagaatgtggacacgtgttccccccatatgtccatgagttctcattgttcagctcccacttgtaagagagaacatgtggcatttgtttttctgttcccgcaatagtttactgaggataatggctcctatctccatccatgtctctgtaaaggacatgatctcattcctttttatgactgcatagtattccatggtgtatatgtaccacattttctttatgtagtatatcattgaagggcatctgggttgattccatgtctttgctgttgtgaatagtgctgcaatg

SEQ ID NO: 829537 - DNA, 638 bp, Homo sapiens
tcatgcctgtaatcccagcactttgggaggccgaggtgggtggatcacttgagctcaagagttcaagaccagcccgrgcaacatggtgaaatcccatccctactaaaaatacaaaatttagccaggcacagtggagtgcacctgtagtcacagctacttgggaggctgaggcaggagaatcactcgaacccgggaggcagaggttgaattgagctgagatcgtaccacagcgagccgagatcacgccactgcactccagcctgggtgacagggcgagacctgcctcaaaacaaacaaaaacacccaaatctaattgtgaggaaacatcagacaaaccctccgtgaggaaccttctgtaaaactactgtccttcactcttcaaaaatggtccaagggaagaaagacaaggaaacattacaggttaaaggggattaactggacgccaccagtaaaagtagtacctggtattggattggatcctggaccagaaacacacacacacacacacagctctaaaggaccttatggggcaactgagaccatctgactgcagacccatcacgatactgcagccatgttacacttccccctcttgattatttcctgtggttttgtaaggaatgttcctgctcttcgga

SEQ ID NO: 829538 - DNA, 494 bp, Homo sapiens
cagtgaaatgagcccaaagacctgacaatctcggccaacagctcagatcaactattgttaaaattcgtactgtgggaaagaggggcacatcacagaagtcaccagagagcttacaaaatgacacactcggtgaccaggctctgatgccattccaagcatggccccacagctcccggcccagcctgcactgttcatgctgcttggctttgtgaacagttgcgtggtggcttctcagcggccttggtggcatgggcaacacgtgcccagctctgcaccatgggcacccggcagaccctcctgctgtttctgaactcctcacctccagcctttctagcctcactagcctcccaagcttgctcccggtctcagggagccacaggaacactctasaacactctggaacactctggggccattggataacacatacgtttgcttaggtatcagatctaatgaaagagaaagagaagtaattgacattgagtgaacataca

SEQ ID NO: 829539 - DNA, 561 bp, Homo sapiens
tttaacaccgtttaaaatgttttaaaaatgaagacacaaacgcacacattagcctgggcctacccggggtcaggatcatcacatcaccgtcttgcacctgcaygtcctgtcctgctggaaggtctccaggggcaaagcacgcgtggagcggccatctcctagggtgacaaggccttcttctggataatttctggaaggcctgcctgagactgttctacagttattttataagtaggagtacactctaatgagaaaagtagagcatagtgagatatctaagcgagtgacatagttgcttattatcacgtatcaagcatgatgtactttgcaggatcatatgtgctaggcttttctaggactggcggtgcagtgggtttgtttacagcagtgtcaccacacacatgagtcatgcactgtgctgcgatgttaccttggctgtgaagtcaccgggctatagggctacagcgagctttcacctctctcagaatcttatggcaccaccatggcaagtatgtgtccctccttgacggaaacattgttcctcagctcgtgactgcaagt

SEQ ID NO: 829540 - DNA, 610 bp, Homo sapiens
gtaattcagttccatcttttaaaaacagatgaatgggcttcaaggagctattctatgtagagacatttttctttattggtaaataaatattccacctgtgagatgtagcgcattaaaattaaatgtcagtgaccattctatggctccctttcaaaggcagggaatttctcttagacaacataataataataatcagcacttttcatcctccaagcaatttttgaacactaactaatcaatctgtccaacatctgtgtgaggtagatgaataagaatcattatttccatcgaggagagaaatgatgggaaaagttgagtggctgaggcttagctgaggtcaagacaatcctgaactgagaagcctcacttcacaaccattctagctttgggacttttggcaaaagaatagagactgcagaatcagttaggaggatattgcaatattccaactgtgacttctgctctccgtgtgatgsggacagtggtagaaatgaaggagaagtctttaattgctttggaggaccatcagaaactaaccaggaaatagtcatttgatttattaactcattcactgattcatttcttgactcattcacttagctcctggctg

SEQ ID NO: 829541 - DNA, 441 bp, Homo sapiens
cattatcactcacagagatctcacaayggtaagtgaaaatgtctaccaaaaatgcatccgaagccagatgcggtggctcacgcctgtaatcccaacgttttgggaggccaaggcaggctgatcacttgaggtaaggaatttgagtcccagctactctggaggctgagccaggagaatcgcttgaacccgggaggcagaagtcacagtgagccgagattgtgccaccgcactccagcagcatggatgacagagtgagaccctgtctcaaaaaaaaaaaagatgaatgtaaggcagatgaatataagatgtctgggaaagtctgtactttagaggtgacagagtgcactgagaaaggtaaacattcaaaagacccagcttggccatgtattcatctccatctactttttttatgcaagagaaaatgcagaaaaatttcaaaag

SEQ ID NO: 829542 - DNA, 590 bp, Homo sapiens
acgtttagtaggaaatacaaataattggactgaatatcacgggtttatgcgatctagttgcctctgagaaatagtttgctttatttcctcaatttccctttttgcagcrggggttaaatacctgggagagtccagggctgcattgccctttagcatagaaaacaggttctgtaatttatcagtagttatgcccaaggtggggcgaagccagttaatattgcccagtaatttttgataattatttaaggtgtgtaagttgtcagtgttcagtttaaccttttgaggtcttactgactgggaagttagtatgtatttaagatatttccaaggagaggtcatttgtcttttctaggtgctatgattaaaccttttaactgtgtattctttttgacagaggcatatacatttgaaagtattggctctgttggggctgccagtaagagatcatccataaaatggatgatcttgcaattaggaaattcttttctactggggagcaaaggctgatttacatcatactgacacatggtaggactgtttagcattccttgaggaagtactttccagtgaaatctgcgagctggccattc

SEQ ID NO: 829543 - DNA, 463 bp, Homo sapiens
ttttctactattattagcatcttacattaatatggttcatttattacaattgatgaacaaayattaatacacttttattaactaaaggccatagtttacattagagctcaatctttgtattgtacatttatgggttttaacaaatatataatgccatgtatctgccattacaataccatacagaataattttactgtcctaaatatcttccataccctgtctattcacctctcccttcctccttcctgctgtaccacgataatcactggtctctttattgtctgtatagttttgctatttccagaatgtcatatagtttaaattgtagccttttcaaacttgttatttacttagcagtacttactcaaggttcctccatgtctcttcatagcttgatagctcatttatttttatcactaaataatatctcattgtataggtgtaccactttgtttatccattc

SEQ ID NO: 829544 - DNA, 555 bp, Homo sapiens
gtaagcagacctactgcactgatagtcgtataatagggtagcacaaccaagtatgtacagtacctaatacttgataatgataataaatgatgagggtactgggttacrtatttactgtagtatactttttatcattagtttagtgtgtattctttctccttatcgaagaagctaatttgaaaacagcctcaggcaaatctttcaggaggtattccagaagaaggaattgttatcataggaagtgacagctccacgcgcgttattgctcctgaagatctctcagtgggacaagatgtggagtgatattgatgatcctgaccctgtgtaggcctaggctaatgtgtgcgtttgtgtcttgtttttttaaaaaaaaagtttgaaaagtaaacaaaaatatattaaaaattaaaaacagaaaaaagcatatagaataaggatataaaaaatttttgaacagctgtacaatgtgtgttttaagctaagtgttattataaaaaagtcaaacagttaaaaaaatttaaaagtttagcaagtaaaaaagttacagtaagctgt

SEQ ID NO: 829545 - DNA, 533 bp, Homo sapiens
gatgctagtgtaagcagacctactgcactgatagtcgtataatagggtagcacaaccaagtatgtacagtacctaatacttgataatgataataaatgatgagggtactgggttacgtatttactgtagtatactttttatcattagtttagtgtgtattctttctccttatcgaagaagctaatttgaaaacagcctcaggcaaatctttcaggaggtattccagaagaaggaattgttatcataggaagtgacagctccacgcgcgttattgctcctgaagatctctcagtgggacaagatgtggagtgatattgatgatcctgaccctgtgtaggcctaggctaatgtgtgcgtttgtgtcttgtttttttaaaaaaaaagtttgaaaagtaaacaaaaatatattaaaaattaaaaacagaaaaaarcatatagaataaggatataaaaaatttttgaacagctgtacaatgtgtgttttaagctaagtgttattataaaaaagtcaaacagttaaaaaaatttaaaag

SEQ ID NO: 829546 - DNA, 533 bp, Homo sapiens
gatgctagtgtaagcagacctactgcactgatagtcgtataatagggtagcacaaccaagtatgtacagtacctaatacttgataatgataataaatgatgagggtactgggttacgtatttactgtagtatactttttatcattagtttagtgtgtattctttctccttatcgaagaagctaatttgaaaacagcctcaggcaaatctttcaggaggtattccagaagaaggaattgttatcataggaagtgacagctccacgcgcgttattgctcctgaagatctctcagtgggacaagatgtggagtgatattgatgatcctgaccctgtgtaggcctaggctaatgtgtgcgtttgtgtcttgtttttttaaaaaaaaagtttgaaaagtaaacaaaaatatattaaaaattaaaaacagaaaaaagyatatagaataaggatataaaaaatttttgaacagctgtacaatgtgtgttttaagctaagtgttattataaaaaagtcaaacagttaaaaaaatttaaaag

SEQ ID NO: 829547 - DNA, 644 bp, Homo sapiens
tcaaactaggaattacactagcaattttcctccagttactacagttttgcttgtggcttttccttctaacctttcttcattgggcaataatagctcagccactctcttcagaggtcatccaataagaaaaaattgctctagtatgtcattagaacaagaggacaaaatgtgagcattttaatatttctcacaatatctctgcattttggcattttgataacaagacacacaatgagcaaatagatcaagagtagtaagatattaaattggaagcaaatgctattacagtttatgtctttaaaatctgagttggaagttttgtttccatctatgagggagtagatgtatcaaagaaatccttggagaaagtaagtgtaaaacctggatagaaaacagaaacaaagcaaagcagctatttggatcccacagaaaacaatcacgacagccaagaattgtggggactagacctatagaagaggaaattgcattgagctcaaccccaaatttgcctctataatttctccctatttatttacagtttctcagtgataatgatggagcctgaagagaaagtaatagccttgagttgtgaccaatatcattrgatagagagaacaaaatcagacttcaggaactggggcaac

SEQ ID NO: 829548 - DNA, 652 bp, Homo sapiens
  misc_feature 580: n = A,T,C or G
agagatcctgctgtcagagctatttaggaagagtgcaaatctgagtggaggtgggggaattccctacgatcaggagcagctgaggtgggagttacttcctgggaccaccgggtacccscccccgatcctcaagcacctgctcccacctttgggacacacaggggccacctgagcagcagaggagggctcctcagaaggcagtaggtgaggcacactggaatcccgctccatgcctgtgggaccttgtccaagaccttggttaaagatgggctcgttattgaaaagaaatgaaatcgaaatgaaaaatgtgtgcatttaaatcacccagtaggctgggagtgatccataggaacttgaagggtcagcacgcatgctggcccagtgcctgtcttcagaccctctggctcccctggttttgcccggaggaagaccaagaccagccacaggtgacacacacagctacccatggagagggaatttgcctctgttccccgggggcacacagctgagctccagtgtggacagctgggagcagtaccacccactcccttgggacacagttgagagcatccagttcagngcacgtctcccagagttactgctaacgcaggccccagccctgagctcagcactttccaatatcacacacttg

SEQ ID NO: 829549 - DNA, 322 bp, Homo sapiens
gaacccctcggcaggtagctgcgccgccgcgggagccggggrccgccctccgcctccttcctcccagctcgctcgctcctcgccttgttacaatgtagccttttctctccgcaagcgcgcgcccgctgacggacgtggccgccgaccaatgggagtggcgcccgggccgagcgctcggaatgagaacgcggtgacacggacggggcgggcgcggacgccgacgccagagggctcgcctgccgccggcctagttctcgcggacgccctcggctcccgcgcccgggggctgctgcggggtgctcggggatgaaggtgggaggcg

SEQ ID NO: 829550 - DNA, 490 bp, Homo sapiens
cccctgcccttgacctcatcttctatcctctcctagatctctctgaactccataccccgatctctcctacataggctggcctttcctcctcaaatccttgagctgttgtcatstaatgaataaattaaggttagcaaagggcacagtgggatgggagtgtctggtggtccttagtgctttcctcttactatttccggttcttccatttccacagtaggttgactggagctctacctgcacttgggtgggggccccatgactggctggtgaattataaatgacagtgattcacgtcacttctgggccacagcatttaattgctggtgtgagaccctccacagtgcactttccctgtggcatggcaactggtagtaaggcgggatggtggtggctgctgccagcctgagtccctgtgtcactccgtgcgtgaagcccttggtgacccatgatggacatgcaacatgagtgaaaactaaacctttgctgtttt

SEQ ID NO: 829551 - DNA, 451 bp, Homo sapiens
tcaagtcttaacttacttaactaaaaaatgtctgtcattttagtcccaaaatctcactattaaaacctttgtcttacagggtttacctggagggaatggacatggggactgggaaggaaaatatgcttttcactttatatatgtctatgttgcattttttagaaacttatgaacaaatatgaatttttcaaataataaaactgtgtgaaaatttaaaactaacaaaaattatggagacagtaaaaagattgggaggagagagggagaaatgagtaggtggagtagagggatttttagggtgatgaaacgactctgtatgatactataatttattctggatgatattgtaatatatttgtaaaaacagaacatacaacgcaaagagtggatcctaatgtaaaccctggactttagttaataataatatatyaatattggcttgtcagtttta

SEQ ID NO: 829552 - DNA, 589 bp, Homo sapiens
ataccgtagtaaactatgtgcatattcagggaggtaaaggaagacatagctttttttttttttttttttaagacaagagtctcgctctgtcgcrcaggctggagtgcagtggcgagatctcagtttatggcaagctccgcctcccgggttcacgccattctcctgcctcagcctcccgagtagctgggactataggcgcccgccaccatgcccagctaattttttgtatttttagtagagacagggtttcaccgtgttagccaggatggtctcgatctcctgacctcgtgatcctcccacctgggcctcccaaagtgctgggattacaggcatgagccaccgcgcccggccaagacagatttttaaaggaaaaatgaggaagattacatcattgttttaaatcaattatgtttggctataaagatcagtgacaagagtgatgccagtctgaggttggacatgaagttactgggcagatgtccttgcagaagtatttttttgtgtaaggttgcagttgcctttgtgcagggttgtggcctttatgagtttttttgtgatagttttttttttttttttttttaaatgtagt

SEQ ID NO: 829553 - DNA, 603 bp, Homo sapiens
catcaggggtggtgaggaaatggggagggagaggaatgtcaaaagatacaaagtggccgtcataaagaatgaacaagtctagaaatccaatataccacatgaagactataggtgayacgattttattttattagggaatttttttcttgttaaatatgtagattttagctattcttgtcatacacacaaaatagtagctatatgagatgataaattattttaatttgcttcactatagtaactattttactatccctatatattctataacattgtgttgtaaacttcaaatatacacaataaaatttattttttttaaaaagtgtatactagtagctgaagcttgtcttcaaattgatagatcaatctctaagaagagggcactttgtacaaatgcaaaaagagaagttttgtaattatataagctgtccagatagagataggctactgaacagaaacacatgttaaaatacagagagagagataattgctgaagctgaccttgaaactacatcctgaaattcattacttaataagataattccaactcttcttacttatctctaaactttattaaggctaagatggccagaaaacaatcac

SEQ ID NO: 829554 - DNA, 609 bp, Homo sapiens
tagctgagagtttaacagccaagaaagaaggaaaaagacaaaaggaagaagctcccggtacagacacagagrgagggggctccaaagaggaaagaggagactctgcatttggaggataccagccagttttacgtgatggctggaagaggcggtgtctgatttcaagttccatggttcaggggattggtttgacctggcatgtcattcacgttggctgtgaaaaaactggccctcccacagtcctttaatatgcaaatgcagggcgccataatgttctacacacacttggggatatgtgggcgtggccatgttgtcaggcacatgctggggcaagggcaagaggacaagggtgggaatcgccatgttgggtggacccagtttctaatggtcagcttttgcgtatcacaggttgccagtctgggtctaagagccagggctttcatgctagacaagaaatatttttggagctgcaaaaaaaacctttcaaggacctcttttcctctctatctaaaataattttttttttcttttttttgagaaggggtctggctctgtcgcccaggctggagtgcagtggcgcaatcttagctcactgcaagctccgcctcc

SEQ ID NO: 829555 - DNA, 439 bp, Homo sapiens
gcagtgcagcttatgaaaaatcgagaaacaaacactaktagattaacaatatataatgagtgacttccagattgagagatatgatgtatttaataagtaaaatcggacaacccattaaaagaaaaattaaaattatatctcaattgcaacaaatattaaaacctagttttaaaaaaactctgaagtatttgagggaaagtttagaatatatttaggagatttagattttggtctataacttcaaagaatgaagactaggttctgatctctatgacggaaaagctcttacatgagacaaaaatatttgtttaaaaattgaaaaattgaagaggcaatataacttagagaacgcttcattttgagaagtaggtaagtgatgatgttagacaagagacataatctctattaagctttaattttgattttgaatagaagatat

SEQ ID NO: 829556 - DNA, 332 bp, Homo sapiens
ggagaaatttatttgttagggttttagtagtggaggarattccattcaattcccctctgatttctctagtaataatttaaaaattatatattttcaattaatcttagtaatactactcagtaatacaagtcattcattctaaaacggatccattcatttagactgtagacttagagagtagtgcaaaaaattgaaaacaaataaaaacaaaagcaatcaggtggtatacggttctatgtagctttggtaatcagctccattccagaatattccatttatcttaatttttagaatggatagtttctcttcagccattgctagaaagctattgc

SEQ ID NO: 829557 - DNA, 508 bp, Homo sapiens
atattcatatagtttatttttactagaatttttcactaacttcgtaaacctctcaaaataatctagaaactcagttacctcattagagtataaaatacatatatggaacaaaatatagaatttgtyatgcagattatgttttatcacacaagttcttttactaagaaagtgcaattcctttctagttatttttctcaaacttcagggaaatagaaaatttttcctcagctatctctgaggcatatagcctcttattcatctacataaaaatgacgttataaagatattaaataataatcccaatttcttagatatgaatatggtttttgagtgtctggatttttattcagttatagctgcatattggaaaatgttttaaaagggaacacattttgaatgcgtatatgaatctgagcagcagtatctcagaatggaatgtttttccctagagaaatatgttaggaatacgcttcttccaaatttttctctttgattatatagagttttt

SEQ ID NO: 829558 - DNA, 627 bp, Homo sapiens
gggtgttggcatgggctggtgcttgccccaggcaccctcagtcctgctgctggatcatctgattagtggcttctgactcaggggaccttcatcccctaggtaaatgggtcttccagtgattcccttgacataaggggcatggatgagggggcaacttatttccacttggacaatcttttttaaagtgtccttgtagaccacactggaagcaagccctattaggcattcaacttgcccagcttttcccttttccagagcctccaaagtccgcttccctgagggccatgattaaagcagtggcttttttttttatcctgtttgtctcattccacctgctcctcttgatctctattataaaaaaccaaggttgccaaattcaatagggtttctaagttttgctccaggactaaggtggacttttgaagtttttttctaatgtctgcagctgactgagtgataaacttatcctttaagattagttggccttcagtagartcaggtgacagggaggtatgtttcctcaatgcctcccttagtctctccagaaaggcagtaagattttcttcctttccctgtgttatactggacatcactgaataattcataggcttcttcctagttttcctt

SEQ ID NO: 829559 - DNA, 667 bp, Homo sapiens
tttataagaaccaccaaattatcttccaatgtggctatgccatttgcatttcaccagcaatgaggaacagttttgttgcttctaattctcaccagcaattggtatcatcacttttgaaattttagctattcaaataggtttgtagtggtatgctgttgttttaatttaaatttccctaatgacaaatgatattcagcacctttttatgttgcttatttggcacttgtatagcttcttaaattacatatttattctgatcttttgcccaatttttaattgggttgttttcttattgttgatttttaaaagttatttgtttattttgaatacagttttttattttcaggtatgcagtttgcaaatattttctagaagtctgtgtcttgttgttttattctcttaatgatgccttttccagagtaaatatttttaattttaataaagtctaatttaccaattttcaatttcatagattattgctttctgtgttgtgtctatatagtcatcactaaacacaaggccacacagattttctcctatatattctccttgatgttttgtagtttacatttaacatttaggtaaatgatacayattaatttaacttttgtgttagatatgaggttcatttttttccatatcgacttccattcttcccagcatcatt

SEQ ID NO: 829560 - DNA, 678 bp, Homo sapiens
gtataaccatggaaaaaggctgtgtctatactgagttccgggaagaatgttcaagtcagagtcagcagaagtcaagtggggcgctgaccctctggctctgccctctctaatcagccttccccaacccatttagaattggaatctgaagaattccctttctggcccaggatcaacagattttggtcctgtctacaagcattttcattttcttgcccgaaagcctgtgcttgggcttttctagagactcagctcccccatcaattgtccaaaatgcctaacttcagctcccaactctgtgggtaaataagtcacccaccctcactctttcttcctgggccacccctggtggaaagaagcccactggggctggacacctacctcccagcacctcgcagtcgctgtccatgctgtcatgcacacctgcaaagatgttggccagagtggacttgcccaccccctgctcccctatgagcaccactcggtagtaggtgttccctgactcagaggagatgactgagtctgtggagtcagaggaccagcttcggcggcagtggtcctcaggggtagcagaatggcggttgcsgtggctgtactggtggggctctttctggaccatcagatgcctgccatcagctgggatgctccagcgctgctgctgtggctgcatgcccacagtgc

SEQ ID NO: 829561 - DNA, 592 bp, Homo sapiens
ggggcgaggggggagggatagcattaggagatatacctaatgctaaatgatgagttaatgggtgcagcacaccagcatggcacatgtatacatawgtaactaacctgcacattgtgcacatgtaccctaaaacttaaagtataataataataaaaaaaaagaaaaaaaaataagacaacaaacaaatcaatagaaaacaggcaaaaatcttagacaattcagaaaatgatatatacaaacaaccaataagcacataaaaagatatttaacatcattagtcatccagaaaatacatattaaaaacctgaaataccacttcacaaccattaggatggctggaatcgcaaagtcagataataaacaagtgtgatgcgtatgtggagaaatcaaaaccctcataccctgctggtaggagtataaaatggtgcagcactttggaaaaaccagcatgacagttgctcaaacaattaaacaagagttaccaaatgacacagcaattacactcctaagtatatgcccaaaagaataataacatatgtccacaaaaaaacttgcatatgaatgtttatagctaggattattaataatagcc

SEQ ID NO: 829562 - DNA, 305 bp, Homo sapiens
atttagattttaaaaaatattatattaaaatattatttatcttgacgactgagtttttgtgccccgccccttatattttctgcctgaggttagtgtttcacttgcctgaacctgttcctggccctggtcccaaccctctatcccaacaaactataatgcaaaaactgctacaggaatgaaaactrtgctcactacgctagaggagatattcaaatccaactaatttctccacaatccaagtgagtccaggaagcaacatgtcaagtggggcagggaatgtgagctttagggctagacagatctgg

SEQ ID NO: 829563 - DNA, 305 bp, Homo sapiens
atttagattttaaaaaatattatattaaaatattatttatcttgacgactgagtttttgtgccccgccccttatattttctgcctgaggttagtgtttcacttgcctgaacctgttcctggccctggtcccaaccctctatcccaacaaactataatgcaaaaactgctacaggaatgaaaactgtgctsactacgctagaggagatattcaaatccaactaatttctccacaatccaagtgagtccaggaagcaacatgtcaagtggggcagggaatgtgagctttagggctagacagatctgg

SEQ ID NO: 829564 - DNA, 670 bp, Homo sapiens
tagctcttcgtgttgaattgcatcctttaccgttatgtgaggcacttctttgtatttttttatctttgttcatttaaagtctgttttgtcaaaactatgattrtgacccctgctgttttctgttttccatgtgcttttcctccctccatttattttgagcctattgtgtctttgcgtgtgagatgggtctcttgaagacagcacagcaatgggttttgactctttctccagctttccattctgtgtcttttaattgaggcatttagcccatttacatttaaggttcatattgttatgtgtgaatttgatcctgtcatcatgatgctggctggttattttacagacttgttaatgtagttgcttcatagtgttattggtctgtgtacttcagtatgtttttgtagtggctggtaaccattttccctttccatattcagtgcttcttacaggagttcttgcaaggcaggtctggtggtgatgaattctgtcatcatttgcttgtctgaaaaagattttatttccccttcactcacaaagcttagtttggccagatattaaattctaggtcggaaattcttttttttaagaatgttgagaccaggcgcagtggctcatgcctgtaatcccagaactttgggaggccgagttgggcagatcacctgaggccagg

SEQ ID NO: 829565 - DNA, 561 bp, Homo sapiens
tggtttggtatttgacttagagttttaataactgaactattaccattaatagctatggcaaaataagccagcawgggtttggtagacctaacttcgtattcccagcttctcccatggtatcatctgggaatgtgtgagttgacatttttacacagttgagtctaaaaaactctctctcttttccctattcttagagcttcatttcaagggcaggatgtcaggtgcttgccgataaagtgtgcttggagaagagttgctaaggacagttaactccttctaatcctgtggtggttgagggagtatgagactttgcagctacttgttataccagctggttgtccaggagccctggctgctttttcagtgaccttgaagcataaggccagtgcttccttggtagagcagtgggaaaagggaacttgtaaatgaggtagaataagtgacaagatggagcagttctgcttagaaatgcatttatttttactacaatggtttttgtcatttcgtgatgtaagtttacaacctattttttaggttcagatttttaaaaacataacacca

SEQ ID NO: 829566 - DNA, 520 bp, Homo sapiens
gcttttctacattaccatgcattgtgtaaccgtgagtctctctttctctctccaacatattttgcacagttgatggaattcgtgtattttagttcaatcatctctaaactccaatgaatttttttctctgtggytcctgaatcattatgaaaagtatggaggatatcacagcttccactttcagtgaaactgacagtgaccgcagtggaatttgtactcagaaagaattatgacaccatccgtaccacaattctctctttcaaatgctatgctggctctcatgcagatacttagatcaagcagactgttaagtatagaattaaatatgcaccactctggcagtgttatcagagaaagagcatgtttgaaaaagacactggttaaaaattaatgataaaaccagttattagataaatatcaaaatggttagaaaaactcaaaatactttgcaatggtcttcaacttctactatcgtctctatgccttaaaataatattgaaaaactgcactatctctcact

SEQ ID NO: 829567 - DNA, 553 bp, Homo sapiens
tttatcatgtttttaaaatttaaactttcaattttagaatagttttaaatacgtagaaaaatcgtgtttcctgtatcttatccattctcccatattgttaacattttatatgactttgatgcattaaggaaccaacatcagcaaaatactatatatatataaaatatatacatattatatataatatactatgtattatatacactatatattatataccatatattttatacactattatatatagtatatacattatgtgtatactttacacattatttagactttaatagttatttcttaatgtcattttcaagaatttcaatcagaattgacattacatttagtcatttcttagtccgatatgatctgtgacagttctgagacattttccttttgataactttaagaattttacatactactggtcagacattttatagaatattgctcaatttttttttaagtttgctttrtttgtttggcactcggaggctatgagttttggagaagaccacagatacaaagtgccattcattacatcatatcaagg

SEQ ID NO: 829568 - DNA, 609 bp, Homo sapiens
ttgcattcttgatttggttctcagcttgaatgttattgttgtatattgctattaatgtttgtattttgattttgtactctaaacctttactgaaggtaaagatagatatctgatgatcttagataatgtgacttcctcttttcctatatggatgtctttttttttttttcctctcacctgattgctctggctaggaattccagtactacattgaataggcctggtgaaaatagacaaacttgtcttttcctagtttttaagggggatacctccaacttttgcccattcagtatgatgttggctgtgggtttgtcatacatgactcttattattttgagacatgttccctgtatgcctagtttgttgaaaggtttttttttattatgaagggatgttggatttaatcaaatgttctttcagcatctattgagataatatgtttttatttttaattctatttatgtggtgaatcacrtatattgagtcacatatgttaaagcatccttgcatttctggaataaagcccaatttatgctgctatattcagtttgctagtatttgtgtgaggacttttgtgactaggttaatcaggaatattgacctgtagtg

SEQ ID NO: 829569 - DNA, 665 bp, Homo sapiens
tgcttttatctcacataattcaacatttcctttcattgagcagttttggaacactttttttgtggaatccgcaattggatatttggaaagctttgcctcctatagtgaaaaaggaaatatcttcacataaaaactagacagaagcattctgggaatcttctctgtgacgagtccwttcatctcactgggttgaacctttcttttgattaagtagttttgaaacactctttttctagaatctgcaggtagatatatggaacactttgaggcctatggtggaaaaggaaatatcttcacataaaaactacacagaagcattctgagaaacttctttatgatgtgtgcaatgatctcacagagttgaaactttgttttgattgagcagttttgaaacaccgcttttgtagaatctgtaagtggatatttggagtgctttgttccctattgtagaggaaatatctgcacataaaactagacagaagcattctgagaaacttctttgtgatgtgtgcattcatctcacacagttgaacttttcttttgattcatcacttttgaaacactctttttgaagaatatgcaagtggatatttgaagcgctttgtggcctatagtggaaaattttatatcttcacataaaaactagacagaagcattctgagaaa

SEQ ID NO: 829570 - DNA, 542 bp, Homo sapiens
tggtctctaatggaatttattcgaatacagtgcaatcaaatggaacgcaatagtatggaatggaattaaatggaatggaccagaatggaatggactggaataaaatggtttcgattgtaattcattgcaatccaattgatttgagttgtatggaatcaaatggaatgaaatcatatggaatgcaatggtatgcaatggaatggaatggaatggaattcaatggaaaggaacggagtggaattgagtggaatggaatcgaaaggaagggaatcaaatggaatggaatcaaatcaaatggactcgaatggaatggactggaagaaaatggaatcgaatggattgaagtagaacagaatgcaatggaatgaaaaggaatgaaaaggaatggacacgaatggaatgcagtggaatgaaatgcaattaaawagaatgcaatggaatggaacggagtgaaatggaaagatatcaaatggaattgaacggaatggaatggaatgaaatggactggagtggaatggacttgaatgaaatggactggagtg

SEQ ID NO: 829571 - DNA, 672 bp, Homo sapiens
ttcttcctaacttctgatggtttgctgccaatctttgcattcttgatttgtagctgcataactccaatctctgcttcctagtcacagagtattccctctgcatgtctgtctcatatggccatctttttttaaggctacccagtcatattagagcaaggtcttaccctactctagtacaaccttatctaagagaattgaagttagtatgtcaacatagctttttggcagggaaattaaatgttaataaaacatagttaattactagaatattaactttacattattgagtgttctgatctaggaacattgtgtatataattatcaggtctatatttttagttctttaatattataatatttcataatttcttttataagaaaccacattttatgcaaattttaaacctagacattttatattttatgttttagtgaattttggacaatttttattgcaattctaatgagaaattgatattatatgtaagagcaactactgatagaatttgtatttggtaatcataataaactcttaaaaygtattttgatggttttattggtttccatggcacttatttatattaatcaaaaatgtgtgtctatgctattgcaattggagatattttattatatttttacatgttgcaaaaggcatgtataacaaatctacat

SEQ ID NO: 829572 - DNA, 632 bp, Homo sapiens
tgaggaggacttgatgcatcattgctagctttggagatgaaggaggccataggcaagagaatgcgggtggtgtctagaagctgagtgacagatccctaagtgacaaccagcaaggaaatgggaccttagtcctacatcaacatgctaaattctgccaacagccataacagccctggaaatgaattctcccccagaaccttcacataagagccagctatctgacattttgactttagctttgtgagaatcagggaaaagaaaccaactgaacctactaagacccctgacctatagaacaatgaaacaatacatttatgttgttttaagctgctacgtttgtgatgaattgttatgggagcaataaaaaactaaaatgttgtggctggggtagtggctcatacttgtaatctcagtattttgggaggccgaggcaggcagatcacttgagctcaggagttccagacaaccttggccaatatggtgaaaccctgtctttactaaaaatacaaaaattagccaggcatggtggtgcatgcctgtagtcccagctacttggcaggctgagggaraagaatcgcttgaactcaggaggctgaggttgcagtgagccgagattgcaccactgcactcca

SEQ ID NO: 829573 - DNA, 526 bp, Homo sapiens
gaatgtacacaagaaccataaaaactgagtttcatgaggaaaagtaagccaagttttactttttgcagaaaatattgcttccttgtactgtccctacatcctctccatgccccccsccgccaaaaaataattccagtatgacatcatcacagaacctaattatagtattctcactgacataaaattttatttcatcagaaccaatatttcatgggtgatactctaatgaggatatagaaagtcactttgttttgaaagtaagtcacttagtatcaaccattgtattcattcattcatttatttaagaaataattttgttcttttgttttgttttgagacagagtctcgctcttgtcacccaggctggagcacgacggcacgatcttggctcactgcaacctccaccttttgggttcaagtgattctcgtgcttcagcctccccagtagctgggattacaggtgcctgccaccatgcccagctaaattttgtagttttagtaaagacagggtttcaccatgttggcc

SEQ ID NO: 829574 - DNA, 512 bp, Homo sapiens
ccatcctggctctccagctgcgctgtcttttgtcagcacagtcctgccttggagcctttgcacttgcactctctatggatcttgtcctcacccatcgtggtgtcatggtgcctctctggagtctctgctacaattcacctgctggtagaggccttccctgagcaccctgtctcaagcacccctcctctagtccccgtgttacatcaccgttaccttcacaacttacaagctgtaatgaccttgttgctttggatgttgatccgtttattttctgtcctgtcttccaccactgagcgcacgaacacacacgcgtacagacacccccatggtaagcttcccgagaccaggaaccttgttttccttttccgctgcctccagccttaaacytgcaccactggactaagcgctcagtaaacattcgttgaattaaccattcctgttttacagaggaggaaactgtcattcagaaaggagagccgagtagctcaaggtcccacggttaataaaaagca

SEQ ID NO: 829575 - DNA, 617 bp, Homo sapiens
aattcaggataaatttggcccattttggggtgttcttggtccatttgtggttgcactcaggtggaggagggacccaggaagggtcaaggcctcragtggggccaaactccccagacatctgtgtgacctcaacgctgcacccacaacccaggggtctctgccttccacactggctccacatagtcctccgtcctgcctggtacaggatccatccctgccgcatgcccctcttagaccaccagggtcccccgtcacgtcccaggaccaatctggtgacccctctgcttcaagacatacattctgcctcagtgggggcacatggggactctaagttacccccatccattctgtccaggcccctcccacaggagttaggaggggctgtcttggtggctggtgacctgatgagtgggtgtctccgtgggccccactgctcccctccgaacatccccctgcctgggatccccagactccttacagggccaggctagctcctctccctgtcaccctggggctctgccagctaccaggcaggaggctgtcaacaccgggaggaggacatatccgaggcatctcggacgccaagcgtgagtgagcaaggctcgtcctgctaaggg

SEQ ID NO: 829576 - DNA, 608 bp, Homo sapiens
acggcactccagcctgggcgatagagccagaccctgtctcaagaaaaaaaaaagaaaaagaaaaaaaaaagcaggtggcagagctagcttggtgcacctctgggctccaggactgtcgggagtctgtgttggcttcatctcagtctgaccccggccacacgagcagcttcagccacttcctgatctgaccttggaactcggagtccccctcccagtggttcctgcaaagccccagggggactcggagtggcctcctcttgacagtcagttgtgagtcagcaatttcctctcatgattaagacggtcccaggggagctttggtcacttggaacctaaagacacttgactgatcccattggtcctcctgagtggctcagagtctgggaggccgccagggcccaggtcacacttcctggcctgaccagaccaatgagcccatcgcctggaatctgcaagcccctccgttgagctgggagcccttcgagggactcctgcttgcattaaacctataccagtgctttctgagtttcactctccccmctggggtgtgatgatgataccgcccatccctgaggggcctgtgacaaacgctacccctttatacatcc

SEQ ID NO: 829577 - DNA, 585 bp, Homo sapiens
aattccaaattatatttagagtaattaacaataaaaaatagcctttaaatttgtatgaataaatgatgagataagacattcaatcagagacattgcagwcaattcaatgcagaaagtcagttctttaaaaatgatgctgaaacacaaggacatccgtatagaaaaaatgaacttcaacctatacctcacattgtatgtaaaatttaacctaaaatagatcaaaatgtaaaaatatataaaatttgaaggaaaaaatataagagaacatttctgtgactttaagtcagggaaattgttcttggatatgacatcaagacataatctataaatgaaaaaatagataaaatacactttattaaaatcttgtgctctggaaataatattgttcagagaattaaaaaacagtattttctcccaagattgggagaaaatattttcaaatcacgtatcaggcaatgaacttgttcctcaaatgttaaaaaaaaaaaaaaaactctcaaaacacaaaaataagaaaataaccaaatatgtaaaaataactagaagattggaacagattcttcgccaaagaagatacacgaatgg

SEQ ID NO: 829578 - DNA, 590 bp, Homo sapiens
tttcctgaggcctcctagcaatgcttcctgttaagcctatggaactgtgagtcaattaaacttctttcctttataattacacagtctcaggtattattcttaatagcagtgtgaaaactgactaaatacaatacctaaccaaggaggtaaaatatctctacaaggaaagctacaaaacactgctgaaataaatcataaacaacacaaacagatgaaaacacatcccatgctcatggatgggtagaatcaatattgtgaaaaggatcatattgccaaaagcaatctaaagattcagtgcaattcccaccaaaataccatcatcattcttcactgaactagaaaaaccaattctaaaattcatatggatccaaaaaagaacctacaaagccaaaacaagactaagcagaaaaaaataatctggaggcatcacattacctgactccaaagtgtactacaaggcaatagttaccaaaatagaatggcactagtataaaaataggcaggcagaccaatggaacagaatasagaacccagaaataaagccaaatatttacacccaactgatctttgacaaagcaaacaaaaacgta

SEQ ID NO: 829579 - DNA, 608 bp, Homo sapiens
atcgcacttaatgcagaaaaagcattcaacaaagatcaacatcctttcttgagaaaaactctcaacagtatagaatgcaagttgctcaacacaatagtggttgtggctgcttatgaaaaacccagaactagcatcaccgtccaatggagagaagctgaaggctgattctctaaggtctggtatagggcaaggacacccactcttgccacttctattcaacatagtactggaagtattattaagagcaatcagacaaacaaaatgtattcaaatcagaaaggaacaaatacgattatccttatttattgatgacttgatcttataagtagaaaagtgcaaagacttcaccaaaaaactgttagaactgttagaaataaagtaagtattgagaaaaaggcttgagagaataaggcttcagatgatcaaactactctgagctacaggaggaaattcaaaccaaagacaaagaagttgaaaactttgaaaaaaatttagaagaatgtataactaggataaccaatatagagaaktgcttaaaggagctgatggagctgaaagccaaggctggagaactacgttaagaatgcagaagcctcagtaaccgatgc

SEQ ID NO: 829580 - DNA, 612 bp, Homo sapiens
aaaccagatgcttttccttccacagctgctcttcttccaggcttccttgtttcagtcaatgccacgagtcacctagtggcacagtataacccttggggtcattctgcataccgtttctcatacccctcatccagcccactgccagatcagctcaacctttcaaatattaatatgtgctcttgcctccgcagtccaatctaccgtcagctcttgcctgaccgaatgaaaagcttcctagttctttctggttctattcttgtccctaccagtctttcaacacagcagagttaactttttttatttttttgagatggagttttgctcttgttgcccaggctggagtgcagtggcgcaatctcggctcactgcaacctccgcctcccgggtgtaagtgattctcctgcctcagcctcccgagtagctgggattacaggcatgcatcaccatgcccagctgattttgtattttcagtagagatgaggtttctccatgttggtcaggctggtctcaaactcccaacctcaggtgatccgccygccttagtctcccaaattgctgggattacaggcatgagccaccgcggccgactgagttaacttttaaaaaatgtaa

SEQ ID NO: 829581 - DNA, 531 bp, Homo sapiens
tcaagcctggaggggacgctggttctccagacatggtcccgcccactgcaagtgccaccttggtaagggatttctccgagcagaggcaaacgcgaatttgtggccttcttaatcaagatgaggtcttcgagccctgtctgccgcgccaggtcgcgttaccttcttatgctcctccgccacagccagaccacgaccctcctgcacgcaatcccaccgagactgcgccttttccccgcaccccagcaggtccctaagtaagatggcggcgaacgcacttccggcgtgtgtccttacgggtgcgtccgggcggctgcttgcaggtgccacccagcgggttccagcttgtttgctgcatagattacaacggtgatggcgggcaagcggtccggctggagccgggcggctctcctccagctccttctcggcgtgaacctggtggtgatgccgcccacccrggcccggagtctgcgcttcgttaccttggtaatgagagatgggctcaccaaagacttccctgaagctaaaagggca

SEQ ID NO: 829582 - DNA, 540 bp, Homo sapiens
tggtattgataggaacaaactactgatacatgaaaaacttggatgaatctccagagaattttgctaagtaaaaacatgaattcaaaaatgtcawatactctatgattccatttgtaccacatttttgaaatgacaaaattatagaaattgaggacagattagtggtttccacagttaaccaggtgttgtggtgtgtgtctgtggtcacagctacttgggaggctgaggtgggaggattgcttgaacctgaaaggtggaggttgcagtgagctgagattgggccacagcactccatccaacctgggtaagaaagtgagaccttgtctcagtaaatatataaacataaaaaggcaacaaaagagttaattgtgttgatagaaaatatttgtgtcttaactatataaacctcaatattctaattctgttattatactaaagttttgcaaggtgttgccactgggggaaattagataaaagatatatggggtttctctgaattattttttacatctatgtgtgaatctataattgttcaatata

SEQ ID NO: 829583 - DNA, 540 bp, Homo sapiens
tggtattgataggaacaaactactgatacatgaaaaacttggatgaatctccagagaattttgctaagtaaaaacatgaattcaaaaatgtcaaatactctatgattccatttgtacmacatttttgaaatgacaaaattatagaaattgaggacagattagtggtttccacagttaaccaggtgttgtggtgtgtgtctgtggtcacagctacttgggaggctgaggtgggaggattgcttgaacctgaaaggtggaggttgcagtgagctgagattgggccacagcactccatccaacctgggtaagaaagtgagaccttgtctcagtaaatatataaacataaaaaggcaacaaaagagttaattgtgttgatagaaaatatttgtgtcttaactatataaacctcaatattctaattctgttattatactaaagttttgcaaggtgttgccactgggggaaattagataaaagatatatggggtttctctgaattattttttacatctatgtgtgaatctataattgttcaatata

SEQ ID NO: 829584 - DNA, 360 bp, Homo sapiens
agaaactgttaatgtgactctatttggaaaaaaaaaatatttttacatatataattcagtggaaaatcttgagataagattatcctaatttatccaggttgccctaaattcaatgacatgtattcttatamtaagcaaatgaagaaaaaggcacagccattgaaaagaaagctttgtgaagacaaacccagagattggagtttggcaaccatagccaaggaatacctgaagccagtagacagtggaagagggaaggaaggattcttccttagagcctccagaggcagtggggccctgccaacaccttgatttcagacatatggcttccagaattgtgagacaagagacttatgttgttta

SEQ ID NO: 829585 - DNA, 510 bp, Homo sapiens
gcccaaatcttccccagagcttttctgactgcagaacaggtcttgctaagaaataaacttaaatgctttattacaaaaggaaaaatgcaggaaacggaaagccaccaatctcccttacactaggctcacgaagaagggaaatacaatctttcttgcaactagaatttggtttccttggttttagccatagacatgacaataaatataaattgcctcagggcacatttttatttaaaaaatcccatttacaaaggttagcagttgcattacaatttgagtaaggtttataaaaaaaatggctttatgtgctgggtacttgttttacttctgaaaacaaattagccatcattctgtgctcctgattagagctttgtgtttcctagaagscttattcttttaattattctcaaagtttataaaacagatgagaactttttcctttttattatttgcatttattaaaagctactctaaaaattttcaaacattaacaaaataaggacaatggtg

SEQ ID NO: 829586 - DNA, 510 bp, Homo sapiens
gcccaaatcttccccagagcttttctgactgcagaacaggtcttgctaagaaataaacttaaatgctttattacaaaaggaaaaatgcaggaaacggaaagccaccaatctcccttacactaggctcacgaagaagggaaatacaatctttcttgcaactagaatttggtttccttggttttagccatagacatgacaataaatataaattgcctcagggcacatttttatttaaaaaatcccatttacaaaggttagcagttgcattacaatttgagtaaggtttataaaaaaaatggctttatgtgctgggtacttgttttacttctgaaaacaaattagccatcattctgtgctcctgattagagctttgtgtttcctagaaggcttattcttttaattattctcaaagtttataaaacagatgagaactttttcctttttattatttrcatttattaaaagctactctaaaaattttcaaacattaacaaaataaggacaatggtg

SEQ ID NO: 829587 - DNA, 606 bp, Homo sapiens
aaatacaggctgccagttcaatttgaatttcagataaacgacagggaatattgcatggcacataattatacaaaacaatcatctgttgtttatctgaaattgaagtagaactggrcatcctatatttttatttgtgatgctgacaaccctatactagtacctatctcgcaatgcatgcgaaataccatagtacctggtatatgctcatagtaattacacgtagtaaatgctcaataaatactagccattatttctattattataattttcccattgttaacacttattagtacgtaattattattgttgtgatgactatgtatattccaagaatgggtataccttttttatttaaccattcttttgaggctattctagcttgtaatttttttttagtgtgaataatgtcttgtatttatagtcccctgtttccttttgggaaaattttttcatgataaattataaacagtgagccctaattgctttctggtagatctatgttagttagtcctgctacatgtcaacagtaaatccgctagcattaggtgtataatgtgaacaaaaggttgctaatttaacatggtttaaacagctgcttagttgttt

SEQ ID NO: 829588 - DNA, 601 bp, Homo sapiens
cctggttatttagtaatgaaaaagcagtgtgttcagctgcattgtaactatccagtctgtggatgtgcacagtctgttttctctgaagttatagggcccaagagggaatacgcatggcaggcctgcctagtgcccaccaagccacgctgtagagatagttctttattgtgtgtacagggtctgccaattaacaggcataattttaaaaaataattgaattgaatgcccttaagtgggtcacaggctgtccatttctaatatctgcctcctcgtccccaccacatacatgtacactttgcttatcacatttttgggacatgcctgcctattgaagacatcttagtttgtatcagctgtagcactgcagaaccattaaaagagtttacgctgaaaattcaggtgagttttatcccttaattaggtattctggagacaggataaacattgattggagaggttatagtaggggatgccagttatttgctcrccatatatttattgagcatctactaagtaccaggctctatcctaggtatgtacaaatgtagatacctagacacagtattgtacatacagtagggaatgaaacagaaaattaaaa

SEQ ID NO: 829589 - DNA, 608 bp, Homo sapiens
gataaatgcaaagcatcactaggactaaaatagaatttggggtcagattccttcatggctggggagctctgcagctgtgacagatggatgagggagcaaatgctagagggaaaaaggaaagaaaaaagaatctgtcctaaactgaacctttgttcagacagttaagacttgcctcccagacaggttttatggattgctaggggtctcaatttgtgccctgatgtgtctgagtgagtgtgattttcaggcatccagacccctcctcccaggcccaccccgcacatattctgccttcacttccttgcacagtgaaacgctccattgactgcaaggcttatgaaatgaaaggctctgataatggagtgtaagcatttttgtcttcatgattgtggaaaaaaaaaagcgatgaaattactaagaaatcctcaagatggggtggggaaatgggaacaaatgattcgttgggaaaataaakgcttcagtctaaaaaaatccaagatggaataaaagatgtattcccctcccaatttatagaggagagcaattttttggtattttctcagccgaaaggaagaaaaccttaaatttcttcttttctgtctttatga

SEQ ID NO: 829590 - DNA, 680 bp, Homo sapiens
ttcattcaacctatgcattccacaaagataattcctgagkgttagaaatgtacatagacacaagaagattacaatcaagagaggaaacaggtttataaaaaataattaaaatacaatgtgatcccttagctagaccttgaaagacatgtagaggggaaattattccaaatgagacagcagttgtgagaaacaatatcaagatattttcactctttctagcctggcataattaattgtgattactctggcaagtatgacatcttctaaatttacaaaaacagctattttgtcattgagggaatcattttttgctgtgctgatattacaataataagctggcttgtgtcattgcagaaaatggtctgtaattaaatcttcctgaacttctaaagagcagtttccacaaaatggctgtatcttctaatttcctttccattttctcagcaagacatagtccctatgacaaaagtaagattttttgaatatatttctcagtttcctggcaaagttgctcatttgcaaagtcacacacccagcccacagaaatttaaaaaaaaacatattttagtcattcatttggcaatgctttttacacaaacaggtaattaggaacactgaaaagacttaaaagatcctcaatctgaagtgataacgctcagagtatgtattggataacggca

SEQ ID NO: 829591 - DNA, 641 bp, Homo sapiens
atacacacacacaaacataatcacataacacacatccctgtatgtctagatagatacacctgtctgagaagttctaatggcagctaatatttacatttactactatgtaccagatggtattctmaactctttataggaaagctcactgaaatgcttatgatgtaactgtgagactgatgcactgaatatctttattttatggggtatagaactggagaaaagtcaagttaaagtgcttaaaggtgaaaagatggggatgctaaagattgtatttaaaatagcactggaacactgcaaccatggcagaatggaatcagagaaaggcaaagtctttctccctgcttatctaaaatcaaaggctttcccaaagacaaatgtaaaacaaagcaaaatgtacatgaatttgcttcaatagtcaatgccattattattgttactatttatatgccattgatttacaaaattagatactggttctttatgttcatgtgagaacaatctgagaagcaaaatattacgtatgttgtttatgttgacttttactgaaaatttgcctttctaattacaagagaaacaaaattataacccaggctttcttcaatttgcctagctcttacttagtattcatacacctgtaacat

SEQ ID NO: 829592 - DNA, 612 bp, Homo sapiens
gattcctgtgtcctccatttgaatggataagggcacccattccctcaacctgtagaattgccatcagtcctttacataatctaacaaataattaaactccaagcatttggyattttagccagagcaatttctccaataataccctcttggggcccagtcaataacagcacccatagctagattttggaacactacggcctttggagcattacaatcattccataaaattgaatttagtagaaaatgtccctttgtaggttcctttgagcagtctggcaatccttttgttttattgcttttagtagtgacaggaactctccattcctcatgtggattaagtttaacattcatgagttgaaaagaattgctcctgcacttgataagaatcattactagaggactgtatggtccacatcgaattctgataagaataagctaagcagccaggcaacattccaatacacagtggtggatatttgtagccaattgacaaattaaagtgcataccttttacttctggttgagctggaaacctgtcatcattggggactggcatgaagacactattattagtgtaaacttccactgaggagtccatccaggagacagacc

SEQ ID NO: 829593 - DNA, 567 bp, Homo sapiens
tctccaaaaaccccctcaacacagcattctcagaaacaaaaagaaagaacgcacacacttaagctaggaaaaacacacataattacacctcaccacaaacagagatctggaaaaattkgtcgaatccagcatctttgccttcgccattaccaccctcatatcaccatattacacccacggtgagcaacgataggggcaattgacaacttcgtttctcaataggcctgttgaaaacagcaagcctttgggcatggtttatagttggctacgttttcaagtgaattctcagctctgtttttgccccgtggctgaagcgccatttctaatttgcatgtctcgccctttcccgcgtgggtaggcgtggctacggcgatctgagtccccgctgcggtccagctctgctcgcagcggccggccgaagctgggctggggctcccggtctggaccatccgggggtcaagacagtggtcagggggaaatgcgcgtgggcgtcactagcggtctgtggaagggagttggaggagagtggtccgagctcttttgaggaaagccatcaggtcatcactg

SEQ ID NO: 829594 - DNA, 675 bp, Homo sapiens
aatattaaacctgacttcccttgtttttgtgatacatgcaggtgattcagcatcaatggaatgataaataattaaatcagcacatttatacaagagcagagacagtggtgacttgccagggttaaattaaatggtacaaaaatgccttagggccattttaaacaagagattaagaaatgcaacctaagccagcaggggagagagacgatgtttactttgtcacaaacatcaagtagtatgtcaccttgaatgctcttgcaaggttatttcggtaaccaaagacatttttaataaagctaccctctccagtctatggggtggtttctataaactttagaaataggctaacactggattagtaatatattccatcccacaaacattaattgagcatctaaaatatgtcagagactgttccaagtactgcagatacaggatgaacaatctctaaagtagtgtttcttgacactggctgtctctaaggatcactctcctaggaaccataaataatatcaatatatatcccagtctcaccccattgagattctgagtcaatgtatctggggtgggactaggcatctgaagtttttcaaagctccctcaggtattaaatattcagccagagtggagaaccataggaggtgctgggatccsagatcctcttagaggaaacac

SEQ ID NO: 829595 - DNA, 634 bp, Homo sapiens
ttttactattaagctttggaacatagatatgattctcaaatcttcactttctaaatagtttaggatgcacagtttggtttctatgagaaaagtgttacagactcgaaagttagggagatgtgtacaaataaaatcttaaagtgctacatgaaaacacagataaatatttatgtaagtgtagtgtggaagagatatttctaagcataaatgctaaagtcagaaagcataaaaatcgatacaccttatataacattttgtatatatacaagatgtgtacatacaagatgtatatatacaaaatgtatacatacaaaatgtatatatacaaaatgttatataaatctaaaagagatcaaaaacaaaagtaaaaccataaggacaagctagtaaacacacttgtaacagatataacaggtaaacagttaacatccttaaaataaaatgaactcataaatcaaaagcttatacaagagtatgttccatatcatacaatattgctagaaaaaaatgtacagatatatgaatgaagcaggactgaaaaagtattcacaaaawgttgatattggttagcactgacatattcttattttcttctttttgtacacatgttttaaaatgtcatagtaaacatcta

SEQ ID NO: 829596 - DNA, 588 bp, Homo sapiens
attcatgcaagacttagtagtaacggaatatttacgacatgtcaggcattgtattaaatacttcacatacaatgcctcatatgtgaaatcctcaaagtaatcaaaaaaggttagatactattattmatcttattattattattttagtatatttaacatattattatcatcatcaggactgtcccaccaaattataatttctataagggcaggaaccttgtctgttttatcatattcttccctgtcctatgaactctatcaaagttctcatatgtactgtatttaggttttaggaatacaatttgattaacataaccttcccaaagagaacactagttcatcaaaatgatctctgtaattggtgaaattttagaatatttgtgaaatagtgaataagaacacctatataaccctgcctataatatcctgcaacagcaagaatctgttcttaaagaatgtgtgcttcaaccagtatccatggaagtgccttcattttctctgcggcctaggctttccagcccaggacagcagcattcacccaggggttctggtacatacatttgtccctcttgctctgctatcctcctg

SEQ ID NO: 829597 - DNA, 451 bp, Homo sapiens
aacaagcatattataatactcattttaaaggtaaagaaactgagactcagtgagttgaattgtgttccagtwtcacagaagaagagtgtcacacggaatagagaatggcaaagcaagtcataatatataacattttttaagagttcagatgtacccaatactacactggattcagaccacattttttttaatgcacattctctagtaaaggacacaaaaatttaaacaaataaacacattggcatcacaagtactttaacagaactacctacgaggcatagtagtggtataaagactaaagtatttaacctaggggctaaagttagaaaatgtgtgatagtagtcaatttttttgcactattcttataatgtgaataagattttaatgggtatgaagttgaaaattatcaaacctaataaaggaaacagcaaaattgtattaggtcatatg

SEQ ID NO: 829598 - DNA, 609 bp, Homo sapiens
cttgaatttctctgtactataagacttaaaaaaaggaaacttgtttcttaaacctctttaaaattactttttggtaacatagatttttgttgtctaacatccatccacattctgcttttcattttcccagctctattagttcctggtaaattttgtgcagatcacatcatgcagttctcttgggtgcacaagaatcaaataaagaggctcagccacccatgtctattcctctgccttttgcaaaagacaatctttcctaattagcaggtgtctggttggtttaattcccctgtcactgccaagttctgtaccttggctaccaagaaactgtttcttgaagagattactttctttgactattactgtaaaatacataattactagctttctttaatctgattaattttctccattgatgtctaattgtttatgtttctctactttttggcctgagaacacatatatagtaaatttgttttaaatcgatgtgttcctgaatatatactttgtaagagtaactgggcaatacatatatttttaaatawgtgtttcccctgcctctacctacccttatttaatcatatatttattgtctctctggttagccta

SEQ ID NO: 829599 - DNA, 313 bp, Homo sapiens
tgaaaggtaaaaataacatgctgtccttcataagcaaatttaaaattactagcccatcaacagtaaaaacatrtacttaaagttatttttctcagggatgagaatagcttctagcaaattaaaaaaaaaatcctaccttcaattcctctgataaacaatagaattcatgtaatgaggcagcacggatgatgctgcttgtaaaagaaaaaaagataaacactctaactttaatagagactgtctttgatcttttactgttgaaagttttttgtccccctcacaccaactaattcaccaattctctgattctcca

SEQ ID NO: 829600 - DNA, 620 bp, Homo sapiens
ttcatgatgaaccccaaggaataaaacgttgaggatcaagtggatcagcaaatatatggaggtcatctcactgtcaagggagaatggaacaaaaaaactcctgcaattctgtgaacccagaggatggggagaaattaatgagaagggctgggagtgaaatactgggtccgagggaagaaaaagcatcaaggccaccctccctctgataagggggttttagtttctgttgaaggccccctataaaaaggcctctggacgaaagcatctgggctaggatgcacgtgtaaggacaaatttcggcacaggggtccaagtccttgattgcaactccctgcagcccacagtgccttggctgggcaacaacgctgatgtgggaaaaacagcttccccagtgaggtctgttgggtaaaagcctttccaattttctatggtcgggcttaaaaagatcacatataggtttctaacaagagccacactcctcagtgcttattcmtgaaatacttggtttctgaactttccattataacataaatctcttaagagattatgctgtgtagtctaatggtaaaaagtaagaactctgaaatttggctgcttgggttcaaagaccagctctatct

SEQ ID NO: 829601 - DNA, 571 bp, Homo sapiens
tgtgaactgctttgttactatggtgatttatttaaacttagtgatcctttgattatctcaaaaatatgaataataccaattttataaacttgttctaaaaattaaatgagagaaaaataatcctccttctctatatattgaaaacctacaaaattagtaacattgtgtccagatattacacacttaccttattgaagcctcatcacaaccccgtcttttaaattacagggattattcccagatttttaaacacttaccttatgcaagtctcataacaatcccatcttttatagatgagcaaactgaggctcagatgagttaaaaacacattcaccatcaaatcataatgagtgatggaattgagattcaaatccagttctctctgacaccaaagatggtgcaatataatgaagaccaagttatatccagcacatggagggatcaaaayatgttgattccctttctctaccctcttacatgtgaatctcaatgactttcactgcctcagaacaatcctaaactccctcccaggttgccttgcagaggatcccttcattttggcgacgattag

SEQ ID NO: 829602 - DNA, 628 bp, Homo sapiens
caagattttcaatgtgatcatcattgctacttttcactagcaattatccagtcaatatattgtgaactgctttgttactatggtgatttatttaaacttagtgatcctttgattatctcaaaaatatgaataataccaattttataaacttgttctaaaaattaaatgagagaaaaataatcctccttctctatatattgaaaacctacaaaattagtaacattgtgtccagatattacacacttaccttattgaagcctcatcacaaccccgtcttttaaattacagggattattcccagatttttaaacacttaccttatgcaagtctcataacaatcccatcttttatagatgagcaaactgaggctcagatgagttaaaaacacattcaccatcaaatcataatgagtgatggaattgagattcaaatccagttctctctgacaccaaagatggtgcaatataatgaagaccaagttatatccagcacatggagggatcaaaacatgtkgattccctttctctaccctcttacatgtgaatctcaatgactttcactgcctcagaacaatcctaaactccctcccaggttgccttgcagaggatcccttcattttggcgacgat

SEQ ID NO: 829603 - DNA, 635 bp, Homo sapiens
tttaaaacttgaattgttacagtgagtatgtcttaatataggctacagtcactttagataaaaaattacctcacatctattttcaatattacttaaagatgttcatttagtggcaaatatttttttttttgcctagaggcagatattttgccacatggctatttatgaaactgtatttaaatgcatgtacacatataaaagctgccactgtggctgtaaactattacaagttatcaagattaaaaaataaacaaaaaatatttcagtttttctatgaaatgtctttactcgagtccaaatttagaggtttaaaatgcttcaaattaataaaaccaagtgtttcacatatttcagttggaatggcatttgtcctagttttattagtgaagcagcagactgcattttttcactctcatacaccttcaaaagatggacagaaaaatttgataaaacttctagggcattatctgatgaaacacattaaacactaaaggagatatacaacttcmttgcttgtaaaagacatataagaaggaaacctacatacatatatctatcagttttgtattttcaggaaatatttgctttaaagtgagcttcataacagtatgtgttctccaacaaagccaaggaaa

SEQ ID NO: 829604 - DNA, 555 bp, Homo sapiens
gtctttcctctttccccatctctcagccacttttgtgctagctccaaggcttgggagacacagagtgctctcccttaatctggattgcacagatccccrgtgaaaaggtgagttgcagagggagactggctgctcttgtctcgtactggagtttcactcccttttatgaaccaaatgctatcacagagtctgctttcccacctccccctccacagggtctggagtgttcttctctattcctgtgaattcctatttttcttcttgaattgaagctcacaaagtttatctttatgcttatttttctacttccaagtggctgaggcacactgaaagcccctaatccatcactctaggaaaaaaggatggtttaaataaaggaatgttcatataaaatatatattaattagtgcaaacatattttatttgacatgagttaggtgaatctttgatacattaattaattttaaaattgttaaataaaattagaaatatcttagaatttgccaaggtatgtttctctcctgggattactggtcagttttattttttccttgg

SEQ ID NO: 829605 - DNA, 510 bp, Homo sapiens
  misc_feature 20: n = A,T,C or G
agcctggaggtcctagaacnagacttctgctccatcccttttggaaaagcaagtcattgtgaccagcacagattcaagaaatgggagattcgactctgcctgtcaatgtaaacagcagcatgtgcatgcagggaggaaagaaatcgagggcatcatctagaagactatcatatcacaccattattccaactaatgaacattatgttttagatgggtagtactagctactcatctctcccccagaaacccaagctaagcatggacatattgaagagaatgtcagcaccattaaaaaaaaactctagaaaaatcacatgtgatgactgaggttaattcagtctgtcaattacatcaatataattgccttcttgtagccctaagtatrgtgaagcagaattgaattctacaaaagtctttcatctgttttcctatggaataattaacaaacccaataaatgtataaatagcatgaagtccgacttattttagatttttacctcataatttcaa

SEQ ID NO: 829606 - DNA, 510 bp, Homo sapiens
  misc_feature 20: n = A,T,C or G
agcctggaggtcctagaacnagacttctgctccatcccttttggaaaagcaagtcattgtgaccagcacagattcaagaaatgggagattcgactctgcctgtcaatgtaaacagcagcatgtgcatgcagggaggaaagaaatcgagggcatcatctagaagactatcatatcacaccattattccaactaatgaacattatgttttagatgggtagtactagctactcatctctcccccagaaacccaagctaagcatggacatattgaagagaatgtcagcaccattaaaaaaaaactctagaaaaatcacatgtgatgactgaggttaattcagtctgtcaattacatcaatataattgccttcttgtagccctaagtatggtgaagcagaattgaattctacaaaagtctttcatctgttttcctatggaataattaacaaacccaataaatgtataaatagcatgaagtccsacttattttagatttttacctcataatttcaa

SEQ ID NO: 829607 - DNA, 536 bp, Homo sapiens
ataggcattttcttcagatgttgatgaaaataattattttatcactatatccagataattccaamaagcaatatgcttgttgaggtgaaataatttttctaagatacaaacagaaaatatatacgattgaaatagacactaggtgatatttcacatatgcaatatgagctctgtttctttgacaagacagatgaatgaagaattcatgtttgaatgattggcattagtctaaagtattaaataatgaaagtgtccatattctctgcccagtatgatcttttaaaatatcatccacacaaatacaagtgaggtcatattttttacaatgaggcatcaaatttaaaggcagcaaaaaaataatgaatatacctcttaggctaattgtttaccttagtggttttaatgatatggaaagttgaagtttagagtgagaaaagcaccaaaaaagaaaataatcagtctcctgactttcatatctggtagtcttagactgaatgtcagaactgtcacaggtcaaataatggcccagtatgttt

SEQ ID NO: 829608 - DNA, 551 bp, Homo sapiens
cacacattttcaccaggtgaattttaaaggctataagagttcataaaatcttagcatcctgagtcatttgagagtctgataaacatcatttaaatacgtaattwaattgtttctcttttcttgttagagaaaggtggtgcaaacttattcctggaagacggtcagccatattaataatgagcaaaatgcctattgagttggttttttaaatactaagaaaatgacttttgaagttaaaacacatgctaactgttgcttagttttaaatatatatatatggagtggaacaaaagttcccactcaacagcttactgaaaaatacaaaaaggaatgcagttttcagcaggttctatttgccataaaacattttcttttcttaccattgttttatttttttctttctggtctccccctcttgccaacgttcacagctggacatctttgtccatctttcaggtactttgtgttgcatatccgtacgtgaaacacatatatgcataactattcaggtttccctcctgtctccattgttggcagaattctcattcaag

SEQ ID NO: 829609 - DNA, 551 bp, Homo sapiens
cacacattttcaccaggtgaattttaaaggctataagagttcataaaatcttagcatcctgagtcatttgagagtctgataaacatcatttaaatacgtaatttaatkgtttctcttttcttgttagagaaaggtggtgcaaacttattcctggaagacggtcagccatattaataatgagcaaaatgcctattgagttggttttttaaatactaagaaaatgacttttgaagttaaaacacatgctaactgttgcttagttttaaatatatatatatggagtggaacaaaagttcccactcaacagcttactgaaaaatacaaaaaggaatgcagttttcagcaggttctatttgccataaaacattttcttttcttaccattgttttatttttttctttctggtctccccctcttgccaacgttcacagctggacatctttgtccatctttcaggtactttgtgttgcatatccgtacgtgaaacacatatatgcataactattcaggtttccctcctgtctccattgttggcagaattctcattcaag

SEQ ID NO: 829610 - DNA, 538 bp, Homo sapiens
attggtgccctgaaatggaagagaaacaacagtcaactttatatgaacaggatgaaatagcatacaacaggatgatattaacatatctctgagcctgtgagggacagggaacagacttagagcaatccacccttgccgttaagatctattttgaagtgagacaggcgcttgtctcaaaggtcagggactaaatgtgtcttagagaagtcatcgtggttgttttaccttttcatccacctttgaaataaaagattagagataagatgaaatctaactagatccttgctaggagaatgaagttttaaaaggagagccatagtcacagctgtcttcagagtaggtagatgccaagtcttagggaagtacaggattaaccatgttggtaatgacagaacctaaggtatccccagcagtsttctttaagagtgtaaaaaacaaggattaggagagcaggtgattggacgcagctgctgaataatcttcttaacctcatctttactccacagggagaaaaataacaggaaaataaaagcttcca

SEQ ID NO: 829611 - DNA, 538 bp, Homo sapiens
attggtgccctgaaatggaagagaaacaacagtcaactttatatgaacaggatgaaatagcatacaacaggatgatattaacatatctctgagcctgtgagggacagggaacagacttagagcaatccacccttgccgttaagatctattttgaagtgagacaggcgcttgtctcaaaggtcagggactaaatgtgtcttagagaagtcatcgtggttgttttaccttttcatccacctttgaaataaaagattagagataagatgaaatctaactagatccttgctaggagaatgaagttttaaaaggagagccatagtcacagctgtcttcagagtaggtagatgccaagtcttagggaagtacaggattaaccatgttggtaatgacagaacctaaggtatccccagcagtgttstttaagagtgtaaaaaacaaggattaggagagcaggtgattggacgcagctgctgaataatcttcttaacctcatctttactccacagggagaaaaataacaggaaaataaaagcttcca

SEQ ID NO: 829612 - DNA, 613 bp, Homo sapiens
tccatgcctgagtaccttcaaacagaagaggctaaccagctgaagaactcagcagatctctctgggatggtactcagtgcaataacaggcacaacagattgagttaacgtggtatrtggtagtgctggaatagagagggtcagtgttgtaggatgtcagataaatgaatcagtttgatccatggaatgggctgaaggttgagagagattgataccctgagagaggagtcagccaaggccatattcttctcgcctccatgttgtccctgaaaaccaaaaaaagaatgaggggctggagccccattctgactttcctctctctaagcaagatggcgctcttcattattcatgaaaaatacgatttccatagaactctgtgtccattcctatgttattcattttttttaaagtgactaaaatattttctaatgctctttgtgaaactctaataacgaactttcagtgagtgattctcaggttactctctcgtcagtagccttcagccaaggacggatgccaaattttagacctgtgattaccggaggttatcatctgatctgatgactttagagactcatcattgctcctcaaatcagttgtgacacaaaggcttg

SEQ ID NO: 829613 - DNA, 629 bp, Homo sapiens
cttcttgtgagagcagttggagttatacagagcaatattttgatttgttttgagctacactcatgtttacttgctctgtgaatggcttactgatttttctsttctactttctaactttacaccaaaaccactattagctccccactatttaaaaaaaataaataatgaggtcaaacatttgttgttgtcatgggcgacatggtgtgtactggtgtgggtgtgagagtgtgtatgtgtgttttgctgtgtgatccaggcatataatagacttctaatacagcttcactattaagatgacaactgctgaaattcagtactgccttttgccctctctctgatttccttatttctctcttagtgtatcagccatgggaagacccaatctttcccttacttatgatgcatctttactggagttgacagctcctttctttgcccatattctcctgcaacacaagtttgtccatagttccatcccctgagaaaacttagacttcaagctgtacccccttatctattatctcttcagtacagaatttcattctttttggaaaattccctccacatatcctagcatctatggcattgtcatttgtggactgatctggccctgacttgtcctaaagcct

SEQ ID NO: 829614 - DNA, 636 bp, Homo sapiens
accttgaagtctggacttcctgtagagtgggtaaattctctggtagtctttgtccacagccagcatttcacataccgtcacagaatcwtagaaccttaaaggtctgttagtccaaacatgcccaaatgacattaaagtttatttgaaggtcaaatgaacaactatcaaagatcttcaagtgagagcaatttaagagaaatgttctgctgaatccttctttttaataattttttccccatttaggaattttttggccactggggaaaaaatctcacttttaatagataaacctttttagggtgactgctaatgtgctgataaagttgcctgtacttgtgtttattccaattattacagaggttgcctgcatagctactcattcactcattaaatatgtattgactgcctactgtcacttctgcttttctgggcggtggtaagagaggggcaaatgagacaaacaaggtcactgctctcagcaagcttatataacagcgagaagacaaaataagcaagcaaaacagcaaataatataattttcattaaaagtaatcacagcaaaaaaactaggtaatgtgatgatgactagatgactggggttgggtagaatgtggcagcaatattagttggagttat

SEQ ID NO: 829615 - DNA, 636 bp, Homo sapiens
accttgaagtctggacttcctgtagagtgggtaaattctctggtagtctttgtccacagccagcatttcacataccgtcacagaatcatagaaccttaaaggtctgttagtccaaacatgcccaaatsacattaaagtttatttgaaggtcaaatgaacaactatcaaagatcttcaagtgagagcaatttaagagaaatgttctgctgaatccttctttttaataattttttccccatttaggaattttttggccactggggaaaaaatctcacttttaatagataaacctttttagggtgactgctaatgtgctgataaagttgcctgtacttgtgtttattccaattattacagaggttgcctgcatagctactcattcactcattaaatatgtattgactgcctactgtcacttctgcttttctgggcggtggtaagagaggggcaaatgagacaaacaaggtcactgctctcagcaagcttatataacagcgagaagacaaaataagcaagcaaaacagcaaataatataattttcattaaaagtaatcacagcaaaaaaactaggtaatgtgatgatgactagatgactggggttgggtagaatgtggcagcaatattagttggagttat

SEQ ID NO: 829616 - DNA, 630 bp, Homo sapiens
acgacttctgtattaaggggaatgatgaatgttttcacattatgggaaccattttaagcacaaccttaaaatagtgctttagagataggtgaagacatcgagaaatttgtctctacattttaaaccttttctctcccacaaggattttttagtaagaatatgtttgtactagagctaagagaatgtgaaagaaaatttctagccttgagtgttgctgccacctacatggtgggaagactacaaacaaaatctaacacctttcagacaggcatcagctgcagtatgttttctatgaaaatgtactttagaaatccccaaatttgtttatttacttcactatcctgaaggcatgttagtatttgttagtttcgcctcattttctatctcaaatacttgcagacattggagtaaatggttttgcttagactggtgtgaatacactgattatttgaaatagaagccgattcaaagaattcttccttattataaaaaaatcccaagtgcaacttgatccccatagctatstcttagggaaaggatgaaggttcttaatctcactgtactagaggtcctccctctttcctaccctagcagattctaaaatccaaaaaaaaaaaaaaaaaaaggaac

SEQ ID NO: 829617 - DNA, 591 bp, Homo sapiens
atttgtttatcatatgtttatcaagtatgtrctgggtacccagcactgacctaggcactggagatataatagtgagcaagttagacatatccccctcccttcaggagctcacagtctcattgcagcagaaaagaaaccaggtgatgaaaacacagggtggtcagtggtgtgacagaagtacaggttaggtcacttaacatatactgggcaacagagaggcctttccagaggttgcccatgacatgaagatctcaggcaatagtgggaaaggggaaaaacctttaggcaggaggctgcagactctccacggctgcccttctcattgtatccctggggccttgctcagtgcttggctcatggaaggtactgaaaacatttaaaataaataaataaatgaatgatgggacagcatatgcagaggttgagagccatgggcagtaatcggtcctttggaggaactgaaaagggtatggtttggctgagttgtagagtttgaggtaggtagaaagaggcaaaataagactagagagacatccaaagctcagttgtaaatgagccttatgaatcatctaaataatctgcactttatcc

SEQ ID NO: 829618 - DNA, 620 bp, Homo sapiens
ggaaacagtacttaactaattgctagagcaaatcctaatatccaaatgtttaaagaaagcaagcagctttctctccaggaaaacaaattataattgaaatccatagtatacaattgggatttaaaactttacaataagatgtaattttatcttcaaaatggtggatggtttttgttttgttttgttttgttgtttttttgagaaagagtctcactctatcactcaggctggagtgaattggcttgatctcagctcactgcaacctcatcttcccgggtttaagcgattctcctgcctcaacctccgagtagctggcattacaggagcccaccacagcacccagctaatttttgtatttttagtagagtcggggtttcgccatgttggtcaggctggtctcgaacacttgacctcaagtaatccaccaacctcggcctccgaaagtgctgagattacaggcataagtcaccacacctggcctattttcaaggaaatatatgatataacattataagacttttgtagaattctgggaaataacactaaacagttgaatattaaaggatgtatttgtascctttgattggttagataggaggaaagagctttagtcatccatt

SEQ ID NO: 829619 - DNA, 605 bp, Homo sapiens
acaccagtcagaatggctattattaaaaagtcaaaaaataacagatactggcaaggctgtgaaaaaaagacaatgcttatacayggttggtaagaatgtaaactagttcggccattgtggaaagtagtttggagacttctcaaagaacttaaaagcagaaccaccactcaacccagcaatcccattactgaattaatatccaaaagaaaacaccccattctaccagaaagacacatgcacttacatgtttacatggagacaacctaggtgcccattaatggtgaattagataaataaaatgtggtatatatacagaatggaatactatgcagtcataaaaaagaataaaattatgtcccttcaagcaacgtggattcagctggaggccattatctcaagagaattaatgcagtaacagaaaaccaaataccatatattctcacttataagtgagaactaaacaatgggatctcagggacataaaggaactaaacaagaggtactcagggacataaagatggcaacagtcaaaactggggacttctagaggagagagtgagagggggcaagggttggaaaactaactattgggtactatgctcaat

SEQ ID NO: 829620 - DNA, 541 bp, Homo sapiens
gctgggtgtcatctatggcaaagatcaaactcaggactcttctgatcccaaagtaggggcttgtccctattaagaatatccaatttaaaaaarcacacatatgcttgaaattctgttttttacagtctcaaaaaaaaaaaaagaatttaaaaagcctaaaattactacagatgctttgccttcattttgagtaaatcatttcttttttgaaactaaatccatgtatgtacaaactcttccaggttaaagactaccttgccattctctgtaattttctatttaactaattatcttaattaattaacatattaacttattttaaaaatctaattttaagactttggagatgctaaataactataggttgagtagctcttatccaaaatgccttagaccagaagtgttttggatcttggattttggaaaatttgcatatacattatgaaatgtcttgggaatggaactcaaatttaaacatgaaattcatctatgttttatatacaccttatacacatagcctaaaggtaatcttatacaatat

SEQ ID NO: 829621 - DNA, 638 bp, Homo sapiens
gccatagagttctaagcattttctccaccttaggagagtttttattaccgtttcaaacttgttacttgtaattggtctgtttgttcaggttgtctrtttgtttttgtttcaattatgttaggttgcctgtgtctaggaatttatccatttcctctagtttttccagatagttagcatatagttgttcagagcagtctcttgtggtctttatgtttctgtgcaatcacttgtaatgtctccttcttcatttatgattttgtttaaattattctttttttattggtttgtttagctagtggtttatcagttttgtatgtctttttgaaaaatccaacttgttttgttgatcctttgtatttttttttagtcacaatttcctttagttctattctgatcattatgatttttattctaccaattttgagtttggtttgctctcggttgtctagtttttatggtgcatcattaggtttatttgaaaccattctacttttgtgatgtaggcatttattggtataaaattcccttggtactccttttgttgtattttatacattttggtatgttttgtttccattttcatttacagcaaaaaattatttcattttatttttaacttacttagtgacccattgtta

SEQ ID NO: 829622 - DNA, 620 bp, Homo sapiens
agcctggacaacagagagaccctgtctccaaaaaaaaaaagacttcttctattaaaaaaaacaaattcctggccagtcgcagtggctcatgcctgtaatcccggcacttcaggaggctgaggcgggtggatcacttgaggtcaggagttcaagaccagcctggtcaacatggcgaaaccctgtctctactaaaaatacaaaaattagccaggtgtggcggtgcgcacctgtaatcccagctactcgggaggctgaggcagaagaatcgcttgatccaggaggtggaagttgcagtgagccgagactgcgccactacactccagcctgggcaacagagcgaggctccgtctcaaaaaaaaaaaaaaacctcatttggtaatgaaacgatttaaaaaaaaattttttaaatacatatgtttaaggtatagagcacgtttgatatatgtaaacatagtaatataattgattactacattcaaacaaatgaacgcatccatcaccttacatggttatcttttgtgataagagcacctaaaatatactttgagcaaattttyttatatacaatacactgttattaactatagtccttagactgcccatttgatctctagacttaa

SEQ ID NO: 829623 - DNA, 605 bp, Homo sapiens
ccactcaccaaggctgacttggctacagtcactgatargtgcccaaaatgccagcagcagagatgaacattaggttcctgatatggtactattccctggggtgattagcctggtggcagaatggctacattggaccatttctgtcatggagagggcagtgttttcttcttactggaatagatacttattctagatatggttttaccttccctgcattcaatgcctctgcaaaaactaccatccatggacttacagaatgccatatctattgccatggtaatgccacacagcattgtttttgatcagcgaactcacttcagagcaaatgaagtgcaacaataagctcaagctcatgtaatttgctggtcttactatgttccccaccattatgaagcagctggtttgacaggatgatggaatgaacttttgaagacaattacagcaccagctagctggcaatatcctgcataactgggggaaggttcactagcagagtgtttctcccacagctaggattcacaggtccagaaatcagggagtgaaaatgggagtgacaccactcactattacccatagttacctactagcaaaaatttgcttcctgt

SEQ ID NO: 829624 - DNA, 245 bp, Homo sapiens
caactgatagtaaaagcagaccaatcactgaaatacaggcacttrcgatgtttgctactaaagtataagacacctgcaatagagaaaaataatcatttggtcattggaaattatccatatgcatcattgacaagtatattaaagtaaaagtttttttaaaagtaaaaggtttatataaattctgatcttttcagcatagtaggatcattacaaagactgtcagaactgcagatttgtcaggatcc

SEQ ID NO: 829625 - DNA, 624 bp, Homo sapiens
agaatcagctggcccaaaatgtcaatagttctgggttgttaactctgctaagggctgagagtaacgcaccctgtgagaactgctggccagaacaaatcctaygtgaagttaactccataagtcactgtgagtaactcacatgagtccatgtgagttaactccatggcgtcctggagatgtggtgctctccccaaggctgtgaaatttccccatagaccctgcctgtggattgcatcctgcagacttccagggaggaagcatgtgcaccacgagagagccaccagacccacaccaggcaagatcaacaatccagagatgttcccatgtcttctaggaaaggacacaacccagagggcagagctgcattcgtaactggttgttatcagccagctgaggccctggcagccttgaagtagccaagcatataatgatgtggatgtgaaagcccatactgaaggccctgaaggtccagaaccatggggttctcacctcccaaagcccttcctagtcatcaggagagaccctgtttgcaaaatatttactcaaggcttaattactaataaatccctgtgtggagccattccatggagagactgcaccacagtgtggtctggtaatcaatgc

SEQ ID NO: 829626 - DNA, 503 bp, Homo sapiens
acatagtcagcagcgcacagtccaaagctgtgccttgcgtctgctacccatttgtcacatgacttggagtgtatctctctgcctttctgggcctcagttttatcatctgtaaaacgggctgggtggactggctggccttgaggttctttcattatgaatacagtctgtactccagcccagtgcttctcagactttaccatggacaggagtcacctgggcctattgacatgcagagttttggggtctagggtacagccggcaactcagcatttctaacaagcaccccaggggacgccactgctggtgtgtgactgcacgtggacaggtgcagccggggtgtgctctgcctcactcctgggagtcacgtccacacccatccrcacatacttggaaaatatgggtcaaaaatgccaaggagcaagttacttcaaaaagtgcagttgttctttgtcccttaggcctatgtccatggctctgaaactcccacgtgtctctggggtgga

SEQ ID NO: 829627 - DNA, 349 bp, Homo sapiens
ggaaataagtcagacagaaattacagtgtataaaaattaaactgagtgtgcctgcctctccttccacctcttctcgtgccatggcaaaaccaatcccccttcttcctcagcctactcaacacgaagactacgaggatgaagacatatgaaccacttccacttaatgaacagtacatatattttctcttccttatgattttgtttttggttttcttctttttttttgagacagggtctcactctgtcacccagtctagggtgcaatggcgtgacttaggctcactgcaacctccacctcctgggttcaagtgyttctcctgcctcagtctccaaagtagctgggattaca

SEQ ID NO: 829628 - DNA, 606 bp, Homo sapiens
cccagtcagcgaatcagaatctctggaggtagccagggcatccggatctttttaaagctctccaagggytgcggctacagcaggagggtggagagccactgatccaggtgacttctccacgatgaacagaccttctctattgtcctcaatgtccctccatcccagctttgacgccacggcccgccatgatgttcacacctttgtgtgcacgcatatttcccttggctgtctgccttcatcattttcccctaggaaaatccccaccaggtccagtccagccctttgtccacttgggaccctcgcagtgcagttgatggtgctgggaaaggctgtccggcgtgatagtctatggtacccgcaggaccacttgccccacctgcacccggcactgactagcacttgaccccttgacttggtccaggcctgcggtcattctcctggatgaccatggtctcctcctctgtgctcaagcctcccgcacctcctcccccatctcctgtctcaagacatcatgttgcttcttatttccctgagaaacttggagcaaactcagaacatgcgttattgcccactgacatctcccccagcctcctgctcccgcctccc

SEQ ID NO: 829629 - DNA, 568 bp, Homo sapiens
tgaaaccccgtctctactaaaaatacaaaaattagctgggtgtggtggcgtgcacctgtaatcctactgcgctccagcctgggtgacagagcaagactctgtctcaaaaaaataaaataaaataaaataaaaaaagttaaatcaatgaagccagcggggctgggtgcagtggctcacacctgaagttccagctactcggaaggctgaggcgggaggatcacttgagctcaggaggtcaaggccgcagggagccgtgattgtgccactgcactccagcctggccaacagagtgaaaaataatttttaatgaaataaataagccattggttctcaaacctgcctgcacatcagaatcaccgggtgggggagaggagctcgaaaattcccatgcatggaccccaccccagtcagcgaatcagaatctctggaggtagccagggcatccggatctttttaaagctctccaagggttgcggctacagcaggagggtggagagccactgatccaggtgacttctccasgatgaacagaccttctctattgtcctcaatgtccctccatcccagc

SEQ ID NO: 829630 - DNA, 601 bp, Homo sapiens
ctcatgtgttccagaaaactgttgttataggcataaatttrcagcatgactcttatggattaagaatgctgcatttctttatttctcttaatcaaatcaaatttggctccaatccagagagatctaaagtcattatggggaaaaaatgtaaattaaagtcagtcatgttttctggtcccctacccctgcattgagggggtctcaggggcccagcactaagggaggccctagacttagaagggaagggggcgtcggtcttcagtccttggggtcgccctggtttcccactgattgccaggcctgatgccttcacagcctaggagctcccagtgctcctcatccctccctttaaataggcactggaatcttccaccctgtaggaccctagagaaaaagtaacctttttcccaggcagtttctgggaagctgtttcccgagatggagccgccccctcctatactgaaagcacctgtttcccctcttggacaacacaccctaattgatttcatagatttagcctcttgaaatcaaagccttctgaaatgtcccagaaatcccactttcatgtcaaccactgcggtcctgaatggaaataatttga

SEQ ID NO: 829631 - DNA, 419 bp, Homo sapiens
taaagtttacttgatcagttattattgtgtccaggagaccaatattagctgtcttgacattactgcattccaggtctagcttctggctccttctaatttttatttttttttgacagagtctcgttctgttgcctaggctggagtgcagcggggtgatctcggctcactgcaatctctgcctccctggttcaagcatttctcctgcctcagcctcctaagaagctgggattacaggtatatgccaccatacccagctaatttgttttgtatttttagtagaacggggtttcrtcgtgttggccagtctggtctctgccggccttgacctaccaaagtgccaggaaaattagcagcaaacagatttatagatgaccccaaagctcagcaagctgtgggatcctctcctgttgccgtaacct

SEQ ID NO: 829632 - DNA, 641 bp, Homo sapiens
atatacttatttatatatgataaaattggcatttatattacatatgtggattttatatatataaatggcctagtgtttatgtgttaccttttttcatagatatggaaataygtacatattttaaattgttacatattctatatttttagattattatatattgtatataaatctatagagagaaatatgtatatgctttttccatatatatagaaaaagagaacacataaaacactaggaggctgtggacacagcacatgggccacagcacagaggacagtgagtgacacacacttggagaaatagggagatttggccatgggagctctgcatgggaaagaaggaaggggcagtgacaaaaattgtgtatttatagaaacgttaagactaccagacactacatatatatatataacatatgtcaattttattatatgtaaatgtcctggtgttttatgtgttacctctttttccatatacatatatggaaaatatgtatatgttttacattactatacattttatattacatattttatcatatatattacatataaataagtatatggaaatatatatttttttctatacacatgaaaaaagaggtaacagataaaacactaagacatggttactggcta

SEQ ID NO: 829633 - DNA, 624 bp, Homo sapiens
tctttaatcgctatcacactccaaaggaggactatgaccaattagaacctaatactgttgaactgyctatattgtctgaacctaaacttggccaattgggtttggttcatttcataagaactcctgttaaggagcacgtgttggcattttgataatattattctcttgatagtcataataatagtccccttggcacgctatatcctctcaagtcttaaatgttgtgtaggcagacatccattgagagttgaatggtctcactccaactgggtcagcaagaacataaaaatcattcagctggtacaaagctgtgacttgtgaattccatattgacaccaaaaacttgtgaaactccatactgaaactaaagaagacttgcgacttccacactgagattgaataagtctttatgatggtgacagagagtggcatcaattcctaaagttttggttaatctctctaaattgagaggctgaccaaaaggggggaattattaaagcaaactaaatatggtctgagaatgactccatacttccatatgtgagtcttatggatgaaacctaacctaataggcagatgggattgaaaaccttccttaggagtatgtgcctgtaacaatagctg

SEQ ID NO: 829634 - DNA, 634 bp, Homo sapiens
ctagggatcaggattgtctatgtcatgccccaattttaatagtttatggcttggatatatcacagcagttctttgactcccattttctttaaattacaaatggagtgtgacttctcttcccccaggcttctctctgtccacttaaatacccttcacacaaccaccagtgtgatttttgtaaatatgtattaaatcctgttgcccaaatgatttaaaatcatttagaaactccttattgccactaaaatgaggttcgaattccctaagtggagcacagagtaccttttaatccagaatccactcacttttatgtccaatcttctccacatagtcacatatgtagattgtatttcaatcctgttgtagcaatcaaagttggctaacataaccattcttttaatacacatgaatatttgcaaataaactacctttcttctcaatgtctcaattgaaaatgtatttttcatcctttttctccaaatcctacctaccctgtttcaatgctttactgaacatgcttgtatgtgttttcawtttgacatatgtcatttgtatataacccatgtattacatttcctcactaaattctaagtccccttcagggcaaaaacaatgctccatacatatagatttt

SEQ ID NO: 829635 - DNA, 455 bp, Homo sapiens
cactattgacatttcttgtcttcatttattataactatgtggttactaaatgctgatcttataattccatcattctttctatatttattgctrgaaattcttttttttttccttttatttttttgaggcgctctgtcacccaggctgaagtgcagtggcgcgatctctgctcactgcaagctccgcctcccgggttcacgtcattctcttgcctcagcttcccgagtagctgggactacaggcgcctgacaccacgcctggataatttttttgtatttttagtagagacggggtttcaccgtgttagccaggatggtctccatcccctgacctcgtgatcggtctgcctcgccctcccaaagtgttgggattacaggcgtgagccatcgcgcccggcctattgctggaaatcctactgtaaaaaagaatattttctgtttatctatttatagcca

SEQ ID NO: 829636 - DNA, 614 bp, Homo sapiens
ttcttcaatcagcttgtgccctcctgtaaaaaggcttccatgaattctcttgtcacaggaaatattgatcaaatcacatttttgatgccacgaagctgagggcagacctgggacagatggtgtctcccactgagggagcggaggcccctgggaggtcagtttctcctgctgctgaacaccatcttccaatcacaacagcaaggaattgggaatgtgtcattttagctgtaaaggaatgtacatgcaaaatgtcctgattaatgattattaaaggaaagaccatttctcttttccccaaacccaacctctttgtcacttcagacccctaagggagcctgtgcaacatcggtgaaggttgctattgacacagggtaccgacatattgatggggcctacatctaccaaaatgaacacgaagttggggaggccatcagggagaagatagcagaaggaaaggtgcggagggaagatatcttctactgtggaaaggtgagatcttgccttcagcctccactggggacagtgagaaggtttcagktgttcattttattattcatcttccgtgtgtgtgtgtgtgtaattgcactcatgagtaggcagtacttaataacagt

SEQ ID NO: 829637 - DNA, 342 bp, Homo sapiens
gcacccctagagattctgaggcaaggtcgtccamcaacctaactttgaaaaacactgccaagtacgatgctctagtgtcctgcttatgctctctccagtatgtgaccttggtccacctctcatcttagtcctcactactgtcatttaggtgctaaaaaccggaagggccttggcttctgtagcttgagaagcttgagataagacatattctaggctgtatgttgaggaagagaatcaaattggtgaggtgttttgagattaaagggacaggctgatgacactgttagcatgcactttccataaagctggaggtctctggtagagttcagctctgttcagttt

SEQ ID NO: 829638 - DNA, 451 bp, Homo sapiens
aaattttctcctttattccttcagacatttacattacaattcttattttagcagacaaaaagacgatgagactgaaaaggctttgtgtgactgacagaaaaaaatccttgtcagcagggccttagcaaagcagtwcttatagagaaatttatagcactaaatgcctgtactggaaaaatagaaagatttcaaatgaataatctttgtatttccatcataagaaactagaaaaaaaattaaatccaaaataagcaagagaaaagaataaagatcagggtaaaaatcaaagaaacagaaaacagaaaaatgagaggaatcacaagctgattcttcaagatcaatacaactgataagcctctagcaaacgtcatcaggaaaagagcgaagatacaaagtgccaatattggacaacagattacctccccacaaagaaaccttcagactccagatg

SEQ ID NO: 829639 - DNA, 610 bp, Homo sapiens
ctggttgtgatcaattcattgtaaatactatagcactcaggctaaccctgtgtatttttcttaatttatttcttgggaggttttaaaatgtatttttttcctttggacttaatgttttcatttttgttttctaagtagtccaaaagaagtttaaaaaatttcattaagagaagaagaaagctaaagcacatgggtacgtgtcatatatttttgcaactgttcatctacgtataaatattatatacactctttattcatgacatatttcacaataaaaaacgtcataataagggaggaagaaatgtttaatttaagaaaagagaggaaaacaaaatccatatcttacaataactcatcctcatttgtatcagttatatgtttttatgcaatgtgccagataggggaagaaaatacaggaggcaataaagaatttcaagaacttctaagccctggaaatcatgccatagaagcatgctctaagattttgtttatataaagatagttttagcagtctatagagctaataaacttcyatcaaacactggcgaggagcaatttggagtacatcaaagagctacgtagttccagcactaagatgaatgtaacattt

SEQ ID NO: 829640 - DNA, 610 bp, Homo sapiens
ctggttgtgatcaattcattgtaaatactatagcactcaggctaaccctgtgtatttttcttaatttatttcttgggaggttttaaaatgtatttttttcctttggacttaatgttttcatttttgttttctaagtagtccaaaagaagtttaaaaaatttcattaagagaagaagaaagctaaagcacatgggtacgtgtcatatatttttgcaactgttcatctacgtataaatattatatacactctttattcatgacatatttcacaataaaaaacgtcataataagggaggaagaaatgtttaatttaagaaaagagaggaaaacaaaatccatatcttacaataactcatcctcatttgtatcagttatatgtttttatgcaatgtgccagataggggaagaaaatacaggaggcaataaagaatttcaagaacttctaagccctggaaatcatgccatagaagcatgctctaagattttgtttatataaagatagttttagcagtctatagagctaataaacttccatcaaacactggcraggagcaatttggagtacatcaaagagctacgtagttccagcactaagatgaatgtaacattt

SEQ ID NO: 829641 - DNA, 536 bp, Homo sapiens
tcaaactggatattatcacttaaaaacagtttctttatttcatatgaaaatatgaaatttatctttttattactagggaatttagrtagtcctgtacacatttggcattaatttttacctttgattttattgctatcttagtaaatccatattttatttataacatctttacattctttcaaaatgtaagtccatctattataagtgactttattgtacagaggaattggcttccaggattggcctgagtacagtccttggaaaaaaatgtttaaaacaggataagaataatcaatatgttataataagtgcttgtaacagtccagagtaagagttgtatacttacttatggttgattgaaaactcttataaatttaatcaccactataataatttataagtgacagatttattcattcccattgttcttaaacttactgcgaagtcttttaacttcacttgtaacaaactggatattagtggcctgttcgaaatttgttttcagctctgtttttctatatttgccattcagatcc

SEQ ID NO: 829642 - DNA, 612 bp, Homo sapiens
tgattatttctggcacacttggcctttaagatctcaaccagagaataagttgacaccagaataaatggagtcattttcattatttattggtattcatattaattatctagtctacttattaattacaactcattctcaagggtgatattaattatttatgacaactgctattggtacaaggcaaggtcaactccaacagtttttctcctcagctgtagcagacccaacacccaaccctccctcttccatgccttctctgcagtccacacccaccatggactaggtgctctgggccgtctcgccatggcctgcccattcccaataccttcggcccctctctaggtggagcgtcttgcatttctgtgttcttggactatgagttaatgtttgttcttgggctatccccaacaggaaagggagccagcgacaacccttgctccgaagtgtaccatggaccccacgccaattcggaagtggaggtgaaatcagtggtagatttcatccaaaaacatgggaatttcaagkgcttcatcgacctgcacagctactcgcagctgctgatgtatccatatgggtactcagtcaaaaaggccccagatgccgaggaactcg

SEQ ID NO: 829643 - DNA, 650 bp, Homo sapiens
gcagatatttgagaatgcaaacccagagatttaaagtgtgtgctgataaatttgacacacaaaggacagacgaaaatttccttgctgcttgttgtggttgaggctttctaggcttaatataacgtgtatgaacaactaaaattaaataaactatggtttctaaaaataagcagttatattttcttcttaagcaatgaagaacaaagtcagattaatgtagatctatgtttatgaacaagaaaagatcacctttgtttaaagaacagtatacgtgatatggtctaatctttgtttaagaaaaaaactcgaaagcagagaaagaaatttggaaagacatatgccaaatggttttctttggatggaagaattattgatggttaaagaaaacactttcttttaattcacactttttataacaagcaacttcattgttgcttgttataggaaatgtcatcagaaagacattttcattttgggaaaaagcacagaaagagggatatcaatttggtgcaaatgcagatggatcactttcgagamagtgcaaaattgaatattaaaaggccttctgttttgttttaatgtagagtgaggattggaatgggccacatctacagggacactcagcagatgtggactgagtgactgcagtg

SEQ ID NO: 829644 - DNA, 583 bp, Homo sapiens
atttgtgctctttcagactttttgatgtaggtgttcaaygctatgaaatttgctcttagcaccacttttgctatattgcagaagttttgataggttgtatcactgtcactgttcagttcaaagaattttcagatttccatcttgatttccttgttgatgcaaagaccattcaggagcaggttatttaatttccatgtatttgtagtgttttgagggttccttttggagttgatttccagttttattccactgtggtctgagagagtacttgatataatttcgattttcttaaacttgttgagactggttttgtggcctatcataaggtctgtcttggagaattttccacgtaccagtgaatagaatgtatattctgcagttgttggatagaatgagaacataaatatctgttatgtccatttgttctatggtatggttaagtccattgtttctttgttgagtttctgtcttgatgacctgtctagtgctgtcagtggagtattgaagtccaccactcttatcgtgttgctgtctatctcatttcttaagtctagaagtaaatattttataaatttgggagctc

SEQ ID NO: 829645 - DNA, 506 bp, Homo sapiens
gtctatatgtaaggactgtagttagagtgatatacttagcatgacaatatggtaacgtattttgtaattatatagtmtctttttgaatatgagcatctactttttatgacagcaattttgaggggatgagtgaacttcttagattgtacagcatcccaagatagttgaactacttcaaaattatactggctatcagagtacatatttacccttttatttttaataatgtgatgcattctagtagtggtcatttttcagctatataaatctggtttcaagtaaggaattagattctatgacagaggctgaactaattattgctaatattatcaggtaagactcaccatatatgaagtcaatatttaaagacgtattcaaaagatctgttctggacttcaattcttcttgaaccacagaaacacaatcaagaaattttctttcactggatcagggtatgagagttgttagattgactgaaggagccagtaataatattttataactag

SEQ ID NO: 829646 - DNA, 653 bp, Homo sapiens
gcatgtgttggccaaggaatgcctgtcagtcatccagggctctgggaggggacgagagtwatgtccccaagaacaggaagtcctttacaaagcatccagtctcttcctgtcctccccttccctaggctggggtaggggttagagactggtggcccaggaggtcacctgccttgccctggattccctcttcagtggccagcaggacttggcagggccaccagctcgccaaggttctgggcggggctccagcctctcctgcctgctccttggctctgctgacctttcacaggcctgacagcagactcagcagggccatcccgggatgctgcaccttctggctggctccctaccagcgcctttccctgtacctggcagcttctctcttggccccacagtcacagcactccacttggtcacaaagacttcagagcaataagaggcgtcctgagccttcagcacctcccaggcctgggatatcgggttcagagggtgctgcagagcagcatgagggtggctccacccatgaggctggtgacactgacgctggcttggctaagttggctcaagccgggtctggcctgacagggtgcagtcacaccaggagcgcatggcagatgcagcctcagtgatgcctctcttgctgggtaggggct

SEQ ID NO: 829647 - DNA, 653 bp, Homo sapiens
gcatgtgttggccaaggaatgcctgtcagtcatccagggctctgggaggggacgagagttatgtccccaagaacaggaagtcctttacaaagcatccagtctcttcctgtcctccccttccctaggctggggtaggggttagagactggtggcccaggaggtcacctgccttgccctggattccctcttcagtggccagcaggacttggcagggccaccagctcgccaaggttctgggcggggctccagcctctcctgcctgctccttggctctgctgacctttcacaggcctgacagcagactcagcagggccatcccgggatgctgcaccttctggctggctccctaccagcgcctttccctgtacctggcagcttctctcttggccccacagtcacagcactccacttggtcacaaagacttcagagcaataagaggcgtcctgagccttcagcacctcccaggcctgggatatcgggttcagagggtgctgcagagcagcatgagggtggctccacccatgaggctggtgacactgacgctggcttggctaagttggctcaagccgggtctggcctgacagggtgcagtcacaccaggagcgcatggcagatgcagcstcagtgatgcctctcttgctgggtaggggct

SEQ ID NO: 829648 - DNA, 604 bp, Homo sapiens
atgaagaaaccccgtctctactacaaatacaaaattagccaggcatggcrgcgcatgcctgtaatcccagctacttgggaggctgaggcaggagaatcgcttgaccccgggaggcggaggctgcagtgggccgagattgcaccattgcactccagcctgggccacaagagtgaaacaccgtctcaaaaaaaaaaaatgttcatgcgtttgtttccaaagcatacagtataatgcttagatcacttattgagcccttgccgaatgccaaggacttttctaagtcctgtactttacatgttttaatgcatctaatcctcacaacaattctgtgaggaattgttatacaatcctcattttatactaggaaaccaaggcacagaaaggtccagtaatttgcctaaagacattaagagctggaatttaatctgaggcaatatggccagagttcagttttaaccattacaatataatgcttcccaatcactgaatgaaagaatatgtgtacagcccttggtctacaatgcgtctctgaattataacatcattcccagggaaacaatcaaagaagccctattctaagatactgtattgaatatcagcaatt

SEQ ID NO: 829649 - DNA, 572 bp, Homo sapiens
caatcagacagaattatacacccggatgcctgtgcttcctgaggaccaagatgtagcggacgagaggacccgcatcctggcccccagyccggactccctgctccacacacctctgattatcaaggagctctccaaggtacccttgcaatttggggtggagtccttcctgccagctgactacctggctgtccccagggtccgaccccatccctggaagctttcggcgctgaggctcagactgctctgctttgcgtccaggcctccgcattccgtgttttctgttgggtgcctgcaggtgtacgagcagcgggtgcccctcctggccgtggacagctctccctcgcggtgcagaaaggggagtgcttcggcctgctgggcttcaatggagccgggaagaccacgactttcaaaatgctgaccggggaggagagcctcacttctggggatgcctttgtcgggggtcacagaatcagctctgatgtcggaaaggtgggtgcagccagggaggctctgaaggggtgagacaggcatggctggagggggcaccctggaggcagggacagagggatgct

SEQ ID NO: 829650 - DNA, 556 bp, Homo sapiens
agcagataagagcttactcgaaaggcgtctagtacattttgacttgacagaaattgtttctggtgttttgttttctcaatcagatccaaaccacctaaaagagatgaaaaggagaggaaaagcggagcccatctcctaagcccaccaaagtgcacattgggagactcacccggaatgtgacaaaggtgaggatcatggatctctcctgtgggcagtggggtgtggacaagcaggcctgtgcctgcagatgaacttagaatgtagccttttggaggactggggtggtggcatgtggtttgagtacagcattgattcgttcctcttggtggaccattaatacatgtgtctgggagatttatcccagaacaacactggtactcatcagatggaatgttttaccctgccgaggttttagtcatgatgtgctgagctctctgcgtctgacgtgactgactggtagctgggcgttggcrtgacccttctttccctctaggatcacatcatggagatattttccacctatgggaaaattaaaatgattgacatgcccgtggaa

SEQ ID NO: 829651 - DNA, 657 bp, Homo sapiens
cgaaaggaacatgggattgttattacgggaagataaacaaccaatttctgtccttaaagattttggaaatatagccytagacggaagcccaggtaggttggaactttagagagaactagaagaaagtcaatacgtatgagttttcctataatatggcacagagatccagccttcttctggtaagagagaaaagccattttctcactcacagtctactttacagattattgacagagttccaagcactgattcagacatgaaaaagtataaagcaatatctgaagaaaatttcttagggactttgattgtatgggtgtaatttgaatcctttttctttctgcccgtgtgctcaaaggaaagtttctcattgtaactctccatttgtttgagtgcaatttcctttttctttctgcctgtgtgctcaaaggaaagtttctcattgcaactcttccatttcctcatctttaaaatgtttacttcatagaatgactgtgatatttaaattataatacatatgtaaattttatgacacagttcctggcatatgttccgattgaataaatgttgtaatcaatactatgtgaaagttaaaggtcaagaaaaagtgaacccagatagggaggaatgtacatctgatcctcagtgaatgtccaaaac

SEQ ID NO: 829652 - DNA, 550 bp, Homo sapiens
gggacttgcctgacccagccataacctrgcttttcccctccacctgccctggtagcttaatgcaaaggacagaaacttgcggaaactttatgaccccgctcattgcctgaggcactagagtacctcccttgggtaatataaggaaaacaccaatcccactgctaccaccacagctgagctcttttgcaagtgccacctcctggctagaggccaactgacacagtccattacagcatctgcaggcagaataatacagcattctggaaggaaacttattcatatcatcagctattaccattgtctgcatcactctggctgagcaggaggtcctgagtctgtgcacatgaccagtttattactactgcagctggtatttgagaaagccaacacactaaggctatctataaccaaggaatttcacagactctacatcactcttgtgccatcgccatcagaactggtcctggtacctgcttctgggagacttgaggacatatcacatcactggattccttgcagacattccttagcaccagcctggagtgtggct

SEQ ID NO: 829653 - DNA, 541 bp, Homo sapiens
ttcctaccaacctcagtacccaaagttgtttaaaaaatgcatgatatgtatcttttttattcccattgcaggctttctccaccaccacaacagcatgtggtctgacagaattsgcttcaaagaagaaactaaaagccacctcttgcaggaaactgcactgccctcaacatccagcccctactccttggtcctccaaacccccaaactctgcaggagaaaggcagcatggtacatggggaggaagaccagactgagcgatttggaatccacatcctaatgctgccacaagctgcatgcacaaagaccttaggcacatctcttcatttctctgtacactggtttctctactatgtgtgtattaaaatatataatgtggatgatagtaaactgaacaaagccttaattttctcccaagctttgacattgccaagggcagttaggagacttcaggatcaagtttaggggacaagtttttttctaatactttcaaaaggcccaagtgaagagaggaaggacacctcactttctggctctaaaagca

SEQ ID NO: 829654 - DNA, 643 bp, Homo sapiens
attccgtattgccccctctatatgggcctttctggagctctgactctcctcaattcttctttcctcagcacctgtccgtgaccgtctattgtttgtggaaacccagacactgtgggtcaatgctccctctcaggttgtttgccagcagctaagggaaggtctaggtcctttcttccagagcttctgttcaggtgagaaaacagcttgccttggagctgcttggagagaagaggtttcaggactgcctttcaagcctggcctattgctcctaggcctgtctcctttgctcctccagtactaaatagttctgaatccccctggtcctccatctgtctgcatgtgtcctagatctccctgggcagggattaagtaattgtgccattcccatcagcatgcccaggggtctggcaggagggaagctgccggctggcagcagtgggctgagcaggagccaggggatagtctgctccaactccctgagcagcttgcggctgttcccggccctcagtgggccagccacgtgcctgcctgctytggatctgcctcagctcagaggccagctctcaaaggaagagagcgcacaggcttagatcaaggaagaacgttttccattaccaggatgccccttcaggtctatcccaat

SEQ ID NO: 829655 - DNA, 656 bp, Homo sapiens
cataagaactcacttattatcatgagaacagcacccagggggaaatccaccccatgatcacctcccaccaggtcccatctccaatattggggattacaatttgacatgagatttgagtggggaygcagatccaaaccatatcaggatggataccctaagtaccttgacttgattattacatattctatacatgtaacaaaatatcacatgtatcctacaaatatgtgaaatattatgtatcaatgatctaaagaagaattagtattaaatgaacacattttgctgaacatagagtaggggtcatggaagacaaagttgaaaaaagcaaacatgggaaccaagatggccaaataggaacagttccggtctacagctcccagcgtgagtgacgcagaggacagatgatttctgcatttccaactgaggtaccaggttcatctcactggggagtgccggacagtgggggaaggacagtgggtgcagcacaccatgcatgagccaaagcagggcgaggcatcgcctcacctgggaagtgcaagggatcagggaattccctttcctagtcaaagaaaggggtgacagatggcacctggaaaattgggtcactcccaccctaacactgtgcatttccaatgggcttaacaaatggcacacca

SEQ ID NO: 829656 - DNA, 566 bp, Homo sapiens
tgctcaattctatcaaatatttaaagaactaacactaatcttaaactcatcaaaaaaactgaaggagaaagactacttccaaagtcattctacaaggccagcaataacttgataccaaatccagaaaagaacacaatgaaaaagcaaactataagccaatatcactgataagcataaatgcaaaaatcttcaacaaaatactagcaaaccaaaacaacacattaaaaagatcaagtgatcaccgtgatcaagtgaaatgcattccagggatggaaggatgattcaacatttgcaaatcagtgaatgtgatatatcacaacagaatcaagaacaaaaattatataattattacaataagtgcccaagaagcatttgataaaattcaacatccatttatgctaaaaactctcattaaaatgggtataggagaaacatacctgaaaataawaaagctcacatatgataaacccactgctaacattgtactgaatggggaaatattaaaggcctttcatataaaggctgtaacaggacaaggatccccactgttgctgctattatgcaag

SEQ ID NO: 829657 - DNA, 596 bp, Homo sapiens
gttcttgagttttttctttgttttttttttgttttgtgtgtgtttttttttttgtttttttkttttttttttttttttttgagacagagtctcttcctgtcacccaggctggagtgcagtggcacaatcttggctcagtgcaacctccatctcctaggttcaagcgagtctcctgcctcagcctcctgagtagctgggactatagctgtgtgccaccatgcacagttaatttttgtatttttagtagagactgggtttcaccattttggccaggctggcctggaactcctaacctcaagtgattcacccccctcggcctcccaaggtgctgggattacaggagtgagccacagcacctggcctgttcgtgaattcttgacagcaaatagtgggagttcagctaatatagaatactgaccctatcttaatttatttgagtctatttgatctcagatagtgaaagaagagtccccagccccagaaaagttgcttgtgtataatgggtgcctaataaatgtttgtttaaatgagtttaattaatatcaatggcataaacgatgaagtagatttcaggtgagtatggtgaatttattttt

SEQ ID NO: 829658 - DNA, 609 bp, Homo sapiens
cagtggatactgaaagaggtgaatgaatttgagatgtgtattgtatgctgaaatgccaagaaagtaatggttgtggtaggtttaggaaggggaattgtcgcagatgacttttaratttctgattttggcagctggtgagattgaggtgccatttactgagatgaagaatatagaataagaatgagttttggggagaaaaattaggagttcagcttctaatttttacttgtgaggaagacagatccaagtggaaatgtcaagtagtcagttggatgtgtggatttggatctgagaaaagagatgttggctagagatgtaaatttgtaaattgtcaccacatagatgttatgtatggtggcattacatacctggagaaagatgagaaagagaggcaggcccaagaccaagctctgaggaatccccaaactaagaggctgaacagataaagagaagctcgtctgagaatttgaagagatccagagaggtaggagtcaagtttttcaagagaagagagtattaaaaaaaaggagaaataaatgataacctccttaaaatactcctaaggggtcttctgagtttaaggatccacattacagttttcctttaaaa

SEQ ID NO: 829659 - DNA, 624 bp, Homo sapiens
atgcagtgggttgtatgactataaaaggtaaagcaaaattaaatttcctttgagtatcttgggtgtaaatggaagaagcaagttagggcagcatttgggagaatgaatgaatcttagaggagaaaaaggaaatggagcacaatgacctgagaaaatttaaagagctagatgagaagggaaaaaggaaaaaagtaacacactatgaagcaaagtccatgggttcctggaggtcttggaggaggtggtaaaagttgacctctgaagctcaggtgacagtattgcttttgatggggaggtattctctttctgggacagcaggagggagagggagataagtgcagacacagttaattggctctttgtttgtaaaggatgggcagagtttctattttatcttcttcattatcttttttccatgaaacaggcaagaacacttgctgagggtgagagtagcaggagtgtggtaaataccttgagttgagtaggaaatctttgaaataaatgctgatagcttataggyagctggaaaccataattatgtattacttgtctacgcaagggcttaaagtggatggtaaaacttattcacaactgactttgcagagacagaataatagaagaaca

SEQ ID NO: 829660 - DNA, 639 bp, Homo sapiens
tcagaggggctagcccaggcatatcttctcatggtaagggcagagtataaggagcatgagcagaaatgtacaaccctctgcttgcataacttggcaatgtcaaagcaagttgcaactctaagctcagagttaggatggaagggtcccacaaaatacatggtgaagattgtgtataggagaagggatgatgatctgagatctttaatgcaaccaatcagttacagtgaggctcactctttgtgtctctttttcttctttgcctatactaaccatttaggtgatttcatctaatcccattcccttaagtatcaactcaactgttgacttccaatataaatttaaatctccatctctgagctctactctcaactccagactaacttatctaatatttacttgacagctcactccaattgcacatctgtctaatagatacctatatctaaaatgtatgtccaaaacaaacacttgatttttcttccttaacttgcccctacttcattgttctccatctgtatttgtaatatcatctttaactacttgctcaggctaaaaaatgtggagttattcctgacttctccctytaatgtatttacaagcaatctacgaacaaaccttttggctctgctttcaaaatgt

SEQ ID NO: 829661 - DNA, 444 bp, Homo sapiens
tcatcattgagtatagaattgtgctaacctgtccacatttagtttgttatcagcttttacaaccaattaatgaatttaraaaaaattaaaaaaggaaaaaatcaaagtgaaggcagaagaaccagatgtgagaagacctactcaatcatgcttcacttttccaaaccaaacttccatagaaaaaattttgatattaggtgcaatgccatcacagggcacaaaacaggaagatttatttgtaggattgtaaaatatgagccatatatataagaatgaaagcttcagaaaagtcattgaacaataaactgttcatattctcatctcttcttcttgttcaaagctaaaagatagatactatgttttgaaatatttgccatatatggccagtagctgatattatgtcttctgaagccatcagaaagcagggcaggtttttatacaatt

SEQ ID NO: 829662 - DNA, 628 bp, Homo sapiens
  misc_feature 201, 215, 217: n = A,T,C or G
gaagagcaagaaacagacaaactcatgtgaatgaggaaagttagcactgatkcagctttattttggtcaacaaatctttaggagaaactctgtaaattaaccaaaaggattaatattaatacaatgtagactatccaaaaaaccaaaataggaacaaaaattaaacaccaaaactgagatataccaacactgtgtgacccnaggcaaaagaaggnanccctacaaattgttgaagacaccccaaacctaaaacagatagaggaaaggcccaaagtccacatccagtgatttttggggaagggtaagtacaacagttcagccacaccacctattccgctggctgcttctgacactcactccacatcacctctggcacatgctgtctccctcaccatgccaggacttagcaaggtgaggtctactgacacgcacccagaaatctggcaatcacatcttcccagaagacaggacaggcacttgagactgattctactagaggcaatgaatttttagtacaaagagaatggtttcctggctcttcagtctccgggtttgctgataagaacttttaattcactagccacagatgtgtgcctttttcaaattctcaatcactacttccaaagtt

SEQ ID NO: 829663 - DNA, 564 bp, Homo sapiens
aaaacttaaatgaattaagatacctgaaagcaaatataagaataaaggcatagcatttccrgaatagatagcgcaataggaagacgaaatagaaaaaaagcacaagttacatgaaaactccgctctctaaaagatctctggcacagaaaactttttggaaggaaatggattaaaagcctattaagatttgagagaattagtcaaagaaatcatgaagctgtatgtgaaagttttctgactggatcttagacacgtacctatcatgagcagaatgcaggctgagaaagctgtgcaccctgtaagaaggttgtgtttccctaatacctgtattagagaaagccacggaggaaaacagtaaaggaagaacccctcccagagtggagtcagggaccacatagaacaatggacaaggaagctattcccaagagaaaaattagggcctaaacaaggaacattccccacccagggttgggctttcacaatgttatccaagctagctacttacaggttatctttcatgttttaaataagctcctataaaaataaatcagaaaactgatagca

SEQ ID NO: 829664 - DNA, 660 bp, Homo sapiens
ctaaaacactaattgcatactttgggcattcattctgtaccatgccctatgcaagggctttaatcctcacaataactttctgaggttggtactgtcagtattcccatttagtaggtaaggaaaccaagtctcaaaaaataagtaattagccaaaggcactgtatagcaggacaagatgctgacgcaggtccgttcacctccaaagctcttccaattaaccatgggtcctactgcaaccaggagccaaaaggttgagattcgcattttttattttttattttttattttttgagacggagtcttgctgtctcccaggctgaagtgcagtggcgcgatctcggcccactgcaagctccgcttcctgggttcacaccattctcctgcctcagcctcccgagtagctgggactacaggcacccgccacaccacgcccggctaattttttgtatttttagtagagatggggtttcactgtgttagccaggatggtctccatctcctgacctcgtgatccgcctgcctctgcctcccaaagtcrcattttttaataatgctcatatatctagggcaaagacacaaatttacgttcaaagagaggatttttttaaacaaaaactaagtatacatatgccagtttaaaccgataaaaatggtgagcag

SEQ ID NO: 829665 - DNA, 426 bp, Homo sapiens
agtttttaatgttaaatgctgcttttagatacactgtaaaaatacacctatcaatgagtttttttattaaaaacattgcaattgtactagactttaaatactaagcaataattcaggcttcaatgttggtttatagttttctcatttctttcatttaatacctctgtaaaatgaagcagttacttccattttcctgaggtgagataagtgccctgcacaatgttataggcccagtaagtgagactggagctctgatctaatccctttgacattaaagtttgtgcagtaaaccagctrtgtcagtttgccacatttgtaatagtgttcaataaattttcacttaaaggtttaatattaaagtagtagcaagaattcataaccttaattggctttaacagcttttctttccctgaaaacagatgcata

SEQ ID NO: 829666 - DNA, 599 bp, Homo sapiens
gcctccatgtgactgtagcatgaacatagctctgctgcccttggctaccagccttgaaattatgtaatgyctgacaagcttttaaaatctgggtgactttacattgttaccatttatgtggcataaagtgaactgcattaatatttttatattataccatttaaattttcataagatacaactgcacagtagtgaaaatcctcattgaattgatgtattttataccttttctagcatcacccggcacagtatctttatatttcattgggttgttgggagaggaaaatgtctaactgtcctaaaactaaaaacatgtatctttattctcttaatagcctgtgacctgttgttacagccggacaatctagcttgtaaaccctgtaagtaatagtgttcttatctatcaagtctcaaagtatcgccactatgatggtgttagggtagcctctggttgctcactctgggtcctaccttcttccagtctggaagcctcggaacctgaacatcagccagcatggctcggacatgcaggtgtccttcgaccatgcaccgcacaacttcggcttccgtttcttctatcttcactacaagctcaagca

SEQ ID NO: 829667 - DNA, 599 bp, Homo sapiens
cagcgagactcggtctcagaaaaaaaaaaaaaaaaatcagatcttttgccttagcagattcccttatttaagttgttggaaccggcagttcatagggattttgtttccatcctttagtgaggggggtgtgtgcgtgcgtgtgcacatggaaagttaggggaaaaacacaatgatataacctaaccccaaaacaaggaagcacgttacacagttgaggtttggcgcttcagttcctgcccagtctcagaaggtacagcttggctgaccttgtgtgacctatctctatgacacatctcccaagggggtggggaggactgtttctctccagcatggctttagttttataaaagccctgtgcagtcttgcaaactcaaatggttttcttaacaaatcactcacatttcatgtgttctgggctgggcagggcctcgctaatccttggccagctttgtgagtcagaaattatttmaatgattgcctgagtccttttgaggcgagagaattggcaagttaatttagggaggtgcaatgactcttaaacagcactgcagtgagtggcagcattgataaatgtgttagaagctctattttattgtgat

SEQ ID NO: 829668 - DNA, 558 bp, Homo sapiens
aaaattagctgggtgtaattgcctataatcccagctacttgggaggctgaggcaggagaattgcttgaacctgggagacagaagttgctgtgagccaagatcacgctactgcgctccagcctgggtaacagagtgagtctctgtctcaaaaaaaaaaaaggcttgtccgtggaatccagctctctggagctcccactgcagatctatttcttccaattccatccagacagtgtgtttctgtttggcaagcgggctgttacgtggagttttattgcaggtaaaggggtcatccaaactgctctgtggagctagcagagtgaccacaggagccccaggaagcgtgagcgtggtcttcattctcggttgagccaaaaaggctcacacgtttccagacaaggctattcttggcagggccacctcctagggattaatcatactgaaaagctcacagatttaattttgctgaagtttgatctgttctaggaaagtacatgyagcgtggctcaacagagaattttctgcccaaggatctacacggttaatatattttggagatct

SEQ ID NO: 829669 - DNA, 533 bp, Homo sapiens
aggaagggttaaaaggttctaaactacctattttaagcagtttgttagccaatacrtgtttaccaagtattgcacaatttcattttcaagctttaaatggattttaaagataaactgacacataacccaatccatgtcctttttcctacaaacaaattgtcttatttaatcactctgttacagagatggagaaattgaaggcctgtgcagttgacttgcgcagggtcatgtggcaaagctgagacatgtttttttccactgcatcaccctggaatttcttaaacactccaaccagacttacacctttcctctaaagaaagcaagagagagttcagagtccttatttttaaacctgcattaaatggaaacctttggaagagcaggtggtggtaatgctatgaatctggctcagcaagggaacactgaggtcatgatatttttcacatttagtaacttcaaaaatatagagatgacgtaaacttcctaagacttgttgccagcctagcgatactggtaactctgggcaggagggc

SEQ ID NO: 829670 - DNA, 622 bp, Homo sapiens
ttagatgtgagaggaagaagggtaccagaggctaatattcagaaaaaaaattccagaattaayttctcttgcaatgattgtccactttacttaacccttggcttagaaggccattcaagtgaaaactttaaataagcaaaagacaaagtgtttcctcaaaagtctcagtaatctagagtttgaatggtcctcagtgttccagaatcccacgttctctttttccttatgtcccctggaagagttttgattcactcctacaaagcaatatccccttttcttcaaagaatgtctgtatttcaagccttctctttgaatgtcatatctcagatgcatctacactagaactagtttagccaagttggccagtgcagcggttaccaggtagaagaatctcaatagcttgcctcccagcttgtacacaacagggaggtggccatgggggccttggtgtttcttggtgagaactggggctgtttaagcatcatctggggtggaactagaattcccaggaagactgattagaactaaatgttcttttgtttgatcttgatcttactttaaaatctctctgtaacaagggagattgtgctggctaagacacatgtatattttccctttcctg

SEQ ID NO: 829671 - DNA, 504 bp, Homo sapiens
cacaagtaacttaaaatccgtttaagaggggccactccaatgcctgatgaagtgagcaaggtgaatgatatggttaggctttgtgtccccacccaaatctcakcttgaattgtagatcccataatccccacgtgtcatgggagggacccagtgggaggtaactgaatcatgggagtgggttttcccatgccattctcctgataatgactaagtctcttgagatctgatggttttataaatgggagttcccctgtacaagctctctcttgcccgcaaccatgtaagatgtgactgctcctccttggccttctgccatgattgtgaggcctccccagctatgtgggactgtgagtccattaaacctctttcctttataattacccagtcttgggcaggtctttactagcaacatgagaacagactaatacagtgaagaatcaggaaaactatttaggcctgtggagaactgggagcccctgcaggggaggaaggttgagactctgc

SEQ ID NO: 829672 - DNA, 420 bp, Homo sapiens
aagttctaatgtttcttagcagagtaggttgactacagtaaacaatatattggatctttgaaaatagctagaaaagataactttttggggaaggttatatatacaaatttactttttaagtgttattataatttactggattaatttggatttttttattttagattcaggaagtgcatgtgcaggtttgtttcctggttacattttctgatgctgaggtttgggtcatgaatgatcccatcacccaggtagtgaatgtggtaactaagaggtttttaaccctttcttcccttcctccctcccacctccagyagtccccagtgtctgttgttctcatttttatgtccctgagtacccaatgtttagctcgtacttataagtgagaacatgggatatttggttttctgtttctgcattagt

SEQ ID NO: 829673 - DNA, 479 bp, Homo sapiens
aaaggaaaatatataaaggaagatatagttcctaaggtggtaaagtcatctggaacttggactaatgacattgttttgttggaaagatttgtttatatatataaaaggaaatgttggctttcagttcatcacatttcagggaacaatgggttctttcttcaaagtgaaatgtcatctgttttcctagagaagagaagctgctgcagctgagctgggaaattaactgctaaaatagccggagagaaagaattgctgataactgggacagattagctgttctagtccatctcatgcctatttatttccacgcaattggtgatggggtttcagctcagtcctgcatcccccttttcttacccctttggcaatacataactgcaggtcctcagtgtggactcaagcccartggttggggagttgatttctgaatagaaaaggctgtaacctgggaacatttccaaattcacaatttcattata

SEQ ID NO: 829674 - DNA, 519 bp, Homo sapiens
aatggtttaatacaattttattatcattaatgaagcagarttttggggaatttcccacattgccacatactatttagactatgcaaatcctatcccaaacccaactattcaatattatgtgttttttttttttccattcaaaactgacagaagaattttgaaatgctccctggactccactccccttctcccacatgcactgaaagaaaacacacacagtctgttggactttcggacttatactcccaaaagtgtcatccctgtataggggaacatttgggatgacaatgaaattctttgagcaaaaacctgaagagataaaaattacccccaagtctagagaaagcacggacatggagaagagtgcacagcaaggctgtggggcctccgtggattcctgctgccaccctggggggcatgtggacctccgggagctgctagcagagaacatccaacaaacacacctttcttagtcctggctgcatattagtggagatggcccagggaagttgatgtctt

SEQ ID NO: 829675 - DNA, 604 bp, Homo sapiens
aggctagttgtcttagtcattttggattgctataacaaaaataccaaagcattttgcttttgaaaataacagatacttttctcagttttggaggctgagaagtccaagaccaaggcactaacagaagaaatttctggtgcagacccacttcctgattcatagcatagggacagaaaaggtgtaaaacctttcttaaaaggatcaccgcctacactcctatataaaagacaggttaacaagagaaaagcataacaaattcacttaatcaaagttttatggggcataggagccttcagaaataaagactcaaagactcaggaaaaactgtctgtttttgcttaggttcaataaatattggacagccatatagaaatgtgattggacaaaagagaatgatctaatggaatagaccaagtggggaatccagcaatgcctgtttgttcagattcttctttgtctctctgtgtggcatttattcctcccagttagaaagtaggactccttttggaatgagagttttatgacckaccatcagacaaggtaggccagattatttctttatggccagcttctacacagaaaggtgggagaaagttagaatgat

SEQ ID NO: 829676 - DNA, 604 bp, Homo sapiens
gtatgttatcttaattagagcaaaaaattgatgactaagaaattaaagttcaagccctaatactaccaygaaccagtggtgttccgggagttagccatgttttctgtataagttgcattttcctgtctataaatgtggatgtaatggtttcctctaatattccatggttgcagcatttttctgcctcttgataattatttgttcaatatctggcctccctgtaggtagcatgaggacaagattctgcttgtcttttcacccacatgtctttgtatctatcacagtgtttggcatctagtggtcactcaagtgccctttattgagtgagaagacacagggattcattcacctgagagactcaggtaatgccaatacagaatacagtatctgtctaatcagaatattctggagaaagttgttccactcttgtcttgctaatattgacagcagtagtgtgtttgatatttatgccacccagccaatgtttggaagagttattttctctagatgtatgatgttacttctcaggttgctgcaaatgttgagatcattaatttatgtattttagcttcagggaatacacatgcacacatacacattgttt

SEQ ID NO: 829677 - DNA, 635 bp, Homo sapiens
catgcctgtcttgtgatctcaatggaaaaatgaagtgtatacctyaagtgatacagtcttggctgaatcatggaacaattatgccatcaggaagtttaggtattctgagtaaaacaggcactttatttgaaaggactgggagacttcacagatgcatcaaatatgttgaggatataaatgccaggctcaggtggatttactgtgaagtgcttgaacttaaccttcaaggctacctataccctggtataggtccatctcctggctctaggagaggccctggcaatgtggttaacaagtgtcatcaagtcaaatactacgaaatcttgcagtgccctgaatcttacagctcacatataaaagaaacctgataaaagttttccaaatttgaagtcaatccaaaaaatttatatgacattacctgtaatgaattatgaagctgaaaggaacttttccaaattattcaagaataaattacaaattctgatctacatttctaaagggaagactgaattatttttctattctctcaatagagaatattgcaaaatgttattggaagagatgatcaaagagtgtgcaaccaaaaaatataggagaattatttcagaggtatggcaatcagttaataaaaatat

SEQ ID NO: 829678 - DNA, 627 bp, Homo sapiens
gttccattttctttcctgtggcacatacattgtatgataaaggcaatagtctccaccacctaaagattagatgtagaacattgcctttgttgtttaatttacaattctctttgtttctagatattaaaacttctccattaatataaaaaatactttattatatatcatatttctaataatacataatacaggagaaaattggttaatctctagattgggttcaatatattatttatattttgagaattttaattttttatgaaggtctaatatttttggaataagatcaccaacaaagttatgttctagtgtaacttcatatgttgtggataaatgtaacacatgaagttctttatcaagcttttcttttatcattctcttttcatgtccagttaacacttcatggcctgtaaagatggctacaaatgctgtgctttgttgccctcctatcgcattaagaaatttgatcataataacatgggaaataatcctgagaggccagccttcctgcacaaaagcctacargaaagaaacaaatgagaccaaggaaaccaactgtactgatgagagaataacctgggtctccagacctgatcagaattcggaccttcagattcgtaccgtggc

SEQ ID NO: 829679 - DNA, 632 bp, Homo sapiens
tttcacatcaccagatttgtgacggaaacaaatgtctctctgaattccatatgctttatgtgaaaaccgaagcatttttttccctctttcctctctgcagttacacctgaagtgaccctgtttcaaaacaggaatagaactgcagtatgcaaggcagttgcagggaagccagctgcgcatatctcctggatcccagagggcgattgtgccactaagcaagaatactggagcaatggcacagtgactgttaagagtacatgccactgggaggtccacaatgtgtctaccgtgacctgccacgtctcccatttgactggcaacaagagtctgtacatagagctacttcctggtcagtaattcttttagttttattttttatttttttccattcttttaaaagagttaagaaaaaaaaagatgtgcaaatatattttgttcgaggatgctctccccactcttcatttttatctcttccctgaccaaaataaagagatgagttkaggagaatagtacagacatttgttgtaaaaagcccttttttagaatgcagtttaattctactattaatgttcacttctatgctagtagttaattagcatgagtagtatacttttaaaaataatacttatggc

SEQ ID NO: 829680 - DNA, 578 bp, Homo sapiens
ctccttcaggctcaagccatttcccaacctcagcctcccaagtagctgggaccacaggtgagttccaccatggccggttaatttttttttttttttttttttgagatggagtctcacycggtagccaggctggagtgctgtggcgtgatctcggctcactgcaaactctgcctcctgggttcaagtgattctcctacctcaggctcccaagtatgtgggactacacgtgagtgccaccacgcccggataattttttggtattttcagtagagatggtatttcaccttgttagtcatgacagtctggatttcataacctcgtgatccgtccgcctcagcgttttaaagtgctgggattacaggcgtgagccacctcttctggccttttttttttttttttgagacaaagtctctgttatccaggctggagttcagtggcatgatctcagatcactgcaaactctgcctcccaggcaattctcctgttttagcctcccaaaaagttggggattatagtccagtgccaccacccccaactaattttttttgtatttttagtagagatggggtttcaccatt

SEQ ID NO: 829681 - DNA, 516 bp, Homo sapiens
acagagcaagattctgtctcaaaaaacaaaaacaaaacaaaacctcatggcagactttaaagatatccagttccctatttgctactcctgtgcttttgattcagtagttctgggaagagagctcagtgtccacatattacagtgctctttaaagattcagaaggaggcagtcagtggaggaatttgtgagatattttcctaagtccatctgtaatgtcttctttcctacagaaacatagggctggggatctagaaaacttccaacatgtcatgtttcctactttttataagcaggagtctctttctaacctgttggagcaaggcaaagagccctggactgtgtagcatgaagtgaaaataagatgggtgggaattttttttttttttttttttttttttttgagacaatctcactctkttgcccaggctggagtgcagtgacacgatctcggttcactgtaacctccacctctggggttcaagcaattctcctgcctcaggctcccaagtagctgg

SEQ ID NO: 829682 - DNA, 631 bp, Homo sapiens
agttttttttaatttagtagattcaaggtttcattatgtttgcccgactggtctcaaactcctgacctcaagccatctacccacctcagcctttcaaagtgctggaaatagaggcataagccactgcggctggccagtctaagctatttctaacagaacgatgaaatgagtgagataggaaaaggggcatctcatcatcacatcaccaaaggccgacaaatcttattaaacaaaggaagtttagagtctgtcctgtaaaacttataatatatgaagccatctaataatattcacttgttttaaaaagcaggtggatgaatcacaagtagaaactccacctctactaaaaatacaaaaattagccaggcttgcgccaggcataatgggcaggtggatcaagagatcagcagttcaagaccagccaggacagtatggtgaaacactgtctccactaaaaaaatacaaacaagtattagccgggcatggtggtgaacatctgtaatttcagctactcagaaggctgaggtaggagattgyctgacctgggaggtggaggttgcactaagctgaaattgcaccactgcactccagcctgggtgacagagcaatactccatcttaaaaaaaaaaaa

SEQ ID NO: 829683 - DNA, 668 bp, Homo sapiens
ttggagaagatgctttttatgatatctgtctttgaaaatctactgaaacataatctatgtttcagtatatatatatatactgaaatatatatagataacatrtagtctatcctggaaaatgtcccatgtgcacttgagaagatgtgtatgctgttattgctgggtacggtgttcaatgtgtgtctattagatctagttggtttattctgttgtttaagtactctactttcttatttatcttttgtctggttgttttagccattattgagaatggggtactgaaatctccaactattattgtagaacagtctatttctcccattggttctgtcagtttttgttgcacatgtatatattttaatggtttgtcattaggtgcataaatgtttataattatatattcttgctgtactgaactttttattaatgcataatgcccttcttcattttttgtaaattttgaaaaatggaagactattttgtctgatattagtatcactaactctgatcttttctggttactatttccatagaatatctgtttccatcctttcactttaaatctatttgtgtctttggatctaaagtaaatctcttgtagacaacatacagttagattatattcttaaatttatcctgcaaatctctgtcttttgactggagagttt

SEQ ID NO: 829684 - DNA, 595 bp, Homo sapiens
ccaaagatgtggctgaattggtgcaatctcwtgataaaattttagtggataagaagttgcttcttatggatgagcaaagaaagtggtttcttgagatggaatctattcctcatgaagacgtgtgaacaatgttgaaatgacaacaaaggatttagaatattcatacacttaattgataaagcagtgatagggtttgaaaagattgcctccaattttgaaaaaagttctactgttggtcaaatgctatcaaacagcattgcatgctacagagaaatctttcatgaaagaaagagtcaatgaaagaggtaaacttcattgttgttttattttaagaaattgctgcagctaccacagccttcagcaaccaccagccttatcagtcagcagccatcaacaatgaggcaaggttctccaccagcaaaaaagatgacagcttgctaaagacacagatgattgttagcatttttagcagtaaagtgtttttcaaattaaggtatgctcattttttagacataatgctattgcacacttaatggactgcagtataactttcataggcactgggaaaccaaaaagtttgtgtgacttactttat

SEQ ID NO: 829685 - DNA, 599 bp, Homo sapiens
atatatttttattcctactgtctttttttcttttccacctcgtaaagcaccctgacatgcatgataaaccatcaagaagctcaataaagaaaagtactcccaacaggaatcttagctggtactttttgtttgtttgttgtttgttgttgaattcttttctgtcatgtttgttattgaatttttttctgtcaatagcatttgagaaatttgcccttttcaaaactgacattttacccacaattctgcaaacaaaaagtttttgatgatatcttaaacccttgaagtactttatacaattcaaattttaaataagtttctatttttaaaaacatcagaaagtgactgctgtgtatttttgtatagagactattccccatctgtgcagtctgtgtcagagaataagatcttacaaggtgccaggggtcctcctcacacaagctttggctgccttttcagggttgctcttgagwtaggccttagacacaatatgactgatgtctctgccatgagggctactggagtttggatttatatgaccaacatctcctttattcctttacaatagaatgggtctcaataagcttttcctcaacaaatat

SEQ ID NO: 829686 - DNA, 560 bp, Homo sapiens
gagactgatcatatttctaaggcttaattttgcctcttgtatctgatttttcaggtctcattttttatttcaactttaaaaaatgaaatcttaccctgttgcccaggctggagtgcagtgacacaattctggctcactgtatcctctgcctccctggttcaagcaattttcatgcctcagcctcctgagtagctgggattacaggtgcccgccaccatgcctggctaatttttgtatttttagtagagacggggtttcactgtgttggctaggctgttctcgaattcctgacctcaagtgatcctcccacctggtcctcccaaagtgctgggattacagacatgagccaccgtgcacagcctcccatcgctttctgacataaaaatggaccagtgtcatggttcacaatcttcttgcacattgaagtcacttgaggarcctaaattaacttgagtcccacccttcaaaatgctgagttaattggtccaaggtgtggcatgggcactgggacttttaaagttccccaaggtgattctaatgcgtggtcaagattgagaccc

SEQ ID NO: 829687 - DNA, 653 bp, Homo sapiens
catccatatgtgtgaggagttaagtctgtttctgactccaacagggaccaytgaatgatcagcatgttgacatcattgtctgggctcaacaggatgtcaaataatatttctcaatttgagaatttttactttagaaatgttcatgttagtgcttgggtcttaagggtccataggataaatgattaaaatttctctcagaaacttatttgggagctttttatattatagccttgaataacaaaatctctccaaaactggttgacatcatgagtagcagaatagtagaacgtttaaacttagctacattttacccaatatacaaactcgatcttgcctttgaagctattggaaagacttgtagggaaaagaggtttgtgttacctgcatcagttcactacacactcttgaaaacaaaatgtcccaatttgactaaccaaccataaatacagtaatgattgtatatttcaagtcagtcttccaaaataagaaatttttgctgtgtcagtctaagaatggtgtttcttaaatgcaaaggagaaatcattttaggcttgatgtaagaaaatgaaaataataaatggtgcaataaaaatatagaatataccaattggatatagggtagatgttccacatacctggcaaacaaatgctta

SEQ ID NO: 829688 - DNA, 658 bp, Homo sapiens
tataagggctggtcacctggcgttttgagtcctctcacaggtcatagacctctggagagagaaactgaaacacttaagagggtraaaatgactcaatggtaacacactgtggagtcttgagtgcaagcagcacacatcaccacacaaaaacgctaggccacagctcagttattttaagaaaaaaaatgagaaaataataatctaagaatgaggagaaaacaaggagaatgatcccctttcaagcactccataggttttatggcacctccacttgccagagtttatgtgaaatggaagtaatatggtatttgtgcatatatatgttaatgaaaaagagcactaaggtcaacctgcaaactatagagttcctaagttctcttttttccctattttcctttctgccagctttaaatctgctgttatttttctattaagatacaaagcactgtttggactcagcaagctgtttgtttgcaagcaggtgaatttgtgtttgcctcatggcttaagttctgaagtaaaagctataagattttgtgtgtgtgtgtgtttgtgtgtgtgcatatttaaaaggcctttataatttatgtaattttatgttgaattggcaattaaatccattttaacttccttctagcacaggagactttttctttca

SEQ ID NO: 829689 - DNA, 522 bp, Homo sapiens
attgaaaaattaggggtagccccaaagaagcaaattcaacttctatccccttttaacctacggttttcacatcctgccaaaggtgatgcaagcactaaccctgagtgacaggacctcgatgtagccttatcctgtgctttgcaccacagctcttgtgggagactctgtcattcacagtattgaatagtgaaaggtgatggttagagaaatttagcattgtctggtttaataaatatcaggaggaagctggcagataagttttaaccccaggacatttaaaaaaacaatcaaaatactgttctccatccatatagtgttcacacaacacagtatgtttatactagagtttagagacagagtaaagttgttctattatacctcaagggcaagcttaaggtctaattcctccaggaagacttctatgattgtcccaactctaaataattactccttcaactacgtgaccacaagacctcgttagcrccaatgaaaggcagtatatgatagtggttaagagtataa

SEQ ID NO: 829690 - DNA, 611 bp, Homo sapiens
atgggaactacaattcaagatgagatttaggtggggtcagagccaaaccatatcaccggcaataaacaaataaacacacaccatcatgtaagctattgaagaacaagaagaggtagacagtgataacgggcagagtaatttttactaaagtgatgaagtaacctctccaagatggtaacatttcagtggaaaactgaaaaaagttcaagagggagccatgcaagatcctgagggaaaacatcaatgaagaaagaaaaaccagtgcaaatatcccaaggcaggaaagatgtaacagggtaataaaggacctcagtgaaattcagcactgaagctttcaaacttgagccttgagccaagtacttagtaagcctgtatggcatgctcaaattcaggctatctactgcctgggtaatgttcaaatttgagctagcttttactcattttcatttttctattgcctcttcgacagctcccagcctcacacagmaacctccttagacttacatcaaagttcttattgtgtatgaaatattgaaattagcagataacctgtctattttcccaaagcaacgaaggccaagtggagcatgttaaatgcttacataagtaag

SEQ ID NO: 829691 - DNA, 589 bp, Homo sapiens
  misc_feature 1, 2, 3, 4, 5, 6, 7, 8, 9, 10, 11, 12, 13, 14, 15, 16, 17,18, 19, 20, 21, 22, 23, 24, 25, 26, 27, 28, 29, 30, 31,32, 33, 34, 35, 36, 37, 38, 39, 40, 41, 42, 43, 44, 45,46: n = A,T,C or G
nnnnnnnnnnnnnnnnnnnnnnnnnnnnnnnnnnnnnnnnnnnnnncccaatttgaattgcataataatcataacgacaatccagagtgagcaaataagaaacaggccattctttcctgtcagctgggccaagaagcattcatttggtctgtgtgagaatgcagctacagcaatcatggaggagaataatgccaactttgcagactaatgattaatccactgttctaagtagctctaggccttttccatcactcctattctactttcagccaaaacgttggtcatctttaagaaaacttacacttgttcacatgatatctatattcatcctctgttgtgacatggatatgttgggaatgccgtggtgataactttcttttttttttttcttttttttgagacagagttttactctgtcacccaggctggagtgcagtggcgcaatcttggctcactgcaagctctgcctcccgggttcacgctattctcctgcctcagcctcccragtagctaagactacaggcacctgccacgacgcccggctaattttttgtattttttttttttagtagagacagggtttcaccgc

SEQ ID NO: 829692 - DNA, 551 bp, Homo sapiens
agggttacttcagggagtttattcaggcccacagcagcaacaatatcctctctggtgatcagaggttattttttcaccctggtatggggaaaggcacccctcccaaaggaattcttatggcttgctgtaggaaatggcagatcagatagctttttctgcaagtacactttctccaatattttctgcatgaaataatcaatatacaaagcagtcatattttgggatggcatgtgtattaatctgttctcatgctgctaataaagatatgcccgagaccgggtaatatataaaggaaagaggtttaattgactcacagttccccatggctgggaaggcctcacaatcatggtggagggcgaaaggagagcaagacacatcttacatggtggcaggcaaggcaagagagcttttgcaggggaactcccctttttataaaaccatcagatcttatgtgacttatttactttcatgagaacagcacaggaaaagcccatcctcaagattcaattacctcccaccaggtycctcccatgacttgtgggaattatggt

SEQ ID NO: 829693 - DNA, 656 bp, Homo sapiens
gataaattagtacaactatggagaagagtctggaggttcctcaacaaattaaaaatagagctgccatacaacccagcacttccactgctggatatgtaggcaaaacaaagaaaatcagtatatcgaagagatatctgcactcccctgtttgtttaagcccttttcatagtagccaagatttggaagcaacctaagtgtccatcaacagataaataaataaggaaaatttggtacatatacacaaaggagtactattcagccctgagaaaatgtgatcctattattgacaacaacatggatggaacttgaggacattatgtaaagtaaaataaatcagaatcagaaagacaaacttcacaatttctcacttgtatgtgggagctaaacatgaaaacaattgcactcatggagatagagagcagaaggatggttactagaggctgggaaggagagtggggatcaagagggaagtagggatcagtaatgggtaccagaaactatttatgaagaacgaataaaaggtagtgtttcataatacaacagggtgactatagtcaataacaatttaattgtatgtttaaaaacaaccaaaagtgtataaytgaattgcttataacacaaataacaaatacttgaggagaataataccctatttt

SEQ ID NO: 829694 - DNA, 576 bp, Homo sapiens
ctccaatttgagagttaattaattgctaatagtttagcttcttatgagacataatttcttcagtttgggtagagaggataaaaaactaaaacaataatttggaatgataaaatctagtaattgactgaaataaataccgataatttcataggggactgttgtgataatttatgttcttgaacatcattgctggaataacttccagaccattttctgcttgagaaaaaagatgcttcaagctgtagcagatgactggtcaacacttagccagggcctacttgtctacatagccatttaaaattctctcctcttaaaatttattcgaaggagagagtagataatttgttaattacatgacttgctctttagtgtgttctgctagaacacttactgaataaaaatgggatatttatgtggtatatttacttcagtttagtccaagaaagtgtataagaataaattctgttgttagcaggaaatgacaattactttattcttcagaaaacacaaactctacatcttgtaagtytgcttccaaatccaattgtcattggtttttctggatgctctctgagt

SEQ ID NO: 829695 - DNA, 640 bp, Homo sapiens
tgttatttcctgttttatcatattcatcttaatgtgctaagtgatgtctccttgtgcttttgttttgcattgctctastgcaataataaatggaactaatgatgtttagaatctttccatatgcttatcaccattttcgtatgctcatctccaaaaggggtggcatatcttttttggacaaatatctgttcaagtcttttgcttgtattatatgtgttgtttttatttttgtcactgagtttgtagtcctttatatattctgaatatttaatccttataagatatgtgatttgaaaatattttcttctattttataggtttcccttttaccgtcttgataatgtactttgatgcacacacttttttttagatttcattgaagtacaacttacctattttttcttacattgttcatgctttttggtctcatatctaataatccattgtcaaatacaaggtcctgaagatttattctatttttatttttcattttccagttttaacttttacatttacattgttgatgacttgtgttaaatttttatattatttgaaatagaattccaactcctttcttttacttatagatatttagttgtcccagcaacatttattaatgagataattcttttcccattga

SEQ ID NO: 829696 - DNA, 527 bp, Homo sapiens
gggcccaatctgtcaaaggtctctaggaatctggagatgcatttgatgatgaaatgatggggaagctggtctgagcaaggggcctgcccagcattctcccrgatccctattgctgtttttcctacagaaatgtcaagcgggaaacattctgcccataaaggaaacataattaggtaaagctttggcatcagaagagacaaatcagccaggagtggcagcacacacatgtagtaccagctactcaggagattgaggtaggaggactgcttgagctctgggaggtcaatgctgcactgagctgtgattgtgccactatactccagcctgggtgacacggtgagaccctgtctcaaaaaaggaagagactgttggggacaccagcaacccaaggtcctaccagtggacttcctcagggccagtcatgtctcttcctgctttttcctgtgtttttcttttcctgtcaattctgaattctactgaatctccttgggactttaagcctttcttaatcttattacttattaatt

SEQ ID NO: 829697 - DNA, 527 bp, Homo sapiens
gggcccaatctgtcaaaggtctctaggaatctggagatgcatttgatgatgaaatgatggggaagctggtctgagcaaggggcctgcccagcattctcccggatccctattgctgtttttcctacagaaatgtcaagcgggaaacattctgcccataaaggaaacataattaggtaaagctttggcatcagaagagacaaatcagccaggagtggcagcacacacatgtagtaccagctactcaggagattgaggtaggaggactgcttgagctctgggaggtcaatgctgcactgagctgtgattgtgccactatactccagcctgggtgacacggtgagaccctgtctcaaaaaaggaagagactgttggggacaccagcaacccaaggtcctaccartggacttcctcagggccagtcatgtctcttcctgctttttcctgtgtttttcttttcctgtcaattctgaattctactgaatctccttgggactttaagcctttcttaatcttattacttattaatt

SEQ ID NO: 829698 - DNA, 620 bp, Homo sapiens
tggataggtgaagtcatcattgcaggtggtacctcttctatgactgcagtaacttacttaacttcacatccattgtatgtggtgagtagtgttcctatcttcatctatggatgagaaaaatgaagcaaagaaaggtcagaaactggttcatgggcacatggtgattaagcgacagaaccaggatgcaaatctggaccttctgtttccagagcctgtgctttcactgctgtgccacacgtctgcaactttaaattcccatcaattcacatttattgattactttgtatctagcagtcactagccaaggttgaatggcgagaggaagaaagagtgaaatcccagcctcgggccttttttttttttatcactctcttggaaacatcacactttgccctcaaagacaagctagagagaaatgctgctgctgcagtttgagtgatgcccatgaagtcagggttattgccaatacctgatgcttccagaatgtgtctcacctgcagaaacactgagaggtcaattttgaagcacatgggaaatmaaactcattcttcagggtcattcccaaatcaagaatttaattaatcttctcataaacttctcccactcttattttgatccca

SEQ ID NO: 829699 - DNA, 572 bp, Homo sapiens
acagtattttctttcatacaacctataatctcaaattaacttatttttyttgtttattgtctcaggctttcagtagaatgtcatttcattgatatcattgttcttgtctttctgttttccattttatcctatacatgtctggcaaacagaacatacttaataaatgtattgaccgaatgaatcaatgaaagagctatttttttctctggcatccctcacaaatactcatctacttcatattaacatatctcacttgtgagtcctcttagtgtcctcaaattctgcttatcaaagacctaaacacaaaactattttagaggcctcaccctgcttgagtttcacttctttcatatcaatatctattgatatagataaataatagagatctaaaaattgacagttcaatatataccagtatctatcttctgacagaaaaagtggaagcaaaacagaaatcgagtgatgctccttttttctattacccatcaattttcagtcatcttctttatcgtctgtaagaagatttaaaagggcattgaaattcaacagggatgccaggtctaggggggatc

SEQ ID NO: 829700 - DNA, 634 bp, Homo sapiens
aatctgaccaaactagagcctggcttaatgtgggttctcccagacgcagacctcaaagccagtattccaatgcaagtaakgtgttttgaatgcaattgctggaaatacaggtaagggagcaggaacggagaaagggacagctgttagtaaaaggtgtgtttttcaaatcagttacccttgaagggaacttaattctgtgagattaatcctgctggaaaaccccgtgtgcgacatgcacttcagggttatctcatttgatgagtgaacaagatgaaaggtctacccactaactcccattggctcccagcgcttgttaattccccagcctctctagcaaagcaagctattaataggaacagcaagtcctggtgggcatagagagctgaagggagagtcccagacacaggcacgtggaagttaggctgggatgcctgggggtggtaaattccaaggggatatgggtgtgatatcaacagcctcctctgcatgacttaacttatcaggggctcagtttccacatccataaatgggggcagtaacacctaaatctctcaggactacggagcccatttgaaagcccatcttataagaaagatgactattttaccaacacttacagcacataaatcattcc

SEQ ID NO: 829701 - DNA, 623 bp, Homo sapiens
ttttttccactgcaacttttgctttcactttaatataattaagctggataacttttacaccttgtctttcctgctgtatctagagactgatcttaaaattgtatatcaagaawgttgataagatggttaattttacgtgtttacttgattgggccacggggagccagatatttggttaaacattattctggccctttggaaggctgaggcgggtgaatcacctgaggtcaggagtttgagaccagcctggccaacatggcaaaaccccatctctactaaaaatgcagaaattagctgagcatggtggcaggcacctgtaatcccggcactttgggaggccaaggtgggcagattacttgaggtcaggagttcaagaccatcctggccaacatggtgaaaccccatctctactaaaaatacaaaaattagctaggcatggtggcaggcacctgtaatcccagctacttgggagcctgaggcaggagaatcacttgaacctgggagacggaggttgcagtgagccaagatcgcaccactacactccagcttgggtgacagagtgagatgccatctcaaaaaaaaaaaaaaagaaaagaaaaaaaaagaaaaagacaattattttg

SEQ ID NO: 829702 - DNA, 578 bp, Homo sapiens
taagcatcctttcttttccctgatcttagcgaaaaagttttcaacattgcacttttgagaattatgttagccacaggtttgtcctatatggtctttattatattgaggtatactccttccggyctaatctactgagagtttatatcataaaaattgttgagttttgtcaattactttttctgcatcttttgaaatgatcatatatgttttatgcttcaatttttaaagtggtttattacatttattgatttgcatatgttgtaccatcactgcatcccagggataaattctactttattttatgatgattatgatgaatgattcctttaatgtgttcttgaacttggtttatttacattttcttgataatttttacatctatgttcatcagggatattggcctataattttattttcttgtagtgtccttgtctttgaacttcaggttcaaagtaatgctaaccttgtgatatagtttgactgtgcccccacccaaatctcattttgaattgtaattcccataatccccaagtgtcatgggagggacccagtgagagggagttgaaccatgggatggt

SEQ ID NO: 829703 - DNA, 603 bp, Homo sapiens
tttgatggattgagattatgtcttttttatctttgaatcttgggcatctagtgcctgaaatgcaatataaatacaatgggtatatagacggagaaaaacaaagacctcgggtagttgacacttgagtataaaagaaaaaaattaagaaacagattgtggtaagagaaaagataaatgattataaagtttcagagaaggagatcacatccaactgggaggaagttacatgtgaagtaatctggcaaggatacatagggtttaaccacacagagatacataaatggaatggcctgggcaaagtcactgtgaggcaacagggacacaatcaagaaggaataagttcttctgtttggttgttatttaaggtacataaatggcaaatgtctgggagaaaaaaaaaaaattaaagcagctagcctaaaattgttcctctcctggtatctggggaatgtccccagaaaagaaagacaggtaacctattgtgatttccttgtaatcatgttggtaactggggctcctggcaaataggyttaatatttactagcaagagagtccttgtctatgcaatgctcctaccagggtgtcctggtttaggactgctat

SEQ ID NO: 829704 - DNA, 465 bp, Homo sapiens
ctctacaatccacaaaatttggtaaaacaatttcataaaagtgaaggtaggcaaaacttaccatatatcacaatgaagaattagaaggctttcagaagacagattcatcccatgttctgctttaagactctctattctaccataaattgtttatacaatttctgcctatccttgtttattttttaactactatgtttcaaagtataatttatgctgtctttttccctacttaatattcagaaatgtaataggcagatgaagtgcttataaatttttgttccttccgtcgagaaactgggtatctaataaattaaattttcataaatcattgttattctgaatcactaaggaragtagatgtggctgaatcttacttgatttatgattcaagcagtaaaaaaatgagtggtttgatggatgtgagagaaataaatggcagcataactaaatgaattgaaaaatccc

SEQ ID NO: 829705 - DNA, 517 bp, Homo sapiens
actaacaaaaattcaccttaacttcatccctccaccttttaattttggttatttttaatttttgtattattgtactgattatgtcctgaaaagttgttgtagttattacttttgattggttcatcaattattcyttctacttaggataagaatagtatacacaccatagttatagtgtcaaaatattctgtgtttttctatgtacttactattaccaggaagttttgtaccttcaggtgattatttattgttcattaatgttattttctttctgattgaagtacaccctttagcatttcttgtcagactggtctggtattgataaaatctatcagtttttgtttgtttgggaaagtgtttctctttcatgtttgatgaatattttcaccagatatattattctagggtaaaagttgttttccttcagcacttttaatatttcatgcctctctttcttagcctgtatggtttccactgaaaagtctgcttccagatgtactggagctccattgcatgc

SEQ ID NO: 829706 - DNA, 517 bp, Homo sapiens
actaacaaaaattcaccttaacttcatccctccaccttttaattttggttatttttaatttttgtattattgtactgattatgtcctgaaaagttgttgtagttattacttttgattggttcatcaattattctttctacttaggataagaatagtatacacaccatagttatagtgtcaaaatattctgtgtttttctatgtacttactattaccaggaagttttgtaccttcaggtgattatttattgttcattaatgttattttctttctgattgaagtacaccctttagcatttcttgtcagactggtctggtattgataaaatctatcagtttttgtttgtttgggaaagtgtttctctttcatgtttgatgaatattttcaccagatatattattctagggtaaaagttgttttccttcarcacttttaatatttcatgcctctctttcttagcctgtatggtttccactgaaaagtctgcttccagatgtactggagctccattgcatgc

SEQ ID NO: 829707 - DNA, 561 bp, Homo sapiens
ttcttctattctttctcaattcycccccccacagatttgggagcctctttccattgctcccttttctttctaagaggaacggaatttaatggaatgaacgacaacccttttatttatttatttatttatttttttgcagctgttcccctcatctttctttttactatccattctgaattcctcacatcttcagctatcatgtctgctggtctttgtggtttacgacccacaccttcatacctgaagggacagaacctttgataggcacactgttctgtttggggttgtggcacatgtccatttacaattacagtggaacaagggagtactagggtgctcccatgaggatcatctgggttgcacaaatatttctctttgtttctattttgtaaaagagtccctacccaccactgattggggtacattatccctgacagtatggtgatttctgttttttcatgcttgcccttgggtacaatgtgccttaacttgtagttcactgagactctggctgtgtctcttggtagaagtttgtcccttttaggaatcagaacctacaat

SEQ ID NO: 829708 - DNA, 653 bp, Homo sapiens
ataatgactaatgttcctacatgatyaatattagaactatgagatagcaaactgttaaagatggaaatgaccctcaagattgtggagttcacaccaccattttagagacaggaaagtgaagcctggagagaggtgatccattgcccaggagactcagaaaacaggaccaggcctgtgggttccccacatcatactgccctcaactcctggtcccctcagtcactgcagtaaccaccacggaaaatgccgcacagagttaactcatgatcagatgtgaaaagggtctcccactgtgattttctttgttggatttaacaacctcctcacctttctgctgaatcagagtgaggaacagtcgaggagaattgcatgagtagcttcttgtgtgtctgtgtgtgttaatggagtttttttttttaaggtttttccatgattagagtcgtattttttgtttgtttttgtccagttttttttgtttgtttgtttctgcatgaaataatgaaaaagtaaatcaaggtttgtaattggtttcttctcacttaggaaagaagaaaattattctatgagagtaccagcaatgtaacatgagtctataattttactcacttggtcttaacttttgacacccttgcctcagtgttcctgggcatggc

SEQ ID NO: 829709 - DNA, 653 bp, Homo sapiens
ataatgactaatgttcctacatgatcaatattagaactatgagatagcaaactgttaaagatggaaatgaccctcaagattgtggagttcacaccaccattttagagacaggaaagtgaagcctggagagaggtgatccattgcccaggagactcagaaaacaggaccaggcctgtgggttccccacatcatactgccctcaactcctggtcccctcagtcactgcagtaaccaccacggaaaatgccgcacagagttaactcatgatcagatgtgaaaagggtctcccactgtgattttctttgttggatttaacaacctcctcacctttctgctgaatcagagtgaggaacagtcgaggagaattgcatgagtagcttcttgtgtgtctgtgtgtgttaatggagtttttttttttaaggtttttccatgattagagtcgtattttttgtttgtttttgtccagttttttttgtttgtttgtttctgcatgaaataatgaaaaagtaaatcaaggtttgtaattggtttcttctsacttaggaaagaagaaaattattctatgagagtaccagcaatgtaacatgagtctataattttactcacttggtcttaacttttgacacccttgcctcagtgttcctgggcatggc

SEQ ID NO: 829710 - DNA, 546 bp, Homo sapiens
  misc_feature 234: n = A,T,C or G
tacttgggcttatggtttggcttgtttacctaaatatagcacttctcattcaactactgagaacttatcaatggtgagccattaaaaaaatcagttgccataccgggcagtcagtgcaaacctttcaccaaatcctttataaaaatctaaaagaaaaggcagtaacgatttggattccaagaaacctggtcaggccacctacaccaggcctgattctttggggaaaagcaattntaaaatgataccttgggacaaggctgtcacctccacgcagagtggtgggatctagctcgaaaatggaggagatgtcattgccttcaggcacagagaccagggagtataccatcttttcttgggcattccgcaacctacttcgagaggcgtcctgatcagggtccacctgaggaggtaaagtcaccaaatcaagaaccatgcatgccaaagcmttcactttctacaattattccacaatccacaggaacggagaagaaaggatcgtgaatgtcagcagttggcaggaaaaggaccacagttacagagcagtcc

SEQ ID NO: 829711 - DNA, 632 bp, Homo sapiens
ctcttgatgactttctttgggaggctttaggtagatagagaagccctcccaacctgtaccraccactgatttcttccttatacccacgttgggtggcccaatctatttcttccttagtgtactggaaagggggcagttcactggtgggagaggggagcgaggcctccatgaaggtattttttgagacggctgcctctttagctttttggtcagctaaccgttttcctcatgcagtttcatcagaacccttctggtgtcctctacagtgcactactgccacttcccagggcaaatgaacagcctctaggagctctaagatttgaggcccatacttaataggagtatcccaagctgttaggtacccccctttcctttcagatagccacatggacatgagacaccagaaaggcgtatttaaaatctgtatacatggttattctttttctttccctagttttagggctctggttagtgcaatgagtttggctacttgcactgaggtccccggggacagagctttagcctccagaactagatgaagggacactatagtgtaccctgcatatcaagttccattccagacaaaactactttaatctgaaaaccatatttcgtccggattatctaggggc

SEQ ID NO: 829712 - DNA, 632 bp, Homo sapiens
ctcttgatgactttctttgggaggctttaggtagatagagaagccctcccaacctgtaccaaccactgatttyttccttatacccacgttgggtggcccaatctatttcttccttagtgtactggaaagggggcagttcactggtgggagaggggagcgaggcctccatgaaggtattttttgagacggctgcctctttagctttttggtcagctaaccgttttcctcatgcagtttcatcagaacccttctggtgtcctctacagtgcactactgccacttcccagggcaaatgaacagcctctaggagctctaagatttgaggcccatacttaataggagtatcccaagctgttaggtacccccctttcctttcagatagccacatggacatgagacaccagaaaggcgtatttaaaatctgtatacatggttattctttttctttccctagttttagggctctggttagtgcaatgagtttggctacttgcactgaggtccccggggacagagctttagcctccagaactagatgaagggacactatagtgtaccctgcatatcaagttccattccagacaaaactactttaatctgaaaaccatatttcgtccggattatctaggggc

SEQ ID NO: 829713 - DNA, 526 bp, Homo sapiens
cctgtgaatggaccagacctgatgaaccagaattggaatgggtggtgcccatggatctgcatttttttttttttttttgagacagggtctcactctgtcccccaggctggagtgcagtggggcaatcacagttgcagcctcaaactcccaggcttaagggattctgccacctcagcctccccagtggctgggactagaggcgcctggctaatatttgaattttttttggtagagacggggtctccctatgttatgcaggttggccttgaactcctggcctcaagtgatcctcctgcctcggccacccaaaatgctgggattataggcatgagccaccacacctggctggatctgcattttaatatgccttcaggtaactaaagcaagagaaycttctcctaagaatctctctgcaacttccttttatttactgacacctaataaatgaacagttgactctggagcaaaactgagccctgggtgagtcttgggcttttcctgatggctcaatacctgaaactttcat

SEQ ID NO: 829714 - DNA, 571 bp, Homo sapiens
ggcagcctgctgtgcacacagcccatgcccagtgaatatctacattatttgtctcagggtaaggttttcttctgtcccaaatgctcccaaaggaggacatacccaaggctccacattagaagcgagtcagaataaagtggtgagcacaaatcaggcagcccctggcactgtagtcctggagtccacacctctctgagtcatggtggagccccttcagcttggtgtctacaaatgggagtctatagtccttccctgtcacgactcaaatggcctcagcctgtttgttatgtaattactgcacaactttaatcctgcagactgcctgcagtacagatctgcttgtttagaaactagctgagggaggaacagatgcctggaaaatccctatggcccaaggtgccttgctgccaatcttccccagagggtgccatctcccctcagcctcgctaagcccygcagagtgagaagtgttgttttcctgattacacaggctcccatcgtccctctggtcagcctccatttgtgaacagtctcctgtgaaatggagatgtcttcagtttagaactgcact

SEQ ID NO: 829715 - DNA, 601 bp, Homo sapiens
gcctttcaggaagaatcaaggaacatcaccattttctgggkttttttttttttttttttttttttgagacaaagtctcactctgtcacccaggctggagtgcagtggtgtgacctcagctcactgcaacctccatctcctgggtccaagctattctcctgcttcagcctccccgagtagctaggattacaggcgcacaccaccacacccagctaatttttgtatttttagtggagacaaggtttcatgatgtttgtcaggctggtctcaaactcctgacctcaagtgatctgcccaccttggcctcccaaaatgctgggattataggtgtgagccaccatgcctagccgcaattgagcagaaatctgaaaaataaaaaaaactcggtaaagggaagtggaaatggggacaagaactataagcagagaggacaatctggcaggatagaaggacagaaggaaggccagcatggcaagaacagagagaaccctctcctaacctactcctaactggctccccgatccctgtggtctgtctccattgactccattgcctacacctgaccactagcaatttgcaggccgcatttcaaggtcatgaca

SEQ ID NO: 829716 - DNA, 602 bp, Homo sapiens
acaaatagggtaataaaagctggccaccccagccagcagtggcaacctgctcacttccacactgtggaagctttgttcttttgctcttcacaataaatctcgctgctgctyacattttgggtccattccatctttaagagctgtaacactcaccacgaaggtccgtggctccattcttgaagtcaacgagaccataaacccaccagaaggaaccaactctggacacactactagacatctaaagaactctctaccccaaatcaacagaatatacattcttctcattgccacatggcacttattctaaaattgaccatgtaattgaaagtaaaacactcctcagcaaatgcaaaagaactgaaatcataacaaacagtcttgcagaccacactgcagtcaaattagaactcaggattaggaaactcactcaaaaccacaaaatttcatggaaactgaacaatctgctcctgaatgactcctgagtaaataatgaaattaaggcaaaaatcaagaagttctttgaaaccaatgagaacaaagagaccacatatcagaatctctgggacacagctaaagcagtgttaagcagctatagcactaaa

SEQ ID NO: 829717 - DNA, 548 bp, Homo sapiens
ataaataacatatatagctgagaatgccayatatatttctcaatagcataagatataacttaaattagtaaaaattatattaattttgattataattagaattgcccgcttcataatgtgtcatcttttatacaaagaattttcaaatcggttgcaattatgcacattaagtgtgaattaagtccttttgccatttggcttccttaaaaaatatgttacagtaaataatactttctagtgtgcacacaataaagtagggaaaatttggactgtctatccctttatactaaagatggctataaacctgcatattaattctattttgtccagcatcaattataatttgagtgttataacataattgcacactaatgatataaaaatatcattatgatgtttttctgaaagcatcattacttatctaatttcttgcttgcttctgtttttttttttttaaattttatcctgtattgaaaatgtgtacctagaagcatgcctcagctatctctttagtaggccaatttttggcatctgccacctgcacgttt

SEQ ID NO: 829718 - DNA, 542 bp, Homo sapiens
ttcttgcttgcttctgtttttttttttttaaattttatcctgtattgaaaatgtgtacctagaagcatgcctcagctatctctttagtaggccaatttttggcatctgccacctgcacgtttagttctaccataccatctgcttcagcttgtcttcatttctgcttgggctcagaacacaataccccaaaatatggttccttggcatgttaatctgtctttgtaagttttattttcaggcccagtcaggaaccctaaggaggttgaggaaagcttccttccctactcctccatttatgactcacactttctactttctgtgggtaccttttgcctttacactaaatttcccaaccatctcattcataaaattttatccctttacaaaatctattctttaaatatgagactgaaaatcagtgcaatacagatttttaactgtaatcagtaataagaattactggagtgacaaaagcaaatacttacaaaggatraagtagatatcttctaaaggagtgaagtggcctggtaggatcaatacag

SEQ ID NO: 829719 - DNA, 494 bp, Homo sapiens
tggtaataaaaaaaattaccaacaaaaaaatgtcaaggaccagacaaattcacagctgaattctatcacacattcaaagaagaattggtaccaatcctattgacactattcctattccacaagacagagaaagagggaattccccctaaatcatttgatgaagccagtatcatcctaataccagaaccaggaaaggacacaacaaataaagagaactacagaccaatttccctgatgaagatagatgctaaaatccttaacaaaatactagctaactgaatccaatagcatatcaaaaagataattcaccatgatcaagtgggttttataccaggaatgcagggaaggtttaacatatgcaagtcaataaatgtgatacaccacataaacagaattaaaaacaaaaaatcawgtgatcatctcaatagatgcagaaaaagcatttgacaaaatctagcatctcgttgtaattaaaacccttagcaaaattggca

SEQ ID NO: 829720 - DNA, 328 bp, Homo sapiens
acttgagacaactgtgaattctgttacacttggatrcaatgttctgtttgtctggtttatttggtcaaatgtgtaattcaagtccaatgtttccctattgattttctgtttaaatgatttgtctgttcttgaaagtggggcattgtgtttccctaatattatggtattagtgtacatttctccctttagattacttaatagtttcataatacattacatgctccaatttggggtttatatgtatttacagttgttatgtcctctttatgaatttatccctttattattatatatgaccttctttgtctcctttttaaggtttttgact

SEQ ID NO: 829721 - DNA, 622 bp, Homo sapiens
tgcagctaggactcagacacgtagtgagatccgtctgagactgatggggcttagtattttcttctgcaagattaaaatatgcaattgctctgagcttcataaactctcttctctgctttatttacwctagaacacacacatagtcttctgtgcactcacatcctctctctcaccatccctccctgatatcctttcctgaagatcctatccccagtgaagtgaaaactctgggctaggaaaatgagaagagagagaaagaaagaggaaatcgaggcagagttgaatgtgctgacactttcttgcatgaggttttcccatgtgattatcccactcgtaagtgtatatggagtccaagccttccagtaaagtcccgttcctctcaaacaaacacaaacaaaaaactaggaaagaatgttaccaagagatgccctaggctgtggttatttaaattgccttgccaatccaggatcacagcactccttctttttgctataatgtagcaggtatattgatccaaccaacttttagcccctgataagtagaaaacgtgctgtaaggcagcggtccccaacctttagggcagcagagactggtttcatggaagacaattttccacagatcg

SEQ ID NO: 829722 - DNA, 469 bp, Homo sapiens
ccgagcttagctctggtggtatgggcctgctccgccttccctctctccctgaccttccctccctcgcccacacacccacttccttccactgtgaaagcggagtaaggctttaattgcacaggttcatcatttcttgtttggaagtcttcagatttttagttttataccttagctttctgcagaattctccgttgaatcaatgccctgggaaccccatggacagaagcaccttttaatgaagtccttccaaaactcgttcctcagtgcattgctctgttggaaacagtgctgtggggtgttggggtgtatagtatattttaacatattttaacttaaaaaaaaaagacctagcaacataatgtttgaaggtatcataaagattatccagttcagtgctttaaaactttttggcttgggggagygcacgggatcctttgttgaaatatactaagtacagcagaggagagca

SEQ ID NO: 829723 - DNA, 533 bp, Homo sapiens
attacacagttaatgttattgtagagtccaatgtgaaatctgtrcatttaatatggatatggaaagtatagaattccagtggctgattttatccagctgggaatatgttcccttcaagcttgggaggggtcacccatcaaacagaattgaacagaaaaactaagcatccatcttaaaaagaagacaaggactcactagcactgcaactcagcttctgtgagacttcagctttggccttatcatccctcatttcccattaaataatttcctgtatttcatagcaatcccaggctgtctgccttttgaccttggcttcctgaggctgctgaagttgtgtgaagattctgttcattttgggtctctagtgaattaggacgtgattctattcagttcatgcaacaaatgcccattgagtgtttctgactttttgggcactgttgcaggcacagcaggacttatattcataacatttaataagtggtaaggtctgggtaccaaccaccctggtactagaaggttgtcacagagggttt

SEQ ID NO: 829724 - DNA, 470 bp, Homo sapiens
gaggctttttacttattcattacttcaatgaccattatatctacgtgatttgagtacggyattaagaactatgccacttttaggttaaaaatgtgaggtgctattgacttttagttttctttttaaggccaatacacaattgaacaattgccaatttactactatgtgatgggcaaatattgagtagattgtgaataaaattgagaacctaccctcatggaacttaccatcaaggtcacatggctggttggcagcgtatagagataatcacatcttccgattcatagttctgtttccctgacgcccttctaatctcttaattgaatatacaattctcaaaactgacagggaaagtattaactatgcaacagaaggcaaaacagagaaagtagatgagtttcttggtatcaactgtttcacacgagggctaaatattcagagataatgaagataatacaataaatgtgatt

SEQ ID NO: 829725 - DNA, 621 bp, Homo sapiens
tctgtctgctgaataaatgaatcataggatgaatgaatggagaaatgaatgaaaagtaagaggatatagaacaccaattatgcccataattaagtcctagattctctattccatttaggactcaagatacctagtcttatagttctttttcctgtagatggggataaggagaatggcaagatctctaatgattttcaagtcatctcattaacattttccttatattctccttagaagcctccactgcatgagatttaggtacagtctacaaatagaacatctccttatacaataaaacttggcccctgttaaagacttgattctttagagctattgaagatttttaagaaagatctagaatgtactactatcttacaaacatctgcttatggtccttaatgaaaacctctaaactaattccatttaaactgtacaaattctatgttgtcatactcccataacgtgttctaaaacacagcattgttaatgagcataaagtatttatcagtccacataattgtttcacacawctattatattcctcagaaaattcatatgtagaaaaccaaatgaactgaaacttcattgtcctcacacctgacatcaaagtaataaaattcc

SEQ ID NO: 829726 - DNA, 602 bp, Homo sapiens
tgattcttgggaacttgatgtggatcctttttagaggacaaaagtgtgttaatacatgtgaagtttacacaattcttgtaaacttctgattccctagaccagtattacatttcagagaccaaatttaacaaagcaactctgaatccacataaatgtttagtaatttgagataaataaattaaatgaatgttgttgatattctgttttgatagtgtcaaattttccttttcacaatgaaggattcctggaatgaaacccagagaaatatgtcaaggaatcagaagaaataatacagacagtaatttctttaatctgaagtatctaaagctgaaaaggcattaaacaatcacaaaaactggagaaaaaaaagcaaaggaaaatgagaagcataatactttaattctctttgttgatattttaagatagttctttactaatttattctttgctcttttccaaagagatagcttgtttcatcacyttaatgtatttatagtcatttataattatttcagaaaagcttttttggtgaattccaaactggattttagtgagaaagcactgagtggaatgctgatgtgtcttctcattgacttcatgat

SEQ ID NO: 829727 - DNA, 572 bp, Homo sapiens
gaccaatgcatgatgttaaaacgtcaattcaaactgcaaaatagaccaattaattttaaagtaacagagtaggaaaaggccaatgatacgatttcaaattctacatcacaaccaacatttaagaaactaccaagctttgccaagctttgatatagtatcaaaaaagaatacccacaattaattgaaaaggccactaaaataaccctcattttttcacctccatatttcttttctgttttcgagactaagtctcgctctgttgcccaggctagagtgcagtggtgtgatcttagcttgctgcagcctccacctcccgggttctcctccctcccgggttctcctccctcccgggattgtcctgcctcagcctcctccacctccatatttctgttaggttgcattttcttcatatatttgaaccaaaacaacacatcacaataaactgaattcagaagaggtgagaatctgttttctaatacctcatgatttgtaaaaatgtataacartaactcccttgttggtaaatttatttttatttgggaaaatcattatttttaatgaaaaactattat

SEQ ID NO: 829728 - DNA, 612 bp, Homo sapiens
aggagaatgagagtgtttcccaagggaaaaatgactactctgtttcctaataactgaatatgttaccatagaagttataaacatcaagagggcataaacgccctctcaaataaaatggggtactttacacacaatttccagtgaagaatttaatcttattcctcttaagaataacctaataaatatcaaaagagctctttttgacaaaatggtttcaaagtttcataaagtaaaagctgctccgtatgatttttataatgcctataatcaaggcctcagaacttggaattatctttttacacaaattatttttcaaataaaagactgccacgagcatctcaatctactactgaatataacaatctttcccaaatattcctacaaagggtcatctagcttctatgaaacacctgaagggcagtattcaaatggcagtaatcataattagtgagattcctacttcagaatacgtactagtagctgcttaatttgcctttagttaatgtttatctagggaatcratacactgcccctacaatacaggtttaaagaatgctgatcctgagacaagctaatgtgattcaatgacaatacctggaccataatattatc

SEQ ID NO: 829729 - DNA, 567 bp, Homo sapiens
tggaaattttaagccagattttgaaaatgtaattatataaatacatccaaaatgtgtgtgtgtgtgcgtgctgtgtgtatgtgtgtgtgtgatggttcatttttaaagaattttatattttgttattcttgaactttttcacatacagattgatttcccataagctcttgttaaaatggcctcagtttaattttttgtgctctgctcaaaacagtattaatgaaatgaatcaatgtccaaagtatgctacctggtaagttggtgaggatcccagaaatgaaattaggagacctacatttcagtcttagtcaatattttgtgttgtttctcattaaaaggaatgtatttcaaagaaggaaattctagaccagttgttcttaaagggtagtccagctccctgtgagagtccccaagacacttgcagaagggccaggagctcaagattatttttatgattgtactaagttgttctttgccttsttcactctcactgtctcatgagtgtatagtggaaggtgcatgtacagaaagagaacatatagaggctgcataacttgtgatgacatc

SEQ ID NO: 829730 - DNA, 430 bp, Homo sapiens
ctacataatgatgttgaatcattatctctttgtggccatcctctacctcacccatgtattgtctggtgagtaggtcagttattatactaacattggatactaatttactgatttttttttccattcactatccctcagacacaaaagctcaccagctatccagaggtatcagcattcaatactcaaggatgccatcatcaaaagaaactattgatctctgttaacatccagtgacatgaactcatgtaggatgcaccaccccattttctcttgggtgatttcacattccacatcctattctgaaaacttcaaactcttgtaacgtttatgagataatggaatatgggtcaaataagtgcctccaagttgctcacgtcagcaatcccataamtaaatgggcagtcagatgaaattatcagaagcacagatg

SEQ ID NO: 829731 - DNA, 544 bp, Homo sapiens
tttttttattacagaaaagttaatttatttttacatgaaaacattttgaaaccaattttgtgtttattgaaggatttttctcatgcatattatccaagatttttttctgtcagagtattagcttcctaggattgctgtaacaaattaccatgaactgggtaccttaaaacagcagaaatacgttctcactgttctggatgctagatgtgcaaaaccatgttagcagggttggcaactactggaactctgagggagaatctattccatgcttttttcctatcttctgagggttcccacaatgtatcactccaatctctgcctccagcttcatgtggcattctcccctgtgtctctatcttctctttcttccttttttttttttttttttttttttgagacagagtctcgttctgttgctcacactggagtgcagtggtgtgatctcgcaacctccacctcccgggttygagtgattcttgtgcctcagactcctgggtagctgacattacaagcaccacgcctggctaattttatttttagtaga

SEQ ID NO: 829732 - DNA, 659 bp, Homo sapiens
tttaatgcatttttaaaatagataatgtcatttccatggctctttcagattatcgatgggacattttcaaataaaacttgtgtgtgcttaagtgctttatttaataggagacagattttatttccacaagaagcagagattgtaagtattatttggtgtccttccctggcatagcactgtaggaagcaacagagattgtgctcaaaatacagacagctaaaaaacatttgatttccatcgtgtttcttaaaattttactggtagctaaaggctcttatcaatccgtaattttaagtggtccagaacataaattagctgtgagaactgagaaaaacatttctgctggagcaagttcattcttagaaaccaaggcctaccctaccttagaagaggaaaaattatatatgcgttggaaagtttttcagaaaaaaatcaactttttccaattctctatcagaatattggtcaagttagttattcaaatctttcaatggatcagaaatgagtgcactatcttccaaagaggatatctatcccacaagaaaatgcctttcctgaaatgtttcctaagctcaatcttacaaagaccatcayactcaagcccgggctgagaaatgcctatatattgggccagccaagaaggtaactacacaactgat

SEQ ID NO: 829733 - DNA, 530 bp, Homo sapiens
atactcacctcagagtggctgtgtgcatgcgggagccagtgtggcacctgacacaaaacagatgctgagcaaatgacggtaaggatgggcaaaattgagcccctgccatgcgccaggcaccacaaaacagcactgtacaaacatggtctcctttaatcctcacagtatcctcgtcagggagatgcagtgttatccctgataaggttctattgtcatccccatttcacaaatgaggaaaccaaggatcaaggagtaatgtgattttgctgagagtgatgcagctgattcatcacagagacttggagcccaaatctgcccaatgttcttagccagcgccacactgattagtcagcaagcgcaccctgtgactctccttaccttcagccgctccaccaccactttcaggattcttctcccttctggccctcgaggaacagagggcagcactgcctcctctgcaccccagctctgtcacttaacaggtgtgtggccctgggcaagcsacatgcccattctgaccttcagtttct

SEQ ID NO: 829734 - DNA, 668 bp, Homo sapiens
agatttggctgtaagcaagagaatcatgatcttggccctctcaaagctcatagtcttatgggaaaagcaaataggcagacaggcattgaccacactgagaaggaagcacacgatgtcaatggtaggctgagagtttcaaactgatggcctatgggatagattcaccacagacgtattctaatttggccttgatactgattgaaaataaagaaaactttacataaatttaaatcatgtacaaaaatttacataaaattaaattaaaatcatttacataaatttaaattttcaggttttcatgaaaacccaggatatctggccacactgagctttcattcttaaatagcaacaatcactagatcctaacagcagaaactctcaagttcttcccattcaccaccagtccctattgccctacacatggcccgatccctccagacattttagccagcctgtctaggaataggttcaagaggacttactatggcaaaaaaaggacctgaacctcaaaggtttttattcagaatggcaaacaaggctgagccatggtggaaatcacaagccctcaactctggggatgtcatggatagtggtatgtamgctgggatgggaaattggactggagtgttcaggtagcatcagcatacacacaggctctggggccctca

SEQ ID NO: 829735 - DNA, 642 bp, Homo sapiens
tctggagcatccctttctacctctatgccttggctcaggccatcccctatacctggctgttctccctccatgtctttacccattgatcccttatgtttcaaagtcctgctcactcattcattcattcattcattcattcaacaagtatctccagagagtgcactatgttccttgcacgtcgatgggtaccagggatatggagggaaatcagttacagcctatgtcctcaagctgctcacagccatggggggaccgatggtgacaataaggacatgtatggaagatgtgagtctgggggtgttgtaaggccagagaaggatcctaatccagccttaggggtggggggtattcagggaagacttcctggaagagaatacctctgagtcctgaagaatgaggtgaaaagagagagagaggtgtatataaatacatgagaacacatataatcttaggcatcgatgtgacctatgattatatgtgttcacatgtacttatatgctaatgtaataactagtgtttattggatgctactakgagcagcactggactagcacatttgacatattagccttataggggtgaggcctcacaaccttataggggagaggactattatcattcccatttcacagatgaggaagc

SEQ ID NO: 829736 - DNA, 618 bp, Homo sapiens; identical to SEQ ID NO: 821278

SEQ ID NO: 829737 - DNA, 624 bp, Homo sapiens
actcccattggaaataagataactgtggaaaccctttcagataaatacaagctaagtagcgaaggtaccttggaaatatctaacatacaaattgaagactcargaagatacacatgtgttgcccagaatgtccaaggggcagacactcgggtggcaacaattaaggttaatgggacccttctggatggtacccaggtgctaaaaatatacgtcaagcagacagaatcccattccatcttagtgtcctggaaagttaattccaatgtcatgacgtcaaacttaaaatggtcgtctgccaccatgaagattgataaccctcacataacatatactgccagggtcccagtcgatgtccatgaatacaacctaacgcatctgcagccttccacagattatgaagtgtgtctcacagtgtccaatattcatcagcagactcaaaagtcatgcgtaaatgtcacaaccaaaaatgccgccttcgcagtggacatctctgatcaagaaaccagtacagcccttgctgcagtaatggggtctatgtttgccgtcattagccttgcgtccattgctgtgtactttgccaaaagatttaagagaaaaaactaccaccactcattaaaaaagtat

SEQ ID NO: 829738 - DNA, 521 bp, Homo sapiens
atgtatactactctgcaatccactctcaggtcatttgaaacraagtcaaaggagagaaggagttagggggatgatgtatatgactgtggattctacaaaaattttatttgatataaagcattcaacgcatctaaagtcatagaatgttataactggaagagtcttagagacaaagcctagcatcctcactttatagatgagaaaggtaaaaaaagagccaggaaataactgtccatgccaccatgctggtaccaggaagagctttggggtttggcaatctggggtgaggttccaactctgccacttattttatcccacttagcttcaatttcctcccaggtaaaataaagatcctaatcatgcctagatgacaaggtgagtgtaacaattaaatatgacatgcacataaagtaatcatcacaatgcttggcacatagtaagtgctccataaatgttagctattagaatgattatccatgatagagatccatcctagaacacaaattggagccagccataat

SEQ ID NO: 829739 - DNA, 521 bp, Homo sapiens
atgtatactactctgcaatccactctcaggtcatttgaaacaaagtcaaaggagagaaggagttagggggatgatgtataygactgtggattctacaaaaattttatttgatataaagcattcaacgcatctaaagtcatagaatgttataactggaagagtcttagagacaaagcctagcatcctcactttatagatgagaaaggtaaaaaaagagccaggaaataactgtccatgccaccatgctggtaccaggaagagctttggggtttggcaatctggggtgaggttccaactctgccacttattttatcccacttagcttcaatttcctcccaggtaaaataaagatcctaatcatgcctagatgacaaggtgagtgtaacaattaaatatgacatgcacataaagtaatcatcacaatgcttggcacatagtaagtgctccataaatgttagctattagaatgattatccatgatagagatccatcctagaacacaaattggagccagccataat

SEQ ID NO: 829740 - DNA, 521 bp, Homo sapiens
atgtatactactctgcaatccactctcaggtcatttgaaacaaagtcaaaggagagaaggagttagggggatgatgtatatgactgtggattctacaaaaattttatttgatataaagcattcaacgcatctaaagtcatagaatgttataactggaagagtcttagagacaaagcctagcatcctcactttatagatgagaaaggtaaaaaaagagccaggaaataactgtccatgccaccatgctggtaccaggaagagctttggggtttggcaatctggggtgaggttccaactctgccacttattttatcccacttagcttcaatttcctcccaggtaaaataaagatcctaatcatgcctagatgacaaggtgagtgtaacaattaaatatgacatgcacataaagtaatcatcacaatgcttggcacatagtaagtgctcsataaatgttagctattagaatgattatccatgatagagatccatcctagaacacaaattggagccagccataat

SEQ ID NO: 829741 - DNA, 491 bp, Homo sapiens
aacaaggactctctagccctgacctcttaatttagccccaaagttatctgtttagctaactgcttgacatcctcatctatgtgtctataggcatttcagtcttaacttggccaaartatgattgttgatttttcctgtgtagatctgtccctcccacaatcttccccatctcagcaaatggcatcactatgtacgtagttgattaagccaaggactgaaatcagggtgatggggctacaagccaaaaattatcaaaggttaacaacaaaccaccaaaaactaaggaagacgcatggaacaagttcttccccacagccttcagaagtaaccaaccctactgatacctttatcttctggcctccagaactatggaagaacaaatttctgttgtttaaaccacccagtttgtggtactttgttttggcagccctggaaatctaatacaagcccctgttctgccaagttggtaggaggtggaatttcaaccctta

SEQ ID NO: 829742 - DNA, 678 bp, Homo sapiens
gagaagagagttctaacaatcctctccagaaaaatcctggtcaaaacacaggacttcagcaatctgctcttttcacttgctcaggactcgggcttcagctttgggtgtggactgtgtgcagggcctatatttagtgattattttgcatatgttctctcaaaaagtttcacagatgcctcacgctggcagttgggggtatatttccttttagtggggactatctgttgtctgaatttgccaagccgctcatacacagataacggatttcacattcagtttagagggagactgatgggcctttgaatctatgacaagcaagacccaattgtagcatagtagacagatataatagcacaggcttaagagaaaggaaaccacaagcgccccaggttttattattaataataacattaaatatcattgctgataaagttataaataataatagcagataatatttattgagctcttaatagacgcctccgtccaaaaatcagctctaccacttgctgttgatttgagcttggaaagtgactgtattagtctcacagggctgccataacaaagtacctaacactaggtgcttaaaccacagaaatgtatctcctcacagctgtaaggrctggaagtctgaaattaaggtgtcccagggccatgctgtctctggggactctaggg

SEQ ID NO: 829743 - DNA, 616 bp, Homo sapiens
tggaggattgcccatagaaaggtagatgtctagcttctcttgaaaaactggaagatttggtaatattgggccctcattggcaaaaatcaacagaactgagtgggggctgcccctggaatagggcacttgtctccagtttgccactgtccccatccagccaggttcactagtttatgtctggcccctatgtgcatgaaacatgctgtttctactgaaaactgatgtactgaaaccaattgctcgaatatcctcaagttactgcatgcttgtagaaaccatcgccaaatggggaatttagatggtacaaggcacaatgaagagacagaacctatttcaagccctcgagaaccatgtttcttcagttctaagctgctgttaaaagaaaaacttcagccaaatcaaatttaaaggagttcagttgagcaaagaacgatttatcaattgggcagcctccggagccagagtaggttcagactccagtgcatccatgtggtggaagatgatttatggacagaaaagggaaagtgatayacagaaaatggaagcaaggcacagaaatagccatattggttacagctctgcatttcccttatttaaacacagtttgaactcttgg

SEQ ID NO: 829744 - DNA, 573 bp, Homo sapiens
ctggagggtccaactctgtggcaktccaggcagcgcctgaacagaggaagcccatgtcaaatgtctttttattccattcatactccaggtccctgaaatacagttaacagtcatcttctaagcttcatttaaatgaaaataaatcagactataaaagtgatagcaaaccagacacatagcttgtttctaacacagatgatgaaaatttttgtaatgatacagaaaccaaaaaattaaggaacccagtaattatgattgaaatgaaagatgattaagagtttgacatgcaaatggcaaaaaatgtaaacccagataccactaattggaaattggacattaggcattggcttcagtctagagatccagaaagtctttttgatttgttgtttacccaccccaaagaaatgaagcatatgattcagatagaaagccacagtatttctgctgctacagatacttaatgaaaacagaaaaccaatacagcgtttattccagaagccactatatggcagtcccagtgctaacaactacagaagcatgaatcttgaattataaaatgtgagttattctttg

SEQ ID NO: 829745 - DNA, 510 bp, Homo sapiens
gcataaaaatttataccagatagcaaagagtggatgggaataaaagcacaaaatggagaagagccctttttgaaattttagaaaattcttctattcmctcaaacagaaatgagcagatttgacaaaaatttcgatgataaaataagagtatcttataattataataattatgtataatgataaaattaaagtaagcacaaaatacttttatcattaaagtggtgataacctgaatcaagtaaaaaaaatcagggaaaaagttctttttattgaataaaataataacaattattattcatcttacttttattaaaggtcaaaaaaggaaataatacaaacaaaagtgaaaaaatacaactttcagaaaatatatgtgatagtacatcttctgctgctgctggcagattaacccaacaaagaaagattgggaaaacgtatcctcagcaatttcccaagaagctgaaggaagagcatgataagtaagcctatagcagtgtgtgtttttttgtt

SEQ ID NO: 829746 - DNA, 489 bp, Homo sapiens
ctacattctagttttaactgggattctcctggcttgggtagtgaaagtccagctttttagtaatcccccaatcctgggcacactgcaatggttggtccccctaacctggacyccttcaattatcccattctgacatattagtttggtgcaaaagtaattgctgcttttgccattacttgtaatgaaagtaatgccattacttttaaagaagccatgaataatgaaagctatagcttttctccacgaaagagaaaaatggcaagagcagcaattacttttgcactaacctaataatagacctttttctttttctcatgaatggaaaaaatttaggataggtcaaaattaagcccagggctttcatatgtgaacaagtttatgtctatgtctctggagagaacttgcagatatgggcataaatttttctcaaagatttcttaatacttctcatttccccatgctcatctatgtgttgtccttctgaaaatt

SEQ ID NO: 829747 - DNA, 613 bp, Homo sapiens
gggtggagagttctgtagaactttcttaggtccacttggtgcagagctsagttccagtcctggatatccttgttaaccttctgcctcgttgttctgtctaatattgacagtgggtattaaagtctcccattattattgtgtgggagtctacatctctttgtaggtctctgaggacttgctttatgaatctgggtgctcctgtgttggatgcacatatatttaggatacttagctcttcttggtgaattgaaccctttaccattatataatggccttctttgtctcttttgatctttgttggtttaaagtctgttttatcagagaccaggattgcaacccctgctttttttgctttccatttacttgctagatctttctccatccctttattttgagcctatgtgtgtgtctttgcacatgagataggtctcctgaatacagcacatggatgggtgttgactctttatcaagacccatctttgccagtctgtgtcttttaattgggcatttagcccatgtacattgaaggttaatattgttatgtgtgtatttgatcctgtcattatgatgttagctggttattttgcccgttaatttatgcagtttcttcata

SEQ ID NO: 829748 - DNA, 613 bp, Homo sapiens
gggtggagagttctgtagaactttcttaggtccacttggtgcagagctgagttcmagtcctggatatccttgttaaccttctgcctcgttgttctgtctaatattgacagtgggtattaaagtctcccattattattgtgtgggagtctacatctctttgtaggtctctgaggacttgctttatgaatctgggtgctcctgtgttggatgcacatatatttaggatacttagctcttcttggtgaattgaaccctttaccattatataatggccttctttgtctcttttgatctttgttggtttaaagtctgttttatcagagaccaggattgcaacccctgctttttttgctttccatttacttgctagatctttctccatccctttattttgagcctatgtgtgtgtctttgcacatgagataggtctcctgaatacagcacatggatgggtgttgactctttatcaagacccatctttgccagtctgtgtcttttaattgggcatttagcccatgtacattgaaggttaatattgttatgtgtgtatttgatcctgtcattatgatgttagctggttattttgcccgttaatttatgcagtttcttcata

SEQ ID NO: 829749 - DNA, 575 bp, Homo sapiens
acaaatgagttgctaggatatgattgggagacacacacaggctttggaatcaaacacacactgagtttaaggctcagcactgataccgtgagatgctggggcttcgaaaatgatactccagagtatggcagtttggcatcctttggcatcctttgtttccttttcttcaaacccaggatctcctgtttgtgcggaatatgttgaattcaaagactgaaagggcctcaaagattgaaagattgaaagggcctcagagcagtctctttgtgaccttctcctgctctcctttctctactaaggtaggtcatagatactggaatttctcttccccatggtgagtcatagaaactagaaattatactctaacctacccctatctttctgtgtaggagctgaccataaagaaattctctgacccaccttgtctgacagtagatcctaagacctcattcccagaggggctgtgctccatgctggagrgtgaggaatactgtgcagagaggtcaagatgaatctgaacagatgggcttgctgggtcctttcagtctattaccactagaacattccatttttgt

SEQ ID NO: 829750 - DNA, 624 bp, Homo sapiens
ggtggagagttctgtagaactttcttaggtccacttggtgcagagctgagttccagtcctggatatccttgttaaccttctgcctcgttgttctgtctaatattgacagtgggtattaaagtctcccattattattgtgtgggagtctacatctctttgtaggtctctgaggacttgctttatgaatctgggtgctcctgtgttggatgcacatatatttaggatacttagctcttcttggtgaattgaaccctttaccattatataatggccttctttgtctcttttgatctttgttggtttaaagtctgttttatcagagaccaggattgcaacccctgctttttttgctttccatttacttgctagatctttctccatccctttattttgagcctatgtgtgtgtctttgcacatgagataggtctcctgaatacagcacatggatgggtgttgactctttatcaagacccatctttgccagtctgtgtcttttaattggkcatttagcccatgtacattgaaggttaatattgttatgtgtgtatttgatcctgtcattatgatgttagctggttattttgcccgttaatttatgcagtttcttcatagcatcaatgatc

SEQ ID NO: 829751 - DNA, 628 bp, Homo sapiens
aaaaaagagcaagaatagctaaagcaactctgagcgaaaaaacaaagckggggacatcatactacctgacttcaaagcttactacaaatctatagtaaccaaaacagcctggtattggtataaaaataacacagacttatggaatagaatatataactgaaagataaacccctatgttcacagccaactgattttcatcaaagctgccgagtgtatatgttggagaaaggacacctgtttccataaatggtaccgggaaaaccgaataaccaatgtagaagaataaaaccagactctatctctatatgtcaccatatacaaaaatcaactcaacatagattaatgacataaatgataaaactactggaagaaaacagggaaaattcttcaggacactagtctagacaaaaatgttatggctaagaattaaaagcataggcaacaaaagcaaaaacagacaaatgaaactatattaaactgaaatacttctttacagcaaaagaaataatcagaataacgagaacacctctggaatgagagaaaatatttgcaaactattcatctgcgaaaggactaatataaatatacaaagaactcaacaataaaaaagtaaataatcccattaaaa

SEQ ID NO: 829752 - DNA, 588 bp, Homo sapiens
cttcatgattcatcccatcctagtactattcaacatcacattttttaaacatggacttattttataggtacactcaattgtcacaagraactgtcatcccctagtctattcacagcaacaatcaattctgccaatttggattgaactggtcccaactctctctactatagcatctctatttttagtgttgccctgggtcaaatagattcagaactccaccctatatagaagtcagtgtgctgaaagttttcagagtccctcttatctagttcaggatggcataagagcatggcattgagtgacaatgagccatggccaaggagggagaggctacagatgagagggcttagttctgcctgtaaaagtacccttcttggtgactaatggatcctgagtggatgagacaatcaaggaaaagacaatttctgttctcaatgagtatgcacatgtgtatgtaattaacatacaagacaacaaaatataattctggggaatggtgtatatgacatgtgctttgagatgtccaaggagggggattttcagggataatatgggaaatgattaagtgaacaatccctacctttccta

SEQ ID NO: 829753 - DNA, 481 bp, Homo sapiens
tggggacatctcttttactagacataaatcaacaaattaacatgtaagttcacactgtctgggctcctgtcaaatactaaatagctatgtcaaacgtgggtacaggcttctacagaattaaataatccttgagtwaaccttttaggcgaaacctcagtatgttattgattaaagatgcccccttcttcatcccacacctacatcctcggcaccttatttccaggtgttgggtgattatcaaagcagatttcaaagttttggatcataattgcaataggactgtataattacagtatctctcataccaaaaactgcctccccagtcccatgtatgtcattcgtctttctttactttctttactttctttacttctctggacttaaatctttcctgctttatctcactgggtcctatctctgcctccttccaactcagtagctctttctctttccaatgttatactcttacaggatccttaga

SEQ ID NO: 829754 - DNA, 562 bp, Homo sapiens
caacccttttttataaggaggcatatcagcatgtcatttkattaagtctgatgttcacactttgcaacaattttgagtatacagccatatatatgtgaatatatatactgctaactcttatcttcagcttgctaatttctactaggctcactaggtaatatctcccatgttctatttcaatttattcaggtcaaaccccaattgcagcttcctccaatgacttctcccaagcatttctcattccttgaaaggagattcccccaggctgaactgagcaatgatcaaaattccttgtgtcacgttacttcagaattaccaaaattacagatttaagtggaggtccttccagttttttcctcttacattctagaattacaaatcagttcaattgagaagacagacgcttttctggctattttgtgcccagaagtagaaaaattacttcgaacagctactaagtcatgttttgattgttgttgttttagtctcaaatatttcagcagcaaataatgaaacctaagaaactcagaggtggcctgccgaaatgaattttattcctttt

SEQ ID NO: 829755 - DNA, 464 bp, Homo sapiens
agggtaaattttgagtctcaggagtttaagaaggagtaaaaaagataaaagggtagaaagcttatttaaagacatactawcatgaaccacataatgatgttttggtcaacaatgcatcatatgtatgatggtggccccataagattattagagttgaaaaattcctataagttagtgacatcacagttgttgtaacatcatactgcagtacattacacatgtttgtggtgctattggtgtttacaaacccactgcactgccagtcatataaaaatatagtacatataattatgtacattatatatttgataatgataataaatgactatgatattggtttatgtatttaccatacttttgattgttattttagagtgtactctttctacttattaaaaaaagtttactgtacaacaggatgcagtgttatgccagcagcagccacatacatctcatgattacta

SEQ ID NO: 829756 - DNA, 635 bp, Homo sapiens
gggtctcctgcacccctctttggactcttgtccctgctgtcatctgtcctaataacctacccacttgacaaggctcaaggtctcatttcttctgagaaatccctttcaatttctcttcctggcacacccagaacagcttccatgcttatttatttatttattttgagatggagtctcactctgtcacctagctggagtgcagtggcatgatctccccttaatgggaactctggcttctgggttcaagcgttctcgtgcctccccatcccgagtagctgggattacaggagcaagccaccagggctggttaatttttgtatttttagtagagacggggtttcaccgtgttagccaggctggtcttgaactcctgacctcaggtgatccaccctcctcggcctcccaaagtgctgggattacaggcatgagctagcatacctggccccatgcttctacagaaccttgcttctgcctctgtcttagcacttgtcatggtctgcttttttatttgtcttgtagttacttctacgtgtgtcttacctccctccatctaatgataagttcctatagasaagagcctattattcagggcattcatgtcacatattttacctgtcatggtgccttacatattt

SEQ ID NO: 829757 - DNA, 619 bp, Homo sapiens
agaaaatataaaacccaagttgctaggcctagactggaatagcgatgtggtacaaggcgaaggcaaactttgttttatttatagagataaaaaataacaggaagagatgaagatgaatatatggttgcctttgtatgttaaaaagcaacagttttctttaaatcaaatgtctaaatcctgcttaattaaaagaaaggaagttgatatttggatatggtgtgtgttgacatccacctctttgatttatgaaagtatgaactagagagaacagattactcaagacagaagaaagagttccaatttgacaggaaaaagtgtaggcagcattaacttcggtgcttgttaaaatatgaaggattagtagcaaaaagggagggaagacttgtgaatgtctccagtttaggatcttcagaaatgtttggggtttctgagaatggctcacccaaccacatgaaagtgacactaagggagtcagccacacgacttctctaaattcagagctgagactgctgtacattgacatcaaaccatcttacttgaagtgtagccacaaattaaatttatttttattgaaaaagtactaastccttgcaaagggggaaaatatagcattcaaaaa

SEQ ID NO: 829758 - DNA, 589 bp, Homo sapiens
ggcaggacgtgtgtgtgtgtgtgtgtgtgtgtgtgtgtgtgtgtgtgtgtgtgtatctcctgagtttgcaatggcggagctgaggaagggttarcagaaaaaaaaatgtcatattaggtttactaattagagcccaaataacttgttggaagccaggtcacccagtctgaacaagagccatataagttaagtgatgcagggcgcaagccagcagttgaagcaaatgaacagaggaaaggtgggtgtagaagaatttctgaaccaaagcccaagcaacttaggcagctttttatgcagatcccgtagttcctggtccagaacaaacattactcgatgtaaatactcagcttgtggagcagctgcataaccagcactgagttccttgaaggaggtgttatggccagttgagtgtcagccaagtaaacactggctaaagtgtaatcctcctagattcagatgctgttttggtccatggcagaagtgataagtatctggaacatatctggtgaatcctccactgtctaccacgcctgtctcatggtagaaattatcacttactattgagtgaggaggctactgctacagcctg

SEQ ID NO: 829759 - DNA, 558 bp, Homo sapiens
cagagtctgggaggcagaggttgcagtgagccycgagattgtgccactgcactccagccggggcaacagaacgagactccacctcaaaaaaaaaaaaaaaagaaaaagaaaaaaaaaagaacatattcaaattcctagatttggaatgtggaaattgtttgtgggggtgtagtaattctgcctgctatatttctaatgtgtgattatgaaaataaattggagaaagttaggtggtatctttgatattacttctattgctctgcttgaaatatgtttatgtgtctgtaactcaatttcatgcttaaatggcttagagaaatatatccaaaagggatgacaatcaatccatgttaaattgatagcttaacttgctaacaatctttcccgttttccctttccactgaagaggcctaaagtctgattataatgttataattataatcaatgtcatgttcaatataatgttatataataatcaagcccattcaaaaacctggacttgattatttgactttaagaattttaaaaatattagattgttttccttagggaatgatt

SEQ ID NO: 829760 - DNA, 591 bp, Homo sapiens
ctatgcaaaaaatgttaaaagaagttcttccgggagaaggaaaatgatgtagtcagcaatttggaactatgggaggctgaagtgtgcgtatcatctgaggtcaggagttccagaccagcctggccaacatggcgaaaccctgtctctactaaaaatacaaaaattaggacagtgtcatggcagacgcttgtaatcccagatactcgggaggcagagggaggagaatcgcttgaacccgggacacagaggttacagtgagctgagatcactccactgcactccagccacatgtaaaactgaactttgggtgacagaactagactccgtctcaaaaacaacaacaacaacaacaacaaaaaggaaagaaataataaatataatattctattttttcgtatattacttgacctatttgataactgtttgttcaaagtaacaatagaaacaacttactgggtratagttatagtatatgggtaagtaaaatgaatgaaagcaatgttataaaggataggaaggaggaattggggctactgtgttgtaaggtaactgtataatctgtgaagcatgatagcgttatttaatagtgat

SEQ ID NO: 829761 - DNA, 642 bp, Homo sapiens
tatgaatttttaattaaattttgccaaagtcaaaaggtttttgacttyttattttatcctttattatatataattatgttgttaatgagtacactgtgaatagtatcaagtaaaatttcatttattctttttctttaaaaaagttatctggatatttttcttttataagatcactttcccatatccaacataattacttattgtataactatcattttatatatatcattttattttgtgctacttggttccctcacgtttcttttatcttctttctgatcttcacttacaaatattgattatgtacgttttcttattcaaaactctctcatttaaaattaacagttttacaaaataaaattcctaagaagaagatgaaatgtttttgcatctatggtgaactacaatgcttattaaaatacagacaagaacattaaaaattttcatttggcataaaactttagtccattgattttctcttctttctgcattaaatatagacatgttcatggcaatttggtagtcatttgagactgtgagcatacaggcataaggataagagtcattctttaagaaagcttgaaaaagtctgtgttttttatgtcatcatagaccgctgcatcagacttaggactacctact

SEQ ID NO: 829762 - DNA, 594 bp, Homo sapiens
attaaaattgaaaaatctgcttctgaatgacttttgcatagataattatattaaggcagaaatcaagaagttatttgaaactaatgagaacaaagatacaacatagcagaatctctgggacacagctaagacatggttaagagggaaattagtagcactaaattcccaaatcagaaagttagaaagatatcaaattaacagcctaatatcacaactaaaaaaaaaaaaaacaaaaaaactagaaaaacaagagcaaaccaaccccaaagctatcagaagacaataactaaaatccgagctgaactgaaggaaatagagacaaaaaaaaacattcgaaagatcaacaaatccaatagctgtttttatgaaaaaaagaaaatagaccactagctagatgaacaaagcaaaaaagtgagacagaacaaaaaggatattactactgaccccacagaaataaaaacaaccatctsaaaatattatgaacacctctatgcacataaactagaaaatctagaagaaatggagaaattcctgaaaacatacaccctttcaagactaaccagaaaaaatttaattcctgagcaaactaataat

SEQ ID NO: 829763 - DNA, 606 bp, Homo sapiens
tatatatgatatacacatatacatacattcatacatatagatatatttaatcacatgcaccttcttcccaatayaaccaatcttccatcactgcctgcatctcctccccaacctgcacacacaaactgatgtcttcttcatcctactcaggactttcactcttgcagccgccgccaaattcctggatggccactcttcgtcctgctctgtttcaatcaccttgcaactggttgttaaaatgccctgctcactctgcttgagctctgaactccactgtcgacgactggcattgaagatgttcttttctgaggcagccttttcaccacattcaggcctttactttgaataccaggctgacacagttgccatcgcttcctcaaacagggtccatcttcactctaatacagctccaaacctcacccaacctgctgccttccctcctccatatggagagccaccatactcgacacccctaaggaataccttttagactgactttttcaggaaaagaggaaagaattaaggaaaaaaagaagatagcaaggtacagaaggaaggagggataggggaagaagatagtatgtttattttaaaaacattagccta

SEQ ID NO: 829764 - DNA, 545 bp, Homo sapiens
aaaattttccatcaattatggttagacttctwaatcatttgaaatttcaaagtgattagtaaaatggtgagtgaaaatggtagataaatgaagtatttttggaataaatttaaacacgcttaaaatgctataacaagtttataaacttacttatctggaattgactaaatagaaaagtcctagatacagcatcaattttataaagtcaagtcaataaactagaaggacaatttttattattttttactgcattgttttattttcttagtgtacatgctatcagcaaagtctgaaggcatggtttgcacatgaaaagggttttagcaactcataaataatataaccagagataagaggggaaagtaacattatttgtttctttaatttgtgtttagcgggacaattttattaggactttctccttgtcactttatgaatgactaaaaaaagaacaaagaaaaaggagttgtgcttctgaaacaatagtttggaaacaaaggtaacatttgaacaacaaagctaggcaatattgaaaaaaattaaaa

SEQ ID NO: 829765 - DNA, 624 bp, Homo sapiens
taccccatatttttagggagttaggaagctttcttgacctgtctgatccttggttgttagttattaatcgtgagttttagaagtctgactggaagccctgagtgtgtggcctgggctccttggctgctgagcatcactgtaaggcgatcaaatatggactggccattttatggcaaccccttaatatttgtgggtattttgagaggataaggtgtcagtcattttactgtaaaagaatctttttatctttcacctaggatgtgtgcatagaggttgatggagatgagtaagggcataagctagacttgcagcattctgggttatattagcggtagtcagctctcaatagaggatggattctgaggtccaactctttgtaatatcaattattaaataatcttctgtatttagctttattgttaccttcataagtatctgtacattttctgaacattttaggattctgctttttttggctcctctttgtataggcattttagcttttggctttttgcgttccggtrtgttagttattactttttaaaagtttattgaactttgagggtgcaggatgctgaggtgggaagattgcttaagcctaggagtttgaggctgcagtgggct

SEQ ID NO: 829766 - DNA, 565 bp, Homo sapiens
tattaaacctttttcttttgtaaattatccagttttgggtatgtctttatcagcagcatgaaaatggactaatacagtaatgtgatacttgtagagtggggtgttgctgagaagatacccaaaaatggggaagtgactttggaattgggtaataggcagaggttggaacagtttggagagctcagaagaagacaggaaaatgtgcaaaagtttggaacttcctagagacttgttgaatggctttgcccacaatgctgatagtaatatggtcaataaagtccaggctgagatggtctcagatggaaatgaggaacttgttgcaactggagcaaaggtgactcttgttatgttttaacaaagaggctggcagcattttgcccctgtcctacagatttgtgaaactttgaacttgagagagatgatttagggtatstggcagatgaaatttctaagcaccaaagcattcaagaggtgacttaggtgctattaaaggcattcagttttttaagggaagcagagcatagaagtttggaaaatttgcagcctgacaatgcaatagaaaaga

SEQ ID NO: 829767 - DNA, 371 bp, Homo sapiens
ctcccatgtgactgctaccctgtgggctccacctcgcgctcatgtgcaccccacagcgggcagtgccctgtcgcccaggagcccttgsgcgccagtgcaacagctgtgacagtcccttcgcagaggtgacagccagcggctgccggggtgagcaggctccacccagctccacccatagagggctggttccagtgtgccaccatcacgtgtcagtggcacacatggctccttggggactctggaagcttctcctgagggagaccacttacacccagggaaccctacctttgccccaagtactttgctgacctgtcacagaatctgacaggtcagctcctgagaagccagcaggagtggcgggcagtgggcct

SEQ ID NO: 829768 - DNA, 371 bp, Homo sapiens
ctcccatgtgactgctaccctgtgggctccacctcgcgctcatgtgcaccccacagcgggcagtgccctgtcgcccaggagcccttgcscgccagtgcaacagctgtgacagtcccttcgcagaggtgacagccagcggctgccggggtgagcaggctccacccagctccacccatagagggctggttccagtgtgccaccatcacgtgtcagtggcacacatggctccttggggactctggaagcttctcctgagggagaccacttacacccagggaaccctacctttgccccaagtactttgctgacctgtcacagaatctgacaggtcagctcctgagaagccagcaggagtggcgggcagtgggcct

SEQ ID NO: 829769 - DNA, 576 bp, Homo sapiens
acgaagacaagcattctggagaatcatttctgagccaccttgctctagagccactctttttttcttttctttttttctacaayagcattatgaagtaattgaaaacaaacttttctgagattcaaagcacttaattagaggatcatttggcagtgtcatacatagaggtacctatgtggtataaatcgaaggtatcctgaaaaacacacactctgtttagatagagagatgatagatagataggtagatagatagatagatagatagatagatagatagatagataaatagataagacttttagtcttacctctttttaagaaggcttcagggtatagtaaaaataatataggttttggtgcttatgttaaaaaacttaaaaacatcttcatttttctcttcctgccattgccctaagcatagattaattttgttttataatcttttaacacataaagcacccaaatataaggagctcaaagataagagaaaaatgaactagatttcagttttatagtgtattatttcatttcatgatcgacacttacttctcaatcactccccaaattctgtgag

SEQ ID NO: 829770 - DNA, 608 bp, Homo sapiens
aatttgattacttctgtcaagatccctgccttcataataaagtcacattctgaggtactaggagttagaacttcaacatataaatgttttagttggtggggtgggtagggaggaacacaacgayaaaatcatttaaaataaattaccaaaatctatttatttagctgtaaaaaagatcatgggttggcaagtatagaaattctaaaaattcattttgccatttttttctgaaatgattatttcatttattttaaaatatctttgatcatttactttatatggtaagttttggggctattcatttttatcagtggcaaaaacaaaaatatttttacccttatagcacgtagagtatggcagaaagtttgttgtaattttgtaactttgaagttttgcttgaaattgagaaatatgtactaattttaatgactttaagatattgatgcaggagattaataaccatactctcacagagggctttagtacacatgctgtttaagagaattttatttcgtagggcaccaaataaggaagaattttctgtaacaatttatttttagatatggctattcttcccgtgcttttatatttgtattttataagttttt

SEQ ID NO: 829771 - DNA, 560 bp, Homo sapiens
tggttcttccaatgtggtatcagttaatcaccagatttattttasagctttgtctatggtttcttttcccctcatcctctttcatatttcaggttaaatcccttttgaacaggttagaagttctatcaaacacagttttccttttctcatggggtgcacatcatccttgccaaggctcagatgttctggcatgaaaaatcatggcctacaacactttaaaataatttctgtggccaatggttcacttccctggtgccttttcctcttccaaggctccacatgcttcgatttgtagcctggacttcaaagtcaccaacaatacattccagattcctttggctgcggtattattaattcccaaagagatcagcaaaacagccagcagttagtgggtttgaggagagactcaattgctgctactttttcagaagatgcaattactccttcctctgagttactttctgtacacattaacttctagacaacggtttcgattccattgttcttttgggatattgttcctcctgacttctctcctggattattttcttcatcttgat

SEQ ID NO: 829772 - DNA, 444 bp, Homo sapiens
tcgggacgtccatccctgtctgctcacacctttcttctctccctagtcctgccagcgactcccccacaacttgtcagcccccgggtcctagaggtggacacgcaggggaccgtggtctgttccctggacrggctgttcccagtctcggaggcccaggtccacctggcactgggggaccagaggttgaaccccacagtcacctatggcaacgactccttgcggctaaggcctcagtcagtgtgaccgcagaggatgagggcacccagcggctgacgtgtgcagtaatactggggaaccagagccaggagacactgcagacagtgaccatctacagtaagaaggggcaggggcggagtggggcttcttgggggtgtgacctgaacccggggcggggctcactgtgtgcctattccaggctttccggcgcccaacgtgattctgacg

SEQ ID NO: 829773 - DNA, 631 bp, Homo sapiens
cccttaaatatatacacctactgtgtacccaaaaaaataaaaaacaaaaaattaaatgtcattgtatgaaaaagaacaktggaagacacccagagtcacagaaggaaaaagccacgtggagacagagacacagacaggagtgaagtatctacaagcccaggaataccaaagaaccaacagccactagaagctaacagcggcaaggaataaatttttccccaaagcttctggagtatccaagactgctaacactttgatttagaattttttttcctccagaactatgagagaatgaatttctgtttatctaagcctcctagtttgtggtaatttgttaaagtagccctcggaaactagtataccatctttcttgaaaagtctctctctactgttcatttaacttcaaatgtcaaaattctacatctcatttaatgccgacaaaattgtctagtcctccattcctttttcttacaattgataatacagctaaacaccatggctttttcctctgaattcttttgacaatgaatatgataaagatattgcagctgaaacttgtttaatgtttgatttatatctaattccttcttattccttgtgaaaacaataaggcaggtgctattatttttca

SEQ ID NO: 829774 - DNA, 631 bp, Homo sapiens
cccttaaatatatacacctactgtgtacccaaaaaaataaaaaacaaaaaattaaatgtcattgtatgaaaaagaacattrgaagacacccagagtcacagaaggaaaaagccacgtggagacagagacacagacaggagtgaagtatctacaagcccaggaataccaaagaaccaacagccactagaagctaacagcggcaaggaataaatttttccccaaagcttctggagtatccaagactgctaacactttgatttagaattttttttcctccagaactatgagagaatgaatttctgtttatctaagcctcctagtttgtggtaatttgttaaagtagccctcggaaactagtataccatctttcttgaaaagtctctctctactgttcatttaacttcaaatgtcaaaattctacatctcatttaatgccgacaaaattgtctagtcctccattcctttttcttacaattgataatacagctaaacaccatggctttttcctctgaattcttttgacaatgaatatgataaagatattgcagctgaaacttgtttaatgtttgatttatatctaattccttcttattccttgtgaaaacaataaggcaggtgctattatttttca

SEQ ID NO: 829775 - DNA, 556 bp, Homo sapiens
ttgtgctaaaggctttactggcattatctcattcaatccttctaaaactttatgaggtagttactaatctacctattttacagatgagaaaaattgaggcttagagatattaatcagtgtgctgaaggtttgcaaagttagaaaatggtaacaaaattgtgaaatgactttctccatcaatttgcttgttttcgtcattagagtggacatgaaaaaaatttaatctctacatcagcagtccccaacctttttggtgtcagggaccagttccatgaaagaccatttttccacagactgcggggatggggaggggatgattcgagcacactacatttattgtgcactttgttactactattattacattgtaatatatgatgaaataattacacaattcacataatgcagaatatgtgggagccctgagcttgttttcctgcaactagatggtcccatctgggggtgatggaagacagtgacaccygaaatgtgttgcttatgtccagtctactccataatctcattatggtttctctcactacaaaaaaccctgctt

SEQ ID NO: 829776 - DNA, 405 bp, Homo sapiens
taattattgacaaaaattgtctgcctgagattctaattcaattaaatattattgtcatcgtcctcatggtacagttgcattcatcattragactgttcactactggacagtttgaatgtcctccccagtgttgctgtgtgagtaggttgcttcacagctaaaatcaagcagagaatgataaatatgctacctattaggaagtgaacgtgtctctattgcttcactagacgtctcctgttgacttagagttccagcccccagtgcaggacataaggagaccaatgttttgtctattaaggtgacttctttaaattacaagaaaaaaacctgagatgagcataaatcttctcttttattgggttgctacaggcacatatctcttctgcctgaaagacagtattattt

SEQ ID NO: 829777 - DNA, 405 bp, Homo sapiens
taattattgacaaaaattgtctgcctgagattctaattcaattaaatattattgtcatcgtcctcatggtacagttgcattcatcattaagactgttcactrctggacagtttgaatgtcctccccagtgttgctgtgtgagtaggttgcttcacagctaaaatcaagcagagaatgataaatatgctacctattaggaagtgaacgtgtctctattgcttcactagacgtctcctgttgacttagagttccagcccccagtgcaggacataaggagaccaatgttttgtctattaaggtgacttctttaaattacaagaaaaaaacctgagatgagcataaatcttctcttttattgggttgctacaggcacatatctcttctgcctgaaagacagtattattt

SEQ ID NO: 829778 - DNA, 606 bp, Homo sapiens
ttaaaactacttttattgttaatgtttttaaarttttaaattgccagataacatcacatgattttattatgtaaaatatgtatacattatgcaatgcttaagtccagctaattaacaaatgcattacctaacagttatttttgcagtgacagcacaaaacaactactctcttcatatttttcaagaatataataagtcatcattaactatagtcactttattgtaagagagatctttttaaatttatccctccaatctaactgttattacgtatgctttgaccatctctccatctgcctcacctccaagcaaccccgcttctgctaagcaccattgtattctctacttctataagatcaactgttttagattccacatattagcaaaccttgcagtattcatgtatcactagcttattttccttaatataatgttctccacgttcatctatgttgtgggaaatgacaggattttattctttttttatgggtgagtagtatttcattgtgtatattcactacatttttattattttattccttggtggacacttaggttaattctatatcttggctattgtgaatagtgcatatgcggagtgtagct

SEQ ID NO: 829779 - DNA, 569 bp, Homo sapiens
tttaatgtctaccctgtgctagatacattacttattttatttagtgaaaaaattctgaggttgaaactctatttttatacttaaatcaaaatgattaactttctaaaggactcagcttgcaagtatcagagctgacatctgaactcaaggcaacctgctccagagtctgtccctgctctgcaaaacagcacactggaagagcggcattttggttcttcctatatatttaattcaattactctgcaaactaccgcagaacattatttcactttaggtccctttcttctcatctctgcttcctctttaaagtagcaggtggggactatgaagaaacattattctgattttttttcttttctctttcaggccacgtaaactagtctttgtctttgctggaataaacagtattgtacgtgattgaacatttgtaatatcaggagacctaacagtrtagtgtggcatcaggctagggaacccctgccttgatgaattggataccataatatttctctgcctagggccactactacttgcataataattgccccagtaaatttgtagcagtccta

SEQ ID NO: 829780 - DNA, 635 bp, Homo sapiens
aggttatataacaagtggartatgcacttacaccctaaactcactgagtcactctggcctggatgtctgccttggcctattccttgaccaaagtacatccgtataccttacaatgggttaagtaggtggctgtcattatacatgggtcacccctgggagcttagtaaggtgcaagttcctgggccccatcccaagagattctgggtcagtggtctgtgaatctacatttgtatcaagcacacagctgataacaacgtaaatgctccatgacctacacaccagatggagcatcatgcaaatccttagccagtagcccaagtcctgtgtatcttaggtgggtcttgcatttccaagggtatttcttccatgactcaataaaacaggctgtctgctatatgatttatgtgggataccactgtacattcaaatgaacttcaagcctgtgtctgtgctataaacagtggtcattccagaacctctccctaggacagggattaggggtgctggaagcagagacagcttgggaggaggggtgatgctgtttgttgggcaaaggaccctgactttatcattgaaatgcaagtagccacaaagatggatgaattatacactagttatgtgtcaatgcattcacc

SEQ ID NO: 829781 - DNA, 648 bp, Homo sapiens
taacaatctaaggcaggacaaaaatgttaattatcttttctcagtgatatttttgttaaatacatggagtatggtacactgctagaataaagaggaggaaaagcatctttctccatgatgatattatggtgttattactgaaccctgaaatagtcttaacagggaaattggcactggttttaaacaacttccagaaatgatggctccatattagccatgcaaaaatgaaaatcattgtctttgttagatattctccactaagggtaattttatttagacagtcactgcggggtacattttgcagaaagccaagttattcagtatcagacaatttatggaatccttactgagattttctacaacctctacgggttatcagtaactttttattttttgagatggagttttgccctgttgcctaggttatggcacaatcttggctcactgcaacctccgcctcccaggttcaagcaattctcctgactcagcctcctgagtggctgggattataggagtgcgccaccatgcycggctaattttttgtgtgtttttagtagagatggggtttcaccatgttggtcaggctggtcttgaactcctgaccctgtgatctgcctgcttcagcctcccaaagtgttaggattacag

SEQ ID NO: 829782 - DNA, 518 bp, Homo sapiens
caaaaggacaaatattgtataattttacttatatgaaatacctagaatagacaaattcatagagccagaaagtagattagaggttatcaagggctgagaatgagggtaatgaggagttattgtttaatgcrtacggcatttctgtttggaatgagaaagttctgggaatggataatggtgatggttacacaacattgaatgtacttaatatgccagtgaatcgtacacttaaaaatgtttaaaatggtaaattttatgtatattttatcacatacatactcccaaaatgtccaagacagacggtggaaatgttctagattaaaggaggctaaagaatcatgacaactaaatgcacacctgatcctggactggatcctaaactagagggaaaaatgctataaaacgccataattgggtcaagtgacaaaatttgaatataaataataaattagacaaaactactgtactcatgttaaatttactaatgtggataaatgtaccatggttatataaaagga

SEQ ID NO: 829783 - DNA, 518 bp, Homo sapiens
caaaaggacaaatattgtataattttacttatatgaaatacctagaatagacaaattcatagagccagaaagtagattagaggttatcaagggctgagaatgagggtaatgaggagttattgtttaatgcatayggcatttctgtttggaatgagaaagttctgggaatggataatggtgatggttacacaacattgaatgtacttaatatgccagtgaatcgtacacttaaaaatgtttaaaatggtaaattttatgtatattttatcacatacatactcccaaaatgtccaagacagacggtggaaatgttctagattaaaggaggctaaagaatcatgacaactaaatgcacacctgatcctggactggatcctaaactagagggaaaaatgctataaaacgccataattgggtcaagtgacaaaatttgaatataaataataaattagacaaaactactgtactcatgttaaatttactaatgtggataaatgtaccatggttatataaaagga

SEQ ID NO: 829784 - DNA, 605 bp, Homo sapiens
  misc_feature 600, 601, 602, 603, 604, 605: n = A,T,C or G
tatttgagacattggtagattggtgaattttatctattttaattaaaaattttaactactttagaaaattattttattacrtagtatgaattttttaatgaaacctattcctttttgaatgtaaaaataaaatcattgacagtaaactaaacatatccctttaaaaatgcactcttttatacagtcatcttgaaggtagcttgacatcataataagcatctaattcaaatattatagaatataaaacaagggtctgtacactaaggcccatggtccagaactcacccaaagcctgtttttgtacagccctcaagctaagactttttcacatttttaaagagttataaatttaaaaaacaacaatcaaaaagaatgtacaacagactaaatgtggcctgcaagcctaagctacttactatctggccatttacaggaaaagcttgctggctcatggtataacataatgatatatgtccaatttctgatgtcaaaccaaaggtaattttcatgtagaatcatgggatacttagtctcggaaattaagattttagctaacagtttatcccttttttcactatcattctttgtctaaatttttgnnnnnn

SEQ ID NO: 829785 - DNA, 625 bp, Homo sapiens
ctaaggccccaccttctagctgtattaacacttcaccaaaagagcccctgcagcttctcccagatagcaatctacttcagtatgtggatgacttactaatctgtagtcctaaccaggctgttccagaccaaaatacagtattagtattcaacaaacttgctaattgtgggtacaaagtatctccttctaaagcacaaatatccacacaaagggttcaattttggggtcttattttaattcccagtgaaaaagcctttgtagtgcttgtacagatcttaaacgtgacaattgtggtaactaaacaacagcttcagtcatttttgggtaaggctgggttttgcagaatatggattccttcctttgagttaatagcaaaacctttatatgaagccctcaagggaactcaggaacagtctctatactggactaatgagatgaagcatgctctaaacactttaaaataggctttaatctcagccctgacctcagccctaccagatctgactaagcctttttctatgtacatgaacaaaagggaatagctttgggagwcttagcccaagattgaggggccctctaagtgccctatagcatttttttttctttgagatggagtctcactcta

SEQ ID NO: 829786 - DNA, 504 bp, Homo sapiens
gaccccgaacaagagaaacctgtaacaggggctctgcggagatctggatcccacccaccaaccacatgggcacctggggggctgcccctcgggatctatcagccagtgggaarggggttgacgttcctctgcggcccatgaatcctggagggctgcccgagggcgcaccggggtccatccacttattcttcggttgttaagcgccagacaggagagaaccgctagagaggagtgtgctaagaccctattacccactaaaactccattttcatcttttgcgtcctggatgactagtctccacattcctggcctttctggtttctcaggagaaccttctgacccaactcttcccacatcgaaagagtttcctagtcttttgttctactactagccgacatagaaagcacctgtcatgtgccagtgtcaaatactgcgctaggaactgggaactcaaggcacaggagcctggcttttgcgcagggcgctcacaggccggtgggtgca

SEQ ID NO: 829787 - DNA, 472 bp, Homo sapiens
acctgtgtctttaggtttcctgcgatctagcttggaggcgggttgggggggtgtggagggaagtgctggagaaattatcccattattgactgagcagcaaagaattttcaagaacagtgattctcctagaaaaagtattgctgctgccatttcaatgcaaaatttggcttttgagtaaaaggcttaggtttttatcttccggggagaaaaaaaaaacccaaaagacaaaaaaaaaaaaaaaaaaaaaggtcatagcgtccctgggtgggctcgaaccaccaacctttcggttaacagccgaacgcgctaaccgattgcgccacagagaccgagtcgactaccggygtagtagtgagccgagtcaatgggagcgagcctggacggcgcagacgccgtaagagatgccgccatcgggcgaaataagtggaacccgggggagaaagggaaggatcctgatgggggagggaggcga

SEQ ID NO: 829788 - DNA, 512 bp, Homo sapiens
tgttgcccaggcaggtctcagactcctgggctcaagggatcctcctgcttcaacctcccaaattgtttcgggattatagatgtgagccactgtgcctggtttcatgtcaatatctttttttttttttttttgagacggaatcttgctctgtcacccaggctagagtgcactggcgcgatctcggctcactgcaacctccacctcctgggttccagtgattctcgtgcctcagcctcccgagtagctggggactgcaggcacgcaccacgcctggctaattttttgtatttttagtagagacagggtttcgccatgttgcttgggctgggtcttcagctcctgagctgaggcagtctaccagcctcggcctcccaaagtgctagaattaccggcatgagccaccatgccttgctaatttttgtatttttagtagagacagagttttgctwtttagggcaagctggtctctgactcctgacctcaagtaatacacccaccttggcctcccaaag

SEQ ID NO: 829789 - DNA, 571 bp, Homo sapiens
atttatgaaacatctatattctaaagaataagaccatatgggctayacccaagcttgtcaaaagtctgtttactaaccagaatttggttggtcacatgtgtagactctgtaaaatacatgattcagtgaattagagccctgacccagactttcttccctgaaggttgagaaactaagacacccttgtgatgaccccagcagaaaaatcttaaacagagttcattttcactttttcttatcattttagaaccccagtcagtgtactggattttgaattaagtattctaaggcacaggtctgtattttcaacagcgagattaccaaacaggaccctttgagctcacctgaaatgtatgcctcactgttcatttatttgatctcagggtgtcaaggtgtcctcctcaggaagacttgaatttcttttctcctctattcaatgttgtttacaagaggaacaacctcccaggcaatactgtgattctgaccctatgactcagggcttttgattcctctggcacattttagtagtctcaagcctgttgcaggctccctgctgcaggcctaaacaaaa

SEQ ID NO: 829790 - DNA, 487 bp, Homo sapiens
tcaaattctatccttcctttcaagtgttttgtgaattcctgttttctatactatttattagtactacagtgagtattataatggcactctcagttacagagttcacaataagacttggagtactaagtttaaaatgtaatttgctataaaaacaggttttagcatatatctagctgaataaatgtggtttacaaatctctgggtaccaattttctacagtgctttaaacgttagaattttaaatcttaggaaaaatggaaattatatttctggataagttttatatcatggtctaaaccatagatgtgacaactctcactaggtgaatttggactctcacctattgagatccagtgctcaagatgaatcaacatgggtttaaattctaacttgccgcttataagctgtataatcagagataggttatttggccattcaaagcttcaatttctaatctgtaaaatgyggtaataatcgtacctccttc

SEQ ID NO: 829791 - DNA, 669 bp, Homo sapiens
ttgatgataaaaggattctcaaaggtatctgtgrcctaaaaagttttcatcattcactctgcaaagcaccatcacatgcttcatttaatttaatgtcacaattccaatgttctcctaaaggtcttttttacagtttacaccatgtattctcaagtgaggagatattcattcccaagagggcaaaaactggttcttggggtgtgaaaaaattcctagatgtcataattgtatatggccctcatagtacttaaacatatatagagtatatcttgtggtattaagatttcatggggagtgtgggagaaaaggaaaagaagtttttaacaaggctccttaggggagcaaccgaaaagaaaaaaattgagaaacgctggtttacactaaaacacaaagggtaatagactaacaattacaagagttaagtgctagtgcagagtaacatgcagggtataaaaaccagtcatagaagcagagcagcataaatgctgttctttgtccctcacacagcataactgctctatgtaaaaatggactctgaaaacaagttgatgaataaacatgtacatatgttgactaagtctctgaaatgtccactgcaacatttctactttcactacattactacccccacaatactttaagacatatttaatatacaacaaaattatg

SEQ ID NO: 829792 - DNA, 624 bp, Homo sapiens
tatcccttgaggataaagggggactattatgtatgacattcaagaaaaagcaaaaytatggatacaggaaaaggtcagtggttgccagggttttggggaaagaagggagggatgaatattggaacataagggatttttagggcagtgaaattactctgtatgttattgtaacggtggatatgtcattagacatttttcaaaacccacagaatgtgcaacacaaaacaacaaaccttaatataaaccatggtctttagttaataactgtaccaatgttggctatcaattgtaataaatataccacaataatgcaggacattaataatagggaaaaagaggcaggttttctgtaaacctaaagctgttttaaaaaataaatctgttaacgaaaaagaaaggcaggggacacagactggaaataaaccttctcagatgaaatctgtcatatggttttgactttcaaaacatgtaaatgtgactattaaataacttcaaaaaccaattactttaagaagaaaataaaagaaaaaagcaatccctaaaaatctaaaccaaattgagacaagtgaacttagctctacagtaagttggtggcaagaccaaatagagaagagctctgtctaa

SEQ ID NO: 829793 - DNA, 510 bp, Homo sapiens
tcctctgtttctctcttgcttcctctctcaccatggagctctgtacacgccaggtttccttcaccttctaccatggatggaagcctaaggccctcacccgatgcagatgcctgtactgtacttcttgkacagtctgcagaaccgtgagctaagcaaacctcgtttcattataaatttctcagcctcagatattcctttatagcaacacacaacacactaagacaccaaatcattatgctaaaaatcgataaatgtaagttatcacttaccctgcttttcttatgtgggctggacttcaaggtacctagtggttgatgagggaaagttctttatagaacaattacagttaataaatgcagaaagaatgataaattagaaaatgactatttttgaaatattttacaaaatgatgaatctaagtaaaaatcatcagtggtttctaaaaccattaggtgaaagatagataaggatccttaatactatatctattgatgaatcaggtcaaccaca

SEQ ID NO: 829794 - DNA, 560 bp, Homo sapiens
accaagacatgaactccaagaggagaagatgatgtgtccgtctgggctctgctgggtttagaaatcctgagactcatccacatgaatgcrccagggagctgtgcataaggatcaaagctcagggaggtggtctgccagggggtctggccctccctgcccctgcccagctcatccctatcccagctctggaggcctccttgccagcattgcccatgggctgctctggagagaaggagcaggagagctccggaatttgacactgtccatttctccccttggggaagctcttctcagggggaatttgggattcaattttcataagtaaataagctttggggttaatcacacctccatttgcatagggagggatggggagtgaatccttccttcctcctggctcatcctccccagaaaaaacgagagtggatccattaccagcagcccaccctccaccactcctgggggaaaaagaaatgacattttccttttacattggaaatacttaaaagtcccaagaatagatttataggaatattttaacctttcctttgatccttgaa

SEQ ID NO: 829795 - DNA, 604 bp, Homo sapiens
gaggccaattaggaagaggaggccactggaagagaggtgaccatgcctgaggcagtgaccatggagacagggaagagtgagaatgtggatgttaacaatgagatcaaatctgtaagacttagagattccgtgagccataagagggaatgtgtgggctgaaggcagcagtagggcgatggaaagcctggccaagggcttctagaacttgaagctcaccatttttggatgacattctgtgaacgaagtgttctctatgagatactaagagcaatatagggtaatcactggtgacagaaacatctgctcatgcaggttcatgtcaaagtccagggttgaaggagaacccctcatcccaggtaattcttgcccctctgccatcccagcacctgtgaactagaatctggagcccagctgtgtgcagctcccacaccaaaaagaggcacagactccagagcaggaatttcccactgatggggcagaggaggggtaggataacttcctgctgccaccttcctcctatttctgctggactagggtctgtcactttggaatgaatggttcwggtacaagagaccagaaaaaggagtgtgtgagagattgcctt

SEQ ID NO: 829796 - DNA, 624 bp, Homo sapiens
actgcgcctggctcctgggatatttatcccctggctccattccccattgtcaagttgccctctgcacttctgagctccacatgtgctgagacagagtaagctcccccactgtttgtggcatcagaggatcccagggaagaggcttcactgtcagcttgcaatggaagcctgcaaggaactatcccctgcaaccatggctgaaatcagaagacaagcatcttgtctcctttgttctccagatgtgaagcagaacatctgatctgtctgctacaatctactttgcagaagtgttaggaagactgatagaccctccaggcttgtacggttcttagcaaattaccatgtaaataacaaacactcacaaatgttctcagtttgtatgtagatgaattgttgaacttctgttagcagcttaatgaatcctacttcgtttaatgttcagacagcagtgctctgtaggggagaatatgctcattttacagatgaggaaactgaggctcaaaaactgactttgcagcttgttcagagtcaaaccactaataatcagaagaacagktttgtctattctgctttttctactgcaccacaactccctggtgggagaagaaggagccctctctctta

SEQ ID NO: 829797 - DNA, 573 bp, Homo sapiens
aaccattattaattatagttactctgctgtgctatcaaatactagttcttattcactctttccatggtttttttttttgtacccattatccatccgcacctctccatctcagcccccaactgtccttcccagcctctgctcttctactcactatggttatgaggtcaattgttttgatttttagatcccacaaataagtgagaacacatgatgtttgacttcctgtgcctggcttattcactcaatataaggacctccagttccatccatgtttttgcaaatgactgactctcattttttatggctgaatagtactccattgtgtatatgcaccacattttctttatccatttgtctgttgatggacacttaggttgcctcccaaagcttggctattgtgcacagtgctgcaacgaacatgggagagcagatctctctttgatatattgattttctttcattttgatatatacgtagcagcgagmctgctggatcataggatagctctatttctactttattgaggaacctccaagctgttctccatagtggctgtactaatttacatttcta

SEQ ID NO: 829798 - DNA, 362 bp, Homo sapiens
ttttattattttaaatttyttgtgggtacatgataggtatatatttatagggtacatgagttgttttgatacaggcgtgcaaagtgaaataagcacatcatggaaaatagggtgtccatcacctcaagcacttatgtttcaagttacaaacaatccaattatattgttattttaaaatataccattaagttattattgactatagtcaccccactgtgctatcaaatagtggttcttattcatccattttttttttgtacccattaaccattcccagctccatggttatcagatgctgggaagggtatcacattgatttatttgcacattttgcaccatctttgcatccctgggataaatct

SEQ ID NO: 829799 - DNA, 674 bp, Homo sapiens
ttgttgttgttgtttttaatgtgtctgtgtctgtttttggtatcagagtaatactggcctcaaagaatgtttgtaacatttcctcctcctctattttttggaacagtttgaataggatttgtattagtttttaaatatttgctagaattcagcagtgaagccattgcgtcctgtgcttttcttttcctcttttttgagacaggttttgctctgtcacccagtgtgcagtgcagtggtataatcatggtacactgtagcctcaacctaaagaaaagtaaaggtttttatttataggagaccttttattatgactttcatctcattattattattggtctatttgtattttggatttctttatggtttgatcttggtaggttgtatgtgtctagatttttgaatttattggcatatggttgctaatagtagtcactaatgatccttcaaagttccgtggtatcagtagcaatgagtctttcttcatctccgattttatttatttggtcttctctctttttttcttagtctggctaaaggtttggccatattgtttatcttttcacaaaaccaatgttttatttcactgatcttttatattattttsttcatttcaaattctcttatttctgcgatgatctttattacctcccttcttttactaattttggggtagg

SEQ ID NO: 829800 - DNA, 612 bp, Homo sapiens
tgttctttgagcttcttgtatttggtcatctagatgtctagtaagaccaggggaggtttcctcaattattcccttcagtaagttttccaaacttttagatttcagttctttctcaggaacaccaattattcttatgtttggttgtttaacataatcccaaatttattggaggctttattcatttttctttgtctttgtcagattgtgttaatttgaaagccatgtcttcgagctctgacattctttcttccacctgtttgattctattgttgaaacttcccaatgtattttgcatttctttaagtgtgtctttcatttccagaaattgtgattatcttttctttacggtttctatttctctggagacattttcccccatggtccttcaagattttatttatttttattttttagctccataggttatttgggaacaggtgatgtttcatctcacgaataagttctttagtggtgatttctgagattgtggtgcactcatcactcaaacactatacactatacccaatttgtagtcttttatccctcactcccctcccaccctttcccccaagtccccaaagtccaytgtatcattcttatgcctttgcatct

SEQ ID NO: 829801 - DNA, 600 bp, Homo sapiens
gcctttgctgcatcatacatatcaccagggaagtggggaaaaccagcagtgacaggtgtcacccagcttccatgcagccagaaaggccagtctcactcccatcatgacccaccaatagcactgagtttatgtccaggcagcagggctgagatcttcccccaggctaccagcctccccactgagaaagcaagcagggctatcaggtcttgcctctccctgcctgccttattacagaggtcagctagaagcttccttcaccctttggcccctccccaattctgctggctgcctttcccaaggatccctgtgagataaggccagggatggcttccctgggcttggactggagaccaggggtgcctacagggctctttctattgcttcttctacttttatattttgctcggttccttaaatctgctttagctctaggtaaggttaaatccttctctcccatgatctgattttcaggttccctagtggggatgtrggtttggaggcagacttttctccctctcacacattgaaaactcagtttttcagctgccttgcagagtttgcagcggcaagctgcttctttcaaagggtatgtgaattctt

SEQ ID NO: 829802 - DNA, 600 bp, Homo sapiens
gcctttgctgcatcatacatatcaccagggaagtggggaaaaccagcagtgacaggtgtcacccagcttccatgcagccagaaaggccagtctcactcccatcatgacccaccaatagcactgagtttatgtccaggcagcagggctgagatcttcccccaggctaccagcctccccactgagaaagcaagcagggctatcaggtcttgcctctccctgcctgccttattacagaggtcagctagaagcttccttcaccctttggcccctccccaattctgctggctgcctttcccaaggatccctgtgagataaggccagggatggcttccctgggcttggactggagaccaggggtgcctacagggctctttctattgcttcttctacttttatattttgctcggttccttaaatctgctttagctctaggtaaggttaaatccttctctcccatgatctgattttcaggttccctagtggggatgtgggtttggaggcagacttttctccctctcacacattgaaaactcagtttttcagctgmcttgcagagtttgcagcggcaagctgcttctttcaaagggtatgtgaattctt

SEQ ID NO: 829803 - DNA, 584 bp, Homo sapiens
atctgaacccgtttgccaggttgtgttcagttctcagcttctaaagccttcatctcaccgagcacaatagtgtatgcctgtaatcccagcactttgggaggctgaggtgagggaatcacttgagcccaggagttcaagaccagcctgggcaacacagcaaggcctcatctctactaaaaatgtaaaaataagccaggcatggtggtgcaaacctatagtcagtcccgcctactcaggaggctgaggtaggaggattgtttaagcccaggagttcaaggttgcaatgagctatgatcatgccactgcactccagcctgggcaacatggcaagatccagtctcaaaaaaaaaaaaaaaaaaaaaagattaaaaatgttaaaagtcctcatatcacctcaactcctcaactgagatgtcttaactactaaaagtacaagctcaatgtctcctcagagtctaaagccaattgtaggggctttggcaaagaagctcatccttactaatcttactaattgtccatatcctaatactggtgaatgaaatctatattgataatgtrtctaataacacagtatctataagaat

SEQ ID NO: 829804 - DNA, 470 bp, Homo sapiens
acattggatcacagaaaaaaaaaaaaaagccaygctctttaagatgactttgtgttggccgggtgcagtgactcatgcctgtaatcccagcactttgggaggccaaggcaggaggatcacctgaggtcgggagttcaagaccagcctggccaacatggagaaaccccgtctctattaaaaatacaaaattagccgggtgtggtggcgcatgcctgtaattccagctactcaggaggctgaggcaggagaatcccttaaacccaggaggcggaagttgagttgagccgagatcatgccattgcactccagcctgggcaacaagagcgaaactccatctcaaaaaaaaaaaaaaaaaatagaagactttgtgtccagaggatattactgaccaatgtcctgttgacccatctcttacagcatccagaatctgctgccttgtattaactttgtacatataaactatctcagag

SEQ ID NO: 829805 - DNA, 539 bp, Homo sapiens
tcccagagttcacctgattctgccagcaggagccctgcagtgctgaatttctgggcatgtgaatgatacattgttgtactgaaacattcattttccaagattcctttccaaattcaactccatggtctttcttttgtctgttttgctaaagggcaaaatactaacctgtttccaagctattcagcaatattttggcacaggtaatccagtaagagaattgtttgtatagaacagagctgatgttaataacagggtgccctaacctgcccctctttctaagctcttcacctatagatgacagcccagctattcacatttaactcttacctgatggctgtttcattgcagctcaaagacttacctgcatatgattaagtcaacacgcaacactgggtgcaacatctaagcccacatttaagcaaagtaaagagcttgagatcatctaaatgggagcrggagcaagggagaactcactatccactgtgtttttgttacctttggcaaattctcaagggtagggggtcaggactgccagtgcc

SEQ ID NO: 829806 - DNA, 657 bp, Homo sapiens
tctgtccacataggattggagggcctgaatgaataggacactcayattatataaaaagagttactcctttacttgaagacactcaatgcaatttaaacaatgacaccctgctaggtcgtgtgaaggtgccagtccaggcctggaaaggggagcagggttagggacagcaaggcaatgcatctgctagctgtcacaacagaggacaatgcaagcgagagctggcactggtcacactagtcaaggatgatgtctaacactttggggcaagatgttcaatctaaaattccagctaactctccaataggaactctccaaaaatgcagtcttggacttttagaaaaagtgaaagcagaaatcagagaggtaatagcaaacaccggggtttaggaaacaaaccaggacacaaggctaagctaagaagttaaaacgttcctaccaagatgcaggttggtcacgtcacttaaatcctgtcattcgtcacagtaatatccagatgctgtaaagttgccccaggaaagtacagcccctgccccggcagagggactgagcctggttggactcggcctttttagaatgaggtaatgccgatttatgttctatgctggctggacagattgtaaaaacctgtcattattgcctcttcccccagatagagac

SEQ ID NO: 829807 - DNA, 332 bp, Homo sapiens
taaacactacacacctagctcccaggatgggctctcaaaattgctgtgcatgcaagattggttcatgtggtaattattttatcacacaagatcttccttcaagcatttgtggctttgggaaaacaggaccccacatctgatacctggtgtttcttggtaggatttcataacccccatcaaaaaggcatgaaagtttctattctcaccttgccyttgtgagctaccaagcacactctcttaccatgcacagcaggtgcaattccccgtgcttggatctcagaaggagctctctggcccatttctaagatcttctttccaaactccagagctca

SEQ ID NO: 829808 - DNA, 332 bp, Homo sapiens
taaacactacacacctagctcccaggatgggctctcaaaattgctgtgcatgcaagattggttcatgtggtaattattttatcacacaagatcttccttcaagcatttgtggctttgggaaaacaggaccccacatctgatacctggtgtttcttggtaggatttcataacccccatcaaaaaggcatgaaagtttctattctcaccttgcctttgtgagctaccaagcacactctcttaccatgcacagcaggtgcaattcyccgtgcttggatctcagaaggagctctctggcccatttctaagatcttctttccaaactccagagctca

SEQ ID NO: 829809 - DNA, 558 bp, Homo sapiens
gcctgcacataaacacagaattgaagactcaaaggggagaagccagctctaacttcagctggctccaagtaactctgtaagtggcaaaccatagatgtacatgggaagtctccactatggtgtgcaagatctatgggagaaagggagtctgtgaagatcatctggtcccattactctgtggctctgaatcgggctggctgtgtcggtcctctccattgcactccgctattgaaccttgtccctcttctcctcccagtttttgccctataccctcctccagaaagtgcccctcaccgctcccctgctactcctctccctcgccatcactgtggcactgctgtctgggactctgtcctagcactaaaatccttcggctgctaaaccaaccatctctttagggaatgagtaattcaggtcttgttaggaacaatggagactgggacagwcttggcatggtaatgactgttgcctaatcattttctgacaagcaatcaaaattattttagttcagcatactccctcatgagacatattgttctgcacaatcgattccttcta

SEQ ID NO: 829810 - DNA, 618 bp, Homo sapiens
gcattgtactacctggtgatattctgttcttgacagtcactaaagacatgttgactattcttatragatagttctgttctgagtccctgcatcttggttgttctaactgaaaatggcattatctatgaaataggaaaaaaaatctatgaggtatacattagcatgaattctgacgctacagataaatgtaaaaaacatggatagtgtggaaaaatattacagtaaaggagttatgataaggtgcaccaaagtacctaggaataaaaatggaaagaaccaacaattaaataaattagtttcaaatttaaaacatgggtttgcagaagactaatatgaataatactgctataaatcatgatttaaaacatgaatatatatatatgtcactgaataaaatgaaatatatagatatgtttgtgtgtgtgtgtgtgtgtgtgtgtgtgtgtgtattccatttacctgaaagttcagtcacattttattggccacaaatggtcagaagcacagtttcatttgccatattgatggactgttcgttaccaacttagacacttctcagtaccaagccgaataccccaaggagtagcctgggtatcagcagactagataatgaattct

SEQ ID NO: 829811 - DNA, 618 bp, Homo sapiens
gcattgtactacctggtgatattctgttcttgacagtcactaaagacatgttgactattcttatgagatagttctgttctgagtccctgcatcttggttgttctaactgaaaatggcattatctatgaaataggaaaaaaaatctatgaggtatacattagcatgaattctgacgctacagataaatgtaaaaaacatggatagtgtggaaaaatattacagtaaaggagttatgataaggtgcaccaaagtacctaggaataaaaatggaaagaaccaacaattaaataaattagtttcaaatttaaaacatgggtttgcagaagactaatatgaataatactgctataaatcatgatttaaaacatgaatatatatatatgtcactgaataaaatgaaatatatagatatgtttgtgtgtgtgtgtgtgtgtgtgtgtgtgtgtgtattccatttacctgaaagttcagtcacattttattggccacaaatggtcagaagcacagtttcatttgccatattgatggactgttcgttaccaacttagacacttctcagtaccaagcygaataccccaaggagtagcctgggtatcagcagactagataatgaattct

SEQ ID NO: 829812 - DNA, 558 bp, Homo sapiens
cctcacccttgtgactgatactcagtaggtgggaaggattatcacaggggaatgattggctagacaatgggttgtcctaaataatatagtttttcttgggataagaagtgaacaaagtttcttttgtcctggaagttaaatgggacttttttttcaatctaagatataaattgcattcctacattaagttatgtgtatggcaacgaaggcacttgcttatatttttaaggtaatgatttcattctttgcatgacattctgtccattgaaattgagtaaaatgttttgttatataaaatttgttcctcacagcacgctgactgttaggtgttatagttgtgtaaactgagtccaagatattagcaggcttatgtttacatggcaaattcgaagcaggattgctttgagatataaaaaacgttctgaatatatgggtgtattatccactcatcctttgactatgagtgggaaagggaaaagygggagaaaaataggagaggggaaatgaagaaaggtacacagctgagtaaggaggactaaagaggtatttacacccact

SEQ ID NO: 829813 - DNA, 302 bp, Homo sapiens
gttattattgatattactgtttgattgcaaagctgaaaaggcctcagaaatcacaatcagatggctcatgtgagatcatgatgggrtcctctcttctgaaaacacatgctacttaagtctgtgagaggaattatggatgaattgtcacagattaaactttatgaggtagctctcgttggtgcgtgatggtttgcactttgctattcttccttttcgcatgagagaatctcatctctggaatgaaatttacctggatttatcacaagagcacatgcttcgagtttgatttggatgcgatcacc

SEQ ID NO: 829814 - DNA, 505 bp, Homo sapiens
agaaataagtgctttcatcaagctctgagttayagaatttattagagtaaagggaagaggataaccttcagatgtcttctgtggtgaaatgttgaagttaaaaattttaaatgtttgcagactaaagacatcctcggctgtgaggcctaaaagaataaacaaaatgtgacatgttttattttgttacttaacccttgtataaaaaagcacaacaaaaaatgtatataaatcatatttttatttctttctgaaaacacggacatggatttttggtgatgatcttctatgtagtggcatcatgccataggttaaagagtggttagtgtgtatgcaaatagctttattttggtatggcagtttcttaaagcagaaagttttaaaggtatacaacataaattctgtgaagatatgttcttctccttctgttgcaatatgctacgcattccagtattttgctgtagcccagcaatgaacaatgcaaagagatgaagaggggaaaaacaaa

SEQ ID NO: 829815 - DNA, 614 bp, Homo sapiens
cggatgtcatctggagactcaccttccagccactactccccattgcatatactgccagtccttactckgttcctagatctaagtgggaggaccagagagtgagtacagagtagctgaaaaacaaagtttaattctgacaaggctcttttaaaatgtatgctataacaccaaagcaatgtcagtgtatgatatagatatgtatatctatgttttaactttttaattaaatacccatgaggtcagggactcccatcatattactaaaagcctaatgcctgaaccaaaggttgcattcaacagatacttttcaaataaacacgtaaatgaaggaatacatattgccaaacatataaagcaaatataataaggaaatatttcaccactgaattttctctgaagaatgaattatattactagaaggccattgatgagttgagcacttgataaatgtctaaatataagtttgggagtgtaagccagaaaacatccaattattttccaggaaaattgggggattcctggagtggataagagacaatgtgaaaggaaggaggtgctcaataaagaagggaaaaaatgcccagtatggcagcagagtaacagaggggtttaga

SEQ ID NO: 829816 - DNA, 614 bp, Homo sapiens
cggatgtcatctggagactcaccttccagccactactccccattgcatatactgccagtccttactcggttcctagatctaagtgggaggaccagagagtgagtacagagtagctgaaaaacaaagtttaattctgacaaggctcttttaaaatgtatgctataacaccaaagcaatgtcagtgtatgatatagatatgtatatctatgttttaactttttaattaaatacccatgaggtcagggactcccatcatattactaaaagcctaatgcctgaaccaaaggttgcattcaacagatacttttcaaataaacacgtaaatgaaggaatacatattgccaaacatataaagcaaatataataaggaaatatttcaccactgaattttctctgaagaatgaattatattactagaaggccattgatgagttgagcacttgataaatgtctaaatataagtttgggagtgtaagccagaaaacatccaattattttccaggaaaattgggggattcctggagtggataagagrcaatgtgaaaggaaggaggtgctcaataaagaagggaaaaaatgcccagtatggcagcagagtaacagaggggtttaga

SEQ ID NO: 829817 - DNA, 562 bp, Homo sapiens
ataaagattcatgttattgattcctattgagctcaggtaatattggatgaaaagcaaaaaaattatttgaaatagaaatattgtgaataaagttattgtcaaytaaagtaaaaatattatctcacacttgtcatcttatctatagttgtacaatatcaaatgctactttttattaacaattgtacttcatataagtattccatttatttcacccttcttaactgtttcaatgccttctgcacttcatatcagtgaaaaacaggccggctggtgccaggaaatggatgtggtgctattgctactttaagagtaatgatgaagagcacttgtctgaattgttcccaagtggccaacactgttatttggcccaaagtacacacatttcttattttcctctaaatttactgctgaaataaaattcttagctaagaaaggcttgatctcattcaaatatgttttatgaaatttggttgacatttcagtgtgtctgacttaaatggaatattgaaaattttcatgaatccaaatagagtgttacacatgaacaatcttttactaaaag

SEQ ID NO: 829818 - DNA, 617 bp, Homo sapiens
attggaaaaagcaggaagattctaaccccatctccccatctctgctagttgtgtgaccttgarccatttacttaacatctgtaggcctcagttcaatagcttgaatagattggcttgatattctccattgtttcttacaatgataacattgaatgatacactgtgttggtattatttatggctcagttatgcactatgatgctacagttctgaaattgggaatttcatatagagtgtatgtttcttgattttgcaagtttaaataatctatgaacttgtacagttagagatcactttttctacctgacacccctcagctccctcattttatagatggagaaacaatgcccatttagttaagtgacttaatggccacatagatattaaagtggggttgtgtctagagcttaagtgttctggttctaagtctatgcttttaccagtactctgcattatctcccctttgttgttaaactctccctggctcttctctgtcacattatatatttctggcctgcctcccataatcatttgtcatatgtttacatggaatgctaattttaatattggcttaaaagatatttgagggagaaaataatgtcatagactgtatctca

SEQ ID NO: 829819 - DNA, 544 bp, Homo sapiens
ggcagatcacttgagcccaagagttccagaccagcctgggcaacatggtgaagccccattactaccaaaaaatactaaaattagctgggtgtggtggcatgcacctgtagtcccagctacttgggatgctgaggtgagagaatcacctgagcctgggaaagcaagggtgcagtgagccatgatcctgacactgtactccaacctaagtgacagagtgaggccctatgaaacaaacaaaaaacaaaagcaaacaaacaaacaaaaaacaagaaagaaagaatatgcacaatcggagcagaaaaaatgaaaaaaaataaaaagaatgaagattgcctacaaggtaaagaaaattacttaaaaataccaaatctaagaattattggtgttcaagaggaatttgagcaagagcaamgggtagaaagattattcaaagaaataataacagaaaacttttcaaaacttgagaaaaaaaaaaaagaaatactgagataacagaaggtcagagaacaccaaataaactgaataggaaggaatacttccaaac

SEQ ID NO: 829820 - DNA, 612 bp, Homo sapiens
ataaagagacaattccactgcatacatsaaggcagctagttccagatacagaccacgcccctgctggaaagagttctgtattaattaggcccagaggaagcttaccattgccacctgatattttaccctatgcttctccccaattattccaaaacaaaaggtcaaaagggaattcaatcataagccagaagtccagaggttttctcttccaatgcggacatgaaggtgttttcacacgtggcagagtctagcaatatcatctatgtgattggcatgggttttcatttgtcaacttacttttgtactgggctatttattggttgcacctgcacacttccaccctcttgccaggccctgcaagagtctttcagaagcccatcagagtcagaattgatgcactttccagacaccatctgccttcatttttttttttttaatttttaaggctggatatgtgacttggcagctccaacatttatattttcactatcccacggtgagccctgatatatagtaatttgtcattttgttgagctacaaatctgaattattcttatcactccttacaagactgatgtgtgaagccagttatttattcagcagtgaaacaaa

SEQ ID NO: 829821 - DNA, 628 bp, Homo sapiens
gatatacaaccaagaaacatggtgcataatgaacatatccctcatcttcaaaagcttccttgcaaccctttgttatctccctcccctgtccaatccttatatcccttgttcctatcctcagaaaatcattgatttgctgtcactgtagatgagtttgcattttccagagttttacataaatggaaccatgcagtatggactctgttttctctggcttattttactcacataattgtttttatgaatattatagttatttatctatgttgtgtgcatcaatagttatttctttgttattgctgagtagtattacaatgcatagacacaatttgcttatctgtagatggatgtttgggttatcgccagttgtggcgattaaaattaaagctgctatgaacattcgtgtacaaagtctttgtttagacataggcttttatttctcttgggtgaaaacctaagagtatggttggatcatatggtaagtgtatatttaactttttaagtracagtcagactgtttttcgaagtggttgtaccattctgcatttccaccagcaatgtatgagagtccatttcctccacattcttggcaacatttgatttgatcagtctttttcattttaggcat

SEQ ID NO: 829822 - DNA, 584 bp, Homo sapiens
aggtatctcttcaacttatgtgatggatggcagtgttgctgcttcacctaaatttaaatcccccgtgataacatcttgaaccctttgtggaaagaaggcattttaratgtgctctcttcattaatttttgtacaataattttctatccccactgcgatgcctgggcttcaagtcacctgcatgaccatgttgctttcagcaagttcagaacctctttatggctcaaaggctcccaactgccacctggggtaacaacacctacctcatgaggttatgagggctaaatgaattaatatttgtaaaatggtttgaactgtgcctggcacgcagcaagtttcatatgtttgttgaataaaaataagtagataaaaagtcttacaaaggaaaacacagatttatatgcagaaatcctctttatgttttcttgtgttacacaaaaattcctcatcttggtcttcaatttgttcctgagggaagagatctggaaaagcaaggatagccttttggctcagcccacttttggggaaatagaattttctgcctgaacccatctgagacaggtgcatttactatagggagcatat

SEQ ID NO: 829823 - DNA, 584 bp, Homo sapiens
gtgtccggagtttgttccttctgatgttcagacgtgttcggagtttcttccttctggtgggttcgtggtctcgctggcttcaggagtgaagctgcagacctttgcagtaagtgttacagctcttaaggtggctcctctggagttgttcattcctgccgtggggagttgttcattccgcccagtgggttcctggtctcgctggcctcaggagtgaagctgcagaccttcgcggtgagtgttacagctcatagaggcagtgcggacccaaagagtgagcagcagcaagatttattgcaaagagtgaaagaacaaagcttccacagtgtggaaaggacccgagcgggttgccactgccggctggggcagcttgcttttattcccttatctggccccagccacatcctgctgattggtccattttatagagagctgattggtctgttttacagagagctgattggtctgttttgacaggtgaaggatcttgcctcaatgttgrtagctgctgaccgatcagggtggtggttgctaaaggttgggatggctgtggcaatttttaaaaatgagacaaccatgaagtttga

SEQ ID NO: 829824 - DNA, 629 bp, Homo sapiens
ggaagcacatgtgaacctgagcagagacagctgattctggctctactgtgataaaagataaggaactgaaccatcaccaagaattcagccatcaattcctctgcaatggcaaatttcccacatagatgtggaatgtcatcgtaaatggcataaatttgtattgcagaataagagtgaagggctggaggagaccttgaagttcacataatcttatcatcagataaagaatctgaggccaaagtgacttactaccttacaccctctaaccagtaacagccagggcaggtctgacaaccaaggcccctttacatgaaattatcttgactttaaatgtgagtgtcttagtttgtgaggctataacagaatatcatagactgggtagtttaaataatagatatttatttctcacagttctggaggctaggaaagtccaaaattgaggcaccatcagatccggtgtctgacgagggatgctgtctggctcacagatcactgtcctctggttatatcttcacatggcaaacagaaagaagaaataagccctcrgtgtctcttcttataagggcattaatcccatcgagaagtctccaacctcataatctaatcacacaccaaaggcctcatctcct

SEQ ID NO: 829825 - DNA, 410 bp, Homo sapiens
attatctctttgtggccatcctctacctcacccatgtattgtctggtgagtaggtcagttattatactaacattggatactaatttactgatttttttttccattcactatccctcagacacaaaagctcaccagctatccagaggtatcagcattcaatactcaaggatgccatcatcaaaagaaactattgatctctgttaacatccagtgacatgaactcatgtaggatgcaccaccccattttctcttgggtgatttcacattccacatcctattctgaaaacttcaaactcttgtaacgtttatgagataatggaatatgggtcaaataagtgcctccaagttgctcacgtcagcaatcccataamtaaatgggcagtcagatgaaattatcagaagcacagatg

SEQ ID NO: 829826 - DNA, 601 bp, Homo sapiens
aggggaaacaacctactcaagcctcagtaatggcagacacccatcyccccaccaaggtcgagcatcccacatcgacttcagactgatgtgctggcagcgagaatttcaagcctgtggatcttagcttgctgggctccatgggggtgggatccactgagcaagacctcttggctccctgacttcagtcccctttccagggagtgaagggttctgtcttgctggcattccaggtgccactggggtccaaaaaaactcctgcactagcttagtgtctgcccaaatggccacccagttttgtgcttgaaacccagggcccatgtggtgtaggcacccaacggaatcgtctggtctgtgggttgcaaagaccatgggaaaagcatagtatctgggccagatagccatgtcccttatggcagggtccctcaaggcttcccttgactaggggagggagttccctgatcccttgtgcttcccaggtgaggcaatgccccaccatgcttctgcttgccctccatgggctgaacccactgtctaaccagtcccagtgagatgaaccaggtactttagttggaaatgcagaaatcacccaccttctgcattg

SEQ ID NO: 829827 - DNA, 640 bp, Homo sapiens
cattaagttttaacttaatctcgaaaagaackaagaaagctacatgatctcacaaggagaaatacatggaaaattttccagctcattgcccctgactttttatacaattatgcgtttgtaaatcctaattgtacctctgcgatctgtatcagcacactctattggaagtggctctcattatgatctcagacctagcacagagttcctgaagtacctacatttctagaagacatggaaactttctgagagtcagaaagttctgtgcaatttcagattggttcattagcataattgtttcaacattaaaaagaaagattcaggcaatttaagatgtttatgtagaaaaatatgtctataactgtctcctcgacaacgtaacatggaagaaccactgattcactgtccagaatcacctcatcaatagcaaaaagtgcttccacttctttaactgttgctcacaagtattggcatcctgcctataatttctttcttgaagaaattctgttccattaattctgaaattcaggcacttccatatactcacttaatcttacacatccatgctaataatgattatttacttaaaaatgagttgatggctctaaagaatgacagagggatccagccataccgtttgtag

SEQ ID NO: 829828 - DNA, 502 bp, Homo sapiens
ttatcatgaaaggatgttgaattttatcaaattcttttactgtatttgttaaaataatcatatttttgtccttcattttgttgatgtgatgtattactyttattggtttgtgtgttttaaaccatcctggcatccctgggataaaccccacttgataatgtttgactcctgtatcagtgagtttcatactttctgtgttttcattatggcaaatatcatcctttcatttccagatataatacctctgtaagcatttcatgcagggccagtctagtgatgatgaattctctcagtctttgtttatgtggaaaagatttcattgcagtttttaaggataactttcctgggtaaaagttttcttggctggcagcattttttttgtcagcaatttgaatataccatcctattctctcctgacctgtaagttttctattgagaaaccagctgttagtctgatgggaatctccatatatgtgactggactcttttctcttgttgtttt

SEQ ID NO: 829829 - DNA, 535 bp, Homo sapiens
ttagattcatcataattacccaaagtccatagtctacattaaggttcactcttggtgatgtacattctatgggtttggacaaatgtattatgacatgatccgtcactacagtattatacagactatttccactgccctaaaaattttctgtgcttcacccacttatccctcccctgacctcccatctcctgggaaccaatgatctttttactgtctccattgttttcacttttccagaacatcaggttgctggaatcagtaggtagacttctcagattggcttctttcacttagtaatgctcatttgactatcctccatgtcttttcatggcttgagagctcttctttttcagtgctgaataatattccattgtctgggtgtaccacagtttatttttttcagctactgaaggacatcttggttkcttccaaagtttggcaattatgaataaagctgctataaacatttgtgtgcaggtttttgtgtagacataagttttcagctcttttggataaataccaaagagcctgtttg

SEQ ID NO: 829830 - DNA, 557 bp, Homo sapiens
gtatattcgtaaaaggtaaaaccaaaattttactcctatggtaaaatttttatatacctagacattgtagtcactggaaaatgtgttattttccctccaacttagaaaggcaaaatagctgtcataatcaaaaatacaggtgcttcttcaactatggggagagggatcatcttggaataaggagagttttaggatcctgccttattaagagcctggacatatttatagaggaagtgttccaggtaggaaatgtggttttaaaatatgtgcacattcaaaataatgacttacaatatacttgctttgctaggaaactgaataaaattacaaaatttattgaggagaataaagaaaaatttacacagctagatttggaagatgttcaagttagagaaaagttaaaacatgccacgagtaaagccaaaaaactggasaaacaacttcaaaaagataaagaaaaggtaggtgttagaaaaaaattcttaaaatttcacgtctgaatatcatacctagttttcatggatgtgtttgccccttattgcctaagagaatgaatt

SEQ ID NO: 829831 - DNA, 568 bp, Homo sapiens
tctcagactcctgacctcaggtgatccacccacctcagcttctgaaagtgctgggattacaggcgtgagccaccgccccaggcaaatttttataagcttatttaccatctgtattaggtaactttgataaagtaactgtataaatcttttgagaatttttacttggtttatttttcttactgttgagtttgagaactttatatatttgggataaaaaccttttatcagatatgcatcttgaaatgtttttcttgtcttgtctttttttttttttttttgagagggagtctcactctgttgcccaggctggagtagtgcaatcccagcttactgcaacttccgcctcccaggttcaagtgattctcctgcctcagcctcccaagtagctgggattacaggtgcccaccaccatgcctggctaagtttttgtatttttagtagagatggggtttcaccatgttggccaggctgrttttgaactcctgacctcaagtgatctgcctgccttggcctcccgaagtactaggattacaggtgtgagccaccgcccagcctgtcttttcattct

SEQ ID NO: 829832 - DNA, 493 bp, Homo sapiens
cccccaaacaattataacagtaacatcaaagatcaccgtaacaggtaataataatgaaaagttttgaaatattatgagaattaccaatatgtgacacagaggcataaagtaaccatatgttgttggaaaaaatggcactgataggattgcttgacacagagttgccgcaaatcttcactttttaaaaaatgcagtatctgcaaagcgcaataatgcaaagctcaataaaacaagatatgcctgtactctatactaatgatagtgcctatttcattgagctattggtaataatcaaaataattcatgtataagttcttgaaaatagtactcggaatataattagcaataagtaaaggtacgattaaaaacatcaaaartaataaaaggaacatattagtccttcattgggagaagccaatggctccatacaatgaaatttatcagggaatgttctatatttggggaaaaggagtctttctgagcctgattttta

SEQ ID NO: 829833 - DNA, 705 bp, Homo sapiens
atgagccaccatgcccggcatattattttattttaaattaacattataatgtaagcattttccacgttataacgaaccwgcctttgcaaaatcgtacagtaaaagaaacttgacatagtggactccatcttgcttctgaccttcacactattcttggtcattcctgggtgtggtccaagctaactttaagaggaatttattttatagtttaaccttaaaccaagggttatgatagcccttcccaaaactaaaccatttttgtaaaactaatgaaaggccacaaggataaaattatccaaggggcttgaactctgctaaaatgtagatgtagtttgtgtaatcccttactgctcaggagtcctgttgccagaggtcacaagatttgtgacttccccaattgttcctataaataacatcactattgtagaacctaaaattggttttttgcaagacgtttttcagactgccttcacccagatttatgactcatgactcaatcgatcctgtggccccatccagaggcagactcagtgcatgaggaccatttttccacacccctgtgatatcagcccctaccaatcagtagcacccattccctagccccctgctcacaaaatcacccataaacacccctaacttctgagccttcagggagactgatttgtgtggtaactccagttttcctgtatgggatggcctcatttc

SEQ ID NO: 829834 - DNA, 655 bp, Homo sapiens
aatactagaaaaggtattcgtagcttatcttacacttaaatttaacttgacgtcctatattttgatttgctaaatctggtacctctagccacttgcaaatccgctgtcatcagcattagtgyggtcaaggtcccaggcttcctctagttcagaagctgagtagcatctagtcattcagtccagagataggacataatacctgtttagcttcaacttcgtgcaaaatactctgttggctctctggagggatgaaactgtaacttgtttggcccctcctgtcctcagtttcttcctatgggaaatggagatgaagtttaatttggaccaggctcaaaccctgatgctgccacttagagttatggcctttgtgcatattcctcttcctctctgatcctcctgattccttcactgggtagcaagtgagagaaataaattgaaagagtatgtgaagctatatgcaaatagttatgtggcagtgaatgtttctttttcaacaattccaatttcactggattcagattgcttctccagacgctgtgatatttttggtaacatggtttatttgcctaaggagcagatgccagggttggatcccagccctgctatttatcagcagtgtgatcttgggaagtaatctaatctctttgtttcccca

SEQ ID NO: 829835 - DNA, 619 bp, Homo sapiens
ctggtaactaggcagagaatgttctcatgtgtctaacatggcatgacactcctctccatgarcggtagaataaatgcattcagatgaagccctgccatcattactttgtcagaaatagattctgtcaataggtcttactggtataagtgtaagagatgagaatacattttaaaagtgttgcagtgatagtatgtggtaattctaaagttttcaaaacctaaagagcagatgcgcagaataacaacttgttggtttctttgattctttgtttgtttgttttgagacagagtcttctgtcaaccaggctgaagtccagtggcccaatctcagctcactgcaacttctgcctccttagttcaagctattctcctgcctcatcctccctagtagctgggactaaaagcatgcaccaccacacctggctaatttttttgcattttttagtagggatggggatttgccatgttgtccaggctagtctggaaatcctgacctcaggtgatccacccaccttggcctcccaaagtggtgggattacaggtgtgagccacctcacccaacaagaataacaactttctaaaggagtcgttttctctctctctctctctctctctctctc

SEQ ID NO: 829836 - DNA, 640 bp, Homo sapiens
acaaaaaacaacaaccataaaataagtactatagaaagaaaagctcagaggaggtaaaaagatactcttccaaaaggaatactgtgtactgtaaactgygtactgatagaaggaagaattagaaattgatttttttgtaagtggcatacatactaagctagtgtaaataaaagcctaaatatgtagttgcttcacagaaggttagaagtaaattaacctcatgaatttcttgagagaacttgtaaggactagcttttgattttggagaaagattttaattaccaaataaaaagtacctttgtttggtaatctcaatcattataatagtgcttagataattacctaggaacaaattaaatattaaatttacttaaaaaaaaagtatatgattggggaatccacaactgaccatatctagattctctgaacaacatatgcactgaaaagaatgaaaaacactgaaccaaatatatgtctttttaagtttataattaaattggaaaaaaatagtaaggaatgttcagaagcaaaaaaataaaatgaaagcaagaatcctcagaggtagcacgaaaattggcttgcccttagatgggacctatcaaagcctatgcccccatgaaaaggattcaggagttggttt

SEQ ID NO: 829837 - DNA, 636 bp, Homo sapiens
atatgaaaagctccaatcacattaggaaatttagtatggaattatatcactgactgtaaaacataacaacatattaatcattaagaagagactgattcattagtcaataaaaggaggttattgacctactatgaaaaaaattatatatgtacttaaatcacatgacattttcagttcactgatcaaactggacatatttcaagctacatgtaattaagagtgcccagtaataaaaggactaaaggaacttacctaaatagaaatggactcttctacatacggtagctgtaaaactgaggtatgttaagtaaggatgaatgtatgttatattttgtgatctttcatattgaacatacatcataataaatatatcaatttatctggattgtcttctctttctcaagtatatgccccaacttgcaaacaagattgcaaattctttaaataccatgctaaagaccttgcctccaaacttgtcctctccaaatgtccacacacaaattcttcgcacagagytcaacctgatcagttgagacataatcattaagtaccaataaaaacttgctgggtcaaactgcatactggatccgtgcatttcccagcaactccaaatctgtgcagtgtctttaaaaatta

SEQ ID NO: 829838 - DNA, 580 bp, Homo sapiens
tatagaaggatgtagcctttgaatgacattaaaaattcactagaagtgtaaagaataatagtcataatatcacgtaagtcacaaatgtctcaaaacatagattaaaatgttctgaaatattggaatataattaaagtccatatttgagacagaagagaaaataaataatagcttatatattatattaaatttattatgtgaaaaagacttttgggaagttgttccataataaatgaagatataaataactataattaaaatttacaaaaaaaagcattaaaataaactgtgaaaaacttaaaagaatgtaaaatttaaagttattaaatttttcatctcaaaaatcataaaaaagtcatttcatcaatgtcctttgaaaattaaaataaaacaaacttagtaatgtaacaaataaaaagagtaattaagaaaaaagtaactttcacaaatsaaagttaaaaaaaagaaaaaataatggattccatactttgtgtttaagatcagaacatagtctcaaatggttcagaaataaaaaatgtcagactcccaaatatattgtggtgattataaataataaaaa

SEQ ID NO: 829839 - DNA, 477 bp, Homo sapiens
atcaagtctgattattttactgagatatctcatggttggctattctgattcaaaatttccaggtccacaggagatccttccaatatgtatagttagttcttcaatttcagaaatattggtttggattatatttaagtattagtgcagttctttttccattttctgaaacttcaattatatgtatgttgagtctcttttgccgaccttctatagctatcttaatttctcttggatcccttcacctctttcttattttgtcttctttgttttggctatctttactcctctattcagtgttccttatattttgaatcagtattttttcttgtaatctaaatttttgrgatgattttccttttttccctttagtttggttaactcttatttcacaactgtttttttgtatttcccgatttcatggaacatcttgagatgtctttcatatcttcaaatgtttgttcaaggcgagttacattt

SEQ ID NO: 829840 - DNA, 541 bp, Homo sapiens
ggaaatctcagttcaggcagattcatctgaagaggacacaatgaggaaagaagtggtacagagaaatacgttgaaacagcatatgttttgaacgtttatgtttcccgactgaccactccagtttggaggaagaggaagcaaaggagagacactgtgttaacattttacctaggatttctcatttaatcctatttaatctggccaagtctatttcctagatcacatcctgggtcctcagcaaacgtttggaagcaatcttgtcatttgtcataaactccagccccagaccagcatcatcacagaagtggcttctggcagcctgggggcctcctcccacccactccactaacaacacacaggccactccccctgcagtcattactaccggagaaatgttctatgggtctcacaacacttactctaaaaggtaagagctaattggcaaccacatcgaggcactgggaaaagatgccctcacccatccctggttccctgggtcatcacctgtgatayaggggctccagacccaaaggcatcactg

SEQ ID NO: 829841 - DNA, 602 bp, Homo sapiens
ggtccctgataaacgctcccttctcccagagagctgcatctattatccaaggacactaatgaggctctccatgggattattttaaaccaatctaagtgtgtatattgatcacaaaaaaaaaaaaaaaccacagacttagtgataatgaattagactaaagaaaaatacagagaagccattcaacactaaatctccaacagctcaggtaggggaaaaaaagtaataaattagaaagcacaaaagaatgtacagtataggaaaaaaaaaacgcctttggagcaaaagtgattttgatgctatggctaatgagcagagcagggtgcaggcgaggatgtgttccagtggctctgccttgccccagtatcctggtgccgggcataattaccagctgatgtgttgggagcctgcggaggagccccctatttcactgtaagatcctactgctaattctcaggacagtatcctgatcatgccatctcctcttccaygcactacagagctcaaccttttctgtccttcctttaaattcttaagggatacctgagacctttcatgttgatcttatctaatttgggggcttatgattagaaaaaggcctgaaa

SEQ ID NO: 829842 - DNA, 516 bp, Homo sapiens
gcacacatatcttcctacagacaaggaagtttgttctgtagtgtttgtgaacagactgtcccactgtgtgctgtgtgtgagcatgtrtgtaaatgtgtgtgtgctcatgtatgtgtgtgcatgcatgtgtaaaagtatatgtgtgtgcatgtgcatgtgtgtgtgaatgagagagacagagtgatctagaaacactggaagaggtattgaaatgcttgagagtataagatagtgtattataccacaggcacaaaagagtaaacaaatacagttgtagaaacaagggcattaaatttagatcaaaatcaacatgtctacagagtaaatcccctagtgaactcgcttgtaagcttgcatcttagatgtgatgacttctttagaaaatactctgaaaatgtgtaagaaagtctcagcagacaagatggttatattgcagggctcacttgcatgggcaatgcaaagaaagatagtactgggttcctgcaacatgctgttttaagttaacagagaataccc

SEQ ID NO: 829843 - DNA, 412 bp, Homo sapiens
aaattacttccattttctgaatttctattttctcactgctgaatagagatattgtgagcaaaagagacagtaatacactgagtgcctagcatggtggtgggaacattgtgagccctatctaaaaggccgctgttatcacaagttagtatgtcccaacctgcacagccatgcagtgagacttgctgtctgaaacccagtgcttccatcatggcaggctttcttttagaaaagtttattgtttataggtttgatggggggaaaatcacactaaagattggtaatattgcataaaacacctaatgatttggacaatgacttctcatccaggattcaaagaaaaagaaaacaaaatwattttatcacatcctgatcttaactttgagttgaattaagttgaattgaccaggagcaa

SEQ ID NO: 829844 - DNA, 341 bp, Homo sapiens
gtaaagtgctccctgccccctttgctacagccatgggactgggtgggcagcgctaaccctgagccaggctgtaacttgtaggaggaggcgacgggcccatttctgctcagctccctggtggttgcccaggtggtaatggggaactgcggaccggatgcaggcttcctggactggatacaggaagcaggacacccagcttcttataagaaacatactctctccattcaagggataatttctggcrtggcattagcgtaggggaattgctgtcacctgacaatggccttttctaaagccacaggctcctgaatagttacaaggggctgacgacttcaggaggt

SEQ ID NO: 829845 - DNA, 264 bp, Homo sapiens
cactccagcctaggcaacagaatgagactgtctcaaaaaacaaaaaaaaaaaaggtgataaaacataacataaaaattaccatcttaatcgtttttaagtatacggttcagtgatattaaggacattcatgtcattgcacaaccatcaccaccatccatctccagaactcttttcatcttgtgaaactgaaagtctgtacccattaaacaactcccacttccccctcccacctagtccctgrcaaccacaattctactttctgt

SEQ ID NO: 829846 - DNA, 615 bp, Homo sapiens
ccactgcccttaaaacaaaaatctttgtctccttcttcagctgttttacctttacttgctttgtggatatctttctccatagagcaggcagagcagcagtgctgaggacagcggaatccttttgattcaaagatggcagtggggaatttgcggacacaggcttcatgataaaatttcccacaagcaccaacagaacaacgcttcacatctttaccagacactttacacgaaaaacatgggtgctgccctggaaaattggtgaggaatacaaattaaataaaattgactaaagcatattcaagtagaagcagctacagacatcaaacagctactcctaaaacagactctattactatacttaagaatttaatgcacaaaaaaaatttaaaataaatgctaaattaaaattatgttttaaattttgctagaataattgattatcaatttggagacagaatactaaaaacaatttagatctccaaaactgattccatagaaaagccagaacagaatttgtttgacatctggtagcagacagcagcaaagttttccccacatagaataaataaattaccaaaggaaagtcwgattccattagataatcactgattattt

SEQ ID NO: 829847 - DNA, 493 bp, Homo sapiens
acatataattttttatggccagtcctttcatgctaataatggattcgtagcaagcacattttatatgtgtgtaaaaacattgcagatttgtcctgatttgcatctgctcttcaggwttgaaatgtaattgacagtgaaggcaacatcacattaatctttgttggtttactgattaattcaacagccagttattcagtgcttatgttttagatacggacctgttctaagagcttactaatgagggaacaagaagaagacagatataactattaatggcatggtaaatgccttcatagtttgagcaaatagattgtggtgcctgtttctgttagataaaatttcatggccgagggcagtggctcatgcctgtaaccccagcactttgggaggctgaggcaggcagatcccttgaggtcaggagttcaagaccagcctggcctacatggcaaaaccccatttctactaaaaatacaaaaaaaaaaaaattagctgg

SEQ ID NO: 829848 - DNA, 644 bp, Homo sapiens
gggggacagaagcttatatgccatcttgaggctacagaaagaatggaggctctggcatggccaaaaacatgttattggggtaaatcaggttacagtgacaagacaggctatgggaggcagagaagaggaggcctggatagcaaaagtggtgttgttatgtagatgaaaccttacaggtagcagccctcaaagagaatagatggtaaatgtttcttttagacctttcaaggcatcagattctcagttaactttggtcctaaatcagacaagggaaggccctcagagaaggcctgactgcatgaatgcagattttctctacagttgcaaatcccctccacaaaagacagctttacggggttacttcagttttgctggctctctgaacacccatctcaaaatatgtcaagaaagtatatcttagggtaaaatgttttgatttccttcaaggtgaaatgagtccactaatatctaattcagagaaattttataattttcattagaaattttgtcagaatgaaagctcagtcagtggtacaacagatatttgtggggtgggtcrgtagtgtgaatggcagaagtcaggtaggtattggtggtggcagtgaaaagtatagaattaagagaatattgcataacagattgtg

SEQ ID NO: 829849 - DNA, 624 bp, Homo sapiens
tctacacttatgatttggctcatgtagtgtttattaggtttctccactgtaatgttactcatttttcttctcttttaatactgtastctttagaaggaagtcactataagtacccctcacttaaggaaatgagaattgtccctgacctcattgacaaaaaattaattgcacaaatttttggtatttttctgcacagaacatgtgtttcatagcaaaccccatttttttacttatgcatttaatcatttatttctgtcagtataaatgatatggtttggctctgtatccccacccacatctcatctcatcgctcccataattcccacatgtggtgggaggaaccaggtggaagataactgaattatggggacaggtctttcccatgttgttctcatgatagtgaataagtttcatgagatctgatggttttaaaaatgggagtttccctgcacgagctctctatttttgcctgctaccatccaagtaagacatgacttgctcctctttgccttctgccatgattttgaggcctccccagccacgtggaactgtaagtccattaaacctctttttcttcccagtctcagttatgtcttcatcagcagcatgaaaatggactaatac

SEQ ID NO: 829850 - DNA, 572 bp, Homo sapiens
aatgtagtgactgtctttggcttactgtctgcrctgtaaatcttttgtttactttcaacctatctatgtcttttaatataaaatgtgtcacttgtagacagcatatatttgagtcattttatatctattctgtcagtctctgtctttccattagaatgtgtttaaactattttcatgtcatataactaataagctataatttacacctgccattttttatattcgtttcctatatgtcttatgtccttttggtttctctgtttcagagttcttgattactttcctattaaacatatactttttggggatatatcattttgattaccttcttgtttatttcactatattttaaaaaatattttctttttggcttccctgaagtctcagttagcttttaaacaattcaatttagttcagtttaacacaaatttaatttcaatagtatacataattttcttgcattgtagctttgcccctcatttttgtgctattattgtcaaacaaattgcatcttttgattaacacatttttatatttgttgctgcatgtagctgcgttttaaattacgtagt

SEQ ID NO: 829851 - DNA, 565 bp, Homo sapiens
ctctcacaatgactgtcttcctcaagtaggttaccagtcaaatgctcaaaataccaatgctactagwtttcatatcaattatttatgttaaagacaaaatcctgaagtatttaacaaattgttgcagtctgtgacgcccataacaattgagcgtagcctgttatagtggacttgtagagagcaatggacttgaagtcaggagtttgaacacttgtttactgaatatgcaactctaagtcagtttatgaacttctttggacctgtaaaacacctgctttcccggctgatggggtctctggaaaatctataaaaaacacagctagaaaaatatttagtgcacacagcgagctagttctcttgtgacctacacatgaaagatgtcattgttattatttttctctttgcaattacagctccatcctttactaggaattctttgtgctttacgtctaaggacatgatagtaattcgttcctcaaatattctgagtacctactggtactaggcactgtggatactgtaaaatcagagcaacagggtcaaaacttaactcagaattaactat

SEQ ID NO: 829852 - DNA, 565 bp, Homo sapiens
ctctcacaatgactgtcttcctcaagtaggttaccagtcaaatgctcaaaataccaatgctactagatttcatatcaattatttatgttaaagacaaaatcctgaagtatttaacaaattgttgcagtctgtgacgcccataacaattgagcgtagcctgttatagtggacttgtagagagcaatggacttgaagtcaggagtttgaacacttgtttactgaatatgcaactctaagtcagtttatgaacttctttggacctgtaaaacacctgctttcccggctgatggggtctctggaaaatctataaaaaacacagctagaaaaatatttagtgcacacagcgagctagttctcttgtgacctacacatgaaagatgtcattgttattatttttctctttgcaattacagctccatcctttactaggaattctttgtgctttacgtstaaggacatgatagtaattcgttcctcaaatattctgagtacctactggtactaggcactgtggatactgtaaaatcagagcaacagggtcaaaacttaactcagaattaactat

SEQ ID NO: 829853 - DNA, 573 bp, Homo sapiens
tctcattcttttttatggctgcatagtattctgtggtgtatgtgtaccacatattctttatccagtctgtcatttatgggcatttaggttgattccaggtctttgctactgtgagtagtgctgtagtgagcattcttgtgcatgtatctttatggtagaatgatttatgttcctctgggtatatacctagtaatgggattgctgagtcaaattgtagttctcctttttgccctttgaggagtcgccatactgccttccacaatggttgaattaatttacactctcaccaacagtgtataagtgttccctttttcacaaccttgccagcatctgttattttttgacttcttaataatagacattctgactggtgtgagatggcatctcatggtggttttcatttgcatttctctaatgataagtgatagtaagctttattcatatgcttgatggccacatgtatgtctcttttgaaaagtgyctgttcacatcccctgctcactttttaatggggttgtttttctcttgtaaatttaagttccttatagatgttggatgtaagacctctgccag

SEQ ID NO: 829854 - DNA, 579 bp, Homo sapiens
ccaggtgatggtattagaaggtgagatctttggaaagtgattagatcgtgagggtgaagccctcatgatcgggattactgcctatgcaatctcaccatattataagagctggctagtttcttccaccaaatgaggacagagcaagaaggaaggcattgtctatgaaccagaaagcagagctcaccagacattgaacctgctggtgccttgatcttgaccttctcaacctctagaattgtgtgaaacaaatttctgttgtttataaactgcccagtttacggccttttgctatagcagcagaatcagactaagacacttggtaagcaactacagagcacagaatgtgatatggtttgtctgtgtccccaccaccagacctcatcttgtagttcccataatccccatgtgtcatgagagggacccaatggtaggtaattgaatcatggcggccastgcacccatgctgttctcctgagactgagtgagttctcatagatctgatggttttttaaggggatcttctctcctttgcttggcacttccccttcctcccgccctgagaaacatgtgtttgcttct

SEQ ID NO: 829855 - DNA, 506 bp, Homo sapiens
gccaaattatttccttagtctcactagttaaatacagcacatttttattgcaaagagaatgttaatatttttatggagcaaatttagaaacaaataccaatgggacatgaaatactytgtggcttttcttacaagattctacactgaattggacaaagatatctcctttaggtagtaaacatagttccagagactgttttttatcttcatttttcagaataatttgatttatcaccagtcacatttagagaaccatttaagaagactttataacttgattaaatctgattgtatcctcatttatccttgtacttgtaccaaggcaattccaaatttatcagacaggaggttaatcacagtgactcatggcagtttgtggggcagggcagggggcaatatcatacagccactttagtttaaattttccataagttaattcaatcatgaaagagttataaaacttcaggaatccacaagaaaacattgagaacatttgtatgttcact

SEQ ID NO: 829856 - DNA, 624 bp, Homo sapiens
catttgctattttattgatttcagctcttatttttcatttcttcatgtttcttggttgtaatttgctctttttaagcttctaagatgacatcattggttttaaaactttattttctaaaataagcatttaaagccatcaatttcaatttaagccgcattggctgcatttcaatatgctgcatttttaatcattcagcgcaaaatattctgtaattttcttctttgcctcatggattatttaaagtatactacttaatttccaaatatttgagaaatcccctgagatttttaaaaattgatttctaatttaatttggttgtggtcagaaaatattctatgtatgacatccatcctttgaaatgtatagagacttgttttatggctcagtatacgatctattttagtgacaattccatgtgcactggaaagagcaaagtagaaggaaatacagagaatgccacaaagatactcctcaagaagagcaactccargacacataattgtcagattcaccaaagttgaaatgaaggaaaaaatgttaagggcagccagagagaaaggtcgggttagtcacaaagggaagcccatcagactaacagctgatctcctggcagaaactctacc

SEQ ID NO: 829857 - DNA, 618 bp, Homo sapiens
aaattaaagagaatataattatggatccatttgagatttaaaagataataaaaaatatgataaatattttaagccagtaaatttaaaactyagatgaaatggtcatattcatgtaagcatattacttcagaatttataaaaattgattaaggaagaaataacttctattacattacaaagaaatctgaatccacagtataaaatcttcctataaatatataacagttccaattagttttacagaagacttctaccatacatttaaggaataggtcttccagggtataaaaatctttcaaagaatagaagaaaggaactattccacaacttattcaatgatactaaaattataaaaagacagtgactgaacaggaaaattaaagatcaattttattcataaactagaagtaagcatcctatgaaaaaatgattaactaggtccagtgttatgtaactcaaataacacatgatgaatacattagttttattccaggaatgaaagagaatgtttacattttaaaatccatggcaacatttaccacattaaaatattaatggagaaaacagtctcagaagcagaaaatacaatacttattcatgataaaataaaatcttaaa

SEQ ID NO: 829858 - DNA, 582 bp, Homo sapiens
ataatacaatttgctaacagatgctaaggtaaacaaaaaattgattatgatagttaatttacacaaggataagttataagctaaaatatttttttcccttaacaaaatattatrtatcatttatttatttatttttttgaaacggagtctcgctccatcgcccaggttggagtgcagtggcgccatctcagctcactgcaacctccacctcctgggttcaagttattctcctgcctcagcctcccaagtagctggaattacaggcacgtgccaccatgcccagctaatttttgtatttttagtagagacggggtttcaccatattggtcaggctggtcttgaactcctgatttcgtgatccacccaccttggcctcccaaagtgctgggattacaggcatgagtcaccgcgcctggccatataatttctaaagatcaaaaggaattaaaataaatgggcaaaaatgaaaactcagctatagcttttgaaaactcattcataccttatgagaaagctgttattttaatagctatattggtagtataaaccaagctttgaaaagccatttgtatataacatgta

SEQ ID NO: 829859 - DNA, 634 bp, Homo sapiens
aaaggtgaagtcgggcctttcagcgtaaccagyaattgaataatgtacattgtacccattaagtaatttcttgtccctcacccctgcttccactcacccacctttcccaggctccaatgtctattattccacactatgtacgtgtgcatacattttttagcactcacttataagtgagaccatacagcatttgactttctgtttctgcattgtttcacctaagataatgacctgcaattcacttaagacaatgacatcatatccttttaatgatatggtatcataagtatacagtattacatatccatgttgctacaagagacacaatttcattctttatggctgaatagtattccatagcattccattggataaagaaaatatgtacattattttctttatttattcatcactgatggacacttaggttgattacatatctgtcctattatgaatagtgctgcaataaccatacaagtgtaggtgtcttttttatatgataatttcttttcttttgggtagatacctagtagtgggattgctggattgaatggtagttctatttctagttctttgagatgtctccatacagcttttcatagtggttgtattaatttacattcccataaacagt

SEQ ID NO: 829860 - DNA, 583 bp, Homo sapiens
tgctaacaaatactaggtcttattcattctaattttttctgtacccattaaccatccctggctcacccacacacacacactayccttcccagtctctggcaaccatccttctactctctatctccattagttcaattgttttgatttctagattccacagataaatgagaacatgtgaaatttgtctttccatgcctgggttatttcacttaacataacgaccttcagttccaccatgttgcaaatgacagaatctcattcatttttacggttgaacagttctccattacatatatgtactacatttcctttatccattcatctgctgatagacacttaggttgctttcaaatcctggctattgtgaacagtgctgcaacaaacatgggagtgcagatatctctttgatatactgatttcctttcttttgggtatatacacccagcagtaagattgctggatcatatggtagatctatttttagatttttgaggaactgcgaactgttcttcacagtggttgtactaatttacaatcccaccaacagcgtacaagggttcccttttctccatatcctcgccag

SEQ ID NO: 829861 - DNA, 388 bp, Homo sapiens
ttactgcatgatctcatccattctcatgccacatgctgatgattcccaatctatagcccagacatctctgataaacctgttactaaacttcttgtgtgttgctccacttagatgtaactgagacaactctcattcagcatgtcccaaactgatttcattgttcacttaatacctgtttattgagcacctaccatgagccaatgctaggtaatggggatgcagtaataattaagcatacccctctcctagcttctgttgtttacatggargaaaggcatatagacaataaacaaatagatatcaggtggtgatgagggtatgtgaaaaataaaggtaagtaagggagagagaaggtgctggggtcagtgttattttattggtgatggtc

SEQ ID NO: 829862 - DNA, 504 bp, Homo sapiens
acaggactccgtgtgtgttgttcccctctatgtgttcttgtgtcctcatcatttarctcccacttataagtgagaacacatagtatttgattttctgtttctgcattagcttgctgaggataatggcttccagctccatccatgttcctgcaaaggacatgaggacatgatctcattcttttttatggctgtatagtattccatggtgtaaatgtgccccattttatttatccagtctatcattagtgggtgtttgggttgattccatgtctttgctattgtgaatagtgctgcaatgaacacatgcatgcatatgtcttaataatgaaacgatttgtattcaattgggtatatacccagtaatgcgattgctgggttgaatggtatttctgtctttaggcctttgaggaatcaccacactgtcttccacagtggttgaactaatttacactcccagcaacagtgtaaaagtgttcccttttctccacaacctcgccagcgtct

SEQ ID NO: 829863 - DNA, 504 bp, Homo sapiens
acaggactccgtgtgtgttgttcccctctatgtgttcttgtgtcctcatcatttaactcccacttataagtgagaacacatagtatttgattttctgtttctgcattagyttgctgaggataatggcttccagctccatccatgttcctgcaaaggacatgaggacatgatctcattcttttttatggctgtatagtattccatggtgtaaatgtgccccattttatttatccagtctatcattagtgggtgtttgggttgattccatgtctttgctattgtgaatagtgctgcaatgaacacatgcatgcatatgtcttaataatgaaacgatttgtattcaattgggtatatacccagtaatgcgattgctgggttgaatggtatttctgtctttaggcctttgaggaatcaccacactgtcttccacagtggttgaactaatttacactcccagcaacagtgtaaaagtgttcccttttctccacaacctcgccagcgtct

SEQ ID NO: 829864 - DNA, 633 bp, Homo sapiens
ctgtaattagggttatgctggtaaatgcataccaattgtttttcaacaacaacaacaaaaatagctctgattctcagttgtaacatttgctcatttctggagtgtaaacatttttactatggttgatttcagtataataacataaagtcattgaatgcagaattaggaggaaaggtgaagtagcacaccattatagagtagttccacaaaaaaaaaaaatgtaaatatcctcaagaacatagaaaatagtacagtatagtagagtaattgtaaggtgattcttttaaagtatttattaattttattttaatgtaaattgcttaattgtaatttttataatttaattttcaataatggccatcttcaacatcttcaacaatcgatcagcttgcaaagttttgcaaagattttctccttatctttactttctagcagtttgtctatggagtgtgtggcagacagacactaaggttacccctcaataatttctggcctcctgatgttcacrctgctgagtattactgtctccttatgtctggacaggatctgtggtttgctctcaccagtagaatatggaaaaggtgataaaatgatactgtcctgatgagtttttattatatcatgctatatagc

SEQ ID NO: 829865 - DNA, 593 bp, Homo sapiens
ttttgtggcaattgtgaatgtgaattcattcgtgatttgcctctcagcttgcctgttgttagtacataggaatgcttgtgatttttgcagattgattttgtatcctgaaactttgctcaagttgtttatcagcttaagaagcttctgggctgagatgatggggttttctagatatagaatcatgtccatttgcaaacaaaaatagtttgacttcttcacttcttatttgagtacactttatttctttctcttgcctgattgccctggccagaactttcaatactatgttgaataagagtgatgagagagcacatccttgtcttgcactgactttcaaggggaatgctttcagtttttggccattcagtatgacactggctgtgggtttgtcatagatggctcttattattttgaggtattttccttcaaaatacaattttttgagagtttttaacatgaaaggatgttaaattttattgaaggcctttcctgcatccgttgaaataatcatgtggtttttatctttagytctgtttatgtgatgaatcacatttattgatttgcatatgttgaaccagtcttgcatcccaagg

SEQ ID NO: 829866 - DNA, 428 bp, Homo sapiens
aatacaaattttactaaggagctcaaaraaaaaaattactttaatttattggtccatttgtgatatgtcctaggcacttgattaaaaatttaattttgctttatagggagataattaattctattaaatttatacatgtatatcatagagagacattacattttctagatgaaaaaagtaatcaggaatgttctatttaatatgttgaaggagaataacatttgtttatgataaggctcaaatatcttagattttatatttacctttttaaacattttaaatatatataacattggaaaatacagttaattcaatagtgatcatttaaatataaccattattcattttaactttaaacagaaaaaatactttataaagtgaatatatttttagcctgatgaaacaattagcccctgtatgtgatactt

SEQ ID NO: 829867 - DNA, 627 bp, Homo sapiens
cttgcactttccgggtgaggcgatgcctcgccctgcttcagctcatgctcggtgcactgcaaccactgtcctacaccgactttctgacactccccagtgagwtgaacctggtacctcagttggaaatgcagaaatcacctgtcttctgtgtcgctcacgctgggagctgtagactggagctgttcctcgtccgacatatcattttaattgtattgatgatgatcactcaataagatcctaccaaatcggttacttcctggactttttaaaattttttttgagattttatcgtgatatggcatcttgtattaagtagaactaaatttgttattccttactctcctacccatcccaatcgtcagttatgattaattacaataatcagaaaatttacaatagaataaaattcttaaattttagtttcttacaaagtataagcagaaatctttttatgattaattgggcaatgttatagtgagatcaatgacaaaagcaatattgcctaggtgttttaaataaaactaatatctttaatatcttggaaatgtgagccttattaatatcacagtctaaacacaaaatttggacaattccagaagtcatttcatttcttggtttcaattttca

SEQ ID NO: 829868 - DNA, 534 bp, Homo sapiens
gattgatggatcctgaccaaattcaaaacccaaaagggcaaactcaaggcttgagaataatcttctttgactccatatcttgtcttctagacacsctggtgtgagatttgggcccccaagaccctagacagccagcttttctggacacagcttatgccacagttctcaggttttggagtctggtgcctgtggctctcccaggctggagttacacactgctgtgcctacaggtctgggatcttgagagcagccctgcccccatggctccattaagaatttctctactgggggctctatgtggcagccctgctcctgtggcagttctctgcctatgcccttaggctccctgagatatcaatttgaaatctaggtggaggtggccatgcctgcccagctctttcagtctacacagctgcagaactggcattgtgtagatgtcactaaggtttagtgcttgagccttctaaaggatcagcctgagctaaacctggcctacatgagccatagttggggtggccaaggaactcctcccga

SEQ ID NO: 829869 - DNA, 533 bp, Homo sapiens
aagtgcacaaattctatctaagcatcacatggctgctaccaagggatgggggaagggtggtgaaggtgattcaagtctgtwtttcctaccctctttagtgcttctctctttaatatgatgttaaagccaggtgctgtgatcactcacttaatttttggtttgtataaaggtgatttttgtatgaatagttgttcagtttgatgtttctctggtggagccagttgcttcaggcttctatttggtcattttgctccacctcttcctcctcatatcttgctttttaaaatttaacattataaatcaatattttctaagcaattaaacatcttttcaaacatttgtgtaaatggcagcatgtatttcattgtggaaatgtgtcatacttatggctggtctttgaatcacaataccaaaacttacttgaataaatggaagttgactctgatttaatcacctgcagcaattgcattcttattccaatgacactgtcattccttagattatttttgaaataatgtttttgtaaatgtctt

SEQ ID NO: 829870 - DNA, 545 bp, Homo sapiens
gcttgccgtgaagcgtggcgcaagatgaacctttgatcttactgcactagtacttctttgaagtaaatgtgacccttattttaggtcctgatgattatcaagaactagaaggtcctagttattttccaagcttaaaacttcccctaggcattccactaaatacactggtcttaatgtggtattaggcacatttgggacagataagcagacattcaaaaaaaaaaaataaacagtttagtaaatattttactaaaatgttataattttggtcacagagcctcatatgctttttgacctttgcttattttctcaaaataccactaagaccaccaacactgtcaaagaaagtgatggatagtttagcaagattcaaacttagaatggaataccactaaaatgtcatgttgttcaatatactggggcaaaataaacccaggatatttggttcatatggaaaccaaaaacaaaacaaaacaaaaaacaaacagagaaatccatgcagtgaccyatggagagttgacacatgtgctgatgctctatatcca

SEQ ID NO: 829871 - DNA, 636 bp, Homo sapiens
gagccagactctgtctcaaaaaaataaaaaaataaaaaagagaataacacttgaagattattgacatgaaaataaggaactgagttagttatggattagcactaacagaggacatatttgtgataggggactgctaaggaaaagtatctaaaactctgacataacacatgtatatttagtgtaatattacattattaaaagctatcatctaaaaggccaacccaaagattacttcattttcttttgacttggctatgtattagttgatttgatcctagacgctatgcaattatgtgataacttctaggtttctctctagtagaaaaagacaatgccagaccttatggatctgtttccatgaaggatattaatcagttttaattcacaactgataggagttcatcaagcatcagaaaaactgctcttgagtgcatttactgtatgcatttttgtgaattactgcattatatcacatttccaattccctttttctaataagtttaataaagtttaaattttwtgcttaataaccaaaaatacagtgcaattgggaatacatattttttctttatttttcttttttaaattatggtaaaatacacatactgtaaaatttgtcactttaatgaattttaa

SEQ ID NO: 829872 - DNA, 611 bp, Homo sapiens
gaaccacttgccctgagttggaaaagactggtagagcaggttttcagaagaagagtaggtgggagtgatagaggagacagaaaaatactggccctctggagtaggggctggaatattagtgggtgtggaggcaccggctatttcttttgctgtcctgtcagcataggcatttccttttgcaataagatcagtaggtttctggtgtcgtttacaatgaatgactccagcattggctggcaggagagcagccttaaggaggatctttattagggaggcattgataatggaagagccttatgtgataaggaagcctttttcggcccagatggcagcatggttatggaggatgtggaaagcatatttggagtcagtacaaatattaatgtgcattcctttagcaaaagagagcacataagttagagcaatcagttcggcttgttgaaaagtggtggagggaagaagtgcagcagcttctataacagaggtgtgggacacgacagcatatscagctttagctggtgaaaattgattgggtttagaagaactgccatcgataaaccaagtgtggtctgggtttggaattggaagaatagaaatataaggaaaggggg

SEQ ID NO: 829873 - DNA, 650 bp, Homo sapiens
tcttcactcaatttgcccctcactacagctgattttgccaattttctgctggcatgcaaccttgcagagatgtggcgattttctgcagcttcattccatgtagtcaaaaggccactgaaagaagtagcttcctaatattcagatcacagccaattcagtttggcaagagacggtttatttatttttaaatatttcttagtattcaatgaaatgttttatatttagtagttaaaaatacatacagaatttaaaacattttctaaaactgatatccccttcttttatttgtagacctaaaactaaatgaataaaaaacattcaggtcaaaaatatgactctcatttttaaaaatactacttcatgttgtttatggtgctatagacttacactcttttataactgaaagaaatattaatgacaattataaaatcagccattgaaaggattttaagaaaaacaactattgcaactgccataatttggtggtattggaaggcagcagaggtataatacagctgatgattggcggggwtaactggcagctccaagccaggcattccatcatgtcagagcccagcaggaaacatgcaacaaaatcaacaatcacttttatatgtacagttctttatcattcaaatgcctctctcaaa

SEQ ID NO: 829874 - DNA, 521 bp, Homo sapiens
gactacagcccagtcagacagarctccttaccctccctcaaacacaccagacacctgcaggcctctctacctgcaaagtctgtactcttaacaactaggctatcctgcatggcttgtcttctctgttcctttgcgtctttgctcacatttcacctgcttaatgaagtctttcctgaccttgtaaccgtccaccctccatgtgtatttcttctccttagcacttaccaatacatgacatattaagagttttaaatattttctttgataattgtcttacccctctaaataatagattttaagagaacacaaattttcgcccgttgttcactgctatatatccagcagctaaattactatctatcacatattacatgctcagtaagtttgccagataaatgaagaaatgatattttagggcttaacctcaaatttttactgctttgcataaaaatcctaaagcaacattaatgtttaaacaatatgcaatcacatacactagagggtattgtagttttcaatga

SEQ ID NO: 829875 - DNA, 570 bp, Homo sapiens
gttataatgttaaattagttttaaaagtttaaaattttgatataatctccttctcctcaagtagcttagctggttaattcagaaggactaaatgcatctatttctattatatttttctccccgtgtgaaatagacaagtcacctatactaattttctatgataagatgtggagactaggttatgtatccttgcagataagcacactcagaactgaaagaacaaagttgaaagtatgttgtttcattagggaacaatgtgaaataattaataacccacattagttctgtgtgttagaatgtttttgtgggggtaggaaaaatatttattttgcagttaaattatacaattctacttcctaatgcttccgctacagtaacttcttcttgtcttatcacctcaaatccatgtttttggtgatgtgccattatcttgctttaagctcttcaatttcttccagtggctggtagaaaaaagtgaaaattccttcgtgtgacatttatgagccttgcctgrttccagctatcattcatcatgccccacctcatggcctgtgccccagccaatcaaac

SEQ ID NO: 829876 - DNA, 593 bp, Homo sapiens
gaccacaggcacatgccaccacccctggctaattttagtatatatatatatatatatatwtttttttttttttttttttgtagagacagagttttgccatattacctaggctgacctcaaactcctggactcaagtgatccgtctccctcagtctcccaaagtgctgggattacaggcgagagccgtggaatctggccacaagcgttcctttagtgtatatgtattaaatattccaacaaggacaaaaaatatttaaggcctaaatattttctaagtaaagttatttatatcacactctttacagaagcacctcctcttaattaattctttccacatattcttctctgaatttaattcataagagttattgtccagtgttctgtaacttgtgccactttttcatcaaacaaggaagatatgtgtgtgtccctgcaccctgggtggcctgctacaaatttttcactcctggtactacatagtccctctctggaaatcaggtcagttggtagtcttctgtatttttgcctcctgccgcagtgtattaaaaatgataaaaagataggcctcttctttgtgctgtaaaataacccaa

SEQ ID NO: 829877 - DNA, 555 bp, Homo sapiens
cttaattttaaaatattttattgctaaaaaatgctaacgatcatctgagccttcagyaaatagtaatctttttgctgatggaaagtcttgactcaatgttgatggctgctgactaatcagggtggtggttcccaaaggttagtgtggccatggcaatttcttaaaataagaaagcaatgtagttgggcatggtgacgcaggcctgtagagtcccatctgctcaggaggctgaggcaggaggataacacaagcacaggaggtggaggctgtagtgcactatgatagcatacgtgaaagccactgcactctggcctgggcaacacagagagacccctgtctctcaaaaaaaaagaagacaacaaagttttctgcatcaattgactcttcgattcacaaaagatttctctgtagcatacgatgctgtttgatagcattttacccacagtagaacttccttcaaaattgaagtcagttctctcaaatcctgctctactttatcaactaagtttatgtaatatttgaaatcctttgttgtcatttcaacaatgttcacgc

SEQ ID NO: 829878 - DNA, 616 bp, Homo sapiens
agcaataaggctgtttcactttcttatcatttgtgtgtccactggagtagcacttttaatttccttcaagaacattttctttgcattcaccacttggctaactgtttggtgcaggaagctagctttcagactttcccagctttcaacatgccttcctcactaagcttagtcatttctaactactgacttaaagtaagagatgtgtgactcttcctttcattggaacacttacaggccattgtagagttattaattggcctaacttcagtattgccatatcacagggactaaggaagccaaggagaggtagagagggtgagcagccagttagtgaagcagttagaacaaatacatttattgtttgtcttcttagatggttgtggtccgtgatgccccaaaacaattacaacagtaacatcaaaaatactaaaggcagatcaccataacagataacaataataataataataataatagtaataaaagtttgaaatattgtgagacctaccaaaatgtgacacagagacacaaagtgagcacatgctgttggraaaatggtgccaacagacttgcttaatgcagggttgccacaaaccttcaatttgtaaaaaactat

SEQ ID NO: 829879 - DNA, 638 bp, Homo sapiens
acctcctcatcttacatggatccctgtattttaaggaacccttctgcatactacctctaccattgcagaagtctttcaatttgtaaccctgccctctgtggcttcctctagcttctcaccttaaccaaacacagctttctttgagaaggtactacatcctcagcagttctctttctttgaaaattgcatttttctcataccccttcataataaaacaagggggtaggcctgttctttatttcgcagtgcacttccataatatgaatggacctcatttgggatgctctcaaatagatgtactgccctttccactcctgcgcatcacacactaccctttgcaatgatgacttaaaacagtagcttctggcagcacgtggtggctcacacctgtgattccagcactgtgggaggccaaggtgggcagattacttgaggccaggagctcaagaccagcttggtcaacatggtgaaaccccgtctctaataaaaatacaaaaattagctgggcgtggtagcrcatgcttgtaattctagctacttgagaggctgaggcaggaggatcacttgaacccaggaggcagaggctgcagtgagccataattacaccactgcactccagcctgggtgacagagtgaga

SEQ ID NO: 829880 - DNA, 619 bp, Homo sapiens
tatgtggctcacttctaatcatgtaaaaacactaacatacccaagagaaaatcactggttccaagtactttaaagaagtttccctttgttagactgctcagattaggcatctactgctatttttgtcttctgtgtaggttttaagagttttataaagcatccaccaaaccaatgcatcttagagagagatgcatgtatctacatggcggactttatacaacataactaatccaagttccaaggttagccaccaaatcaattctgcaagtcagttactatggaccttggcttgtagtacagcatagcagttagacaaggggatatatacaatatataacagaaaagagaaaagactgggcattaccatagttaagtttctgttcgtttgttcaaatattcttcataccacacagagttatactgaagtatcaaagtggtatcagaatgtaagcatcttggtaaaataatgatttaacaggccatcaaatcgaatggcagggaaacaatctgtgcactagtatttkacctgcctcaaacagaagatattactgtaaataattctaaacataagcacaatttagtgaataaggtaggagactggtagactctaactttcaga

SEQ ID NO: 829881 - DNA, 568 bp, Homo sapiens
cttttgatatgccttcttcactaagcataatcctttctagcttttgatttaaagtgagaaatgtgatttaaagtgagagattttcttttcacttatgtacttagaggccactgtagggttattaactggcctaatttcaacactgttgtgcctcaaggaataggaaggcccgaggagaggagagagataggactggccagctggtggagcagtcagaacataaacatttatcaattaggtttgttgtcttatataggtaaggttcatggcaccccaaaacaattacatcaatgaccactgatcacagatcaccattacagatatagtaacaacacagaagttttgaaatactgttaagaattaccaaaatgtgacataaagacacaaagtgagcatatatgctgttggaaaaatggtgccaactgacttgctcaatgcagtgttgtcaaaaaaccttcaatttgtaaaamttcagtatcaaaaattgagtaaagcttataagctttagtaattctcgcaatatttcaatatttttcattattattttatcttttatggtgatctcata

SEQ ID NO: 829882 - DNA, 513 bp, Homo sapiens
aagcttgcttcttactaaggtataataacactyttaaaagaacaaaaaagctggcaagacacacaaagacagattttctcatttccttccttggctttagggagaaaatgtactgtacagtggaaccctggctttggctggacccaagaccgtatgttaaattaattaatgtaaattatattgctttttaaaaaaagcatatattccatttcccatcatttaaacctctgaacccacatatatacagaacatggacaaaactacacactgtttcctgctgctaataataagcaaataaaagataatcccttagtaggtaaactcatccttaaacaaatttaactcatattaggtgagtaaacagatggagctggcatagtgccttaaaagtcaggaaattcagacttggtagagctgatgaggtggaaaggcaagagtataccagagctgaggattgtccggagaaaaactcttcgtttctatcctcaccttcagtaatgatcttggattctt

SEQ ID NO: 829883 - DNA, 604 bp, Homo sapiens
ttcttgttaaattgcctggaaaggagtaactcaaaaatcctcaaatttctgatagaaaaaactaaaagttattacagatgtctgttaatcttatatgttgcctttaagacactgaacaaattagcaaaatattaaaccttaaagaatgttctaatattctgaattttgattagtttaattgctacttgaaattacatttttaaaaagaatatgatattagaatatttaatgctggagtattattgttaagtgtatcttcttttctttaaaaaaagttagtattaaattgtattttattaaaggttgagtatacatgctgaaaatagaatcataggaggttgttctatgggtagtctaataagctgagagagaagcccaaatgaatatggcataattatggaaagtattagcactgctcagaagtacttctgtgcattaggaggattacatgtttttacctcctcaaagttagttgtggtcatgagactcaatgacayattaactgaaataatctttcttattcagatatagatgcatttaagatccagcagtgattctctgtatgtttgcctctccctgctgctatgtcgagatgtatatcaga

SEQ ID NO: 829884 - DNA, 565 bp, Homo sapiens
ctgccagctgtgagaaaagggccagcctcctccagactccagaacggtagatccactgtcagcttgcaccatgagtcgggaaaagctgcagacagtcaatgtcagccatgaaagcagccatgagaggagttgtaccctgcaaaactacatggtcagagctgcccaaagtcctaggagcccacctcttgcatcagcatgtcctggatgtgagatatggagtcaatggagatcattttggaacttaaggtttaatgactgccctattggattttggacttgcatggggcctgtagctcctttattttggccaatttctcccatttggaatgggtgtattcacccaatgcctgtattctcattgtgtctggaaagtaactaacttgcttttgattttacaggctcataggcagaaatgacctacttttctcagatgagactttggatttggacttttgagttaatgctggaatgagctaagactttggggractgttggaagggcatgattgtgttttaaattgtgaggacataagatttcaaagggtccgagggcagaatgatatag

SEQ ID NO: 829885 - DNA, 600 bp, Homo sapiens
attactatccaattaaagcaaaacgcttgttactggccatgatgtcacctttaccaaaagaggaggwcttttttttttttaatagagcattttctctaggcctggtgctaattaaatgctttgcgtgcatttctcactgatccttataataatccctccagataggtattgctttcacacctccattttacagataaggaaactgaggtctgaagagatgaagtcacagacgtaaggtaacaacctaacagagtacgcgtaagatgacctgtgctttcagacttgactcccaagcctcttgacgtaatttaaaggtgtcatctagttagtatctggtatctgccaccacccatggcagctcacaactgtcttttttcattctgtcaccttactgaagaggctccgctgtctattagtgctgggaacaaaaatgtgtaagaggaaggctctgcgctagagcactggaagctccggtaggaatgctgactgccaggaaggtggggctgagtggctccaaggagccttctagagagaaggcacagcgcagcgaaagtcatggatccagggatgggggattctatctggtggggtgtggggtag

SEQ ID NO: 829886 - DNA, 522 bp, Homo sapiens
aggaagacctcacattgcaaagcagtcagttctccccaaatgaacagatacatttaacacaatttccatcaaaatagtgtgaggttttttttttttttcttttggaacttgtagtggtatttstactatttattttgaagaatatattttggatgaacaagtgaaactagcccagagaaaaggaacaataaataaaataaatgggcaaaagcttgtgctgttagctttaaagtgtatttaaaataaatctgaaatcatttaaacagcatgaaccttggtggccaaatagatcaatgacaaagaggagaaaacctagatacaggttcatttttgccttatatgctttgagattagtgtttctatttagagctgtgactaatacagatgcatcacggctgagagcaaagcgaggtgaatgtccctattaattgccaccatggtgcgaggctggaatgagggtgtggccagctaagaggggatttgctcttcttgccctagaagttcctcattgtttcctgtcct

SEQ ID NO: 829887 - DNA, 627 bp, Homo sapiens
aagtcatggatccagggatgggggattctatctggtggggtgtggggtaggctgactggagtcaaatcagggcgggccctccttcctgaaagttgagttttgactttcacaagagctcctgggttataggcagggaaatgactagatcacatcggtgttgaagaaatatgtttcactgtttacctcctcactacgtaggccctttcatttccagacatgtctgtgagaagtccttaactcctactgtaatctgtttccagaggatttttttttttcctccttggtcttttaagttggctgtttcctccaaggatagaaggaaatcccctggtagcttcaagacctgtgcaggggacgccttgcccaaggaacaagaacctggataaacattgggtcgaccatcgcctccaggtctgatgagcacagatgttttctgaagagttctggaggtaccttgtggcacctgaaccatgctctgttttccttgcaggaggcttttctttttcagtcacygtttaaaacatgctttctacctgttcagaaaatctagttcaggtcgacgaagacctttgggatgaaatctcaatgcccagcctggagattgggccacatggtttctactagaca

SEQ ID NO: 829888 - DNA, 374 bp, Homo sapiens
tatatatatatttgatatatatatatatacacacacacacacacagagtccccccactttttttttagcagtgagtaagtcgaggcctcagcgattttggaggaaagwaaagtgcgtgggcgtgtctttaaaaccatcacatagtatctttaaaagggttgggattataggatatatttggttatttaaaagtctttttgcttttgacataatggaaaaaattagtagctgcataatataccataaagtggatttttcataattttcatacctacatacctacctaggttgttttctaatgtctgttagcacaagtgatgctgtatagatgtttttgctgtagttctttatatttcattgggatacatttctac

SEQ ID NO: 829889 - DNA, 374 bp, Homo sapiens
tatatatatatttgatatatatatatatacacacacacacacacagagtccccccactttttttttagcagtgagtaagtcgaggcctcagcgattttggaggaaagtaaagtgcgtgggcgtgtctttaaaaccatcacatagtatctttaaaagggttgggattataggatatatttggttatttaaaagtctttttgcttttgacataatggaaaaaattagtagctgcataatataccataaagtggatttttcataattttcatacctacatacctacctaggttgttttytaatgtctgttagcacaagtgatgctgtatagatgtttttgctgtagttctttatatttcattgggatacatttctac

SEQ ID NO: 829890 - DNA, 649 bp, Homo sapiens
tttaagtgatgagaaggatcctttctaccagatgtcaaaaagtactgagaagtcttatagttgaaataatgttggataggtttatctataaatggagagaggagtgttgcagtttgaaacatraaagtctataccatagtcattggtgctgtccaacaaatatttctattattcctcttctgtatggggcaccagtgcattgccccacctgccttaaggttaggtgtgatcacatgacttacttttgccagtgaaatgttaatacaagggacctgtgtaatttccagataagaagctttaagactccaggcatcatgcaccatgttctctgtctgtctcatctagtgactgtcattgacagccctgacaccctgggtacctcagcaagaatggtgctgagctcccagacaacccacaatggatgtgtaacatgagagacaaataaaccttttaccctgtatgtcattaagccaggttattactgtgacataatttggtctagactgagaaataaagtggattctcaccagttatctttaaaattccatattctcttatgtgcttgaatatttcagaaaaaatgcctttatgcactccttcttttaaaaagtccttattaaaggttagttaagggcaaaaaaagataaca

SEQ ID NO: 829891 - DNA, 633 bp, Homo sapiens
ttgaactgcatggggacaaatagaggtgtcacataaagtctctctcttaaaattataacctgtggtagaaccagaacaggaatctcagtttttcactcatgttagtatatcaccctgacttcccaagatattcgaacgggatcatcttgaaaactgttctatttttttaccttaagttgcagattaactccttcaaagcaagaaaaacgtaaggaaagatgagtgggaattcagaaaaaagaaaatgggtgaagtctttgaaattggccaagcagagaaaattggacatttgagctaaactcaccaaaatcttcaggatacagagtggctccaatagtatcagaattacatttggagcttttccagtaattctgaaccgagacatactaccaggctactacccaagagtaaatcctcagcccagaactgagccaagagtgtacccttgttacagctgcccaacagcacaggacaggctgatcatttgtggccggtgctggccctcgaaattccttttcatgcttagtggaaatcatggaaacaacactaagattagcattatggtctttagagatgcactatttgaaactggagaaatcagagggagatcmaacacgtgcatcattagtacta

SEQ ID NO: 829892 - DNA, 492 bp, Homo sapiens
ttcgaggcaataataataagattaacaacaatattaataataaaatatactacttgcacacgaacttaaaagtttaaagaaaagaaaaaagatttttaaaagatactaccatattttaccatttattatatcactgattggtggttgtgtttttggcagtggtatttggattttcttagttggtaaggtaatttttttgactgattccacaagtgattacacaagtgaaaaaacatttaataaaaatttgtttactgaatagacaaatgtataaacagccttgacacatttgttgtattggtcaactcaattaattgctgccagatgaatgaatgaatgaacatttgctgagtgtctagcattcatgtaggtactcttstactttgtcctatcaagttctccacttacccaagcaacccactttacaggtagattatttaaaataaggggacccaggtcattgcaaagagggcttgtggggctgtgaaaccg

SEQ ID NO: 829893 - DNA, 542 bp, Homo sapiens
ccatttaacaagtctctagcaagttccaaactttcccttatcttcctatcttcttttgacccctccaaactgttccatyctctgtctattgcccagtttcaaagctccttccacatttttaggtatctttatagcaatgctccactcccagtaccaattttcagtattagtcaggtctcacactgctatagagacatacctaagactggttaatttataaagaaaagaggtttaatccactcacagttctgtgggctgtatgggattctgcctctggggatgtctcaggaaatttacaatcatggcagaaggtgaaagggaagcaaacaaatcttcacatggccagcatgagagacagagagtgatgcgagaagtgctacacacttttaaacaaccagatcttatgagaactctatcatgagaacagcaaaggggaagtctgcctccatgactcagtcacctctcatcaagccccttctccaacactgaagtttacaatttgacatgagatttgggtggggtcatagagccagccaaaccat

SEQ ID NO: 829894 - DNA, 587 bp, Homo sapiens
agtaccaattttctgtattagtcttttctcacactgctataaagaactgactgagactaggtgattaataaagaaaagaggtttaactgactcacagttctgcatgggggggtgacctcaggaaactcactatcatggcagaaggtgaaagggaagcaggcacatcttacatggtggcaagagagagaaagggaaagtgccagacacttaccaaactaccagatctcacgagaaattactcatgggcatgagaacagcaaggggaaaatccatccacatgatccaatcatttcccatcaggtccctctcttaacatatgaggattagaatttgagatgagatttgggtgggggcacacagccaagccatataaatatcttcacaatatcttcagaaatttaaatccaaaacataataactctccattctaaaaaagagggagagagagagaaagaaaaaagacccaacagcaaaaagcaaaactttgtggattgggctcaatagtacastggagttgacacaggataaaatcactgaacttgagggcatatcaatagaccaagcttgtttaacctgtggcctgcagg

SEQ ID NO: 829895 - DNA, 587 bp, Homo sapiens
agtaccaattttctgtattagtcttttctcacactgctataaagaactgactgagactaggtgattaataaagaaaagaggtttaactgactcacagttctgcatgggggggtgacctcaggaaactcactatcatggcagaaggtgaaagggaagcaggcacatcttacatggtggcaagagagagaaagggaaagtgccagacacttaccaaactaccagatctcacgagaaattactcatgggcatgagaacagcaaggggaaaatccatccacatgatccaatcatttcccatcaggtccctctcttaacatatgaggattagaatttgagatgagatttgggtgggggcacacagccaagccatataaatatcttcacaatatcttcagaaatttaaatccaaaacataataactctccattctaaaaaagagggagagagagagaaagaaaaaagacccaacagcaaaaagcaaaactttgtggattgggctcaatagtacactggagttgacasaggataaaatcactgaacttgagggcatatcaatagaccaagcttgtttaacctgtggcctgcagg

SEQ ID NO: 829896 - DNA, 553 bp, Homo sapiens
tgaaggggaagggacaatgtaaattgtgtgaagtatgtcagacagaaggcttggctgtaaaatgaatggagagtattcattcaacaaacatttaccgagggacttggagccacttctgatggggaagatgaggatggggggcaggtcccacctgccagaggctcacaggagtgttgtgcaatgagtaaagaaatcgacacccagagaggagctgccccagaccctaaattggtcagcaggagaatcaaggctaaattccagggtcctgtttttctttccacactggccttccaaaaagttggtagccaaattggttcagtgtgtggcagttcattaggtttccatccataccacctggtctcttcttgcagtcatctccattaattaattaattcattcattcactcaaactcatatttattaagcccctatgtgtgacacacataatgctcagtccttttgcttgtatagtgcgtatcctcataaatatctttaaatctkgattcgtaatgtaatataaaaatagaaaaaatctaaaaatagctaaatggat

SEQ ID NO: 829897 - DNA, 451 bp, Homo sapiens
agatcctgaagtctagaagtattcagatgcctcagagcctcagagggtgccttgcatttaataaatgctcaaaaactgcctgcaggttgactgagtcactaaaccactgaattaaatactcttaagtgattaggtaacatcattaattgtgttggtattattgaaattctgttccccaccacctagaacttttatatcccctaataataggaaggatgctggcctctgtactctggaaggcaaaaacaaatatagctcctgtaagaggcaggtacatcaaaggcaaagtagcaaacaaaagctaaagattgttaatgctgacccaacctcktcctgaccaggtgggtgccaatcacccacagtcactatagaggcaggatatgcctgtatgcagtacacaggcattgcttacataacacactgtgatgctgctattttgcctttggatcct

SEQ ID NO: 829898 - DNA, 591 bp, Homo sapiens
caatttcttttcagtcccccctccccagtctctggtaatgattgctctattctctgctttaatgagatcaactttttagaatccacatatgagtgagattatgtggtatttgtctttctatgtctggcttatttcacttaacataatgtcttccacatatattcatgctgcaaataataggattttattcttttttttgtatggctgactgggatcccattgtgtatatataccacattttctttatctatttatctactaatggatatgtaggctgattccacaggttggctattgtgaatagtctgcaataaacatgaaagtgcacgtgtctttttgacaaactgatttcattttctttggatatatatccagtagtaagatagctggatcatatggtagtttgatttttagttttctgagtaacctccatattgctttccagaggggctatagactaattcacattttcactgacactgtataagggkttccttttctccacttctttgccaacacttattttgtgtttttactaatgtcattttagctggagtaaggtgataacttactatgattttgatatgcatt

SEQ ID NO: 829899 - DNA, 553 bp, Homo sapiens
aatattgctaaagtccttgcaagcatggctgccatgcttaaactccctcattagtgaataagaggcctcatactctcacattctcatcaatattttatatttgatccacttkcctaatttttgacatttgggcataaagtggtgacatggtttggctctgtgtgcccacccaaatcttatctcaaattgtaatcttcacatgtggaggaaggaacctggtgggaggtgattggatcatagaagtggcttccctcatgctgttttcatgatagtaagggagttcttgggagatttgatggtttaaaagtgtcagtttcccctgcattctctctctcctgaagccatgtaagacatgccttgctttctcttcaccttatgccacaattgtaagtttcctgaggcctctctagccatgcagaattgtgagtcaattaaacctcttttgtttataaattacccagtctcaggcagtatctttatagcaatgtgaaactgactaatacaaatggtatttcatcttggttttagtttgcctttttcctcaattattagc

SEQ ID NO: 829900 - DNA, 607 bp, Homo sapiens
tgatgagggaggaaagagtacagatgcatttaatgattttatccaaagagcatcacaaagaataagagaaaatggctgactagacacagccagaaggacctcccagctgggacactgggaagactgctacccacactccaagcagatattcagaaggaaggcatcaagaatggatggagggaggacacagatgctaggctgaagtgggaggaaatgaggaacccaaaaggggctaccaagcaccaggatttgtttctgacccctaatgaacaccgaggaagggagaatcaaagaagataaaagcaaaaaaatcccatccaaaggatagcaacttcaaagactgaaggaatttcatcccacgcagataataaagatccagtacaagaactctggcaactcaaaaagccagagtgtcttcttagtgccaaacaactgcactagttccccagcattggttttactaggccaaaatggctgaaatgacagaaatagaattcagaatatggataggaatgaagatcattgagattcaagakgaagctgaaacctagtccaagaaatctaaggaacacaatacaatgacataggagctgaaagacaaatttta

SEQ ID NO: 829901 - DNA, 653 bp, Homo sapiens
aatcagatagttctaatgtgaaaattagtaaacaggaatatatatcaatggtaaatattagatgaaaccatcatgagaaaataaaagaggaaaaaaaaacaaaaaacaaaaatgagagtcatacatgatgaaaagatcttgcaggcatgcaattgcaactccaaaatgtaagacgataacaaatgagatagaagcaatctgtgaagagacagaggccaagaattgctcaacgctggcaaaaaatatcaaggtcccaattcaagaaataatgaaaataacaagtaagatattacaaagaaaatgaaacttggaaacatcaaagtaaaagctttgaaactaaagaaaaagacaacactcttaagggaaatcaaaaaaataaacactcttttaaaaataactataggattaacagctaatttactaacataaataataaaagtcagaaaaaatatgtatcttcaaattctgaaggaaaattctcacctaagaattctatatgccacaaaaatatctatcctgaaaatgaaggtgaaataagtatattttcaggcaaattaaaaaaaaaaaaactaaaatcatccctgaagaccttgaataaaaggagtttwtaaagcagcaagataacaatctagaaacatgcatgaaaatgtgaa

SEQ ID NO: 829902 - DNA, 612 bp, Homo sapiens
agaagaaacaaattgtcaatatcagaattaaaaggtcattcatcactggtgatcccgtgtgatcccatggacattacaatgataaaaagaaacactaagaactactccacgtcaaaaatttaataacttcaatgacatgggccaattccttgaagaaacaaaactaccaaaactcatgcaaggagaaatagactatttggacagcctgtatctattaaagaattaaactagtagttaaaaacaacccaaaaaataaatcagggagccaaaagaagtttcactggtgaagtctaccaactctttaaagaactaattacaattctatacaatctgttttaggatacagaaaaaagggactagtttctgactccttttattccatcattattacactaataccaaaaccagataaagacattacaagaaaaggatattacagaccaatatctctcataaacatagaggcaaaaattcttaacaaaatattagcgaatcaaatccagcaatacgaaagataaataaataaatacatcaccaccaaatgacattcgttccaagaatgcaaggctgtttcaacatttatawatcagtgagagtaattcatcatataaa

SEQ ID NO: 829903 - DNA, 615 bp, Homo sapiens
aggcgcatgccctcaaagacagggttgaggaggagggccgaacatatcaataaaaaaaaattatctcacttcactttttcaactcaaatggcacccagtaagggttgactaatttcagctgctcagcaagctctggaacagggtttgagatgtttatgcggcgacgtccacctttacaagtgcctcctcacgtgtatgtggggcaggagggagcacttactttacttcctgactaggtagggaagaagaaagtatttcccccataagcctataattagcttttctaaaggctcaagaccactgatgaggtgatcatctcaggaacatcgtatcgacctctgagaaaccctataaggcttattcagccctgaagtctagaagctccttagccgctgtgcaagattgtatattatcaaatctcttgttacattgccctgtagattttaaagaagaaatctgggaaacatatttttcagaatcttttgtcagcatagtgtgggcttaactttgccaattacagatacaaraggttaggaaaactgaagaaacccaaagccattattttctggtgagagctgcaagcaggtatatggtattggcaggtggcagacaaaa

SEQ ID NO: 829904 - DNA, 444 bp, Homo sapiens
ctccctccttccctaccttgaacggaaggagagatgcacttgttaaaatcatgcagtggcttcaggagctgaatccaratgtcactgctgggggcacactccttactcaattagcacctgggcatggtttggtctttgtagtggataatgtctggccacacaaagatggggcacgggccaggtcagttctgctgactgggagctgactggataagtagcatatgacctggagcagtgcagcctaatagaaatatagcaagagtcatccatgtaactttaagtttcctagcagccacctttttaaaaagtaaaaagaagtaggtaaaattaacttcaatcatatattttatttaacccagtatatccaagatattatcatttcaatatgtaacactggtcatacttcaagtgctcagtagccccacaggactagtggctgcctac

SEQ ID NO: 829905 - DNA, 595 bp, Homo sapiens
aaaaagtcaaattattcttgcttgcagatgatacttttgcagaatgtttgcttcttagttaagctaaaaacgggttcttgtcacatgaccaggaaggattargaatgaggaaacattgaagggtgagtggagcaaaatttattgagaaaaaaagaaaacctctcagcaaagcgagaagggttcctgccaatgggctcccactccacgaattccagaccacaacacgtgagctgaagaggccaggctcttccccacgcacaaggcatgaaatttccatggttttaccccattttgccagtgtgcaggagggttggagattttccaagcaccctcccccttatctgcctcctgcatttatcatccctccacctaaaaaagtacatctaactgccattagaataaaaataaggataagggcaaagactgatcttaactgcttcctgccaatagtggctgctgttttgggaaaaaggcagtcagatctccctcagtggcctatccaaatgtccatggcaaaaggggccctcatctgaggccctgttgcatgatcatttggagttcaaaagcctgaatgcaaggagagacaaactgggtt

SEQ ID NO: 829906 - DNA, 601 bp, Homo sapiens
ctttatcctatctatttcaaaatgatttttaaccctatgcaacaatttacatttctatgcctacttataatctttaattaaaaacacattttaatgttcttacatacctcacatgtaaatctatttttagtagtcccaattacatgttatgtggtaactcctagcaatttttaactttaatgtcaaacttggtaagttgtttaaattatgtgcgcattgcagccaaggtttgactcataattaagggtgcataattaagggtgctgttaattccatatgtcccaagcctttccaattgtgaagcaggcaagtcaaacatttctcaaaaacataaaaagcaatttataaccttataacattttgcaaacctattatctgacatgcataatttagtttacctatttacattttgacaacatctgcatttcaccaataatatttaaggctgtttttatttctcaaatattaaagtcacaggagctaaaaggtaccacagcttttgtctctgttttaaaaaatatttgatccaatcacttatcttcctttaggctagttaattagagctcytttttttatagacatcatcacacaacacacatat

SEQ ID NO: 829907 - DNA, 611 bp, Homo sapiens
aattcttagaagaaaacaggagcagatgtttacaaccttgggttttacactatttttttattaaatatgaccccaatagcacaggcaacaacaaaaatataatagataaatggaactttataaaaattgaatagttggaaataatgttcccaagtcatatatacagtgtaaattgacataaatttcatgtatacggaatcctttataccaacgcttagcaaagaggtccttgctgtcctttaaccatgtacaagatagcaaattttatctggttttcatgttcaggttttaaatttcaaaaatatgtacatttcctttaggaacattttaaattagacaatcaatttagtcgtccttaccctcagattacatatccagacataatcaaaactttttcctttaatgttaatttgggatcaaaggagaacaaagtataccaacctattcctgttgcaatctctgccttcctatcatttaaggtatttgtgtaaatccttggaagattttaactacatataacaacaaaagatttaaaccctgttttatatgcaatgcttgaaaataatgttatttagtccrtgactaacaagctgagaagagacacaggatat

SEQ ID NO: 829908 - DNA, 664 bp, Homo sapiens
tggttttgacttgcatttctctaaacgttagttatgttgggaatttttttcatgtgcttgttggctgcatgtatgtcttctcttgaaaagcatcttgtttatccccactttttaacaggattgtttgttttttccctgaatccagaatctataaacttaaataaattaacagatgcataatttgcaaatatttttctcccattctgtggcttgtctgtttactctgttgatagtttattttgctgtgcagaagctccttaatttaattaggtcccacttgtcattttttttttttgtatttctgttgcagttgcttttggtatcttcatcatgaaatctttgccaggtcctactccagaatggtatttcctaatttgtcttcaagggattttatagttgtaggtttcaaatttaagttttaatccatcttgagttgatttttatatatagtgtaaggaaggggtatagtttcagttttctgcatatggctagccagttatcttggcaccatatattgaatagaagttatttccccagtgcttgcttttttcaaytttgttgaaaatcagatagctgtgggtgtacagctttacttctgggttctctaacctgttccattggtctatgtgtttgtctttgtgctgttaccatggtgttttagtta

SEQ ID NO: 829909 - DNA, 601 bp, Homo sapiens
ggaggtggtactttccaaaaagcatcagctgaagtagtgtggagagggatcagtgctgggtggggctctagaactccgaagactatgtgtccattgtcttccactatcaaggtgggtagggaaggaccatcaggtgagggcagggctaagcgtgtctgagctcagactctccttgtgtgggtcttgctgcagctgctgtgggtgatggggctgagattcccaggtcactggagttgtgtacctaggaggattatggctgcctctgctgagtcatgcagtagtgaaaagccgacagtcacaggcctcaaaccagctcccatgcaaaccacagggctggtctcactcccaccatgcccctctgcaacagccccgaggtctgttaccaggcagagggggagacaggcttgaagacttgccctaggctactggggctgtgaaagaaaagggcgttagttcttcccctgcctgtgaagtctgcaagtkggattcgaacactcctccaacttctggccaggaggcttctcgccacatttaaattgttacaaagttcagctagagatttcctgccctctgtggggttttaccccctgctcctctggcc

SEQ ID NO: 829910 - DNA, 601 bp, Homo sapiens
ggaggtggtactttccaaaaagcatcagctgaagtagtgtggagagggatcagtgctgggtggggctctagaactccgaagactatgtgtccattgtcttccactatcaaggtgggtagggaaggaccatcaggtgagggcagggctaagcgtgtctgagctcagactctccttgtgtgggtcttgctgcagctgctgtgggtgatggggctgagattcccaggtcactggagttgtgtacctaggaggattatggctgcctctgctgagtcatgcagtagtgaaaagccgacagtcacaggcctcaaaccagctcccatgcaaaccacagggctggtctcactcccaccatgcccctctgcaacagccccgaggtctgttaccaggcagagggggagacaggcttgaagacttgccctaggctactggggctgtgaaagaaaagggcgttagttcttcccctgcctgtgaagtctgcaagtgkgattcgaacactcctccaacttctggccaggaggcttctcgccacatttaaattgttacaaagttcagctagagatttcctgccctctgtggggttttaccccctgctcctctggcc

SEQ ID NO: 829911 - DNA, 551 bp, Homo sapiens
gctttcagggaattttccaacacatgacttagtcactgatatgaaatcacatgtgagaagtgccccttagactccacggttggtgctcctggagcgttttgtmcctcagtcacattttccattgtttcagagcttcctatgtagttgctcctcccccctccctctccctcggtaactggacttttctggggtgcagggtccctgacttactcatctctacactgcctgcagcactgtgccctataaggagtggagtaaatgtctgtataaggaatttcacaaaatattttatagaattgggattgagaatgagcacacctttaggggtggtgaagagccgctagggtagcaaaagagctatccataactgtgagaggtttgaaaatctgttctgaaattcctatcgcaagggatgcatgtcctttgaaatcttacttaaaggaaaggaggctgagtgtttgaatccacttgtcttatgacatacacgtgacctacaggcagtagctgatgaggcgagggaaaaggagctgcagtgacttgcttcatcctca

SEQ ID NO: 829912 - DNA, 551 bp, Homo sapiens
gctttcagggaattttccaacacatgacttagtcactgatatgaaatcacatgtgagaagtgccccttagactccacggttggtgctcctggagcgttttgtacctcagtcacattttccattgtttcagagcttcctatgtagttgctcctcccccctccctctccctcggtaactggacttttctggggtgcagggtccctgacttactcatctctacactgcctgcagcactgtgccctataaggagtggagtaaatgtctgtataaggaatttcacaaaatattttatagaattgggattgagaatgagcacacctttaggggtggtgaagagccgctagggtagcaaaagagctatccataactgtgagaggtttgaaaatctgttctgaaattcctatcgcaagggatgcatgtcctttgaaatcttacttaaaggaaaggaggctgagtgtttgaatccasttgtcttatgacatacacgtgacctacaggcagtagctgatgaggcgagggaaaaggagctgcagtgacttgcttcatcctca

SEQ ID NO: 829913 - DNA, 464 bp, Homo sapiens
ctggatcagaatgaaatggaataattccttccagggaagtggtagaccttgtaactaaagaatgattttcattatcaaagaggcatagaaaaatcaagaaagttccttttaataaagtcsttcaggtatcttaccctcctcatgacccagaggttcagcaaaagtcagatataattattaaaggggaattttctgtgaaggttaaagcaagggtatatatttacctcatcttatgatacgccacagggacctcaaatagagatttgaggtcagtggattttgtcactgacagcacacccccaaatgctgtcattctcaggtctcagggagagcatgactgggcttatgtctttgaatttgcaagattttaaaggatgtcttgttttgggggtattcatttatctagaacggtttgttttagcctttattccattattgtcctcctgaggaacctttttagacat

SEQ ID NO: 829914 - DNA, 464 bp, Homo sapiens
ctggatcagaatgaaatggaataattccttccagggaagtggtagaccttgtaactaaagaatgattttcattatcaaagaggcatagaaaaatcaagaaagttccttttaataaagtccttcaggtatcttaccctcctcatgacccagaggttcagcaaaagtcagatataattattaaaggggaattttctgtgaaggttaaagcaagggtatatatttacctcatcttatgatacgccacagggacctcaaatagagatttgaggtcagtggattttgtcactgacagcacacccccaaatgctgtcattctcaggtctcagggagagcatgactgggcttatgtctttgaatttgcaagattttaaaggatgtcttgttttgkgggtattcatttatctagaacggtttgttttagcctttattccattattgtcctcctgaggaacctttttagacat

SEQ ID NO: 829915 - DNA, 577 bp, Homo sapiens
attaagtggtgtcaagacacgaatgccatcaccattcctattcaacatagcattgaagtcctagccagagcaatcaggcaagagaaagaaataaagcccattcagatacgaagagaggaagtgaaactatctctatttgtagatgacacgattctatatctagaaaaccccatagtcttggcccaaaaggtccttcagttgataaacaacttcagcaaagtttcaggatacaaaatcaatgtacaaaaatcactagcattcctgtataccaacaacagccaaacctagagtcaaatcaaaaaggcaatcccattcagaattgctgcaaaaagaataaaatacctaggaatacagctaaccagggaggttatagatctctatgatgagaattacaaaacactgctcaaagaaattagagatgacacaagcaaatggaaaaacattctatgctcatgggtaggaagaatcaatarcattaaaatgggcatactgcccaaagcaatttacagattcaatgccattcctattaaattaccaatgacattcttcacagaactagaaaaaactattttaaaat

SEQ ID NO: 829916 - DNA, 597 bp, Homo sapiens
cacacacatacatatatgtcactgtattaatcagggttctctagagggacaaaactaatggaaaacatakataaaatataatataatataatataatataatataatataatataataattgcatatatatacataaaggagagtttattaagtattaactcacatgatcacaaggtcccacaataggccatctgcaggctgaggaacaagaaaagtcagtcagagttccaaaactgaagaacctggagtcgaatgttcaagggcaggaagcatccagcacaggagaaagatgtaggccaggaggctaggcccatctttcttttcacatttttctgcctgcttatattctagccttgctggcaggtgattagattgtgcccacccagattaagggtggttctgcctttcccagcccactgactcaaatgttaatctcctttggcaacaccctcacagacacacccaagatcaatagtttgcatccttcaatccaatcaagttgatactcaatattaaccattgcagtcacacacgtgtgtgtgtgtgtgtatgtgtgtgtctgtgtttgcttagtgacatagatatatacaatgtgc

SEQ ID NO: 829917 - DNA, 618 bp, Homo sapiens
gtgatgaatgaaattctattgctgactactttttactgactataaaatcctgttgtgatatcacataatctcatagttttaaataccatgtatatactggcaacattcaaatttatttttcatcacttttaaactacagattcatatattcatctgtttacttcacatgtgtgcttgagatgccaggaagacattttaaagctaatatgtcccaaactgaacatcggatccactctttgctagagtgatcaactgtcccagtttgcctggggctggggagttctgaaggccatgggactttcagtggtaaacccaggaaagacttgtgtaaaactgggtagttggtcaccataacacacacacacacacacacacacacacacacacacacactctttctttctctctgtctcaccatacaagtggcaccactttcagtctttcttatctttattctagtcaatcaactctatccctgcagttaattgggccaaaactttgragtcaatcttgactcctctttctctcacactcctcatccactctttcagtaaatctttttggttctacctgcaaaatctagaatctaacctgtttacctcatttaaaatttcaatt

SEQ ID NO: 829918 - DNA, 565 bp, Homo sapiens
atgaaattgatttatgcttaaaatttagtgagaaacacaactctttgaactcccaaatattttcttgatctactagagtcattttaagttgataccattttgatatataggatttttttttwaaaaaatggcataggctactcgggcataagcacctttgccacaggtttagaaaagtcttgcctgaaaaagggagtttgggaagctggtagtggttagattttagaacttttttgcattggataagatgctgcttatgagacactgcattcggtgagaccagtggtttatttggccttggatttagctctgatatgacaatcaagaaattagagtcacgggaattcttgtcgtttgcctccaagcagatttctaaaggtcttatttattgaaagtatttgttgtttcaggcacagtactaagtgctttatctacatcagtagcctcctaaccactctcattgccttctttcttgcccttacatccatttttcacacagcagccagagaaatcctcctaaaacattaatcagatcgcactcttcccctcttcccaagccttgttg

SEQ ID NO: 829919 - DNA, 663 bp, Homo sapiens
ttcactgtgccaaggttcatgctgcctagcatcagagtttattgttccatctggctataattattccatttgcacaagatcctgatgtgtctggtgcttccttggtataaggtttctgttttaatggttttatgatgtgctgagctgcatttggtgtgttggatgatttccttaatttgactctgatgtttgtgaagattaagtatttatcagttcacacagttttggtttttgactcataaaactggagcaaatgggcctggggctcaataattcaatgactgctgataagtttcataattttgttcttttattattgggaccactgctagagagactttctctataattttcttctagtcccctaaaacaattgcctgatattaatatattatcaatttaattctcatgttatccttttcaggtttcatggtaggttagtaaaaacatttttctaaaaaaatccatttagttttttaaaataagcatcacaatattataaatagatgttggggattttggaacccaaaatatgatgtttttwaaataagttaaaaaataacaacttattaagtttccagcatggcatgttctgatttgccagttgggtgcagccaccagaaatagcttaaacgcaggacacataggtgatctttgggtgcg

SEQ ID NO: 829920 - DNA, 663 bp, Homo sapiens
ttcactgtgccaaggttcatgctgcctagcatcagagtttattgttccatctggctataattattccatttgcacaagatcctgatgtgtctggtgcttccttggtataaggtttctgttttaatggttttatgatgtgctgagctgcatttggtgtgttggatgatttccttaatttgactctgatgtttgtgaagattaagtatttatcagttcacacagttttggtttttgactcataaaactggagcaaatgggcctggggctcaataattcaatgactgctgataagtttcataattttgttcttttattattgggaccactgctagagagactttctctataattttcttctagtcccctaaaacaattgcctgatattaatatattatcaatttaattctcatgttatccttttcaggtttcatggtaggttagtaaaaacatttttctaaaaaaatccatttagttttttaaaataagcatcacaatattataaatagatgttggggattttggaacccaaaatatgatgttttttaaataagttaaaaaataacaacttattaagtttccagcatggcatgttctgatttgccrgttgggtgcagccaccagaaatagcttaaacgcaggacacataggtgatctttgggtgcg

SEQ ID NO: 829921 - DNA, 517 bp, Homo sapiens
tctcatggaatttatttgaagattaagtaagwttaggtatataaaatattattcataatatgcaaagaaccacatgaatgtaaaatattaagaatgccacgtgtcctgctttagagattatagtattattaaagttagatttggtgagatacatcatagggtttgtaaatctttacaaaaaattaagatgcaggtctatgtttatggtggaatgggagtttaacaataacgtgatgatggagttgactcccatttcagaggagggccacaactacaaagaaagtcacagtaccaaaagcagtggtccctgtaagatgggcttattcaattgctatttgtccttttcttctttttctgatcccagtgctgccagatttcaacagcaggctaaaatcccataaaacaataatataatgtgactgtttactaaatgtgtaagacaacattgactactggaaaaagtaatagcattacatcaagttaaactaaatccagtaggcagaaaattcaatagaat

SEQ ID NO: 829922 - DNA, 614 bp, Homo sapiens
tttgttgtaagtctttaaaacaaatttgctgtgtatttcacacttatagcacatattaattcagactagctacatttgaagagttcagtagttaccatattggatagttaccacagctctaaggtatcaacatctccaatgaataattaaatcctttaataaatcatatcaaccaaatggttctgaaactttttactgttacagttttgaagattattttgttacctgaagctaactgaccatgtctgtacactgtgaaatattgagaaactctttttttgtggatgataagatttagataaaataaaatttgaagataataaaataaaattcttgaaatgaaaattagtaaataaggggcttgcagggcacttcttccttgaggagttccgtgtgaagtggcaggagtggcagctatggagccccaggaggagaaagaggtgcaggttgctgtgtgattaaaaaaaaaaaaaatggaggtaatcccatttacctcatacccatactcaaaatctcatacccatagtatgaggtgaacctacgaattrgagattttacaccaccttttagaatgcaacaagctccaggacagggatgtctacctggtaatacat

SEQ ID NO: 829923 - DNA, 635 bp, Homo sapiens
taaaactgtgttatttttattagattaaaaaaaatgtttccctgatgactttttttttggctttttgttttttttctttgagacagagtcttgctctgtcacccaggctggagtgcaktggtgggatctcagcccactgccacctccacctcccaggttcaaacgattctcctgcctcagcctcctgagtagctgggactacaggtgtgtgtcaccatgcctggctaatttttgtatttttagtagaaacagggttttggcatgttgcccaggctgctctcaaactcctggcctcatgtcatctgcccgccttgaccacccaaagtgctgggattacaggcgtgagccatcacgtctggtcactgatgaagtttttagcatccatttttctgatgagtcctgtaggattttttgcccagtgatttttaggaatgtgtgtgtatgtgtgtgactttattgcagaactgactttattgtcacttattatgcagatttctcctgttagggggtgtgtgtgtgtgtgtgtgtgtgtgtgtgtgtgtgtgtgtgtgtgagatgcacttaaaggggtagctgataattatttgaagtacttcttttcacagtggtttagcaggttagcagatttttcccaa

SEQ ID NO: 829924 - DNA, 635 bp, Homo sapiens
taaaactgtgttatttttattagattaaaaaaaatgtttccctgatgactttttttttggctttttgttttttttctttgagacagagtcttgctctgtcacccaggctggagtgcagtggtgggatctcagcccactgccacctccacctcccaggttcaaacgattctcctgcctcagcctcctgagtagctgggactacaggtgtgtgtcaccatgcctggctaatttttgtatttttagtagaaacagggttttggcatgttgcccaggctgctctcaaactcctggcctcatgtcatctgcccgccttgaccacccaaagtgctgggattacaggcgtgagccatcacgtctggtcactgatgaagtttttagcatccatttttctgatgagtcctgtaggattttttgcccagtgatttttaggaatgtgtgtgtatgtgtgtgactttattgcagaactgactttattgtcacttattatgcagatttctcctgttagggggtgtgtgtgtgtgtgtgtgtgtgtgtgtgtgtgtgtgtgtgtgtgwgatgcacttaaaggggtagctgataattatttgaagtacttcttttcacagtggtttagcaggttagcagatttttcccaa

SEQ ID NO: 829925 - DNA, 634 bp, Homo sapiens
ccatgtttatttatattgttactatttagcttctcccccacccccgccccagcatgttacagagaatctcataaggattggtacattgatatatatggtatatattgatatattaatactcatactattgattagcattgtgattgtgatatggtatagaaacagcagttagttatactgggactaaacatgagaagatgctattttgaatgccactgatattttcctttttcttatccacttttatattttatagacatatttggcatataatatgaaacaaaatattctcttcccagagaacctataggattgtttgttaaggaatgttgaattagtcagttttattgaatattacatatcacatataaaatattgaatattttattgaatgctaaatattgcataaattgagtcatggaaactaaacagctttgggcactttattaatttttaattcctctacatttctagtttgttccacaaaagaggcagtccactagaaatacatacactaattattcaagtaaaatttaaaataatttagagcaaaaaatagaactagragaaatgtattttaaatcatcacagtaactctagagaatgctttgttttccacaaaatgtttcaaatt

SEQ ID NO: 829926 - DNA, 527 bp, Homo sapiens
aggaagataataaagaaacatataacatatgatatakttttatgtagtaatagagtctgtgactaaatagggagtgatgtagaatgtgggagaagaaacaagctatgcaattgtttgggagaaagaaatttccaggcagaagtgacagtaggtcagtgctcctgagaaaagaatgaactgtggtcaagctgtagagagaaggccagcatagctaggcggcacaaaagagcacagtgcaagatgagtgtggaggggtttgaaaggtgatggaatgttggatcttgtaggctgtgaaacctaaatattaaagaaagccattggaacagtttggccaggatatgaatatgatctgacttgcatttataaaagatgtttccagtgacacgagcatagagagaaggagatgggaggagaagcatgttactatgatagtcatggaacttggaattggttggatacaattagaagggatcagtatttgaccatcagtatttaggttaactctgagtgaagttccagataactgg

SEQ ID NO: 829927 - DNA, 534 bp, Homo sapiens
gcaggcctggacatagactcctgagcactcagcattaagcatcatggccttggaagctgcagtgaaagtagtgggtgcctcttctttgtaatggaccatggggattagaacaatgagtctcatggtgaaccgcagtggactaccgaccagaggaggcctccctgaaatttgcctgggttccctggcccgtaaatccgggtataaggccagtgaaggaagaaattcataagaacaaaaaaaaaaaaaaaaggaaaaaaaagcttattctcctgaaaggtctgaaaactggatatgatttcatcaaaaaacataatgcaacatgacatttctttcattctgtacagagtggagaagaaaatacctgttaaaaaatattgcaatacaggaatatgaaatacagaacttctcttccttagaaaatttacaccagactaagactcttaagttattataacaaagttagactgattyattgaggatgaggttagtgcctggaaagtaatacagtgttacaaattagtttttttagatgct

SEQ ID NO: 829928 - DNA, 630 bp, Homo sapiens
aaaagcataccagtatgacagccaaaatatcttttaaagtgtatggatctagagatagacagatgatggatcgatggatggacggatggttggatggctggatgatggatggatggatggatggatggatggatrgagagataggagctatagacaaaaacttgtctctttgtagagtatcaggaaggattcacactaaactatccccaatatctttgggatagaaggcgaagagccttggaagcataactcaccctcatttattttagtaccctcaactctcagcacctgagttccaccaaacttcaaactgcaaatcttagattgaatggtatgttactgttttcaggagaacactcgaaatcatgaaggtctgtatgtcgttgatgttatggtttggacttcttattgtgtctttaaaggacttgcttctgtttggttctgaccgctttttctagcagtcattaggagctttcataatccttaaggccccatcacggatgatgtcagcttctttgattatggaaaaccttgagaagtttattataaatttatcaatgtaactttgtaaacaaaagagaagcgggaaaaaagaacaaagtacctttccagagaaatagtaaaacctta

SEQ ID NO: 829929 - DNA, 521 bp, Homo sapiens
ggtgttactggggccatctgcccctcttctcataccttgccctgtgcatctgttccatctggctgtgccacagttgaatccttcataataaactgggaatagcaagcaaaccacttttcctgagttctggtgaactatgctagcaaattaccaaacgtgaggagggaaccccatatttgtagctggtctgtcagcatgtgaaacccggcatttgtgattcgtgtctgaagtgggaggcaatcttgttggactgagtccttaccctgtgcggcctgccttaacccaaggtagttagtgtcggaatggaattaaattatatggcacccacttggtgtctggagagaattatgcaattattggtgtggaaaacccatactttttttttttgttagtgttataagtaaagaagtggttttcctttacaaataaaaggttgacagtggatttccccaaaggagtatgtctctagcttctatatttagccgtagggtgtcctgcygcccaccatcctggaaagcaag

SEQ ID NO: 829930 - DNA, 304 bp, Homo sapiens
attgggacttgttttgacgtccaatacatggcytattttggtgaatgtaccatgtgttcttggaaataatatatattctacagttcttgaatataatcttctagaaatgtcattaagtcagagtagttgatagctaaaattaatttttatttgcaacaatagatacttattttaaggacacctaggaacatgaggtaggaggagacttccctcaaccatctttctttgctctctgattttgtatgcttaaattctaggaagcactttaggatcaaaactgagaagaaattgtatttacattcca

SEQ ID NO: 829931 - DNA, 457 bp, Homo sapiens
ctaaggaataaaaccttacatcataggagattaagtcctttcttcgttttagcattttttaattttatttttccattygctctgttattccaggtgaatggagatggttttattttttgatatcttatgtccctttagagccaaggtttttaataagtagtgtgtggtttccaaggtttccaaagaattatcaaacgttatagaataaagaagaaagtcatctacatattggatgagcgttaaattgtaaaggaagatgaaatccccttggatttgcatttaatgtccaggaaaaataactggggtcttctgtaaatctctggtacacaactaaccaaggacactgttgcttttcccatgtaaaggagattagctattgagagtcagggtgaagaggcatgctgaaaaaatcagagcataagtcaacaatggcaaatgagtgacattggagggtatg

SEQ ID NO: 829932 - DNA, 599 bp, Homo sapiens
tattatttacaagtgatttcattttaatcaagtatatttgttttatcaggattattggaaacatatagccaatagagactgtcaatttwtacttactgctaagatgggcatatgaaacataggtaggcatggcatatattcatataaattcctatgtagtcataaatatacataatatataaatatgcatatacaataatttaaatttatttagatattagaggttgagcatctcaagtctaaaaatctgaaatccagaatgcttcaaaatctgaaacattttggatgccaatgtaacactcataggaaatgaaatttgggcatttgggatttcagattttcaaatttgacatgatcagcatttaagtatactgcatgtatttcaaaatccctaaaataaaaaatttgaaatacttctgattcctagcattttaaataacggatattcaatctgtgctatatgaatgaattggtaaaaattgccatagggaaattaggtttccctatatttgatagatctatatttgatagaggattgaatttaaatgaatagattgaatttaaaatttaggccaatttattgctcaattgggtgtaag

SEQ ID NO: 829933 - DNA, 534 bp, Homo sapiens
tctgcgtttaacgtgctgtccatgatgcccaggctgtctccactgagaggcatctgcagccctgagccaggccacctcaatgcccyggggcctcctcctgtgctcatgtggcacccaaagtctgaagggggctgaggttgcaggggactgttgtggcagcgctgccttgagcacatgcacacctggctgagttgtggcagcacctaggcttcgccacaactttgctctaccccagagtgggcactaggagcagagagaggtcaggagcaggagcaaacattttcaagcctgtgggggcagagtttttcctgggtcccccaagaacacagggatgctggtgtctggagccgtggctgtgtggctgaggctatacctaggagtgcaggctcctgccctgccaacccagtaaggggtggggctcttacctgtacttggctcccaccagctctgtggagcgctcagccccagctgtgccttccgtgctgcagccagcatcctcacaaaggcatctccagaagggccatcactgccatc

SEQ ID NO: 829934 - DNA, 534 bp, Homo sapiens
tctgcgtttaacgtgctgtccatgatgcccaggctgtctccactgagaggcatctgcagccctgagccaggccacctcaatgccctggggcctcctcctgtgctcatgtggcacccaaagtctgaagggggctgaggttgcaggggactgttgtggcagcgctgccttgagcacatgcacacctggctgagttgtggcagcacctaggcttcgccacaactttgctctaccccagagtgggcactaggagcagagagaggtcaggagcaggagcaaacattttcaagcctgtgggggcagagtttttcctgggtcccccaagaacacagggatgctggtgtctggagccgtggctgtgtggctgaggctatacctaggagtgcaggctcctgccctgccaacccagtaaggggtggggctcttacctgtayttggctcccaccagctctgtggagcgctcagccccagctgtgccttccgtgctgcagccagcatcctcacaaaggcatctccagaagggccatcactgccatc

SEQ ID NO: 829935 - DNA, 544 bp, Homo sapiens
tcctcctcagatttcatggtcttttgaataggcagttgcatagccaataacaacgcataaaacaatcccaatcccttatgtaataacagctgatccttgagcaatgaaggggttcagttaaaaaaawatatatatatatatttatattatattttggagaatcacaagtatgtatatatatttatatatacatatatatatttatatataaatacatacatatatacacaattgtgattctccaaaaacttaactactaatagcccactgctgactggaagtctcagtggtaacataaacagttgattaacacattttgtatgttacatgtattgcataatgcattcttaccataaagtaagtgagagaaaagaagatgttattaagaaaatattaatgaagagaaaaaaaaatatatatatatatatactagtcattaagtggaagtgatcattacaaatgtcttcatcctcaatgtcttcacattcagtaggctgaggaggaggaggaagaggaggttttgctgcttcagaggtggcagagg

SEQ ID NO: 829936 - DNA, 591 bp, Homo sapiens
taggatgaaaaatggagtggctactttagaaaacagtttagcagttcctcagattgttaaacatttaaaacatatgtccatgcaaacacttgcacatgaatgtttatagcagcattactcatgacaaccaaaagtgaaaataaccccaatagtccatcaaccgatgaataaatcaaaaaaatgttctatattcatacaatggaatattattcagccataaaatggaacgaaatactgatacatgctacaacaaggatgaagcttaaaggcagtacactaagtgaatgaccacgatcaccaaagaccacatattatatcattctattcatatgaattcatcagattatgcaaatccacagtgacagaaagtagattcctggttgccttcctggtggtggggatggggggtggggaggagtgaatggagtgtgactcctaaggttacaggagtttctttctgaattgataaaaatgttctaaaattaaacagtagtgatggtttcacaactstgtgaatactaaaaaccactcaattataaactataaaaggacgagttttatggtatgtgcattatatatcaataaaactgt

SEQ ID NO: 829937 - DNA, 587 bp, Homo sapiens
ttaacacaactgtgaattatttattgatactatttaatctgccatctgtaatcaaacttccctgatttccttaaaattatattttatgctttgttrttcatgtctgtacctaaaaatgattttaagtcatttataatctacagtatggaatttataaggttcttgaaactctagttttatatcttttgtcacttttgtaaaattcatggtaattcttcaaatgtggcaccttcctcattttccttaccctcttcatcttgaatacctgtaacaaatgtacataacacttgcactatccatttctctctcttttgtgttcatttatccttttgtctttttgtgcttcaatcagaatttttgttggtcaatctttcaagttcatgaatcctttgttctgctgtgtctaagctactgttaaactcaaatattgatttcttaattttattaccagtatttctactgtacttgtttttatgcatttctggtatcttttaatattcccttaaacataataatcatatttgttctaaagtccatgtataataactgtaatatattactttggttttacatttttttctattatt

SEQ ID NO: 829938 - DNA, 596 bp, Homo sapiens
gatgagaccctgtcatcaagcagggtctcatcactggaccattgattttggtccagaattttccttttgtatctgatagatgattttaacaatttcagaaaataatattgatagatgatatcgatatagacatatagatacacatctatgaacactctcttgattcatgttggtaaaaattaacattctgtgtctatttctctctaaatgattttggaatttacattaaaacattgaaaaacttagctatgcttttataataaagtctcaagtgtcctcaacttttctttaagtcaaatgtgaaccccagggaaaattgttgcagagatttgcttaaacatctcaagccaataataattaattctttgcaattttgatctttgtatggcccagaggccacatttcaaagttcaggaagattgcaagtgtactggcccattctcacgctgctatgaaggaataccasagactggacaatttattaaaaaagaggtttcattgactcacagttccacatggctgaggaagcctcaggaaacttacaatcagagcagaagacacctcttcacagggtggcaagagagagattgagcgcc

SEQ ID NO: 829939 - DNA, 622 bp, Homo sapiens
tgacactttttgagtcaagtgacattcatgaggcttctctgtgtcataaagggtcgtgtggaataatcttcatttaatacgtatgtgttgwtatatcctgatatgtaccaatgacagtgataaatctgaatttagaaatctttcctctatgttaggttatattctcttctgttcttccatagctgttagttcattattctgtagtagtaattttccttcctttctcctccttcccttcatttatcccttcctccctcctttttcccctctatgccttcctctcttacttctgttcttctctcattacactgataagcttttccagagctgggattttatttagtcatatttatcttttaatgcttgaaacagaaaatgctgttagggtaaatactaattttgtttccttgctttagttgctacttctcttacttcacaaatactgagtaattgctctgtgtctggtattgttttgaggccagggcacgaatgaggctctgtacttgacttgactcgttagaacttctttcaattctctgagccatcaaagtgtccttccctttaattcctatttttatctcaagctaaccaaattgatttctgtttataaagccaaagcaac

SEQ ID NO: 829940 - DNA, 622 bp, Homo sapiens
tgacactttttgagtcaagtgacattcatgaggcttctctgtgtcataaagggtcgtgtggaataatcttcatttaatacgtatgtgttgttatatcctgatatgtaccaatgacagtgataaatctgaatttrgaaatctttcctctatgttaggttatattctcttctgttcttccatagctgttagttcattattctgtagtagtaattttccttcctttctcctccttcccttcatttatcccttcctccctcctttttcccctctatgccttcctctcttacttctgttcttctctcattacactgataagcttttccagagctgggattttatttagtcatatttatcttttaatgcttgaaacagaaaatgctgttagggtaaatactaattttgtttccttgctttagttgctacttctcttacttcacaaatactgagtaattgctctgtgtctggtattgttttgaggccagggcacgaatgaggctctgtacttgacttgactcgttagaacttctttcaattctctgagccatcaaagtgtccttccctttaattcctatttttatctcaagctaaccaaattgatttctgtttataaagccaaagcaac

SEQ ID NO: 829941 - DNA, 657 bp, Homo sapiens
ggccactaattagttttaatttaatgatttgatttttggaagtagaggagacaaaacaaatcaaagatactactgaatacacacacgcgcrcacacacacacacacacacacacacacacacacacaccccccatagattttccgagacggttggctaaatgctatggaaatgggtgctatgattcttgactttagaggagcttactctctggtcggggaaacaattctatcaataattggaaaaaggaaaaagtctgggagagtgtggaaatagtttaagttgagtctggaactaaccagtgtccagattctacttggtttgtgctaaatttaaactgtgttttagtataagaacaatggtagataatctgtttgagagtaggagtaaactaaaaggttaataatttaaaggattatttaaaatacaacctgaaatcattgtatttatcaatattggaaaatttataatatgctaagggaggagagcagcaagtggttaatttatttgtcctagggcatttaaaaaaatgtgctaggccagtactgcgaaaatatttgttaagcggggattcataggtagcctcatgacaagtgtatcaggtaagagaaaaaaagttggtatatccaaattacaaaaatatcagtctttcagtgaa

SEQ ID NO: 829942 - DNA, 526 bp, Homo sapiens
tacttctagggcctaacacagggctctcaggaagaatgcaaggggctcttccttcacttcctggaaagatctagattgttactgccgtatatgagctgtctccgtgggagaagtyagaaattcaattgtgtttgaactgctgattatttggatttttttttaactttggcacattgatccatctaaacctggtgggaagaaatctccccacattgtctcatgaagagacttaattgcaactgtgccctccacactatcctgacttacttcagtcttcactctgataccacagtgcagccatgcaaatggttattccagctctggccacacactcttttcacaaaattgctcctaactggaagatctcactttctcctgtggggtaggaactgacaccagtgggagggatgtgcccctgaccattaatgactgctttcttttttttccttaaagaatggagctgttggggagggacatgcacacaatgtaaaacagacaaaatgcattacaactgtggtgtaatgtg

SEQ ID NO: 829943 - DNA, 640 bp, Homo sapiens
gaatcgggcagatcacttgaggtcaggagttcgagaccagcctgggcaatgtggcaatgtggtgaaaccttgtctctactaaaaatacaaaaattatctgggcgtggtggcaggcacctgtaatcccagctaatagggaggttgaggcaggagaatcacttgaacccgggagatggaggttgcagtgagcaaaaatcgtgcagcctgggtgacagagtgagactctgtctcaaaaaaaaaaaaagaacgaaaatttgcctgaatcagtaacagaactagaggtaaaaaattatatattttagagattacaaatgtatatgtgttatgaaacacattacactttatgaaattcaaagaataaagaaattgctcaaaactaaagaatcaaagatggttttagggaaaagatatcatttgtgcagactgaattttttagtatagaggtaacagtaaggatgcaaaggctagcaaaggatacaaggtaaaagcctgaggaacatcaccatagcttgagttgagtgaagagaattctakacaggtagagcaaggctagacaatggaaggacttggtccaagaatttagactgtcctgaaggcaataggaaatcacagaggatttctgaacagaatgacataatca

SEQ ID NO: 829944 - DNA, 628 bp, Homo sapiens
aagagcttatttcagagaacaataaataaaaatacagaaaacccatatattaaataactaaaagatgtgaaayaaaaaaatccctttaaattcacgaccaaaaaaataggccatcaacaaaaactcctaggattaattaaggaaagtagagatgggagaaaaataactaagcatttcttcgtccttctttgctaaggagtcctaagcttctacatatactctatagctatgtttaggaaactacattttaagacttcaacaatgacttattttgtctacagttagtgaaagaatgcagaactagaaaatgaaacatctaggttgaagtacataaggcatctatggcagggctaagtcccagaacttactttcatgtcagctccaggcaagtattctgggaaactaatcacatattatgaatatgactgcgcaatgctagtaacctaaatattacttcctcctttatataatgcctgcaatttttaaaagtatgcaattttttattgaccctgaattattcatttattcatctcacacacacacacacacatacacacacacattcctttaaaaagcagtcaaaaatagagttctatgtttctttatcaaagaatgttacgaaaaaaac

SEQ ID NO: 829945 - DNA, 575 bp, Homo sapiens
gtctcgaactcccgacctcgtgatccgcccgcctcagcctcccaaagtgctgggattacaggcatgagccaccgtgccagccacacatttaaaataatgataatagtaagccccaattatactataaaggaacaactaatttagaataggaggtctaggtaaatatgcaaatgcaaatactctggcgcaacccccctggaaaaataatgaagtggtcccgccagagtatcctcacacagggtcaccaccaacacattgcatcagctgccatgcagacgaacacaggtctgttttgcattgtcacccaagtgacattcagtattgccattggttaggcaattttccagaattggtgagattctgaaccaaacaaaaaacaagatcacctcttttgacacaggggggtgcattgtggtgatgtgtggaatatgttcatctgtacraaaatatttggggtttgagtgtaaaatcgagttgggttctagactcagataaacaagattttttttctcccccacccaaagactgtttatcagggtcattcgaaatgtatgtggggcaactctatgtagtca

SEQ ID NO: 829946 - DNA, 596 bp, Homo sapiens
tgaccttttttcttcacttgcccaaattcctatctaagacatctggggaatcatgctctacaagccaaaaagtctcawaagagggctttcatttaaccctacataatgtggcttactttccagcctgactctggcaataacatcacatgacagataaggaaggaaataaaaatattttaaccccaaatatgtttctttgccctatcttgaaatagtcctgcaaagctgtctcttatgggggaaaaaaactatattttgtagaaaatcccttttccccttctcatgcctttttcttgatccaagagagaattaactaagagtctgataccttttaaagtctgacaagaaacatttaccatctagtctctctgaagcctgctacctggaggcttcgtctacatagtaagaacctcagtctccacaaccccttatcttaagctagacatttcctttctattgattccaggtctttaaactctttcaaccaattgccaaacaaaatatttgaatccacctataacctggaaacacaccctcctccagttgtcctgcctttccagaccgaaccattgtacattttacaagtattgattaat

SEQ ID NO: 829947 - DNA, 639 bp, Homo sapiens
gctggagtgcagtggtgcaatcttggctcactgcaagctccgcctcccgggttcatgccattctcctgcctcagcctcctgagtagctgggactacaggygtctgccactacgcccggctaatttttttgtatttttagtagagatggggtttcaccatgttagccaggatggtctcgatctcctgaactcgtgatctgcccgtcaaagtgctgggattacaggtgtgaaccaccgcgcccagctgagaaatgtaagtttgttattttcattgactctcacaatttagaactcagttctgtgaggacccactgctgagtgcaatcatgacgagggaaatagcttgtgggacccaaccacttagggtttaagacacactgcttctaggactcactctcaggatctacagaaacaggagttacttaaaatcttgttaggaaacaattcctttcttcccttagacaagcctagatacttctgttgagtgcacatatgcatgcatccgcttcctctggtcttgtggacattcttgagtagacagcaattgatagggaaactgtcgaatgactagttgatgaaagataaccaaccaacctgatagggatccagaggcagcccacgtttggcagggcatgtgttc

SEQ ID NO: 829948 - DNA, 532 bp, Homo sapiens
ttggagttaagaagttgggaggataggagaaaggaccacctccacttaaaaagaaaccctactgcatttctaatttaatttactatatatctcattttaattttaattttattttcattctccccartagaatgcaagcttaattggggtggttcaatgctgtatctgtagtgcctagaacagtgctgggcacatattaagtcccttataaataattgttgaatgaataaatggaaggaagggagaaagaaaaaaagaaaggaagtaaaggaggaagaagaaagagacaaaggaagaaagaaaaagagaaagaaagaaggaaagacagaaaggtattcatatttgaacactgcagattagttgaagaaagagtcaagtttctctaaaggtgaggaaatgtgtgttctaggagatgactaaagacataaagaagtttaggataaagtgaaagctccaaaggcaacagtggaagagaggggaagggagaggaattagcagaaggatatttttgagggagttaatgagctaaaag

SEQ ID NO: 829949 - DNA, 584 bp, Homo sapiens
acaagaaaatcccataatctcagtgtcttaataaattaaaataacttatttataacaaaatgtctaatgcaaatagggctccttcatcttgtagttactctagaacatggggtctctatggtcacctatggcatgggaaaagggattgaggtgacattcagctctttgctcagcccaagaatgaaactcatcacatctgttttcagtccagtgaccaatactagtcatgtggccccagcataactacaggagaggctggagaatatatgggaacctcctcacattcaccaaatggaatctttggtgaattctaaagattcccggcatgtcccactatctccttttggggctgagaaaatgaaagaaaaaactgacaggccaatgtactgactgctctctcacctgggtctgatcccatctgaagctactttgggtggttatcacaatgtagtttatcatagtgctgtggaatatgaactatgaccatagccagccctatattytagaaccagcatctccatttgtagctatgggtgcttggacaaacacttcaatgttctccatctcagtttcctcatctgaaa

SEQ ID NO: 829950 - DNA, 566 bp, Homo sapiens
ttgacaaagacctggctcaagagatcagtgactggagctatccgtcaaagcagatcaggaagccaggtgaataggtaggtaccaggagacagtcagaaggcccaagtcaaagcaagacagagtgaggcactgagcagtatatgtagtagcagtgaaaatagcttgcaacggaggcccctcctgtcctggcctgggggccttttacatgcttcctgctgagccaggtgctgtgggtgaggctccacacctggccaatctcctgtttgctggcccagaagggatcctgagggagataagtgagtgaggctaaagaggggagcaaacccatctgtctcagtcagtttgggttgtataacaaagtaccatagattgctggcttatcaacaatttattcctcactgttctggaggctggaagtctgagatcacggtgccagcctggtcggtttctggtgagggccctcttccaggttgcagactactgacttctggttgcatcctcatgaggtggaaagagarctagccagctctctggcatcttcttatgaggacactaatcccattcct

SEQ ID NO: 829951 - DNA, 600 bp, Homo sapiens
ttatttttttcaaaagcatgcaatcccacccacagcctggcactgaggagccaggacagccactcattcaggaagggcctctaccagtttggatgacgaatattatctcccaatcatgacctgtagctctrtggcaagaggctgttaggacatgacatttcaaaacagaattgttctgaaataatttttacttggctacaaagaacaaatagcaagagtgatgccagtctggggtaggataggcagctgctgggcagatgaaatattttttgtgtaaggtagtgatggtctttgtggaaggttacagtttttgctttagcacagtgcctggtctctgtgtattgcacggcagtgtctgataaaggcaactttcttcttcatcctcacctgttctggcaggaatcactttgcctgtgtcaggcttttttttcaggggtcacctgattcagaaccgcaccccagtgtactggctaagaagatagactatcaagtaaggaggtgtgggttcaaatcctagccctgcccctaaataactgcgtgaaattgggcaagtggtttagcttgcttgtgtcagatttcctcatttgtaaaacagggatg

SEQ ID NO: 829952 - DNA, 626 bp, Homo sapiens
agcagccatgcagactggaatgaattaaacccagactgtcctgcctggtatggttcagaggctttytgtatgcccaatgtagccagcttgccatactgagcagagatttgcccaagaatgaattgtaggtacaaagttctttctagaaaacatattattgaaaaactttttttctgaattatattctgctcagcataacagatattattaaatattagttgaaatgagtgactgttctgtgtcaaagtataatggtcacaggagcaccagcagggaaatgacactgcactgagaaataacagttctcaccctttaacatgtaactactaacctttttggtaataaaatcatcataacaataatatttaatacaatttcagatttcttctggaatctcaaaattcagttgtgacttttggcttcagcctcaactttagccaaatatacatgtttaacaatttggccttttgccaacatctgatgaacatcgatgcaaaaatcctcaataaaatactggcaaaccgaattcagcagcacatcgaaaagcttatccaccacgatcaagttggcttcatccctgggacacaagcctggttaaacatacgcaaatcaataaatgtaatcca

SEQ ID NO: 829953 - DNA, 626 bp, Homo sapiens
agcagccatgcagactggaatgaattaaacccagactgtcctgcctggtatggttcagaggctttctgtatgcccaatgtagccagcttgccatactgagcagagatttgcccaagaatgaattgtaggtacaaagttctttctagaaaacatattattgaaaaactttttttctgaattatattctgctcagcataacagatattattaaatattagttgaaatgagtgactgttctgtgtcaaagtataatggtcacaggagcaccagcagggaaatgacactgcactgagaaataacagttctcaccctttaacatgtaactactaacctttttggtaataaaatcatcataacaataatatttaatacaatttcagatttcttctggaatctcaaaattcagttgtgacttttggcttcagcctcaactttagccaaatatacatgtttaacaatttggccttttgccaacatctgatgaacatcgatgcaaaaatcctcaataaaatactggcaaaccgaattcagcagcacatcgaaaagcttatccaccacgatcaagttggcttcatccctgggacacaagcctggttmaacatacgcaaatcaataaatgtaatcca

SEQ ID NO: 829954 - DNA, 602 bp, Homo sapiens
tccttggtgtggcttggaacttcaattctggctaccaggatacagaggtggaggaagagaaggctgaacaccacccccgtctcccaacacacaccctcgaggcaagaaagatatcaagttctcattttgttgcaagaaaactacattctccttttgataataagcaaaaaaatacttctacatttttcaaatagtacctggtcggaactgttccaaacccagagaaaaaagcaataaacactgaaatcccctggcggtctctgagttgaagatgtaggcaggaagtattccatatcttcaaggtttttagggagaagcaagaaaacggtagaggaagggtagaggaggcctcccaggaggcctgggagtgaagtgtacccatcctatgaaagctggaacctttaggaaacagaatcaggagaatgctgactttaaatttaaattaccttgctgaaaaggattggcccaacacaggacaagcagcagtctttggaatgaatgcrtcttttactgacctatgcctctctttcagaggtcacggctgtcttcaccctcttctttgcatgtatctcaagcctatgtaattaacaccaatattttta

SEQ ID NO: 829955 - DNA, 588 bp, Homo sapiens
caaatgaagtcagaagcctccagggttctcagatacatcagagagttctaggggcattgcttcctttgtggccagaactataatgtggggagggaaatgctgactttcattgcacagtagaaaatgtcagtcatatttccaagaatctctcaaaggggtcagcatgttcacttcaggatccttggcagtacgggtgacttcacatacagtaaaagatccagtaggctctggcatctaagagcttagaatccagacatggtgaagtttcccatgagccccagatatccacaaaattgcctgtggtcattaaacccacaggactgttaaaaaaaataaaatacagaagtatgcagaacaatgaaggaaggattttctaaaacaaaaaacacaatctttcattgtttcccctgtctttacaataaaaacacagttttggacctgtctggacaaggggactttccagtttccatgtgaggctggacattttgcattcratacaaattagttcctcaaaatcagaatcaattgtcataaaatgtagggaagtattttcccacggggcaagcatttgtggtaaaactggaaatg

SEQ ID NO: 829956 - DNA, 522 bp, Homo sapiens
ctattcgtagtactctgtgacagtttaattttyctattttgatgatggaaaagtaaaggtgacctcaaggcaccaagtggctaaagatgtccccctagggaaggcatgagcctttcaaataatttctttgcaacaaattaacattgagacttcctgtgtataaaggaattgaatgcaaaaatacataggtaaacacagtttttgtttttaaaagtttataatttagtgaagagaaggggacgtataaaaatgattaaaattaagggttgaataaagggttgacataggatagaaaagggctaattaaagtttcaggaattttgttataggagcatggtagaagaggtgattaatctgaaagagggtcttactagagatttcacattttcatagaaagggtgacatttgggaagctgccatgctttcagttattaaaggctcagattctgcagtcattcaacccaggttctaatccctgctctgccaattcctagtcaggtaacagggcaaattatttaatcc

SEQ ID NO: 829957 - DNA, 522 bp, Homo sapiens
ctattcgtagtactctgtgacagtttaattttcctattttgatgatggaaaagtaaaggtgacctcaaggcaccaagtggctaaagatgtccccctagggaaggcatgagcctttcaaataatttctttgcaacaaattaacattgagacttcctgtgtataaaggaattgaatgcaaaaatacataggtaaacacagtttttgtttttaaaagtttataatttagtgaagagaaggggacgtataaaaatgattaaaattaagggttgaataaagggttgacataggatagaaaagggctaattaaagtttcaggaattttgttataggagcatggtagaagaggtgattaatctgaaagagggtcttactagagatttcacattttcatagaaagggtgacatttgggaagctgccrtgctttcagttattaaaggctcagattctgcagtcattcaacccaggttctaatccctgctctgccaattcctagtcaggtaacagggcaaattatttaatcc

SEQ ID NO: 829958 - DNA, 522 bp, Homo sapiens
ctattcgtagtactctgtgacagtttaattttcctattttgatgatggaaaagtaaaggtgacctcaaggcaccaagtggctaaagatgtccccctagggaaggcatgagcctttcaaataatttctttgcaacaaattaacattgagacttcctgtgtataaaggaattgaatgcaaaaatacataggtaaacacagtttttgtttttaaaagtttataatttagtgaagagaaggggacgtataaaaatgattaaaattaagggttgaataaagggttgacataggatagaaaagggctaattaaagtttcaggaattttgttataggagcatggtagaagaggtgattaatctgaaagagggtcttactagagatttcacattttcatagaaagggtgacatttgggaagctgccatgctttcagttattaaaggctcagattctgcagtcattcaaccyaggttctaatccctgctctgccaattcctagtcaggtaacagggcaaattatttaatcc

SEQ ID NO: 829959 - DNA, 658 bp, Homo sapiens
cttatctgtggcctggtgatgctgctgtgtgcccagaagccagtcatatggatgtcttgacctgtccagcacacacctcagtagtaggagatatgggtctttggaatgctttatgtgtgatgaggatgaaacagttaagtgctactttctcatcctcggccttatgacattagttagttgtgtaagattttgcagggaggtattccctcctctaccctttcgtcacaagcccctctcattcctctgaaaaggttccatactccagtccctaccctcaaagaaagattttactaagcaaaagtatctatggctctctctgttctccttgctttagctagcacagctaaactgggatctcaccagtctgacagggcaacctccaagattcacaacccaggaaaagtactgctttgcgtaagtttaatcaagaccagagcagagacaggacacaaagtcaaaagaactcagtcagctctgtccccttggtgctaaagaagcaactagaataattattcttttacagtattttgccatattttttgtctttttaagatttgccatcacccatctgtagatggtggcattttgggtagtttttatttttatcactatattttactgcatgtktacattttctttcatgtgcatgtgtgttgtg

SEQ ID NO: 829960 - DNA, 581 bp, Homo sapiens
tcaagataagctgaggagcaaggtcaacacattgcatcagacctcaaatgaagactggaacatatcaccctaaccgcatgggactaggatggggtgagcaytggggcaggagcagtggtgtgtgatggaggggtggaggaatctttctccactccaagatgggatcagaaatgtaggaggaagccaaaaagagcaagctcaccactcttggcatattttttccaccttgacattgatagctagacctcactcctggttgggaaattttctaagctaccaagaataggaaaaaaatcaaccataactaaagccctttgagatattcttccttgtcttcatgaacaggacaatattaaaacattacagaaagtctggaaaacaaagggaaaaaaaagctgatagccctgcccttcaaatatacaactcattgcatttttagtaatgccccctttcagtttttaatctatttgcatatataatatattagctagctaaaattggaacataaacaatatatatcttgcttattcatcttacaacttaatacagaaattttctgttactttattactttttataat

SEQ ID NO: 829961 - DNA, 403 bp, Homo sapiens
attctggagatctatgtgcgagacaaacatacagaccctcgaaacagtgttctggaatcctaggtaagggaaaaacatttagacccacatagcagtcttctggaatcgtacgtgaggaacaaacattccgaacccaacaacagtgttctggaatcttaagtgagggacaaacattcagaccacagcaggagtgttctggaatcccatgtgtgggagaataattgagacccttgtagcagtgttctcgaatcctatctgagggaaaaaaattcagaccccagtagcagtgttatggaatcctcwgtgagggagaaacactcagaacccagcagcagtgttctggaatcctatgtgttggacaatcattcagaccacagctggggtgttctggatccctaggtgt

SEQ ID NO: 829962 - DNA, 635 bp, Homo sapiens
agcctgggtcaaatggtatttctagttctagatccctgaggaatcaccacactgtcttccacaatcgttgaactactttacaatcccactaacagtgtaaaagtgttcctgtttytccatatactctctagcatctgttgtttcctgacttttaaatgatcgccattctaactagtgtgagatgatatctcattgtgattttgatttgcatttttctgatggcgagtgacgatgaccatttttcatgtgtctgttggctgcataaatgtcttcttttgagaagtgtctgttcatatccttcgcccacttgttgatggggttttttcttgtacatttgtttgagttaattgtagattttggatattatccctttgtcagatgactgcaaaaattttctcccattctgtaggttgcctgttcactggtatgtcttttgcttcacagaagctctttagtttaattatatcccatttgtcaattttggcttttgttggcattgcttttgatgtttaagacatgaagtctttgcccatgcctatgtcctgaatggtattgcctaggttttcttctagggttttcatggttttaggtctaacatttaaatctttaatacgtcttgaattaatttttgtata

SEQ ID NO: 829963 - DNA, 635 bp, Homo sapiens
agcctgggtcaaatggtatttctagttctagatccctgaggaatcaccacactgtcttccacaatcgttgaactactttacaatcccactaacagtgtaaaagtgttcctgtttctccatatactctctagcatctgttgtttcctgacttttaaatgatcgccattctaactagtgtgagatgatatctcattgtgattttgatttgcatttttctgatggcgagtgacgatgaccatttttcatgtgtctgttggctgcataaatgtcttcttttgagaagtgtctgttcatatccttcgcccacttgttgatggggttttttcttgtacatttgtttgagttaattgtagattttggatattatccctttgtcagatgactgcaaaaattttctcccattctgtaggttgcctgttcactggtatgtcttttgcttcacagaagctctttagtttaattatatcccatttgtcaattttggcttttgttggcattgcttttgatgtttaagacatgaagtctttgcccatgcctatgtcctgaatggtattgcctaggttttcttctagggttttcatggttttaggtctaacatttaaatctttaatacrtcttgaattaatttttgtata

SEQ ID NO: 829964 - DNA, 507 bp, Homo sapiens
aattattcagatcacagctggggtgttctggaatcctacgtgtgggacaaactttcagacccttgtagcattgtactggaatcctatgtgaggaaaatacattcagaacacagcaggagtgttctggagtcctacgtgcaggacaaacattcagacccttgtagcagtgttctgaaatcctatgtgagggataaaaatttagacccacgtctcagtgttctggagtcatacgtgagggacaaacagacagaactcaacagcagtgttctggaatcctaagtgaaggacaaacattgagaccacagtaggagtgttctggaatcctatgtgagggagaataattaagaccctcatagcagtgtactggaatcctatgtgaggaacaaatattcacacccgagttgcagtgttctggaatactttttgagggacaaacattcacactakagaaggaatgttttggaatcatatgtgagggagaaatattcagaccacagcaggattgtt

SEQ ID NO: 829965 - DNA, 616 bp, Homo sapiens
ccgataaaacctgatatgtgggacttgatactagcactgcagatcaagtagggaaagtgactgatattcaatgatggtgttagaacatatgatttctcataagaaaaaatataaacatatataccatctaggattatgtaagcacactttatgatgttcacaaaacaaaaatgttgcttagtaatgcatgtctcagaacatacacatgtcattaagccatgcatgagtgtactttatatcatctctggaacacttcggtcaatcatgaaacatgaccgagacaaatctcaatcattttaagaggtttatttgccaacattaaggatgcacacccaggagacaagtctatgcctttctttaaaaatgattatgagggctccaaatttaaaggggaaagggggaaacactgagaaatacagttttcatgtaagactggggtagggggaaaacattcattgatatggtttggctctgtgtccccacccaaatttcaccataaattgtaataatccccatgtgtcaagggtggggccrggtggaagtaattggatcatcaaagcagtttcctctatgctgttctcatgataatgagtcacatgagatctgatggttttgt

SEQ ID NO: 829966 - DNA, 649 bp, Homo sapiens
cagtaaatgttatttaacgacaactaataaaatgaaattatggtaatatattttgtaatgaactcaccataagatgaggcaaagtaagttttagtactaaacctggaagttgagcasatttcaatggctgggtaggtgaatgaatcctatggggaggcaagagacactaacatgattgtggtagagaatgttaataagaggtcagatatataaaatttttattgcactttgacaattggagctgcccctcctgattttcatatatgttatattcatctcacattcaaaaggcaaattaaagaatatattgctaaacttctattctagctcctccatacccaaacatgaagtgactatttcattatccattggtatcatcattggtatgattttggaagaacatgaaatatgttccctgaaatgctttctttttttcctacttgtgcctcctttagcacattgtttgagattttcggaagagtcagttgtaatttttaaaaatagaaaagagagagagaggatgttaaatcactgtatcctctgaaagtcataagccatcgaattgtaaaactctaacacattcaggagtgtatgtagtttcagagagtgcacttctgtaggtttaaattagagctgtgagttattgggg

SEQ ID NO: 829967 - DNA, 621 bp, Homo sapiens
attttaacttcaagagatattagagtttcaattatatacaattactcattgtatttttgaaacgtgtgattattctcattcatatatgttggttatagatatctagtagaaaatctcctaacattcacttttttattttttagtgaagtagcctgaaagatgtaggcttggctgagaatgctctataaaaaatgaatagatttggggctagaagtctgatgtgggctgtaaagagattaccagaaatggaaacaggataaatcagatggaccaacacattatttgaggaagctgctatgtgaactcccacaaaaaatatgtcacgctgactttctctaaagaagtaagctgggctttgtggatgacagttgtggtgggtggagagaggaaacaattttcaaaatattacatattctagcaataaaattgttctgcaagtgttaaggaatccttctgggtatgttaatgtgacttgactataaaaaattatkgagcataggagcacatgcaaacacactcacatagtccttcctttagtgttatttccttagaaagatgcacgaattagaatttctgaaaacatatattctctatatctgcagtgccatatgagaaaacttt

SEQ ID NO: 829968 - DNA, 615 bp, Homo sapiens
aaagctgcctaactagccagtcctactccatgaaagcaatraaagcttgtcgtaagaactgaagtttcgtgggagtttgttacataggattactctggtggtaaacaaccatttaacacattaaatttgaaatttattctgaaaatattttttcatccagaaagcatatatccacctcaaataaatgttgttttgagaatagaaaggcagtctttgtttttttaatagagaataatggcctacaattattaacaaacaaagacatgtaaagtgaaaactaaataacgaaattaatatttcatttatagtagagtcagttgttacctttctatccttttaggcacttttacaagcacttggtttcaaaattactttgttttttctttaacattgagcagccattatattctgatatttatttactctgcctgtgtatcttatacttcagagtttgttcctttttttttttttcttttctttttttttttagacgaagtttcactcttacagcccaggctggagtgcaatggcacgatctcggctcactgcaaccttcacctcctgggttcatgcaattcttctgcctcagcctcccgagtagctgagattacaggc

SEQ ID NO: 829969 - DNA, 633 bp, Homo sapiens
aaaataagtttggacaaaaattaacaagagattccatcgtggtcacttaaactgtctaagggaatgcaaaacaaagaaaagagaaccattgagctgttgtgttctctctttttgaaatggtgggaagactcyattaataattacaattcaacatgtaccatttttgactgaaattcaatgcaattcttggcctgtaacttagaaaacttctcataatagattctctataatcatagcattgttacaatctgttaaaatgttcaataagacagttgcacttagactataagcagcatacaatttgcatttctgctctgtgaaagaatggctaactggtggaaattcttctggttaaatatggctttgaataataaacttactcttttttaaaagaagagtgctggatggtatgaaatgaagaatggcttttaaacctagtttcattaatgcatcttaagtgtattattcctgtgctggtgagacatattcttcatgtagcacacagagaagctacattcatcatatatttaaaggagacacatcaaactcaaacaagcagagtatgttattatgcaaaagaacagctataaatatacatgtcaaggaagaaatttaaggagtaaagacaagcac

SEQ ID NO: 829970 - DNA, 604 bp, Homo sapiens
ggcggtaatgtcataagattttaggttttaaaccaggagaatatcttgcagaactgttgcttattccctgtaaattgcacccttctccacataaggagaaatgagtttgyggatttggctcaactgttgcttattccctgtaaattgccctcttctctatgtaagaagaagcgaggaggtcgggaatttgggagtacaactaggagagagatttatctatcacaacccatagcatctaatagacccacctgtacagtacaaattgaaggcttaaggattgtttttttactatgttattgcacgagagggagaggcttcgatttgttttctctgtgccttctgttaatcagaaagagcctgcttctcattatcaatggaaagttttaccccgtggcaattaaccaaagagggagaggctgagctgtagcttgtagaacaaatgcttctgcaatggcatgcctcccggcttacagccacctttgcttctgttttggtagatttactaacttgggggaccagggtatgcttgtttttgcaggaaatgaacaaaaagtgtgggtgcccccaaggtgtgtactaccatggaatgggagattggagggac

SEQ ID NO: 829971 - DNA, 604 bp, Homo sapiens
ggcggtaatgtcataagattttaggttttaaaccaggagaatatcttgcagaactgttgcttattccctgtaaattgcacccttctccacataaggagaaatgagtttgcggatttggctcaactgttgcttattccctgtaaattgccctcttctctatgtaagaagaagcgaggaggtcgggaatttgggagtacaactaggagagagatttatctatcacaacccatagcatctaatagacccacctgtacagtacaaattgaaggcttaaggattgtttttttactatgttattgcacgagagggagaggcttcgatttgttttctctgtgccttctgttaatcagaaagagcctgcttctcattatcaatggaaagttttaccccgtggcaattaaccaaagagggagaggctgagctgtagcttgtagaacaaatgcttctgcaatggcatgcctcccggcttasagccacctttgcttctgttttggtagatttactaacttgggggaccagggtatgcttgtttttgcaggaaatgaacaaaaagtgtgggtgcccccaaggtgtgtactaccatggaatgggagattggagggac

SEQ ID NO: 829972 - DNA, 692 bp, Homo sapiens
aaaattctctcccattttgtaggttgcgcatttactckgttggtagtttattttgttgtgcagaagttctttagtttaattagatgccatttgttttgttttgttttgttttttgtttgttttttgagatggagtctcgctctgtcacccaggctggagtgcagtggtgcgatctcggctcactgcaagctccacctccctggttcacaccactatcctgcctcagcctcccgaatagctgggactagaggcgcccaccaccacatccggctaatttttttttttgtattttttagtagagatggggtttcaccctgttagcaaggatggtctcaatctcctgaacttgtgatccacccgcctcagcctcccaaagtgctgagattacaggcgtgagccaccatgcccggccagatcccatttgttaatttttgcttttgttgcaattgcttttaatgtcttcatcatgaaatttttgttcgtgtctacatcctgaatggtattgtctaggttgtcttccaggctttttatacttttgggtttcacattaaagtctttaatccatcttgggttaatttttatatatggtgtaacgaaggggttcagttttaatcttctgcatatggctaaccagttatccccataccatttattacataaaaaatcctttccccattgcttgttttttgtca

SEQ ID NO: 829973 - DNA, 606 bp, Homo sapiens
gagtacataaatatcactaatcataaaataaaaaaataataaattagacctcatcaaaattaaaaatgtccatgcttctaaaaaaagtgttaagaaaaggaaaattcaagccacaaacatacacacgcacatataacacacatccagaaaacacaaaaaatcatacgagttaataaaagtctaatttttaaaattgggaacatactataataaaaaatacataaaacacatatttaaaagtgttcagcatctttaatcatcaggaaaatgcaaattaaagctacaatgataatattgtttcccacccactagtatagatagctaaattttaaaaagctgaaaacaccaaatgttggtaaggatatggagacactgaaactcctgtaacattgctggtggaattataaaatggtaccaatattttggaaaactgcttggcaatttctaataaagttaaacatatgcgtactgtattagggttctccagagggacagaactaawaggatatatgtatatatgaaagggagtctattagggagaattggcttacttgatcacaaggtgaagtcccatgataggccgtctgcaagctgaggaagaaagaa

SEQ ID NO: 829974 - DNA, 612 bp, Homo sapiens
aatatttataacaaccttatcctaatagccccaaactggaaacaacccaaatgtccatcaacagataatgataaacaaaatgtggtaatatccatacaataaaaaactactggccaattaaaaggagtaaaccgatgatgcacactcacacaacttagtcgaatatttaaaaagtgctaacataaaaactacataatttatgatgctatgtgaagttctagaaaaggaaaactatagtgacaacaagcagatcaatggtccctgaggttagaggtggaaatggagagtaactgcaaggagacatgagaaaacattctggagtgataacagtgttctaaatcttgaacatggtggagctgcaatactatatacttttatcaaaactcatagaacttaaaatgaatacattctattgtatgtatatcatactttaaatctgttcaaaaatagtaccatatttaaaaatatttggaattaaagatgcttttattttccagtaaacatagcaacatatacaagttattttattctgatacaaatctatcatatagaacatgtaycaagcaatgtgctgcagtgggacaggaacagattttattccatccagacaga

SEQ ID NO: 829975 - DNA, 639 bp, Homo sapiens
ggtaaagagaacttgtgacattggtatcacttattattgatattatttggatatcttaaaaacaatagctagtaccccaccttttttacatgtacacaaaatcctttacatgaaggtttaacaaaccttttctggtaaacagacacatagtaaatatttttactttgctgatcatgcaatatctactacaactattataattcaggaattttagagaatcataagaaagaaatgaatgagcagtgtgttccaaaatctttatttctaaacacatatgggccaggcacagtggctcatgcctgtaatcccagcactttgggaggccaaggtgggcagatcacctgaggtggggagttagagaccagcctggcaaatatggtaaaacccagtctctaataaaaatacgaaaaaaaaaattacccaggcttcgtggcgggcacctgtaatctcagctgcctgggagactgaggtgggaaaatagcttgaatccgggaggtggaggtctcagtgagctgagatcgcgccactgcactccagcctgggyatgacagagggagactccatctcaaaaaaaaaaaaaaaaagaagaagaaaagaaaacaaaaaacaggctgggagcagtggctcacacctttaatc

SEQ ID NO: 829976 - DNA, 578 bp, Homo sapiens
catatatatatacataaagcatatgaaaaacatattcaccaaccaattcaattcactgatgctaagacataacattgaaatactgayattcattgtccatcacatttatctctaaatggagactcagatatattcattagctcttctcagacacaaaatccatatcaaaatgagtcagattagatgaagaaataacattgtctaataagtcctagataatccattgtgaagacctattgttaaataaactgcaaattatttattgcttacatttcctatgcttctgatgaatggcataaagagagttttacctcagtggctagatttatctaggcttatttctggcattcagcaaaggcatataagtatgtctgtagttaatataattctcattatgagattactgaaaacattataaaatcataaagaactggaacttttagcaaagcagcaaataataaaagtctaactaagaaactaaaaagtatatattttgtttacctattttgaagctgtttacctgagaaaagtatgcccaaaaatatttgaatactatgctaatggaagcattcagcctc

SEQ ID NO: 829977 - DNA, 606 bp, Homo sapiens
aaatcaaatgatcatacatgtaatacgtcctttaaagacgtaattayacaaattaacaattattagcaatcatggctttgttttaaaataaatatttatctctcagctttttgaaaatttttaaaaatatatttttagattttgaagaaaatactaaaaatgtagaaaatttaaatgagcttattaaaatataaattttggctagttaacaatgtaaatcaatcatttacaaacacttgttcaagtatcactttctatgttaaacttattctctaatttgtcagtttgcattctaaactacagtttgatttgaaatatttaattcatgcttaaataaaacagacattatagatataagtacatctcttaaatcagtgtcagaaatataattattaatagttacgtatctaaattaatccttatttttctgtagaacctaatttgtaatgaaagtctttcttcagactggtatgctctaatgtttctgttacatttctcagagccatcacagctagataattccctatgtatcagtgaatgacaataatcctgtgttgaatttcaatatcttcagttctaagtaaatcagtggagagtaaagatcta

SEQ ID NO: 829978 - DNA, 601 bp, Homo sapiens
aggatccctggaactgggaagaccaaggttgcagtgagctacaatcgcaccactgcattccagccaaggtgacaaagtaagaccctgtctcaaaacaaaacaaaacaaaggaaagaaaagaaaaaaggggaaaaaaaactgtcagccaaaaacattatacacagcaaagctattctacagaaatgaagcaaaaataaaagttttccagacaacaaaaagctgagagatttcacaccactagccaggccttacaagaaatgcttacagtgtgattcaagcagaagtgaaaaaataataatagttgccataaaaacaaaagagtatgaaactccctggtagaggtgaacatataatcaaattcagataactccattactgaatggtagtatattaatcttccagatctctattatgaagagtaaacctcagagtggtcaataataactacagttacaataaattgttaagaaacacacaatatataatgatgtaatatagactacaacaaaataacacatcatcatttcttacacggtgaagctaaacmttgggtatacaatgaaataaagatggcaaaaatagacactggggactactacag

SEQ ID NO: 829979 - DNA, 519 bp, Homo sapiens
tcttaggagtaattttaattatatgtgttctgtgatctgctaaaataatatggttaatttattaaggatatatgagttattttaaggatttcataatgtctagctctagattataataattctacactacttaaaaaatatatccactgtaactcacttgagtctccaactttataaaattcagtctttaacctgatattcaaggttgattaacatttcatctcaccttcattctccaaacacagtttaaatattctgttccttaaatctggcagtgaaaaaaactacgaatattaaaaaaatactgagcttgctatatatttttaattaatagaggttatgattatcatagtagttataagtgtgatccatggtatctaatctttagcttcatgtgtgatataatcttaccaatccataaataagtaatttattcagaagttacttataagaaatctayaagatctttatctcctacctgactcccacctaccaaacttgaattttctgctttaagtc

SEQ ID NO: 829980 - DNA, 593 bp, Homo sapiens
gtccctttttgtagatagctttggaagatgatgatacctccacagttgggmccatgttgttaaaaacatccttcgtttgactatttatacatttggttctaaagaaggtgttatccttagattcttggatctaaagaatatatatatattttttttttgtttgtttgtttttttgagaaggaatctcactctgtcacccaggctagagtgcagtttgtgatctcagctcactgcaacctccgcctcctgggttccagtgattctcctgcctcagcctcctgagtagctgggactgcatgtgcccgccaccacgcctggctaatttctgtatttttggtagagatggggcttcacgatgttggccaggctggtctcgaactcctgacctcaagtgataacacccgtctcggcctcccgaagttctgagattgcaggcatgagccaccgtgcccagcaagagtatattatcttaagattcttgcctcgttactattcttaaaattgctccaaaacttgcttaagtagtcagctttaaattatgtaaatatagacaacaaaactcttaatcctaaaggtgcttttaaaattcatgc

SEQ ID NO: 829981 - DNA, 638 bp, Homo sapiens
tcatttccctttctccaatgcacagttaccctggtaaaaggccagaggtctccttggggaaggatgggagaaagattcactgcataaattgtcaataatatactggggtccttcttcaaggggacccagcctccctttcattcaaagggttctgggtctgtaaactgactcaagtctggaaattgaggggccgtgattctctgtttttataattcaaattagtctttagtccattcaacctagaagttttctctttatataaattaagtaggaatggaatagaattcctatcaatttatattctaggaacactgtgattaattagccaatgccagagctctacatgagtcagactattctgactgtggctttgtctctgctgtccactgcagtaactacactcaccttgcctttcatggcgagtgctaccacctggcctctgccacctcaggatcaaattattcccattgtattttaagtttgtagttgagtgactatggttccctttgttagatctggcatacggagaagagcagttacagggctcttcaaagttgcagrtgccaccaacacaaatctattttacaaggcattggtcaagggtatatcttctggatcctaccagctgggatgagtag

SEQ ID NO: 829982 - DNA, 510 bp, Homo sapiens
agaaaagccccttttgtgaataggaaagctctgccttcaacagttaggagtaaaatgtcctttgtagccaaattttagttccaatactgtcccatctacagaagaaattgccattaggcctctacattcatttcaggcacctattctgtctcccaattaaaatagtacttgattaggtaaggggattttaagtttagaatgtaaccggaaccattttccttaagggtgaatgttttagcacggggccgtaatagcaggcaactagcacattccctccgttaaagaagccttgctcaaaagtgactattacagtctttcagagatccattttttcagagccaggcagatcacacaagttttggaaatcaaaatggattcacaggaggatarctaaggctgtgtgggtaaagcgtggttaaatcccattacttagttcatccacttccatggcttggagggccacacttgcaaccatggccaggacatttaacatggtgccaggactcagga

SEQ ID NO: 829983 - DNA, 612 bp, Homo sapiens
ccagatcataacctgtttttttttwaataatccaatgtttgtcgtaatttgttgccagagcaaaagggaattggtacaggttctggcactgtgagtggggtactgctgtaacaaatatttatatacgtagacaaggctttgaaactgggtaatgggctaggagaattctaaggaacatgatagaaaaactaggttgcttggagcataatgtggattaaaggcactgctggtgagggctcagagtgaagtgaggagtatggtagagaaaacctgtattagcccagaaaataataaaatcatcataagccatctgttggtaaaaatatgaatattaaaagcactgctggtgaagtctgagaagaaaataaagaacatgttatttgaaccttgctatattgtggcagaaaaaaattagtcgatttatttcctacagtgatgtggaaagcagaacttgtagtggatgagcatgtatatttagttcaggagatttccaggcaaaacgttgacagtccaacccagtttctctttgctgcaaatatagtaaaatgtgagaggaaagagacagactgtgagaagaactgttaagcacaagaaagttggacttaatgattt

SEQ ID NO: 829984 - DNA, 612 bp, Homo sapiens
ccagatcataacctgttttttttttaataatccaatgtttgtcgtaatttgttgccagagcaaaagggaattggtacaggttctggcactgtgagtggggtactgctgtaacaaatatttawatacgtagacaaggctttgaaactgggtaatgggctaggagaattctaaggaacatgatagaaaaactaggttgcttggagcataatgtggattaaaggcactgctggtgagggctcagagtgaagtgaggagtatggtagagaaaacctgtattagcccagaaaataataaaatcatcataagccatctgttggtaaaaatatgaatattaaaagcactgctggtgaagtctgagaagaaaataaagaacatgttatttgaaccttgctatattgtggcagaaaaaaattagtcgatttatttcctacagtgatgtggaaagcagaacttgtagtggatgagcatgtatatttagttcaggagatttccaggcaaaacgttgacagtccaacccagtttctctttgctgcaaatatagtaaaatgtgagaggaaagagacagactgtgagaagaactgttaagcacaagaaagttggacttaatgattt

SEQ ID NO: 829985 - DNA, 537 bp, Homo sapiens
aaaggcatattgattacctgatgctgaggtttgaagtatggttgaacctgtcacccagtgagcataataccctataggtagttttccagcccttgctcccctttctctcttccccaactagtagtccccaatgtatactgctgctatctttatgtccatgtacatctaatggttagctctttcttataagtgagaacatgcagtattttgttttctatttctgtgttagttcgctaaggataatggcctccagctgtatccatgttgctgcaaagacatgattttgtccttttatggctgcatagtattccctggtgtatatatgccacattttttggacattatttggcaccaatccaccatttatgtgcacctggattgattccatgtctttcctaatataaataaagctgtggtgagaatatgggtgcatgtgtctttttggtagaataatttattttcctttgagtataccctcagtaatgggattattgggttaaatggtagtwcaactgagctatttgagaaatctccaaa

SEQ ID NO: 829986 - DNA, 593 bp, Homo sapiens
aagatagcaaggtctgtggggttagagcccagagcaagatggagagggtatctatgcagggaagggggcagcagtggcaatggaagactggttacatggaggggattgatcaaataagtatrtatattaagaataattgtagtcaggattattactgtagttgaaaggagttaaaaatttggaaagagagaaaactaggacgaaccctgggatgtcatcttggaattgggtatatcagtatgaactcatgcatttcaacaaacacatagatagacataaaaataaatttagctttgtccaccaaaatggtggacagcaacaccaactagcaaatctactcctcagatctttacttctaactaccttccttcaacaaaaggagccttcgagaagtggttaacttcatgtctggggcagggaaaatacagaatgttatgccagaagatttaagaacaaacatattgttggagtagattaaaaaaaaaataggcctttcttttgtataaacagcattaaatatacacagtgcaaaatgttttcagggaataatgagcaaatatatttcctaatcaggtaatcaagacattttatcc

SEQ ID NO: 829987 - DNA, 618 bp, Homo sapiens
ctttgcaagggtataaaatatttaaaatatgagaaaacaatgctattactgttgaatggtaattttacctttagtgtttctagaaaaaagttttattgcaatatagcataacaacattctcaggaaataggaatcaatgatattctgcccagaaaacttacagtacttcactgtttgttcttctcaagcctatattcttgttactagtcttagaatgtcatataatgtgctttttacctttggtagttcagttctaatatgcagccctgcaagctttagtggaaatgttccagttagtgaagaagtctaacttgtaacatcttaatcactgtaatttaatacagttttaactgtgctctccattccctaatgtctcttgtctgtagaagacatctgtctttttatctgatcatgtttacttttaataaccctcaactcacaaagggctacatttctcggttcatgttccttgaagtagagaatttctgcattagaaaacwctgaatcataaatacagagaaaacaaaaacacaaagattactgaatggcaacattttatggaggtagtatatttgtaattgaagactctttctcttgatactcaatttctattgtgtt

SEQ ID NO: 829988 - DNA, 237 bp, Homo sapiens
ccctaccaccaaaaatcatctatccactctaagagggagtcaagagtggcggtttgggkatagcaccagaagatatcagctgtgatgtcttggaggaacaatgtaaaccggcagtgtaaacaagagcaggtcatttatgagtagttgagaatggtgaataggagtatgactagacagaatatagtaggaatgacaactttttggggcacagtctaagtagtgggggtgactgtgtaa

SEQ ID NO: 829989 - DNA, 632 bp, Homo sapiens
gtttggatccaccatattgaaaaactgagaataagtagagaactggaaagtttagtcaaaggtgactataccctgcttctgatatgagaaattcccacttatatgcaaaatggatgctgaggcagcataaaattataacattttactacacatatatatcattcttgctttctctccttatttaactttacccctagttaaacgacgtgagaaatttgggtactgcagtccaccattctttgtttaatttttgtacacatgtatggtggtttcacaattgttaacccatagtccataggaaacactttcatcaaataaaatacagtgcttatgtacatttcttttttcctttagtcttgaagactctacttatttccaaagttacttagctcagtacctttttctttcatcccatttcaatgagattgttttaatcagttgtaataaagttatattcttttgtcacactgcattatctcctgggattcctcatttcctcaatgcttcttaaaaatttgtatacattaaggtgtactctttgtgctgttaatttctgtggattttgacaaattcatartgttgcatatccgttattagagtatcagacaggatagtttcacagctctaaaaaa

SEQ ID NO: 829990 - DNA, 597 bp, Homo sapiens
tgattgttttatgtttcaagtttgctaggctgtaatacccagatatttaatcaaacactaatatggatgctgayttgaggatatttagtaaatttgattaacatctacaatcaaattaattcaagaaaaatgagattaccctcaatgatgtagatgggactcatccaatacactgaaggtctcaagagtaaacactggtttctcagagaagaaaaatattttgctttaagactgcccatgctgagttttcagccagctgacctgccctacagattttggactcaagactgtggcattaacccctgcctaatttcctagcctgctgatgtgatctataaattttggacttggcagctaccacattgcatgagcactggttttgagtaaatgtcatatatatatacacacacacacacacacacacacacacactcatatacacatgattatgtgtacatataaatatatattagacaacatatgtgatctgtttatagtctatataaactataattatatatatataatatatgtcatatcatacatataaaaatctgtttttcttgagatttctgacatatatagctacaaattctg

SEQ ID NO: 829991 - DNA, 504 bp, Homo sapiens
ggaacttaaacaagatatttaagtttcttgattcttagtttattcatctaagawtatggtcaaattttattaggcaaaaattttttttttttttttttttttttttgagacggagtctcgctctgtcgcccaggccggactgcggactgcagtggcgcaatctcggctcactgcaagctccgcttcccgggttcacgccattctcctgcctcagcctcccgagtagctgggactacaggcgcccgccaccgcgcccggctaattttttttgtattttttttttagtagagacggggtttcaccttgttagccaggatggtctcgatctcctgacctcatgatccacccgcctcggcctcccaaagtgctgggattacaggtgtgagccaccgcgcccggcctaggcaatatttaataggcaatgttacttacagtgtgttccacaggctacctataccagaggaatctggagaggtttgttaaaaatagagatcctttaaatcc

SEQ ID NO: 829992 - DNA, 621 bp, Homo sapiens
actactaccactacagactgaagagccctgcttatggcactggctggcaaagagagataggcatgcatgytccctggccagactgaaggcatggaggctcttactttcccagcaacgactcaagaggctggggtgacacaactcagaagtgcaggggagttaatgtccaaggaatgaattggtcagtagaacaaaagtgaaaggcattgagtagatttatctcccttcttcatccttccctaccatgtaaactgttctgagacatggaaattcatagatgctccaggaaaatgccacaccagatgcaggagccagctgtccttgttacgcaacttgggccagcctgggacatgcccccctcatatgtgcacaccttccatctctgcctcatgcccttttctccctcttttctgcttccctgatattgcaccaccccgtgaagtattagcacacagtttttttttctccgattctgttgtctagggaaactggactatgacataccccaaatttcttagcattccttttagtgcctggtctctatgctgttttcttgcctggtgcccatgtgccccaccactaccctcaaaaaaattacagccatccttcaagatatattat

SEQ ID NO: 829993 - DNA, 614 bp, Homo sapiens
aaggatcctgacaagagtacagacattagtaatcacttcactttaccttaaaggcattatgaaaacacaaccaccacaagaataacaatacatccatccaaggaagacctgtgctcccttgaaaaggaccattataatatctcacactcttaagatggcttttccttttcaaagtatttgaatgtcttatccttctgaaataggtcgaaactgaacacttgtaatccagagctgatgctggtgtgtgctctaggacacaggtctgcaaattttctctctaaagggccagatagtaaatatttcagagtttatgagccaacaggcagaactgagcatatgaagaagctagacaggaccatttaaaaatgtagatatttaaaaatgttaaaaccattcttagcttgcatggtgtacaaaaccgggcagcagattggatgtggcccatggcttgttgtttgttgacccctgttctaggacataaaaagtcaaaaggaatcattctctgacttccaagtgtttacagatctttatggtagatgataccttctggggtgsacatctgctattttgtctgaccagcatctgttccctgtttcagtgaaagccaaattttt

SEQ ID NO: 829994 - DNA, 499 bp, Homo sapiens
acaaagttaggagccaaaaggcccagatggtatcacagctgtgtccgttaccacctatgtaacctcaggcaagacgcctcacccgtgtctcaatccttaatgagaaagtaacaacacctgtkaagagtccatttgcaaattaaattaggcttaacgatgttgactgctaaaaacagtggctggcacatgccagccagtgttagctcttttcctgggaatggctgctgttattatgatcactattttagtgaaagcacacagagccttggatgctccatcagagcagacagtcttgactcagaacactctgcgtcaaacccagtttcctctggtgacttgcggccacaataggcaggcggtctggggaggaagctcagattaaatccacatcccactatggactgagcaatgctggaggaggtgtcatgtggctgggacaggcgacagggcccaggggttagtagcaggcgttaggatcccctgacatgcactagcagga

SEQ ID NO: 829995 - DNA, 567 bp, Homo sapiens
ccttgatttcatggaaacagaaaattcaggatccattttcataagtaagcataaaaaggatttttgaaataaaagaartttatgagtagcaacctatttaagaaaaatgcttataataacagtgactaacaaaatatttagcaaagaggatagaatgctgtcatagcaaaaacatagcaacaaaaggcaggtactctttgggttagtggcagtaagttacttaatttataaatttcttagatgacataggtaagttcaaaagagggtaatattcttagccttctgtgtagctagtttatttttcttataaaattagatgctttgtcatactcctctaataatgaatgcacatatatttttagattgatataaccagattcaaagaacagaagtgattatgtcagatttatattgttctttgcaatgtggtgttgacatgttaatgattcctatcaggtgctagatgtattttttctctaatacttctattcttcacatattctcaagtgggtgttactagaataaacttgcactggcgccctagatcctctgattatgttgtcatca

SEQ ID NO: 829996 - DNA, 521 bp, Homo sapiens
gtttggtgaaatccaaacaatgtctctttgtagtgataaaaataccatctccgtggatttacatttcactcctctagcaaagcaatttaatgatttgtttactttctttacttttacataggcacaagcatcagtatttttttcaattattcttagtcctttcttgtggtcagtttataaagcacactgcaattttagaattttcagtttgtttataaattcgtaattatagaattatattaatatttatttggatttttagcatacaaaaacaattcttaagttattaaatagggctgagtgaatttgtttgtggaattgtttacacaaaaaccaactgattaataactgcaggagaagctctattttatttacaacatgctttgagaaaatgagaaagccatagattgagattytgaacaaaggtaaaagagatagttttgttcattttgatcatgtagattatctctgaacctggaagtaaatttcaagattgtcactaaaaaaaaaaaaaaagaaaa

SEQ ID NO: 829997 - DNA, 521 bp, Homo sapiens
gtttggtgaaatccaaacaatgtctctttgtagtgataaaaataccatctccgtggatttacatttcactcctctagcaaagcaatttaatgatttgtttactttctttacttttacataggcacaagcatcagtatttttttcaattattcttagtcctttcttgtggtcagtttataaagcacactgcaattttagaattttcagtttgtttataaattcgtaattatagaattatattaatatttatttggatttttagcatacaaaaacaattcttaagttattaaatagggctgagtgaatttgtttgtggaattgtttacacaaaaaccaactgattaataactgcaggagaagctctattttatttacaacatgctttgagaaaatgagaaagccatagattgagattctgaacaaaggtaaaagagatasttttgttcattttgatcatgtagattatctctgaacctggaagtaaatttcaagattgtcactaaaaaaaaaaaaaaagaaaa

SEQ ID NO: 829998 - DNA, 685 bp, Homo sapiens
gaactgaggaaaaagtgtcacaggatccttgggggtgtcacttcaccaggcagaaatctctgtggccagtggcacctctgtcygagtttttactcagccccactgggtttattctgcccactcagcctggcaggctgcacttggattgcactaccagcctgagtctcatgcccgccaaggttgagccaggtgcagagatgagagggttgtgtgaatgagccattgtggggtctggccaccgtgcacagccaggcatgctggctgcagcagggtgggcagctccaggtgccagctccctgaaaggctgcagctggaccaagcatactgcaagcagtattcactgctggcaccaggaaatgtggtggtgctcagaagcttggaagtgcccaggaacctcagatccccaaagaggctgttacagccctggctcggggtgctccctaaagggccatggttcttctctccttctctcttctctctttcttgttgcacacaacatggtgagcaaggggagtgtttcagtcctgtttgtgttacagctctttcagtcccaacattcagcaggtcctgaggtcttgtcctgtgtcctggaagaatgaggtacgtgaacaagtggagggtgagcaaagtgaagaggagctttattgagcaacagaatagctcaaaggagacctgcaatgggtct

SEQ ID NO: 829999 - DNA, 644 bp, Homo sapiens
aaatagacagatccaacaggcagtcaattgctaaggacataactgaactcaacagcatcatccattaactggatataattgccatgtgtagactacttcaagcaaaaacagaagaatacgcattcttctcaaactcatatggaatattcacaagacagaccacattctgggctataatatacatcttaaccaaatttaaagaatataaattatgcaatgtctgctctcagaccatggtggaattaagctgcaatccaataacagaaagaaaactaaaaaataccaaaaacccttggagattaaacaacatacttctaaatgacataggaatcaatgaagaaatatttttacaaatttaaaaatattttaaacaaaattaaaatgaaaatataacatacccaaatctgtggaatacagtgaaagcagtgcttacagggaaatttacagcactgaatgcatataatacaaaagaagaaagacaaaatatcaataatcaaagcttccttcttaggawactagaaaaagaacagcaatttaaacccaaagtaagcagaagaaaagaaaagaaaaaaaaaaaactcaaagtaaaaatcagtggaaataaaggcataaaatcaatagacaaaagaaataaaacctaaaac

SEQ ID NO: 830000 - DNA, 454 bp, Homo sapiens
ggcaataggacatctaagtggaaatgtttagtagccaacggcatacagaatttagataccaaagatttggaagtcctcagtgcataggrggagtcgaggtaatatatctaagttaagagagcatacaaggttaacaaagtgaaggttcaagaaggaatctttagggtattcaaactcttaggggaaagtagagaaaagaggactcagaatggtgaagtgactagaaaagcaagaggaagataaaaaaaaagattcgtattttagaagccaaagcagacgagaatttttcaaaggaggaagcagtcactgacctcaatgctgtagaaaggtcaagtaagagaatataaaaatattcaataaattattttaattagaaagccattgacttaggaagaattttagtatagtctttagatgaagatgattaaattaaggaataaataggaaatgaaga

SEQ ID NO: 830001 - DNA, 454 bp, Homo sapiens
ggcaataggacatctaagtggaaatgtttagtagccaacggcatacagaatttagataccaaagatttggaagtcctcagtgcataggaggagtcgaggtaatatatctargttaagagagcatacaaggttaacaaagtgaaggttcaagaaggaatctttagggtattcaaactcttaggggaaagtagagaaaagaggactcagaatggtgaagtgactagaaaagcaagaggaagataaaaaaaaagattcgtattttagaagccaaagcagacgagaatttttcaaaggaggaagcagtcactgacctcaatgctgtagaaaggtcaagtaagagaatataaaaatattcaataaattattttaattagaaagccattgacttaggaagaattttagtatagtctttagatgaagatgattaaattaaggaataaataggaaatgaaga

SEQ ID NO: 830002 - DNA, 454 bp, Homo sapiens
ggcaataggacatctaagtggaaatgtttagtagccaacggcatacagaatttagataccaaagatttggaagtcctcagtgcataggaggagtcgaggtaatatatctaagttaagagagcatayaaggttaacaaagtgaaggttcaagaaggaatctttagggtattcaaactcttaggggaaagtagagaaaagaggactcagaatggtgaagtgactagaaaagcaagaggaagataaaaaaaaagattcgtattttagaagccaaagcagacgagaatttttcaaaggaggaagcagtcactgacctcaatgctgtagaaaggtcaagtaagagaatataaaaatattcaataaattattttaattagaaagccattgacttaggaagaattttagtatagtctttagatgaagatgattaaattaaggaataaataggaaatgaaga

SEQ ID NO: 830003 - DNA, 486 bp, Homo sapiens
accagaaagtgatggaggccagtgcaaataacattcacctgattctgtaaaactcataataagaaataatgaagcatctggcagatagggaaaggyccaagaagaaacattttgaacggaaagtgtatcactccctttggcaaagacttactggttggcaaagactgttgttgcttcaggaaacccttgcctgtcattttcagagtaagaatatatatttttccatgcattcagtgttgtcttcagagtggaattagttcttaagaccaatagtaaagcatgttcttggttcctttttccctcagaagtagtttagaggacgggttctcaaactttgctgtttattagaatcaccaagtatcttagaccacttgtgctgctataacaaatacgtcagactgggtaatttataaagaacataaatttattttctcatatttctggaggctgagaagtcaaagatcaaggcattggtaggtttggttc

SEQ ID NO: 830004 - DNA, 486 bp, Homo sapiens
accagaaagtgatggaggccagtgcaaataacattcacctgattctgtaaaactcataataagaaataatgaagcatctggcagatagggaaaggtccaagaagaaacattttgaacggaaagtgtatcastccctttggcaaagacttactggttggcaaagactgttgttgcttcaggaaacccttgcctgtcattttcagagtaagaatatatatttttccatgcattcagtgttgtcttcagagtggaattagttcttaagaccaatagtaaagcatgttcttggttcctttttccctcagaagtagtttagaggacgggttctcaaactttgctgtttattagaatcaccaagtatcttagaccacttgtgctgctataacaaatacgtcagactgggtaatttataaagaacataaatttattttctcatatttctggaggctgagaagtcaaagatcaaggcattggtaggtttggttc

SEQ ID NO: 830005 - DNA, 637 bp, Homo sapiens
tattcacccggtctgcatctttgccttttttcaagtgaccctgcagttccctcccattctcggaggtggaaaccgcccaatccttgactctggatccagccrtgtgattagctttggctaaagagtcttttaaaatgtatgcaattgaattttttttttttttttttttttttttttttttttttttttttgagaccgagtcttgctctgttgcccaggctggagtgcagtggcgcgatctccgctcactgcaagctccgcctcccgggttgacaccattctgctgattcagcctcctaagtagctgggactacaggcacccgccaccacgactggctaatttttttgtatttttagtagaggcggggtttcgtcgtgtttgccacgatggtctcaatctcctgacctcgtgatccgcccaccttggcctcccaaagtgctgggattacaggcgtgagccaccgtgcctggcgaagtaaagtcttaaagtacttggctgagtgggtttgttcttcctcatttttctgccatagacatgacaacatgcctgggattgcctgccaggaacagcagagctcctagcatacctgtagctgaccacaggcacatgagtgagccggcacagattggatgaacc

SEQ ID NO: 830006 - DNA, 635 bp, Homo sapiens
catgatttatattacaccatccaagcttgttcttcactcaggacatttgtacttactatgtctctatattgcatgttcttttcacagattttcatataaataactccttctcawtatttagaagccagttatatttctcttggtattgaggccttctcataataaatattttcagttatacagaggaattctatgcctcttattctctgcagtatcctcattgttcaaagtagcaatcaattataggtgctccctaaacgactgttgttttctgattgactgactgatgaactgactatgaatatatctgcaaaaaaagtaagggtttttcagtgccattatagagtcatagagaaaatgttagggattccatgagagggtgcaatcagactagaatggttatcatggactggttcattgagaaagaatctgctgaattggatcttgcataattagtatcattgtttttgttgtcatgggtaaatatttagtgtctgctatgtgtgaaacaatattctaagtctattctagaaacaatattacttaatcttcataaaaactcagtgagttaggcgcagtgactgtcacctgtaatcccatcaggtgggttatttgagcccaggagttggagacca

SEQ ID NO: 830007 - DNA, 526 bp, Homo sapiens
aatctctgttctcatttagggccatgggtatccaggcatgagggtggggcctttgccatggaactgccttcttctgcccagtatttccatttctcctgtccatattgatattccactaacagtcataaagtatttggatgagctagtcttgccccttggaatttccatttggtagcactttcaggtatgttctcacagtacccactgagccacttgaagaatcagtttggaatagagtagaatgttatgtagttaataacaaagatatttaagaaatagctggattttttaaaaatgtgttttttggccaaaaaatcattgtggtgagtagtggagttagtctgtactgcctctggttctctcaaattctcctaaagaggaagaaactcagcccagaaaattttagggaactcaactccatccatattaagaacatgttatcattagttattgcatgatttgaagctaagtcatcytttcatatttgtcatgtttactatttatttcctactttttgtggggacat

SEQ ID NO: 830008 - DNA, 456 bp, Homo sapiens; identical to SEQ ID NO: 828538

SEQ ID NO: 830009 - DNA, 513 bp, Homo sapiens
gggaagcttggtttaagaacacggacaaagcccaggtgtggcgactcatacctgtaatcccagcactttgggaacccagcatgggtgaattgcttgagcccaggagtttgacaccagcctaggcaacacggtgaaaccccgtctttacaaaaaaaaaatacaaaaattagctgagcatggtggcacatgcctgtgatcccagctacttgggaggctgatgtagaaggatcgaggctgcagtaagccatggccattgcactccagtctgggcaatagagtccctgtctcaaaaacaaataccttccccctgcaaaaaaaaaaaaaaaaaaaaaaaaagggaaaagaaaagaaaagaaaaggacaaatacaggatgaggtacagggccttggaagagacccacgtaagtgcgcagtcctggtgattaagtttcattagcatcactgcaaagccccctgggtctttgaccaatgctaaraggcagcggcgtaaaacctgtggtgcaattagcaaaa

SEQ ID NO: 830010 - DNA, 635 bp, Homo sapiens
cctttccatagccactctcatttttatcctggttcaaatgctgayaagccatggcttgtgactggcctacatagtagggagaaggggctgggaagcacaggtgaggggcaggcaggtcacttggcaagtggattgaaaatttgtagctggagcaagtcagaaacaaggccaagtggactggagtgtcttcccaggttctaaataggctcagagagatcacatagcacactagatgcagagttcagctgcagattttagctgagcaagcaacctgtaggtggacagaggacattggctctgagatgagtggacgcaggccattgcctacctgaggactgacatgaagcccttccctcccttcccaacacatagggcactctcctccctccacatacctgaacatcagcttaggaagaacagcagaagacagggaaagtatctgagagattcagtgtcttcatcctggagatactaagcaatagatgtaagagctgtttagattattaaataggcctacttttaaaccagattagacatttagtttatttcttccctggtaacctgtgggtgcgggaaaaagtctaaattaaagaccaaatttagcaagacatcatctttgcatatatgagttataa

SEQ ID NO: 830011 - DNA, 640 bp, Homo sapiens
ttcaaaatccagagcccaaacactttgggaaaaacattttccatgctttttaataatttttagctcttcmgatttgggaaaataatgtcatattccgtaaaagggctgtgctgtgatctcagaattatctattgtcagaaatatattaaataaagattccaagaaaatggccaggcatggtggctcatgactgtaatcccagcactttgggaggctgaggcaggcggatcactttaggtcaggagtttgagaccagcctggccaacatggcgaaaccccgtctctactaaaaatacaaaaattagccgagtgtggtggcagacacctgtaatcctagctactcggaaggccgaggcaggagaatcacttgaaccagggaggcagaggttgcagtgagccgagatcaaaccaccgtactccagcctgggtgacagagcaaaactccatctcaaaacaaaaaacttccaggaaaatgtttagctcttttttttttttagtgacttttaacctctattaactacacatttttgttgttcttttctagtgctaattccacttctatttataattctttgcttctgctttaatttttgttttcttactttattgtatgattcctttgtgcgagtctcctcaaacc

SEQ ID NO: 830012 - DNA, 605 bp, Homo sapiens
acatctttttcattatttatttttagcccaccttaataatagaatgttgctattgttgatgaaaaaagccaaactcagaaaatatttgaaaaggtttatgctgagccaaatttgaggatcatggcccttgacacagactcaggaggccctgagaacatgtgcccaaggtggttgggctacagtttggttttataaattttagagagacagaaattacaggcaaagacataaatccatgcgtataaaatatacattggtttggtcaggaaaggtgggacatcttgagtagtggggctcccagccaggtcatgagtgaattattttctgattgacaattggttgaaagagttaagctatgcctgaagaattgaagtcagtataaatacttgagttaagataaggcaagttctggaagccaagattcttgttatttagatgaagcctccaggtaacaggctttggatcaaatagatgattaatatctcttatcaggcctaaaaatgtgtcagactctctggaaaaggaagttcyggatagaatattaaattgataaggaatgaagattctctacagagtgtaaacttcttcctcaagggacagctttg

SEQ ID NO: 830013 - DNA, 590 bp, Homo sapiens
gcattatttaattatacttaccttgtctcaaaaataattgaataattttaagatcttacaactaataagcaaatttggaacatgtatctgtctgatgtcaagcttttgccctgtcaacaaaattatcccatgattccttaggcagatgaatgtattaataactaggcaaattgtttttatgaattctttttttctctacctaaaatagtttaaggttattggattgaattaagattaggatactaaagctgaatttatctatcctccaagagtaatttaaatttatataggtcattaaaaagttgttttcacatctaagaaaagtcatcacaattctaagatgactcaagtacttcttaaaaaactcttgacttcataaggaaacatgtctcctcagcattataattccttcagtggtcatttttgtagcttgtacactggagactgtttcattaatactttggtgagaatttttcttttttttttttttttttttttttttgctaaacaaaggacaaagtcttgctctgtagcccaagctggagtgcaggggsgcaatctcggctcactgcaacctccaccttttgggt

SEQ ID NO: 830014 - DNA, 644 bp, Homo sapiens
tcagggcaatatgagttatcttgtgatggaaatgttctccagcttgactgtatcaatgctaatatgttggctgcaatattgtattacagtttaaaaagatgttatcartgaagtaaactgttctgcagtatatgggactctataattgcatatgaatttacaattatttgtaattttttaaaaagtttaaacagaaaaaaatatgaacataccagatactcagtaaagtttagatgtctttcctgaaaaaaaaaaaaagttgggttgaacagcccctgtttccatttactatgatgaagaaaaaaatgcggatattgttacttgaaaaacatattatgttagagaaagatccctggaatctagaatttagaagaccagagttatctctgttgctctgttactaatgaacagtgatccaataaatgagccacttaattctttaacttcacttctcttatgtgaaatgcatgtgaatttgttcagatgattataaagtttgcttctaatttatgaaatgatgattattgaataaattcaagtagatttcctccaaaagcactcaatatagtcattttacataaatgtctcttgctgtttaaaattacatattcttattttccaaaacatgaggtatatgctttcct

SEQ ID NO: 830015 - DNA, 516 bp, Homo sapiens
aagaatcccaatggaattggtctgaagtttttaggagggaaaaggcttatttgtaatcaccttggatgtggtactaatttaacagggaagagaagcagggcctgagtggaggtctaaattctccattcaattctgaagagaggctttcagagggactaagagaaacatgcatagatcttactttccttctcatcaaaatgtttgtacagagtattacaaatattctcaccataaataacttcaaggcttttttttagttttattgcagtgtaatgaatgaacactaaactatgtatatgtggtctaatttaagactttgatatatgtaaatacctatgctatcatcattgtaagttactaattaatatgtgtgtcatcctcacaattttcctcatgtsttttataaactttcttccctaccctcttcggtatcctcatagtagctgaactcttttttcttttctctcactacagattagtttataatttgctagaactgtgtataaatgactgtgt

SEQ ID NO: 830016 - DNA, 598 bp, Homo sapiens
aagcttcggtgctgatgtagcagctgtagtcagcacggctgcttaagaaatcttggaccactagataacttttctcccctggattcatttcctgattatctctacctcacagtctaatttgaagttttggtaacatgctgtggttatacactttttttctgttccacctgcttagccttcgttaacttcccataagagtaagttttatcatattgtttactcccagtgaaaattttccctgacatttccagacaccaggatttatttaagtcatcggattacattgtctcttttagaaaatcttcattttatatattattatttgcatttaggtatcatgaatatatcaaaactattgagcaactgttatgtgacaatcataatagtcactagatagagatgggttgataaaaagtacagatatggtacatgatctctggaatcttactatttggaaagacaattataagtgagcaatgaaaataacatttatgatcaattcataaggtaaataaaggaatgtatgtcaagtagaccaaactgagtataaggcccaytcttgaaagtcttctctgtggaaagaatgcttcatttgaag

SEQ ID NO: 830017 - DNA, 611 bp, Homo sapiens
ctgggcgcagaacatcttttcatctgggagtgaaacctgtccgttttttgtagttagtgttttctcctgcgggctttctcacatgatgttaatgaggaagtagttaagttggagtgagtgggatggaaggaatgggaatatacatttacaaataactgttgcacttttctatctaagtttgtactgccagataacttggcaggcaccagaaacagctattgcaggactagaaagttacatgaataccagagggaaaaaactgatttgctcactaggagactctattaagtgaacatctgttaactgtaaaaatcccatgcaccaaatgggaaaatataatgaaactgagaggtttcgagcaaattaaaatcataaaataccagtgggcaggaatcgctgtgtgtttcaccattctgaaatttacacggaaacttggagccaggcaaaacaaagcagaaacacttaagcttatttactctaggtgtggaatagagctatcctgtgctttggaagaaagctwggagttgggggaaaatgtgctcagttaggaagttcacgtgtaaagctccccagctgataaatattgatacaatgaaagatcgtggctctgc

SEQ ID NO: 830018 - DNA, 615 bp, Homo sapiens
ttccctttgaaaactggtacaagacagggattccctctctcaccactcctattcaacayagtattggaagttctggccagggcaattaggcaagagagagaaataaggagtattcaaatagaaagagaggaagtcagattatctctgtttgcagatgacatgattttataattagaaaaccccttcatctcagccccaaaactccttatctgataagcaacttcagcaaagtctcaggatacaaaatcaatgtgcaaaaattacaagcattcctatacactaataagagacagagaaccaaatcatgagcaaactcttattcacaactgctacacagagaataaaatacctaggaatacaacttacaagggatgtgaaggacctcttcaaggagaactacaaaccactgctcaaggaaatcagagaggacacaaacaaatggaaaaacattccatgctcgtggataggaagaatcaatatcatggaaaatggccatactgcccaaagtaatttatagattcaatactattcccatcaagctaccactgactttcttcatagaattagaaagaactactttaaatttcatatggaaccaaaaaggagcctgtatag

SEQ ID NO: 830019 - DNA, 615 bp, Homo sapiens
ttccctttgaaaactggtacaagacagggattccctctctcaccactcctattcaacacagtattggaagttctggccagggcaattaggcaagagagagaaataaggrgtattcaaatagaaagagaggaagtcagattatctctgtttgcagatgacatgattttataattagaaaaccccttcatctcagccccaaaactccttatctgataagcaacttcagcaaagtctcaggatacaaaatcaatgtgcaaaaattacaagcattcctatacactaataagagacagagaaccaaatcatgagcaaactcttattcacaactgctacacagagaataaaatacctaggaatacaacttacaagggatgtgaaggacctcttcaaggagaactacaaaccactgctcaaggaaatcagagaggacacaaacaaatggaaaaacattccatgctcgtggataggaagaatcaatatcatggaaaatggccatactgcccaaagtaatttatagattcaatactattcccatcaagctaccactgactttcttcatagaattagaaagaactactttaaatttcatatggaaccaaaaaggagcctgtatag

SEQ ID NO: 830020 - DNA, 630 bp, Homo sapiens
acaaaaataataattatcaaggcaatgtgggatccatagcatacttaaaagtatgataacaatatcacaaaggccaggagtaaggaaatgaaaatacaccattgtaaatttcctaggtttctatacagtatgtgaaataacacactatcatctgaaggtagactgtgataaattaaaaacatatgccataaatcctaaagcaatctttaaaataacagagaaaatgaaaccatgaaaatgtgaaaagacaatccacacaatgggagaaaatatttgactattatggatctagtaagggacttacattagaatatataaagaattcttatattgcatcaataaaaagactaaaactcaatgtaaaaatgggcaaacaatttgaatagtcatttatttaaaaacgatatacaaatggccaatatgtacattacaaagatgctcgacaccattagccactagggaaatgcaaatcaaaactgcaatgagataacacttcacacctacttacaacaggcaataaataacaagtgttggtgaattggaaccaatatacatcacttgtgggaatgtaaaatggkgtggccactagagaaaactttgtttcccaaaaagtgaggcagagttaaaata

SEQ ID NO: 830021 - DNA, 686 bp, Homo sapiens
atttcagtgcttctcaaccaggggtgactttgcaccccaagggatgtttggcaatgtctggagacgtgtgtctgtgtgtgtgtgcgtgcgcacatgtgtgggkgtgtgtgtgtgtgtgtgtgtgtgttattacaactagaaggtgctactgacatctactgggtaaaaccagatatcctgcaaagcacagaacagcccacctccccccaaagaattacccagcacaaatgttaatagtacaagtttgagaaatgctgatctacagtgatacagaagcagtatttacagaagccaagaatggcgagacaagaatatgccagaaatttcagagcactctgctgataggacaaaagaatagtttgtaaagacaagcttaaaagaatgaaataatacctaaattcatttttggtccctggtttttctctcaatagcatttcagaagttttgctagaattcttcttaagaaatcatcatctctaagaaaatgagaaaaaataattcaaatttatatgggagatgtatgtgtattttatgcagaggaagtaaaaattatgctttattctattatgaataaaaagacttgtcataaattgagtctgggttcatttctttatgcttaataaagcctgcacacagcatctgaagagaaagtagatagaaaatgtacccattaaaatatttaccct

SEQ ID NO: 830022 - DNA, 596 bp, Homo sapiens
gaatacacagtcattgcaaaaacaacacctcaacctttactgaaagtgaaagttagcaaaaactagtgaatcaattccatcctgctattaaaaaggccagattcattgtcaaagggataaattctgggtcttacattctttttccaccatctgctcttttttaaataactttttcctaaatatggtagatcatggctccccttaactttcaaccgacaaagcagccatacctacctctttctaagatgaaattgtgacactgatctcacaggtgcctatgccatgtaaacagcaggaatgtcaccttgggtaggcccagggtatggaacgtaatagagagccctgtgtataggacagggtcactccttagctgatacttctaaggacccatcacaggcaagtggaatttctctatcctgacttcattcccaggtcaatgctgacatatagagttctaaatctagataatttgtaattagtgaagttgaaaatataccataatttcagcaaaaaaaaaggggtcttgtrctagatagtactaatgggttaagcgagttaaattaattaggcttttaaggatctcagccttatttctt

SEQ ID NO: 830023 - DNA, 604 bp, Homo sapiens
ccttcctcttagctaaaaaaaaaaaaaaaaatccttatcctaaagaacctgattgttaagatttttacttaatttcttggatagttattcaaagcaaaraaaatgagtgtttcttttcttcccaaacaggaagcacatttataacaacataaattatatgaacttcctaatttaaaaaccaaaagtacaaatattagtaactttaatatcaaagaaaaaaagaaaatgattttgtaaagcttcctcagtcagtggttgcagatcacatttcaattaatgaatttgaagattttattatagtcaaatttcaagacagcagagtcagcttctaatcacctataaaacagaaggtacaacttttcctcaatctgtaatagttttctaagtatgttttctttgccttggggaggcaggtatcctaagagcagagcagtttatatctaaatctggttatacaatttaaccataaatttttatgctacatctacattttgcttataaaaacattaaaattagtttctctacttcaagagaaatgttgcttacaagtaacaaaggaaaaactaaatttgattatatcaaaaatagaatgtttgtgctacaa

SEQ ID NO: 830024 - DNA, 604 bp, Homo sapiens
ccttcctcttagctaaaaaaaaaaaaaaaaatccttatcctaaagaacctgattgttaagatttttacttaatttcttggatagttattcaaagcaaaaaaaatgagtgtttyttttcttcccaaacaggaagcacatttataacaacataaattatatgaacttcctaatttaaaaaccaaaagtacaaatattagtaactttaatatcaaagaaaaaaagaaaatgattttgtaaagcttcctcagtcagtggttgcagatcacatttcaattaatgaatttgaagattttattatagtcaaatttcaagacagcagagtcagcttctaatcacctataaaacagaaggtacaacttttcctcaatctgtaatagttttctaagtatgttttctttgccttggggaggcaggtatcctaagagcagagcagtttatatctaaatctggttatacaatttaaccataaatttttatgctacatctacattttgcttataaaaacattaaaattagtttctctacttcaagagaaatgttgcttacaagtaacaaaggaaaaactaaatttgattatatcaaaaatagaatgtttgtgctacaa

SEQ ID NO: 830025 - DNA, 604 bp, Homo sapiens
ccttcctcttagctaaaaaaaaaaaaaaaaatccttatcctaaagaacctgattgttaagatttttacttaatttcttggatagttattcaaagcaaaaaaaatgagtgtttcttttyttcccaaacaggaagcacatttataacaacataaattatatgaacttcctaatttaaaaaccaaaagtacaaatattagtaactttaatatcaaagaaaaaaagaaaatgattttgtaaagcttcctcagtcagtggttgcagatcacatttcaattaatgaatttgaagattttattatagtcaaatttcaagacagcagagtcagcttctaatcacctataaaacagaaggtacaacttttcctcaatctgtaatagttttctaagtatgttttctttgccttggggaggcaggtatcctaagagcagagcagtttatatctaaatctggttatacaatttaaccataaatttttatgctacatctacattttgcttataaaaacattaaaattagtttctctacttcaagagaaatgttgcttacaagtaacaaaggaaaaactaaatttgattatatcaaaaatagaatgtttgtgctacaa

SEQ ID NO: 830026 - DNA, 472 bp, Homo sapiens
tttatacaccataatctcggtattttataaatttcttgaaattatttttatttacactgctttgcagaattttaactggctttgaaataaacaatgacaatagtcctccatgttactagtttcaaattttcccaatacctactaagacattacttaatccacagatttattgtcaatagtttgtatcaaattgtgataacatatttgaaattaatatttcaaattaaagcaaaatcacaaatttatactttatattatgaatgagattcacaaaaggagcatgataatatattctgttgtcatcgcatacaaaataataacatatagagtatgaatcaataatttttcaaatacaaagctattacaattaggaatacaaagaaatcataattaggaatactttttccatattaaccccccatagtggtaacacttgcaaaawgatgggggggggtttttttttttttttttt

SEQ ID NO: 830027 - DNA, 622 bp, Homo sapiens
atcatatgctaaaagaacttttgctgaggcaggtcttaagggattaaaastgttttaattatggtattccatcactggaatatttgttctttctaaaaccttcccacaatgagagaacaaatgatcccatcaataaacccagtctgtaaagaactcttcagttgagtatatatttaaatcacataaacaatgcaagtggacagttatctacactttccattgatcaatttatacttgaactgtgaacaatcaaaataaattaggcaaatattctaataaattaaaatattttactctgtttacaattgaattttggttcagaggaaatattcctgccacctaacaccttttggcaaattcctcattttagataaatcttgatgcttgaatttaaaacaaataaatggaaggtgaaggagaaattcacaacttgataatctgtttgaattttcttttgaacaattcaaaactacatttttctctgcattttttaattttttaaaaagaaaatcctttcatatatgacaatatacctgaacctctaggacattaagagaaataagccagtcacagaaggacaaatactgcaagattctacttattagagatatctaaagtagtc

SEQ ID NO: 830028 - DNA, 574 bp, Homo sapiens
attaacaatctgactttgtacttaatggaactagaaaaaacaagaacaaaccaactcccaaactagcagaagaaaataaataactaaaattagagaagaactaaatgaaattgagatgcaaaagtccatacaaaagatcaatgaaatcagtgctcagtctttcaaaacaaaacaaaacaaaaaaaaaaaaaaacaaagaaaacaagaagaaataaacaagattgatagaccactattagctaggttaacaaagagaaagtagaaaaatccaaaataagtacaatgaaaaaatgacaaagatggcattgcagtcgatcccatagacacagaaaagatcctcagagtgtaataaaaacaactctatgcacataaataagaaaatctagaggaaatgaataaatttatggaaacatacaatctcctaagattaaagtcaggaagacattgaaccctgaatagatgaatatcaagctctgaaatcgaatcagtaatgaagaaaatacctatcaastagaaaaattcctggaacacatgaattcacagctgaattctaccaaatgtacaaaagagaatt

SEQ ID NO: 830029 - DNA, 581 bp, Homo sapiens
atttattttatgtgaagtttattgggctttctgtatctgagaatttgtgacattcattagttctgcaatattctaagccattgtttctttaaattttacctttaatccattttatcttttcaacaattatgtattttttgagtgcttaacatgtgccaagcacacttctaggtactagggatatgtatctgatcaaaacagtcaaaaaacatctctattctagtggttctagaaaatctgcatacaaaaaaaaagcaaaatccatagcatttaaaagactgttagtagttattacaaaaaaaattaatgaaacaggaaaagaaggcagagagtgtcagaggcatagttacaatttaaatagtgtgttcagagaaggcctcaatgaaaaagtgatacttgtgcaaatacatggaggaggaaagggagtgagcctcctgtatatttgggaaaaagagatctcaggaacagggattcacaagtataacaatcctgacttgagaacaagtctgatgtgttcacaratatgtaaggaagcttaacaggcttgtgcaggataatattttcatttctttaatccttct

SEQ ID NO: 830030 - DNA, 606 bp, Homo sapiens
actgataattttaataataaatccaggtacctcaagaaagagcagaataaatacttcccaaaatatactccgaaacatatcatatccaaatttcaggaaagcaaatctaagacaaaaatcttgaaggatgccagacactgtgggagatcttacctacagaggaaaaaaatataagaattatgtatgcctggctgagcacagtggctcatgcctgtaattccagcactttgggaggccaaggtgggcggatcacaaggtcaagagatcgagaccatcctggccaacatggtgaaaccctgaaacccgtctctactaaaaatacaaaaattagctgggcgtggtggggtatgcctgtagtcccagctactcgggaagctgaggcaggagaattgcttgaacctgggaggtggaggttgcagtgagctggatatgccactgtgctccagcctggcatcagagcgagactccaactgaaaaaaaaaaaaaaaaaaaaagatttacatatgccagtcctcaraaaccatgaaagcaaggagagagtagagtgggatattttagctgtggaaagaagtaaaacccaccaacctagagttctgtatacagtga

SEQ ID NO: 830031 - DNA, 626 bp, Homo sapiens
  misc_feature 1, 2, 3, 4, 5, 6, 7, 8, 9, 10, 11, 12, 13, 14, 15, 16, 17,18, 19, 20, 21, 22, 23, 24, 25, 26, 27, 28, 29, 30, 31,32, 33, 34, 35, 36: n = A,T,C or G
nnnnnnnnnnnnnnnnnnnnnnnnnnnnnnnnnnnnataactatacaattattcayaggaaacttgatgttatatgataaatggagaaagatatataatgggtataaattccggaataaaaaatacattaggctaccattttacaatcacttattaatacccacttaagctatccagtgtactatgtagtaggcatacaaaagtaaaccaatgtcactaactttaaatttataatataaagacacaagtataaaaactgtggtttcttttctctatttttttgttatagctgtttttcccttattttagatttccaagtgtgtgtaaaatgacttctctccaccatatttaagtgacagtaggatttttaaaatcaaatttgcacaggcattcatagatatcaatttaatataaatgatagcaacttattttgctttcatatttatgacctgccacataaagctgagttgtctttacacactatgttatttaattcttacaacaactgtatgagttatgtatcatttgatgaggaaatacaggataagaagataatattcaactatgcctaaggatatagtaaaagaaaactgcagtcagaattgaaattctgacttcttcaaagt

SEQ ID NO: 830032 - DNA, 643 bp, Homo sapiens
aaaattcagaagctcattttaaggagcaaaggttacacgcaagattaagatcaaagaattcctaakaatactgactgagaaaccaagatcctagtctttagagtaaccattctttctgagaaaagctgatgactcatgctgattgtagaagtttgtaatatgccatgaaaattgagcacttaaaattcaaagatttccttggatgcatctactctgaatcatctggaggaaaattgaataaaaacaaaaccaaaaccaaaaaaccaaaccaaacagtcaattgtctgggtattttagccacataatggcaaacatatagctatttgtaaatatcatatgactgcctgaattttttataatctagatttctagtcatgaacccagtaaaatctgtattatcatcaaataacaatttatttctacacagactacaattgaaaatttaagccacagattttgatgattactggcttaataaatgaacatagcttagttagatatgaaatagcacaactcatataatcaaaaattagttgaagggaaaatatcatgtaaaagaaagggctgaagcaatctagctgcaacttttaatcagaagctagcatactgtcagcataatgagatgtattatatatgtaaatgc

SEQ ID NO: 830033 - DNA, 643 bp, Homo sapiens
aaaattcagaagctcattttaaggagcaaaggttacacgcaagattaagatcaaagaattcctaataatactgactgagaaaccaagatcctagtctttagagtaaccattctttctgagaaaagctgatgactcatgctgattgtagaagtttgtaatatgccatgaaaattgagcacttaaaattcaaagatttccttggatgcatctactctgaatcatctggaggaaaattgaataaaaacaaaaccaaaaccaaaaaaccaaaccaaacagtcaattgtctgggtattttagccacataatggcaaacatatagctatttgtaaatatcatatgactgcctgaattttttataatctagatttctagtcatgaacccagtaaaatctgtattatcatcaaataacaatttatttctacacagactacaattgaaaatttaagccacagattttgatgattactggcttaataaatgaacatagcttagttagatatgaaatagcacaactcatataatcaaaaattarttgaagggaaaatatcatgtaaaagaaagggctgaagcaatctagctgcaacttttaatcagaagctagcatactgtcagcataatgagatgtattatatatgtaaatgc

SEQ ID NO: 830034 - DNA, 574 bp, Homo sapiens
tcgctaggctggtctcaagctcctgggctcaagggatcctcctgactcagtctcctaagtagctggaattccaggtgttcacccatgtacatggctactgtgggttttgacaaatacatggtgtcctgtatttatgtattcacaattccagtatcatacagaatagtttcagtattctaaaaatcccctgtggcttacctgctcattcctcccttccccctgagactccggcaaccactttttactgtctctatagttttgcttttaagaatgtcatatagttggaattatgtggtatgtagttattttactggtgtctttcacttagcaatattcatttaatgttcctctctgtctttttgtggcttgatagctgatttttttttctgtttagtaatattttattgtatagatgtaccacagtttgtttatgcattcacctgttgatagacatcttggttgcatacaaattttagcwcttatgaataaaactgctatagggagctgagatcgcaccactgtggaacaggaattaaaaaaaattaaagaatgtgtaagcagaaactcagttata

SEQ ID NO: 830035 - DNA, 654 bp, Homo sapiens
tttaatatccctatcaggatccggcagtaccttgtaattgtatacattaatatttctgcagcaaaatgcatgaatttttacactatgtatgataaatgactaaatattcttcttttttttttcttgagacggagtcttgctctgtcgcccagactggagtgcagaggcacgaccttggctcactgcaagctccgcctcccggtttcacgccattctcctgtctcagcctcctgagcagctgggactacaggcgcccgccaccacgcccagctaattttttgtatttttagtagagacggggtttcaccatgttagccaggatggtctctacctccttacctcgtgatccgcccgcctcggccgcccaaagtgctgggattacaggcgtgagccaccgcgcccggccctaaatatacttctgtcaatttagtatcacatgagttcaagtcaggaaagattttgccactaattcagttttgaaaaaacttggtttgcaaagcttttcaggtttcaggatttcaaaaaaggattatgaatctgtacrtataacatcaggaggtgaatccttgaagtaatagaaagttgggcaaggatagaaagaaatagaatagaaagaaaaaatagaaaaaatagaaaattagaaagttagaaaat

SEQ ID NO: 830036 - DNA, 574 bp, Homo sapiens
acccaaacgaaaggaaatcagcatacagaagccatctggaccccatatttatggcagcactattcacaacaatgaagaaatggaatcaacctaagtgtctatcaacagatgattaaagaaaatgtggtgtatatataaacaagggaatactattcagcctaaaaaagaaatcctgtcattcatggcaacatgaatggaactggaagacattatgttaagtgaaacatgtcaggtccagaaagataagtactgcatattctcactcatatgtgggaactaacaaaatgagctcctagaagtagagagtacacttatgattattagagactggaaagggaaagatggacaggaggatggggagaagttggttacaggcatacaaaataacagctagataggaggaataagtactagcgttctgtagcactgcagcatgattatagttaacaataatttattatatatgtccaaaaagctaaaagagaagattttgaatgctcccaaaacaaagarataataaatgcctgaggtgatggatattctaattgctctgacttgatcattaagcattgta

SEQ ID NO: 830037 - DNA, 605 bp, Homo sapiens
tgttatttcctggctagggtcatcctccagattccatgttgattggtaagaacagcagccagttggcatcackgaagtaggcacaactccagacagaggcatgagccatttccttggtcctcagtttatagaggtcattcagaacggctggggatttagagcatactgtacattctgtggcctccattcctctcactccaccctctcacaatagaatttttgcatggtagccccatcagattcaccaaccccagaaatactctcatcccacccctagtcctccttcttcactgctctctctaatctgcaagccccaggggaaaggtgctgaggcccagctctgggagaaagggagcttcctgtgtgcctactgcccggttaaggcaagagagactgtgacatggactctctgagctgtaagcctggaagcaatttgcttcctgaaatgagaaaattccagcaggccagtctgggaggatcagtccagccagaggggaggaggggacagagggcatcagtgaggtggttttccctgaaataccacctccagtaggaagcgccacaggccccaggccacaagtccctcccagctttacccggactga

SEQ ID NO: 830038 - DNA, 544 bp, Homo sapiens
gacatgatgggaacataataacagtggtatggaagggcactgggctggctgagctgggacatagacctcccaccaccccaggaagactcatccgtctctttgcatcctctgatattcctgggggcttttgtctgttaatttccaggggaaaagggggtttggatggggcagtgcagcaggatagcagagagatggagggccacattgggccttggactagatttgaggtctgaagttgatgggactgttttcacaggcggctttctagggtctaacacagtggggctcctttggtgctcagtccccactgctgcacactggtacgggaggatgagccactacaggatagtgtcctttcgtgcgaatacatgaaagatacagagacagtgtcctttccatggtccatggcattctcacgatgagattccagtggttcaaggtagaacttttccgcagtgggatccagggcaggggataaagtcaggggyggcatgaggtagcaatagctaagagggtgacttgcaggtgtacatgaggcctgcct

SEQ ID NO: 830039 - DNA, 575 bp, Homo sapiens
tgtgaggttaatattatgatctgcactttgtggaggaggaactggaaacgcagagggatgaaggtcaatggtggaccctaactgagatcagggcagtgaagatggcccaataaagtggcacactggagctccatatgctcactgcgtagcagtgcctcttggctttcttctctgagtggtcctggagagcctaagaaagagtgagaaaattctaagctaattctatattggctttgtgttgactcccacgttaagagaacctccaaatacctcccccagggcctgccatacattatgaaattttattcagagattcatgtacttgaatcttaaagactcataagcctcctcctcaattgtactgaagaccagaccggagtgggaaccagtttttggcctccattcccaaccgactctggagactgttacagtgagactttgtgctrttggagttggcatcaagcctacttgtgtctgagtgctgattctgctattataatctctttgagactcattttccttatgtgcaagtaggaattataatacctactttctagcagtttggtgaggaatac

SEQ ID NO: 830040 - DNA, 600 bp, Homo sapiens
cttcccaaagctacccaccacctctgtgtcctccccacccgcaggaaccacctgctacctacacawtgcaggcctcccatttctctagcaccttcacctggcacgctgggtgagcacacagcacgaagcctgcaggacctgttgtgaagctagatgtgctgaggctgccgggctgtgtgtgtgtcgggtctggcgggctgctgggctgtgtcaggtcgagagggctgccaggctgtgtgtcaggtcaggtaggctgctgggctgtgtgtaggtggggcgggctgctgggctgtgtgtgtgtggggtcgggagggctgctgggctgtgtgtgtgtcaggtcgggagggctgccgggctgtgtgtcgggtcaggtgggctgccgagctgtgtgtgggtcgggagggctgctgggttgtgtgtgtgtcgggtcaggtgggctgctgggctgtgtgtgtgtcgggtcaggtgggctgctgggctgtgtgggtcgggagggctgctgggctgtgtgtgtgtcgggtcaggtgggctgctgggctgtgtgtgggtcgggagggtggctgggctgtgtgtgtggaaagaacaaacctgggtgtacaa

SEQ ID NO: 830041 - DNA, 640 bp, Homo sapiens
tgtttcctcatattttgtttctttgtgttaatactctttttattttcataaagaaagaaataattaaaaacctaagagaacactgagtttgtttatggtttaataaaattgttttgatttcaataaagctgacatttacgaagagggatcatttcttaaaaactaagaacatttctttatggaaacaattgtggaaaatgtataaaggagactaatcttgacaagtatataaaatacacttctatgaactactttaaggtttttctcctgttaattattcgcctccacttattatgtctagagtcaatagaatgcttatgagaatatgtcttcatatttttgtatgtacaccacatatactataaatccaaaacaatagatactaatacctattaaatacataggaaagaatggcatgcatatgtttgcatatgtgttccttgtgttctttccttgacgctctgaagtaatgttcttgaaattaattccttgatggctaatactcaatgcaagccaaatgaccagatatggggtacaataaaatatacattttgtacatgtcaacaagctttggggttgattgtgatasgaatgggggcttggaagctagagtgaaagcattaataagcacaggtcattt

SEQ ID NO: 830042 - DNA, 656 bp, Homo sapiens
gctaatattttagataaaaatggggtccttaatttctaaaaatctcatttctttctggcgtatacattaggcccaggaggcagcaaagtcttacagaaagggtaaaatcttgctaaagataacttacagtggaacattccaaatgaacaacaatgcactgaagtgcatttaaaaaaaaaaaaaaagaaagaaaaaaagattttcttttgtgttgcgtttggcctccaaggttatatagtgtggcaagcagggttaggtcactagggccactcagggaagggaacccagatacctgatatgccaacaaaagggtaaaagttcttatcagtcacacttctagcctctctctgtgcaaatcggttggatgaatggtaaaaatcatggtttatatcctctgttaagttttgattaatgggaaaaaggattcatgaggctaatgttgagctgtagtgaatctggtgtgctttgtgtgtctttctgtattgttctatcatacagaggggtaccttaggatagaatgtgagcctaggtccccataagcccgctgttcaagatggcccagcaaactggtcagtcatgtccttgggagcatgacattgtaaccacgtggcagtrctttctcttggtctgtgctcttaccacagcagcccaggttc

SEQ ID NO: 830043 - DNA, 478 bp, Homo sapiens
ggaatcaacgcgagtgcaggggaatggaatggaatggaatgcaatggaatgtaatcatccggaatggaatggaatggaatggaatgcaaagcaatggaatcaactcgattgcaatggaatggaatggaatggaaaggaatacattggaatcaaacagagtggaatggaatggaaaggactggaatggagtggaatggaatggaatggaatggaatggaatcaactcgattggaatggaatggaatggaatggaatggaatggaattaacccgaatagaatggagtggaatggaatggaacggaacggaatggaatggaaaggaatggaatggaatggaatggaatggaatggaatggaatcaacccgactgcaggggaatgraatggaatggaatgcaatggaatggattcaacttgaatggaatggtaagaatggaatcaacacgagtggaatggcatggattggaatggaatggaa

SEQ ID NO: 830044 - DNA, 587 bp, Homo sapiens
ctcagagttctagaagaaggaattacagaagtaaaaaaaaataagtgttagtgcccaggccagcgrgccataattcacggtgagatgccagacatggtggagaaagtggtcacaatctatatacttatttactcattcagtatttactggatacttaatacagtacagatactttgctagctacttcaggcaaagatgattaagatatgatttctgtcttcaagaaacttgaaatctgatgaggaacacaaacccatagaaagatgattataaataatatggcgaggacattagtagactaatgtaaggggtcttatggtagcatcaaagaagggcccataaacttaccttaaggaataggtaggaatcaaggaagttcaccaagaaggggccaccatgtacaaaacaaacagcagaagatggaggaaggccaatgagaccactttatgtcccaccagtgatgtgttggaacttacaaatgtgccatcagtcctgatcagagttggttcaggattgggtaagttttacctacagcttgaacaaggtgggaaaatcagggaccatcatgattatcagtcacatataaa

SEQ ID NO: 830045 - DNA, 544 bp, Homo sapiens
actccgtctcagaaaaaaaaaaaaaaagataaatatatcttgtataaatacatatcatatatcatatacagataaatatttatctgttaaatatatatttataaacatttattgtgagaaaagaaagtacttcattaaaaaaagtctatcgccggctgtgcgcagtggctcacgcctgtaatcccagcattttgggaggccaaggcctgcggatcacgaggtcaggagatcgagaccatcctggctaacacgatgaaaccccgtctctgctaaaaaatacaaaaaattagccaggcgtggtggcgggcacctgggtgcgtgtagtcccagctgctcggggggctgaggcaggagaatggtgtgaacccgggaggcggagcttgcagagagctgagattgcgccactgcactccagcctgggcgaaagagcgagactccgtctcaaaaaagaaataaawaaatagtctattgcctaagaataatatcctattcctcatttctcctctttacacattacacaccccactaactgtgtgttctagat

SEQ ID NO: 830046 - DNA, 624 bp, Homo sapiens
aatcggccaacttgaatatttaaaaagacatacagrttgcaaataacttaacaaaatatgttcaacgtcagtcatcagggatatacaaattaaaaacaaaatgtgccaattctgagcacagtgcctatgagttagttagtcctgctccacaaggagcacttaaagtcacacacacacacaccccccccaacacacacacacacacacacagagatggctctacacatctagcagaatgtcaaccaagcaaataaacaaaaatgtcacaataccaagtgttagaaattatgtggagcaactggaaatcttacacaagactggtgtgagtgcaaaatggtgcaactacttcgaaaaatagtttggcaggttcttataaagttaaacatatattttgctatacaatccagagtctcacttttagattatttacccaaatgaaataaaaacttacgtacatgcaaaaacttgaatgtgaatgtttataaatactttatttataatcatccaaactggaaagaacccaattgtccatcaactagtaaatgaataaactgtagtacacccattcagtggaatatccagctataaaaaatgaatgaactggatgggtgcggtggctcacac

SEQ ID NO: 830047 - DNA, 616 bp, Homo sapiens
ttatttcacttatatatggaatctgaaaaaaaaaggagttgatatcctagaagcagagactggggaggagaggaagctagggaagacagaaaactgttggtcaacaggaagaaagttacarttacatagaaggaatatgttgtggtgttttattgcaaagtgggatgacaatagttaagagtaagtctttgtatattataaaatagctaaaagaaaggcttttgaatgttctcaccacaaagaaatgataaatgtatcggataataatgaatatgctaaataccctgttttgattattatataacatataggtaccaaaacatcaaattttactccatgaatatgtataactgcaatgtatcaataaagaaataaagcaaactttaagaggaaatttaaagaatgaaaaaaaaactgatctcactagcaatcaaagaaatataattgcaactacaagaagacactacattggcaagaatgtgttgtgaaaacagtgttctccctagagtatatggaaatgaactctgtgcattcctgatgggagtgcaaatttctttaagaatatttgtggagctgatttaggaatatgcagcgaaaccattaaaaacattcatag

SEQ ID NO: 830048 - DNA, 631 bp, Homo sapiens
gacaatgttgaagatgaagcccgtagcagcagaccattcacagcaatttgtgaagaaaaaaagcacagacaatatctaatatggtttggctgtgtgtccccacccaaatctcatgcagaagtgtaatgacaggaagtgttggaggagggacatggagggagatgattggatcatgtgcatggcttctgatggtttagcaccatcgccctagtgctgtcccatgatagagttctcacaagatctggttgtttgaaagtgtgtagcacctccctcttcacttgctgtctcctgctggccatgtgaagatgtgctttcttccccttctcccatgattttaagtttcctgagcctcccagccatgcttcctgtagagcctgtggaactgagtcaagcttcttttctttatacagtacgcactctcaggtaattcttttttgggaggacagagtttcactcttgtcacccagactggaatgcagtggtgctctctcggttcactgcaagctccgcctcccaggttcaagtgattctcctrcctcagccttgtgagtagcagggattacaggtgtttgccatcatgcccagcaaatttttgtatttttagtagatatggggtttcaccatgttggcc

SEQ ID NO: 830049 - DNA, 608 bp, Homo sapiens
aataatttattcagtaaagaatcaatgttaaaattaatgggtgagtctgataatttacagagtgtcaaagtgtctctccacaagatacataataagtayaatggaaaaatagcatctttacaatggtctaccattaccaagttatccaagttaatatcactcataatgggacaaaaagaaatgtgcctgataaaatgcactgagaaggacagaacattacttttgcggcattcctgccaaaaatccatgatccaaatataatcatgaggaaaccagacaaattcaaattcaagagacagactacaaaataattggcctatacttctgaaaaatgtcaaggtgataaaagacaaagactaagcaagttctaaattaaaggaaattgatgagaaatgacaactaaatgcaatacatgactctagactggatgttggattaaaattttcaaaatttgaataaagtcttatattagattatgtatccatgttaattcccttacttttatcattgtactgtggctatgttagacaatgtcccttttattaaagacacacacgctgaaatgtgtatttagaagacaaacgtcatcatgtctacaagttactttc

SEQ ID NO: 830050 - DNA, 456 bp, Homo sapiens
gtgagtctgtaggtgattccggagtgtgggaggctgactcccgctgaaatctgggcgtggtgggagagtagctgggacagacaggagagtcccagggggctcggggtgacgacrtgagagagactggggagtaactcagtgaaattgctgagttggttggtgatacctgggtgcctggaactgacccccgctgaaatctgggcatggttggagagtagctgggacacacaggagagtccctgagggctgggggtgaagacatgagcgagaccggggagtaactgagtgaaactggtgagtttggtggtgactccggggtgcctggaactgactccagctgaaatgtgggcgtggttggagagtagctgggacagacaggagagtccctgaggactggtgaagacatgagagagactggagagtaattgagtgaaattggtgagtttggtggtgatt

SEQ ID NO: 830051 - DNA, 584 bp, Homo sapiens
agcactgcagatcaagtagggaaagtgactgatattcaatgatggtgttagaacatatgatttctcataagaaaaaatataaacatatataccatctaggattatgtaagcacactttatgatgttcacaaaacaaaaatgttgcttagtaatgcatgtctcagaacatacacatgtcattaagccatgcatgagtgtactttatatcatctctggaacacttcggtcaatcaggaaacatgaccgagacaaatctcaatcattttaagaggtttatttgccaacattaaggatgcacacccaggagacaagtctatgcctttctttaaaaatgattatgagggctccaaatttaaaggggaaagggtgaaacactgagaaatacagttttcatgtaagactggggtagggggaaaacattcattgatatggtttggctctgtgtccccacccaaatttcaccataaattgtaataatccccatgtgtcaagggtggggccrggtggaagtaattggatcatcaaagcagtttcctctatgctgttctcatgataatgagtcacatgagatctgatggttttgt

SEQ ID NO: 830052 - DNA, 644 bp, Homo sapiens
ctgaatgtttctccctcacataggattccagaacattgctgcgagggtctaaatgtctgtccttcacataggattccagaacactgctacgaggttctgaatgtttgtccattacataggattctagaacactgctgctggggtctgaatgtttgtccctcacataggattccagaacactgctgccggggtctgaatgtttgtccctcacataagactccagaacactgctatgagggtctgaatatttgtccctcacataggattccagaaccctcctgctgtggtctgaatgcgtgtccctcacataagattccagaacactgctacgagggtctgaatgtctgtcacataggactccagaacatggctgctgtggtctgaaagtttttccctcacataggattccagaacactaatgcaatgatctgaatatttgtccctcacataggattccagaacactgattccagggtctgaatgtttgtacctcacataggattccagaacactgctgctggggtctgagtgtttgtcccacasataggattccagaacactgctgggaatgtctgaatgtttgcccatcacatgggatcccagaacactgctgctggcatctgaatgtttgtccctcacacagg

SEQ ID NO: 830053 - DNA, 635 bp, Homo sapiens; identical to SEQ ID NO: 829962

SEQ ID NO: 830054 - DNA, 635 bp, Homo sapiens; identical to SEQ ID NO: 829963

SEQ ID NO: 830055 - DNA, 519 bp, Homo sapiens
cctgcctcagcttctcaaagagctgggatcacaggcttcaaccaccatacccagcccacattttaaaaaacatatatctctggtgtgtcatcaatgagayaactgatttttaggacaccagagtaggtgtgtctttagaaagaaaaaatattttgtaatctgcacgtaaagtccaatggcataaacttgacctcccaaatgtaaaatgatatttgagcacatcccatttttggcttattggttgcaaacagatttttaaaagacatgagtttgaaaaagtattgatcatattacaagatgttattcagagtttttagagtaaaagaaacataaacacagttacatattttagaagtgtcaggcccaatctgcttgtcgattcccagaacatactagtttttcagaggatgtacgcatataaataaactaaatgcatatagaaaagcacatatatcttttctttccaaattgctttccttcactctacctgacataaactccctgatgtcctggccagag

SEQ ID NO: 830056 - DNA, 529 bp, Homo sapiens
taacacaaaaaagctgctaaatatctgctggcagaatagaattaatagtggaaaaagcaagaggatgctattctatgtcattacttctattcatctctttacttttctgccacacacagaaactgggttctcaacatctccaaggcttgattcataggatgagtaaagcaagctaatgacaacgtgcattcaagtgatggctaaataggaaagaggcccacactggtgaatacaaataaagaattcttcaattaatgttaccagtcattctgcctttgccactgctcttctcctttcttttatcttatttcaaccctcccgttctgccaaagtctgcgattataatggtgtatactcatcaagccacacagaaccgaagagtgtattctttagttgaatgccacctacttcttaaagacttccctgattgccgagctggaaatcatctctttctcttttgaattctgtaatacttgtgctatcacagtagctgcctctgtgcaygaaaatctctactgaatgaataaat

SEQ ID NO: 830057 - DNA, 641 bp, Homo sapiens
ctcacattcctggacatgacggctgctggcgcctccctcgccagctcctggaggcggctctgccctttttggcctcctgctccctgagcgtctggtgtccctgaggggtgagaggccagagtgaggggggacagatcagcacagcgcatcccgtaggagccagggtcccatcggggtttcagagaagccacggccgagaggtctgcatgggaccccttccccgtgacagggagggaacgggctcagggcatcattggactgtcccagaactgcccggtggacatgtcagggccaggatggaacccaggtctgtgcagccgcggactctggccttggaccctgccttgtggagtgacttcccccatcacctgcagggctcaggagcactggccactcccagccagggccactgtggggcgtggggagacccaggtgggggcaggcccccggcacatgtgtctgggagtgggagagggtcccagctaggggctgcactgtggagtcagcggcagtcacagcccaccctgccctgctacgttcacctcccaccgtaccccygctccagagaggggttcaaggctggtcagttgccttgaaaaccgagggaaggtgtcctgcctgtcatcgagctgtgatgtcct

SEQ ID NO: 830058 - DNA, 613 bp, Homo sapiens
ttatctcaaaaaacaaacaaaaaacctcatggagtaaaacccacaggaaaagttgtcattccccagagaatgatttcaagtggaaataagaaaggttggcgaagcctggctcccacaggcgagagagtagggtggtttctccgccactttccccagcactggacctggcctgggctgccggatcctggtgtcactccagccgggacaggtacgacagcgcagcttctgaggttttccagccacctgggctgagggaccacatgtgtttgttcacatggctcctccagccctcggagcagcccgtctctcaataagccccattcaactgtcctccgcaggcgggcctcggccacggggctgtgcctggtaccaggctcctgataccaaggcccccgataccaggcctgcagctgacggaggcgggaagcagaggctgctcgagcctcacagccgctaagagctgtaaagtgccctgggggaagacaggtctgagggcgcccagccagggtgggatgggacacccagctccaaagccagaggccttggagccrtccggaaaactaatcaagacatcccatgtctgatgctgggagtccacggaaacattccctta

SEQ ID NO: 830059 - DNA, 531 bp, Homo sapiens
aggggatcctgtgggaagaaaatgatctttgctggaagctgcactgtctgaagttagcctcatttaaacgtagtctctgactctcagccacttgtatccccaacgctcagccgcttgcatccccgactgcttgcatcagccagctgaagtcttttttttttttctgagacagagtctcgctctgtcaccagactggagtgcagtggcccaatctcggctcactgcaacctccgctcccaggttcagacgattctcttgcctcagcctcttgaatagctgggattacaggcgaccaccaccatgcctggctaatttttgtatttttagtaaagacgggttttgccatgttggcgatgctagtctcaaactcctgacctcaggtgatccgccctcctcggcctcccaaagtactgggattacaggccygagccacggagcccagccagctgaagtctttttatggacacaggctatgggtgggatgggccaaaatggcaattatttggcggggttgcggtgtggagaaacggg

SEQ ID NO: 830060 - DNA, 578 bp, Homo sapiens
gacccagggggaggtaattgaattagggggccagtctttcccatgctatcttcatgacagtgaatacgtytcaccagatcagatgagtttatcaggggtttccgcttttgctttttcctcttttttctcttgccaccaccaaggcgccaccataagaagtgccttttgccctctgccatgattatgagccctccccagccatgtggaactgtaagtccaagtaaacctctttttgtttccagtttcgagtacgtctttatcagcagcatgaaaatgaactaaaacaaggttcaattaagcaagaagatttaactatctgaaatatatacacatctgacattggaacagccagagtcataaacaagtacttctagacctacagaaagacttagacggccacacaataatagtggcatctatagagtactccacccatcaatcacagaatatacattcttctcatctgtacatggaatatgctctaagatcaaccacatgcttgactataaaacaagtctcaataaattaaaacaaataaaaatcataccaaccatactcttgaaacacaggggaataat

SEQ ID NO: 830061 - DNA, 521 bp, Homo sapiens
tgtcaaagtgctttaaagattcctctcagtgtcttataagcccggggtatgtcataatgaccataaatagttttcatattattgtgggcayacagacataagttgtacatgaagcacagttataagacatctgtttttcagtgtcccccttcacccattaatttcttgaagctgaaacccatgtcctctccatctcttcccacagtgaatgacacgcggttggctctcagataacatgtgttgaaatacactgaatttattgaaaggaatgtggtaactgttatgatcagtttttgcacaaggacagatggggcatagagggcatgaaagcaaacactcatcatgtatccttctctttactcatcatttttatgtctgaagaaccaaagatttgtaagacccccaaaggcaaaatgtgcttgaggcatttccagtaggattatttcgctgtattataccattcaaatagcaatgacaagattggcataatagtaaccgtaactataatttatttaagtggt

SEQ ID NO: 830062 - DNA, 603 bp, Homo sapiens
caaaaataatgcttcatttcctggatcagaaaagaacatattcttgtaacttactgtcaaagtttatctttcatatttaagtctacaaacatctaaaatagaattttgtgtatattgtgatacaagaatgcaatttaacacattttaaaagtttattttattaaggtattgtctacataaagtccatccatcttaagtgaacagttttgtcaatttggggaattatatacagcactgtaacctccaccataaccatgatacagaacaattctctcaccttaaagaagtttcattgtgagacttcactcccagccctgtggcaaacgctgatctgattttcatccctttagttttgcctttttaaagatttaattctaatggaagatagagtatgtagtcttagatttgacttttttcacttagcactgttttgagattgatcatggatttcatttctttttattgctaagtggtatttcataatatgatatgtcaaatttgtttatctttaccatttgattagttggcaccatttgratttgctatattcagtctgcatctattatgaataatgctgctatgaatattcacataaaagagttt

SEQ ID NO: 830063 - DNA, 605 bp, Homo sapiens
tggaatatttgacttttaaagctttgcaagattccctcccaatcctcgcccaatttgatgtacccagtgctggatcccaggagaaattttgaaataaacacaatttctggttaaaagaatagtcctggagccgaactgatgtggaggaaacaggctctgggaatcgtaaaaccagatgggacaggctttctgggctcacacccatgctgctgtggcctcctggtgtatctccctgcatttgttctcttcattccagtttatcctttgcacggttaccagggcgatgtttctgaaacaacaaatccgatggcaacatcatttctgctgaaaattcttcagagattgctttttgtctctaggataagcccaaacctcttaacatggcattcaaagctgcaagtccccctcaccattcctgctgctcaccactccccacctcctcatacctcaggcttgcagggcatactgaaccgytttctgcttacaaatgactaggctcttcttcacctctgcacctttgaaaaggctgtttcctctgcttgagccactgctcctcctcaccaccctcctctccatgccctgcctgggaagctattcaccttgca

SEQ ID NO: 830064 - DNA, 608 bp, Homo sapiens
ggaaatcgatgaaatgcctaaaaataaattcaaaataataatcttacggaaacagtaaaatacaagagaacacaagtagaaaatacaaaagtatcaggaaaacaatttataatctgaatgaaaaactcaacaaagagatatcataaaaaggaaccaaatacaaatcctggaactgaagaattcaaagaatgaaacaaaaaaatacaaaggaaagctttaacagtagattaggtcaagcaggaaaaaaagaatgtctgattgaagacaggtcttttgaaacagcacaggcaggtaacaaaaaaacaaaaataataaaaagaatgaagaatgtctatgtgacacaagggacacatgccatcaagtaaacaaatgttcaagttttgtatgttccagaaggagaagagatgagaaaaggcatagaaaatctatttaatgaaataatagctaaaacttcccaagtctttgaagatttatggacatccaaatccaagaagcttaaagatckccaagcagactcaatcccaaaggtattctctgatgcacattatagtcaaactatctaaagataaagacagaaagataatttttaaaacggcaagaaaaaagca

SEQ ID NO: 830065 - DNA, 634 bp, Homo sapiens
aataggagtacctgctgagcatattcttcccaacaaatacatccaatagcgcaaaatcactagatatgactgctctctgtttatcacatcrgatcttctttagataccagaatcagagattcttgatttccagacaaatatgactgtggtaatcttgattttaaaaaatagcacatacctttaatttctacgaaaatataaaatttgatatttctctctagttcttatcccagtttccaaatgactttgcctgtgatgattatatactattaaactttgactgaggtcttccccagatgtagctacatgagtcactggttaaaacatttctttacagatgtttggaaagtgctctgggagttggtgtaacagagggtgtttacttatatgctgcctcaagtaaatcagcgactgttatttcatgtaccagaagcctaatgagccaatggtgactgcaaaataaaagcaaactgggtgttattcatcccacacatagctattaggaagaagaaaaactagctgtagattatgctaagtcaaaacagcagaacaaccaattttaccgtttcctaccattgctttaacaattgagtttagcacttaagaggtcacaaagcagttctgtatctaacaa

SEQ ID NO: 830066 - DNA, 440 bp, Homo sapiens
ataaccagaaaatattaaacaggacaagcaggggtttccaaatccactcagctcaagctaccctccccaccactccactggagctccttgccaaggtcaagggcgctctgcatcatgccaaagtcgatggtcayttttctgccttcatcttactgaagctctcagtagcagctgacacaggtgaccaccacctcctccttgaaacacttacttctacaaaactacacatttcccagtctccccttccatcagtgcccactactctttcttctttgctgggttcccctcctcttcttggatgacaaatgctaagactgcctcaggtcctcagcctagttatcttctctgttctttctctcacaatttgatctcacctagtcccaaataacgacagtaaattcacctgcaatctccatcctagtatccatgcaactgctaac

SEQ ID NO: 830067 - DNA, 599 bp, Homo sapiens
agtagagacgaagtttcaccgtsttggccaggctggtctcaaactcctgatctcaagtgatccacctgcctcggcctcccaaaatgctgggattataggggtgagctaccactcctggccggaaaccttcactttcactatatatatcctttttgtactttgggtttttgtttgtttgtttgagatggggtctcactctgttgtctaggctggagtgcagtggcacaaccatagctcactgcagcctcaagctcctgggttcaagcatttttctcacctcagcctccccagtagctaggactacaggcacacatcaccacatctagctattttttttttttttttttcttagaaacaaggtcttttggctgggcatggtggctcatggcctgtaatcccaacactttgggaggtcgaggcaggtggatcacctgaggtcaggacttcgaaactagcctggaacacatggtgaaaccctgtctctgctaaaaatacaaaagttagctgggcatggtggagggtgtctgtagtcccagctactcaggatgctgaggcaggagaatcacttgaacctgggaggcggaggttgcaatgagcca

SEQ ID NO: 830068 - DNA, 612 bp, Homo sapiens
tgaggtgttggattcggcagccccttgggtgacgggtgatagcacccgaggccctgccagcctccctgtccctggaggggaggaggcagcagctgtggccccagcacagagcctggccctggggttgtggggagcaatcattgctgagaattgctgtgttctcctaggctccagcatccctggcacccacccttccttgagaactgcccccagtgcccgggtgtgggtgtgtgtggggtcactgtgtccctttctgctcacatctttcacaccctttgttccacctgccttttagggggaacctcttcacccggacactgagtgatattgtgagcaaagaggacttcgtgctggattctgaatatctcgtcacacttctggtcatcgtccccaagtgagtgctgggcgatcacgaaggaaaccggccctgcccagtggagaggaaggtggacccgttggtgacttgggcagtgtggacgaggakgctccctgcccagccccagttctcgggaagcagtcattccttcatggggccctgcctgcggctgtcagtagggacagtggttgggtgatggtggttgtggccacgatagaagcagccatttattgagc

SEQ ID NO: 830069 - DNA, 599 bp, Homo sapiens
agtagagacgaagtttcaccgtcttggccaggctggtctcaaactcctgatctcaagtgatccacctgcctcggcctcccaaaatgctgggattataggsgtgagctaccactcctggccggaaaccttcactttcactatatatatcctttttgtactttgggtttttgtttgtttgtttgagatggggtctcactctgttgtctaggctggagtgcagtggcacaaccatagctcactgcagcctcaagctcctgggttcaagcatttttctcacctcagcctccccagtagctaggactacaggcacacatcaccacatctagctattttttttttttttttttcttagaaacaaggtcttttggctgggcatggtggctcatggcctgtaatcccaacactttgggaggtcgaggcaggtggatcacctgaggtcaggacttcgaaactagcctggaacacatggtgaaaccctgtctctgctaaaaatacaaaagttagctgggcatggtggagggtgtctgtagtcccagctactcaggatgctgaggcaggagaatcacttgaacctgggaggcggaggttgcaatgagcca

SEQ ID NO: 830070 - DNA, 577 bp, Homo sapiens
tgtttgaagagttaagacatttgtgttagatcatgtagctgcctagtgtcaggccttcacctggtcatcctgactgcctggtctgtccttgctctgtggtaggcccctcacaggtggcagtagctctcctttgcctcccctgccttgattttcagtttaggcccagctgggatggtctccagtatctgccaggcttcccccagctcccagcagctcttatcaaaccagaagtccagccagcaggggaggaaggaatgttggctggccactttaggtacaacatgcgggagtaagggtcagctcgaggcaatgttgtgaaatcccgaaatcattctttggaggttaaatttaatgtaaggcatttccatcttggaccctgccccggtccttcagggacccacggctccattgttccccaggtctcagcaaggcctttttcacttaacaccgtgttggtgctcatcgcagccccagtaaatggcagccatttggacgttccwtattttcacgagcttcaggggcaacctcccatggtcctttttggatgttctttttgcattagcttcatgtccaaagt

SEQ ID NO: 830071 - DNA, 501 bp, Homo sapiens
ccagcttgtgggatggctctgggcccatggtgggaggtgagcttgcctgtgcctgtgcaatggggtcctggaggtgagtttcactgtcgttcctgccacaggaggagtccccgccatcctcctggttaccctctgaccactccctgctcttacttccaccccgggcctgtacccttgctacaaggtcattcccattgtgtgtggcaataccaaagcctgtattaatacccaaactaataccaatgtctgagtcagcctggactgctgtcacaaaataccactgactgggcagcttaaaccacagactaagatcagacaacctggtttctcctgagggctctctgcctggcttgtagacggccaccttcttgctgcatcrtcccatggcctttccttggtgcctgtatgaggacagggagagcacggatccaactctctgctgtcccttcttatatggcctcgaatcctattggatcagggccccacccttagtgcctcaga

SEQ ID NO: 830072 - DNA, 468 bp, Homo sapiens
ctcgaccccccaagtgctgggattacaaacgtaagccactgcacccagctaactatttatatttacgtgtaactcacacactgaaaaattttgtgtttaccatctttatttcacctgacaatctgtcctgtaagtagagtatatagcctatttatattttggaaagtaattttaattacctattgcctttttagctataactctttttattaattttattggatgttctaggaatttcaggatgtatccttggcttttcaaagtttacctagagtaaatattgtactagttcttgaaaaatctatacaccttgcaacattatagatacatttacctctcccaattcccttacactgtagttgtcttacgcattccatctaaatccattacatacactagaatgttataatttttgctttagacagacctaggtattgtktaaaattaagataaaaatagtctttttta

SEQ ID NO: 830073 - DNA, 589 bp, Homo sapiens
atccacccacctcggcctcccacagctgagattacaggcgtgagccactgttccccrgccacctaactttcttaaatgtccgattttccatctatataaaatggaaataataatataacccataaggtcaccctgaggattaaatatgattaggcacacaaaagtgcttaacatagtgcctcagtgaatgctcatgattattttgaaatgaccaaaaagctggaaaccagccgtctggccagagtgtataagctctacacatgtggagctcaagcctgatattttcctgcacatgattttgattctaaaagaggtcaagtgagttggatgattattctttaattaagcatggaaagaaaaccaggattagattaaactgtgattgcgaatcatggaagatgattaaggaaaaccgcctgactgcacatttctgtagagcatcttcaagcatgtgtggcattcttttaaatgtcatactgaattagtatcagaaatgggcgcgacagttaaattattttaccttattgaaaacatccaagcttttttttttttcttctttcagattaactactgcaatgtgcaatgaagt

SEQ ID NO: 830074 - DNA, 589 bp, Homo sapiens
atccacccacctcggcctcccacagctgagattacaggcgtgagccactgttccccggccacctaactttcttaaatgtccgattttccatctatataaaatggaaataataatataacccataaggtcaccctgaggattaaatatgattaggcacacaaaagtgcttaacatagtgcctcagtgaatgctcatgattattttgaaatgaccaaaaagctggaaaccagccgtctggccagagtgtataagctctacacatgtggagctcaagcctgatattttcctgcacatgattttgattctaaaagaggtcaagtgagttggatgattattctttaattaagcatggaaagaaaaccaggattagattaaactgtgattgcgaatcatggaagatgattaaggaaaaccgcctgactgcacatttctgtagagcatcttcaagcatgtgtggcattcttttaaatgtcatactgaattagtatcagaaatggkcgcgacagttaaattattttaccttattgaaaacatccaagcttttttttttttcttctttcagattaactactgcaatgtgcaatgaagt

SEQ ID NO: 830075 - DNA, 589 bp, Homo sapiens
atccacccacctcggcctcccacagctgagattacaggcgtgagccactgttccccggccacctaactttcttaaatgtccgattttccatctatataaaatggaaataataatataacccataaggtcaccctgaggattaaatatgattaggcacacaaaagtgcttaacatagtgcctcagtgaatgctcatgattattttgaaatgaccaaaaagctggaaaccagccgtctggccagagtgtataagctctacacatgtggagctcaagcctgatattttcctgcacatgattttgattctaaaagaggtcaagtgagttggatgattattctttaattaagcatggaaagaaaaccaggattagattaaactgtgattgcgaatcatggaagatgattaaggaaaaccgcctgactgcacatttctgtagagcatcttcaagcatgtgtggcattcttttaaatgtcatactgaattagtatcagaaatgggcgygacagttaaattattttaccttattgaaaacatccaagcttttttttttttcttctttcagattaactactgcaatgtgcaatgaagt

SEQ ID NO: 830076 - DNA, 612 bp, Homo sapiens
cttcaatcagcttgtgccctcctgtaaaaaggcttccatgaattctcttgtcacaggaaatattgatcaaatcacatttttgatgccacgaagctgagggcagacctgggacagatggtgtctcccactgagggagcggaggcccctgggaggtcagtttctcctgctgctgaacaccatcttccaatcacaacagcaaggaattgggaatgtgtcattttagctgtaaaggaatgtacatgcaaaatgtcctgattaatgattattaaaggaaagaccatttctcttttccccaaacccaacctctttgtcacttcagacccctaagggagcctgtgcaacatcggtgaaggttgctattgacacagggtaccgacatattgatggggcctacatctaccaaaatgaacacgaagttggggaggccatcagggagaagatagcagaaggaaaggtgcggagggaagatatcttctactgtggaaaggtgagatcttgccttcagcctccactggggacagtgagaaggtttcagktgttcattttattattcatcttccgtgtgtgtgtgtgtgtaattgcactcatgagtaggcagtacttaataacagt

SEQ ID NO: 830077 - DNA, 623 bp, Homo sapiens
gtcggtctggctgatctcaaactcctgacctcaggtgatccacccgcctcagcctcccaaagtgctgggattacaggcatgagccactgcgcctggcccaagtttattgtttaatattcgttataatctcaaaaatcctttttttaataaagcatatgactagttaagtagaagtaagatgttttgttttctatcattttccactgtgattctgtggtatgtcaacacctgcagaaaggccatgtatttccagccctgctctgagagacgagctcattattaaaagtaatttgcataatgactccttttcctctggatagatatccagtagtgagatagctggaccaaatggtagttctacttttagatctttaaggagtctctgcactgttttctatagtggttgtactcgtttatattccaaccagcagtgtaaaagtgttcccttttcaccgcatccccaccaatatcaattattttctgattttttgattatggccattcttgcaggagtaaggtggtatagcattgtggttttgatttgcatttccctgatcattagtgatgttgaacrttttgtcatgtgtttgttggccatttgcatatcttattttggaattgtc

SEQ ID NO: 830078 - DNA, 594 bp, Homo sapiens
acactaaaatcattagagttcaattggccaaactaacatgagagaggatgtcrcatttctgaaactgcattgccacccatcactgaaggtggactgaaggcacaagccttttgcgctgggcttgcttattccatagtgtgctgcggttttcgaactgcaaaacttttactggtacagggagcccaggctgtgctggcaaatgtgaaaacagaactgcagtgcaggacgtgattggaaagcaatcatccacatctcccataagatgcttatattttcactttcatcaaaatttaacaccaatttttaatcttgtaaagaattcagaggctttccagattgtgtcacaatagtctagctggggaaactctgtaatcacagtacctgtaaggtccttcgagatttaacaatccattctgctcaaatttaacgttgtgggaatcctagacacatcccgctgcagggcatggatctaccaccagagggaaacagagagccatcgtggtaaagaagtggtggcaatagcgacagcctcctccctgttggcaaagagctacttgggccaagctgcacggccattctcccccatggatccta

SEQ ID NO: 830079 - DNA, 564 bp, Homo sapiens
cacgcccggttaattttgagacggggtttcaccaagttagccaggatggtttttttttcccgacctcctgatccgcccgcctcggcctcccaaagkgctgggattacagccgtgagacaccgcgcccggcacgcccagctaatttttgtttttttagtagaaaccgagtttcgccatgttggccaggctgatctcaaactcctaacctcaggtgatccacccacctcggcctccccaagtgctaggatgacaggcgtgagccattgtgcctggcccctcagttcactcttagttcaaaaaaggataattgaatataagctcataatcccgaataatccaacacaaaaaccagtcactggagtcagagtcagcagaaatcatctacagaattagctctacaaatatttccaattatagaaagatggagaccataagtaacgtgtttaaaattgaatgggacttaagctagcaatgagtgagagacttttaaaaaggagatagctattaaaaacaaatcaagtaaacaaaaacacaaatataataggcaaacaataactaaaattg

SEQ ID NO: 830080 - DNA, 615 bp, Homo sapiens
aacactacatttatattaggctacactaaatttattttaaaaattatttctttagtaagttaaacttagtttactgtaacttttttggtgctgtaaattttttatctttttaaaaracatttcaacccttataggaatgcttaggttaaaacacaaacccattgtttagctgtacaaaacaatattttctaatttaaaaatttttaatctttaaattttttactttttaaaacttttcttcttaaagttgaaggcaaaaacatacatattagcctacacaggagtagaattatcaatgtcactgtctttcacccccataccttgtcccattggaaggtcctcaggggaaataacaggcatggagctctcatctcttatgataacaatgccttcttctagaatacttcctgaagaacctgcatgaggctattctaccattaaccattgttatataaatagaaggagtgcacactaaaataacaataaaaagtatagtatagtaagtgcataaaccagtaacaaagtttattattattatcagtgttatctactgtacataattgtattgctatactcttaaatgactgtcagctcagtaggtttgtttacctcagt

SEQ ID NO: 830081 - DNA, 494 bp, Homo sapiens
cagtagtaagttcacagcaaaattgagtgaaaggcacagagatttcccatatatcccctcattatacatgcatagcyttcctcattattaacattcccctccagagtggtacatttgttgcaactgatgaatctacactgacacatcattatctcggagagtccatagttcacattagcatttacttttagtggtcattccataggtttgaacaaatttataatgacacatatccacaattacagtgtcataaagagtagttccactgccccgaaaattttgtgtgctccacctattcatcatccggtgaacactgatgattttactgtctctgtagtttgccttttctagaatgtcacacacttataattatatagtacgccttttcacattggcttctttcacttagtaatatgcatttaaggttccttcatgtctttttgtagggcttgatagctgatttcttttcagtgctgaataatatcccattatcc

SEQ ID NO: 830082 - DNA, 465 bp, Homo sapiens
atacagggggaggaaagtgtattttctttcgattgtaaataacatgaaggatgtgttttaaattgcttcaggaaaggttgaccttaactgctacttgcagtttccttaaactaagtacactatatcatgcttctgtctctttgcaaatgctatttcttcttcttggcacacgttttttttttttttttttttgcaagttttttttgacttcacctaccaagcaaagttttccttttcttggcttgtaaaaaattgcatcatcattgttcctgcgttttgcttttatatctcctcccaggcaaaaatcatattttattcacctttaattccccattttatcccagggtcttgaaaatactgttgtttgttgaaaaagtgaaaagttaaatgaaraaaaaactcttgattaaaaagttataggttaacaaaaataagtcattgggggaaaaaagtgaaacttttgac

SEQ ID NO: 830083 - DNA, 565 bp, Homo sapiens
accaccacaactaatgaaactgttgctgctgctgttgctaagaaaaatgataataaagatgaaggcaatgattactaacattcgttgagtgcttactttctctcaggcattgtgctaagtgctttactcatataatccttcgagcaaatataggaagtaactactattattatttttgttccattgttgagaaaactgaagcttgttgtccagcatcacattgctcatagctaacacatctagggttaggtatcacagctggggttaagcaagtcatctgggaggactgcaagcagtccagctccagagctacttatgatagagggagcatctctgccctctaggagctcacaatatggagcaggagaacagtacatgactggatgtgatgtgtcaattataatttttaaattaagtgcagtgaatgcacaaagactgacatgctgagtggtcttctagasaagttatggagtcttcatagagcaggtaaattatgacataagtctaataggagttcttagcttattttttatatagtaccttttgtagtctgataaacttttca

SEQ ID NO: 830084 - DNA, 556 bp, Homo sapiens
gttttttttttccaatatgtggaatccagacaacactataaacaaaggaccaattagaaacagcagagacagagctttattgtggagtgctttggaagagctagtagtaagaatgttagatcaaaatggaamtaagcaaaggtaatctgatttatctgagcatttgaagtacatattgtcctgattagttgtttgtttgaaaaggatagcagtgattataacacagacaaaaaacaagtttttgctacataaaaaaggaacattattcattttccatatgccaaagttatattaacaaggatacattgaaccacagttatggctctaaataatttttttttcttcagctcaaacctgttttcccattttaaatattttaaaaataaatttggtgagttttagactgtaccagagcatcaagaattctcaataggaatttcatgtcacaataaattatatttttcaaaagtatctaaaatttggcttaaacataaaaaagtaaaattatttttacattaaaagcacccttgaaaattaacagaaaaatgttgcactt

SEQ ID NO: 830085 - DNA, 653 bp, Homo sapiens
ttggtgctctctattcatttaagtgtttcttatcagcttctgcctagggataaccttctaataaaaatacacatttccttgcccatatgtcacaagtcagctgttcctctaaaggacatacctgtgatcttgaacaatgggttcaaaatatattataaaccagtataatattctaggttttgtttgtttgttttttgttttctgagacagaatctctctctgtcacccaggctggagtgcagtggctcgattttggctcactgcaacctctgcctcccaggttcaggtgattctcttgtctcagcctcccgagcaggtgggattacaggtgcatgccactacgcccagctaattggcatttttagtagagacagggtttcaccatgttggccaggctggtcttgaatttctgacctcaagtgatctgcctgcctctgcctgctaaagtgctgggataacaggcatgagccaccatgccaggccctagtttttttatttttattttttattgtttttattgttgctgttgtttgagggaaatactgaaactacaaataaattaacagtcattgccaccaactcatttgatgaaaaccrtttattctaattgcaactgaaaacctggcttttgtgccctcagatcagatgatctg

SEQ ID NO: 830086 - DNA, 653 bp, Homo sapiens
ttggtgctctctattcatttaagtgtttcttatcagcttctgcctagggataaccttctaataaaaatacacatttccttgcccatatgtcacaagtcagctgttcctctaaaggacatacctgtgatcttgaacaatgggttcaaaatatattataaaccagtataatattctaggttttgtttgtttgttttttgttttctgagacagaatctctctctgtcacccaggctggagtgcagtggctcgattttggctcactgcaacctctgcctcccaggttcaggtgattctcttgtctcagcctcccgagcaggtgggattacaggtgcatgccactacgcccagctaattggcatttttagtagagacagggtttcaccatgttggccaggctggtcttgaatttctgacctcaagtgatctgcctgcctctgcctgctaaagtgctgggataacaggcatgagccaccatgccaggccctagtttttttatttttattttttattgtttttattgttgctgttgtttgagggaaatactgaaactacaaataaattaacagtcattgccaccaactcatttgatgaaaaccgtttattctaattgyaactgaaaacctggcttttgtgccctcagatcagatgatctg

SEQ ID NO: 830087 - DNA, 614 bp, Homo sapiens
ttgtagattctggctattagccctttgtcagatggatagatcgcaaaaattttctcccattctgtaggttgccygttcactctgatgagagtttcttttgctgtgcagaagctctttagtttaatcagatcccatttgtcaattttggcttttgttgccattgcatttggtgttttggtcatgaagtctttctccatgcctatgtcgtgattggtattataggttatcttctagggtttttatggttttaggtcggacatgtaagcctttaatccatcttgagttaatttttgtataaggtgtaaggaaggggtccagtttcagttttctgcatatggctagccagttttcccacaaccatttattaaatagggaatcctttccccattgcttgtttttgtcaggtttgtcaatctcataccagttagaatggtgatcgttaaaaaggcaggaaacaatagatgctggagaggatgttgagaaatgggcacacttttacactgttggtgggagtgtaaattagttcaaccattgtggaagacagtgtggtgattcttcaaggatctagaaccagaaataccatatgaaccaacaatcccattactgggtatata

SEQ ID NO: 830088 - DNA, 628 bp, Homo sapiens
atttaagtgaaataagccaggtacagaaagacaaaaattggatgtaccatctcctatatgggagctaaaaaagtttatctcaaggaagtagaaattagaatggtgcttaccagaggctgggaagtatgggggagaggggagatagagagagactggttaatggttgcaaaaatacagttagaaataagtaagttctagtgttcaatagtacagtacaaggactatagttatcaataatatactgtatatttcaaaatagccagaagagaagatgtggaatgttctcaacacaaataaatgataaatgtttgaggtgataagtatctcagttactctgatttaatcagtgcacattgtatgaatgtatcaaaatatcacatatgccccataaatatgtaaaattgtatatcaataaaaaaagactaatcttctatcattgcaaaagagaatggaaataaataagctaattatttagttctagaagctagaaatgagaaatcagaatcctggcaaaatatgaagaagaaatagatatagatatagataaatataawattaattaaaaacaataaatatattgataaatccatctgaaagctatttcttgaaaaaataataaaatatagga

SEQ ID NO: 830089 - DNA, 562 bp, Homo sapiens
atcagagaaaccactttgtggtgtgtgcattcatctcccagttaaatgtttcctttcattcagcagttggaaatactcttttagtaaaatctscaaatgggtatttgggagttcattgagccaaaggtgaaaaagtgaatatctcaggataaaaactagaaggaagctatctgagaaaccactctgtgatgtgtgcattcacctcacagagttaacactcttttttcattcagcagtctggaaacactgttttggcagaatccataaagggttatttgggagtgcattgaggcctattgtgaaaaaggaaatatcttcagataaaaataagaaagaagctttctgagaaactgctttgtgatgtgtgcattcatctcccagagttaaaccattttttggagtgaacagtttggaaacactgttggtgtagaatctgcaaagggatatttcagatctcattgatgccaaaggcaaaaaatcaaatatcacaggaaaaaaatttagaaagaagttatctgagaaactgctttgtgatgtgtacattcatctgtcagaattaaac

SEQ ID NO: 830090 - DNA, 524 bp, Homo sapiens
gaaaaaacaaatatccacagatgaaaactagaaagaagctgtgaaactgcttggtgatgtgcagattcatctcgcagtgttaaatctttcttttcattcagcaggttggagacacgctttttgcagaatatrtgaaggaacattttggaacccattgaggactatgtggaaaaaccaaatatccctagaaaaaaacaagtaagaagctatctgtgaaatggcctggtcatgtgtggattcatttcacagagttaacttttcttttgattcagcagtttggagacacttttatatatatatatatatatatatatatatatatatatatatatatatatatatatatataatctgtgaagggacattttggagcccattgaggcctatagggaaaaacagaatatccgcagaaaaaaaaacttcaaataagggatcagtgaaactacttgtgatgtgtggattcatctcacagaattaaacctttcttttgattcaacagctggaaacagtctttttgtagaatc

SEQ ID NO: 830091 - DNA, 595 bp, Homo sapiens
tttccccccttcttattcttactggatccccttagagatccaaccaccttattgctcttctccatctgcaaacatgagctaatggtgagactcacatatacatcctgccacctcattctgttgctatatgggygggcatgggcaccgggtcagactaattactgtgctcatcttcctggtcaaagtggctcaggtgggcgtgggactgaaaccagtccatcagagtccttccgtggggcatgggacactgacatttaaagacacagttctctccttcctgttgaatgtgggctcagggtgtgaactgaaaactgctggaaaccagaattcttaccatagagaagagactgagacaaggaagccaatggtcagagaagaggagaagcaatggctggggtccagagtcccggccaggggctcactgagcttcccagattccagtagtttttcctttgagtctaaaatccactccagaattctcccactatatcccctgcctttaattattttttttaacttcagttggttgaattaggtttctgttgcttccacctgaaataattttcagtaatagaatctgtttctaatagactga

SEQ ID NO: 830092 - DNA, 542 bp, Homo sapiens
ttgcaagggttttgatgggaaatttgtaggcacccagcttatagttctatttggctccttctgacatatttttgcttcytactcttaaaatacctataaagggcacccatttctcttcaattaaaaaagtaaatagactacattggcatggttaaattcccagggcccttagttttttattgatagactaagtggccggtatcattgcttacaaaagtgtctggaccttgatggagtttatgttagaaaacaaagcttatattttttatttttattgttgaattcaaattttccataaacttttgaagtcccctcatatgctaagggctttaatggaaaagcagacaatatgcaagaacagatggttaatctaagaagcaagattgacactttaagaatcagaaggaaatgctagaaataaacactgtaacagaagacttttaaaaatttatttgctaggctaatcagtaggctagacatggctgaagaaagtcagtgagcttgaaaagatgtcaaactgaaatgcaaagagaaaaaagaaa

SEQ ID NO: 830093 - DNA, 542 bp, Homo sapiens
ttgcaagggttttgatgggaaatttgtaggcacccagcttatagttctatttggctccttctgacatatttttgcttcctactcttaaaatacctatwaagggcacccatttctcttcaattaaaaaagtaaatagactacattggcatggttaaattcccagggcccttagttttttattgatagactaagtggccggtatcattgcttacaaaagtgtctggaccttgatggagtttatgttagaaaacaaagcttatattttttatttttattgttgaattcaaattttccataaacttttgaagtcccctcatatgctaagggctttaatggaaaagcagacaatatgcaagaacagatggttaatctaagaagcaagattgacactttaagaatcagaaggaaatgctagaaataaacactgtaacagaagacttttaaaaatttatttgctaggctaatcagtaggctagacatggctgaagaaagtcagtgagcttgaaaagatgtcaaactgaaatgcaaagagaaaaaagaaa

SEQ ID NO: 830094 - DNA, 552 bp, Homo sapiens
atatatatatatatatatgaaaattagccaggcatgatggcatgtgcctgtagtcctagctactcaagaggctgaggctggaggatcacttgaatccaggagttcaaaaaagctgtagtgasctacgatcacaccactacactctagactgggtgacagagagtgagatgctgtttccaaagagagagagagagagacaacactgcatttgttattcagtcattgaataaatatttgttaagcatctattgtgtgcttcgtattgatctagacactgggacacaatggtgaaaacacggacaaggtcccagttctcatgacatttatattctagtgtctgtgtggggaagagatacataataaacaagtaacaataaatgaagatgattttagttgttaagagcaataaagaaaatggagaagagtggcatggttgtgcttgaatgatagaggatgagtgaggatggagtaatttagactaaaggattggaggaattctcactgagaaagtgatgcttgagctaagactgcaaagatagacctgttaagata

SEQ ID NO: 830095 - DNA, 552 bp, Homo sapiens
atatatatatatatatatgaaaattagccaggcatgatggcatgtgcctgtagtcctagctactcaagaggctgaggctggaggatcacttgaatccaggagttcaaaaaagctgtagtgacctacgatcacaccactacactctagactgggtgacagagagtgagatgctgtttccaaagagagagagagagagacaacactgcatttgttattcagtcattgaataaatatttgttaagcatctattgtgtgcttcgtattgatctagacactgggacacaatggtgaaaacacggacaaggtcccagttctcatgacatttatattctagtgtctgtgtggggaagagatacataataaacaagtaacaataaatgaagatgattttagttgttaagagcaataaagaaaatggagaagagtggcatggttgtgsttgaatgatagaggatgagtgaggatggagtaatttagactaaaggattggaggaattctcactgagaaagtgatgcttgagctaagactgcaaagatagacctgttaagata

SEQ ID NO: 830096 - DNA, 634 bp, Homo sapiens
tgctgcaggacatatgtacacagcccagttccctatcaaaacccagaaatttctgttttggtcgtggtttaaattaagaaggggacaaktggccaggcgtggtggctcatgcctgtaatcccagcactgtgggaggccgaggtgggcagatcacgaggtcagtagttcgagaccagcctgacctacacggtgaaaccccgtctctactaaaaatacaaaaattagctgggcatggtggtgcgtgcctgtaatcccagctactcaggaggctgaagcaggagaatcgcttgaatctgggaggcggaggttgcaatgagccaagatcgcgccattgcactccagccagggcgacagagtgagactctgtctcgagaaaaaaaaaaaaaaaaaaaagaagctgacaatcttcagacaatactgaattaaaatttcaccagcacacaggtgcagctgcacagcaaaccagagagagcagcctggtgtgcagacctcccgcctgccaccacggatcgaaaggcagcaggggatggtggacatattttttatttacttacccgggagagatggggaagaatctgtatttttaaaactggtcatatatttaaaaaggactctgactcaaatgatgtagtca

SEQ ID NO: 830097 - DNA, 645 bp, Homo sapiens
aataaattccagaacttagatgaaatagacaaattccttgaaaagaaagacacaatgtatcaaaacttacacagaasaaagtaaaaattctgaatttccctaagtctatttaataaattgaaattgttactaaaaattctacctcaaagaaaactcagtttagatggctccactgaattctgtcaaacttttaaggaagaaataataccaaagttacacaaactctttttgaaagtagactagaaatggacaatgaaggaatacttctcaatttctctgatgccaaaacctaatgaagacattacagtaaaagaaaatcacagaccaatattgttcatgatcatgaacaaaaagatccttaacaaagcattcataaattgaattcaacaatatacgaaaaaagtctaatacattatgaccaactgtactttatcccaagaatgcaaggttgttttaacattcaaaagttaattaatgtaattaataatattagcaaactaaagaagaaaatagttattatcacaataaaggcggacaagaaaacatttgacaacattaaacaaccattcataatagacactcagcaaactagaaaagaacttcctaaaatgttgtctcattaaaattttcatttttatttgaaat

SEQ ID NO: 830098 - DNA, 626 bp, Homo sapiens
acaggagatcaaggccctttgttttgggttaaatgaaggttgccaggtggaggttgctatggggagagtgctaagtgaaaatgttacataaactgcatgctttttacaaataggagtgatygtttcgtccagtctgctgccactgaaccaccctgtatgtaagtcccctcaataaaccctatgtctcttttgctggctctaggtctttggcctcttgaacatggtgtcattcctgttgaactcaacagggatccagcacaacagcatcttataccgatgcaaaaacttagaggcccaaatgtacatgtttaatgaatcacatgagcccagatcattctggctctgaaacctatcttttcccccatttcactgagagatttgcctaatagagaacaggtctttctgggataacaatttcctggtcccttcagtccctgtggccactggctttgggcctccataaataattttccaaatcctgggattcctcccccaatgctgaggctgctatggtggttaaatgcactagatagcataacttaagcatacccttaaaatgagcctgcatagcagatgtacctgaatgtgtgccctgagctcagggatctgggagtggccaacccaga

SEQ ID NO: 830099 - DNA, 626 bp, Homo sapiens
caattaatgaaataagaaatacaaccaagagaatctgcaatagaatagatcaagcagaagaaaaaaatgtctgaacttgaggacaggtcttttaaaataacagaaaaccaaatacygcatgttctcactaataagtgggaactaaatgatgagaactcaggaacacaaagaagggaacaacagacattgggatatacttgagggtgaagggtggatggagggagaggaccagaagaaataactattgagtattaggcttaataccagagtgatgaaataatctgtacaacagacccctgtgacacaagtttacctgtataacaaaccttcttatgtacccccaaacctaaaataaaaattttttaaaaacctagttagaacacaaaggagaaaagaatgaaaaagaatgaagaatgcctgcacgacatatgggacattataaagtgacaaggattcaaattttggtgtcccagaagatgaagagtaaaccaaaggcttagaaaagctatgtaatgaaataatagctggtaagttcccaaatcttgcaagagatgtagacttccagatagaggaagctcacagatccccaaacagattcaacccaaaaaggtcttctccaaggaatg

SEQ ID NO: 830100 - DNA, 525 bp, Homo sapiens
cagatttaactcaaacaagaggattggaatccattactccccactaaacaagaacaatgtttgccagagggcttgctaattagcaacagactttatattagtcaggcattcttcagttgcaacagatwaaaaaaaaaatcaaactagcttaagacaaaaagaagtgtatgagggatttattacttcatgtaattgaacacctcaggcatggcctcactctcactggtttagagaatcaggcaatgacattcaatgcaggccgagagcctggaaaattacggtggcaattgtggaaatgaaggaacctctgcctgtcaaggtctacaaatacattctgcctaaattatttggcaattcctgagctgctcccgaatcagggaggctccaaaattctcagtgtaaagcaatagatggaagattgagagctgaacaattgccttgctgcccaccacagggaagacagaatttggattttgaggcttatcctaaatacattcaaggacttaaggggaaatatgcatataa

SEQ ID NO: 830101 - DNA, 588 bp, Homo sapiens
ctagtcagcactgttcttttgcattgaaaccgagcctaagcattgactctttcctttcattttctttagtacacatctcttggttttccccttgtttctccactcaagtttcccacaaatgagatgagagtatagtgctgaagagattcttgttttctcatatttgttctcatcacttgaatacgggcaactgtcagtctcccaaacaaaattgtccatcttacatgccaatattatgtggccaatattagaacactgaaaatatttcaaatcaatgacctcaatgtctaccctatgaaactagaaaaaagggggcaattaaatcaaatgtaagcagaagaaaggccagaatcaaaattaaacccaaaataaatgaaatagaatgcagaaaatcaactgaaaaaaatcaagaaagtcaagtggtctttttgagatcaataaaattatcaacctctagccacactaataaaaaaatagaatatacaaattgccaatattagcaatamgaaaagtgatatcactacagattctacagatattagtaggataacaagaaaatattataaatgacttttttctataaacttt

SEQ ID NO: 830102 - DNA, 647 bp, Homo sapiens
ccaaagcacttcccaaagtcaaacttgcaccaaaaaaaaggtcatggtcacagtttggtggtctgctgctggtctgacacactacggctttctgactcacggtgaaaccattacatctgagaaatacgctcagmgaatcgatgagatgcactgaaaactgcaatgcctgcagctggcattggtcaacagaaagggcccaattcttctccacgacaatgctcgtggagcacacattccacattccacgacacattccacaaccaacacctcaaaaattgaacaaattgggctaccaagttttgccttatccaccatattcaccggacctcttgccaaccagctaccacttcttcaagcatctcgacaactttttgcagggaaaacacttccataaccagcaggatgcagaaaatgcttttcaagagttcatcaaatcccgaagccgggatttttacaccacagggataaacaaacttatttatcattggcaaaaatgtgttgattctaatggttcctgttttgattaataaagatgtgtttgagcctagttacaatgatttaacattcatggtctgaaagtgcaatcacttttgcacggacctaatataaaattagaggaaggaaatcaagtctctaaaatattaagt

SEQ ID NO: 830103 - DNA, 579 bp, Homo sapiens
gagttgtttttagtttggggcttatatgaatatgaatatttttaaatcggctttaaaaatattaarataggaatacaacaaaatattcaaggtcacttttagttagcattacgaatctgaatattacattaccagttttttttccacaaatgatttttaaagtcatttatatgatgcttttatggcaacaagcagtttaaaactaggaaacagatgattttacaaaagttcagaggcaaattacaaaataaggactgctggagaattgaaacatttcgtggggtactagaagaatctgtcgtttttgaaagtctcttcaaagtctaatagtcatactgctttgtttttcaggagaggaaatggagaccaagagtctggtttggaaagagtaccagactacaaatgaagtgctcctgtttagctttaactaactgacattaagagaaactaacttttctaagcctgaatttgttaggctttgctcatgctcagtttcccagccttcttgggaattttcaaactatttgtaaaatggtttgttctcccctaatttttaatgtcatcataggaccagaaatt

SEQ ID NO: 830104 - DNA, 648 bp, Homo sapiens
tatgaggtaggtacaattatctccattctacagatgaggaaacaggtgcagagaatttaagaacctagcccgtcatactattaraggggtgaacccaggtagtttaactcgtatgcctgtgtatttaatcattacactgactgttttaatccttaattctaacccttagttctattccttctcacattgaatcaatcatctatgatctattaatgttgtcccccaaatcatctcagtccctgtgtactttggctggagtaatagattattttttaaagtagaggtttattttagagataatcttgcttatctaatttcctcatattgcagacttgctgcagttttacatccagttcactgatcaactatcaaactgaaggatagcttgtcactgcatctgcagtgactcacttgccttggggaaaaatacatgtcacacatttacattttggcttttaagtgaggaaacttcatggttttcagaacagagtaagattcttgaaaactaaaacaataaatccaatgctgattgtgatcaatgatgaataccttgtgtcacttgcaaaaatgtacagcttctggaggtgttttcctggtcttggggctggtgattgtgatcattataactactgatgagttaccaaattc

SEQ ID NO: 830105 - DNA, 591 bp, Homo sapiens
tcactcaaattagaatggcgatctttaaaaaggaaacaacagatgctggagaggatgtggagaaataggaacacttttacattgttggtgggagtgtaaattagttcaaccattgtggaaaacagtggtgactcctcaaggatctagaaccagaaataccatttgacccaggaatcccattactgggtatatactgaaaggattataaatcattctactataaagacacatgcacacgtatgtttactgcggcactattcacaatagcaaggacttggaaccaacccaaatgcccatcaataatagactggataaagaaaatgtggcacatatacactatgtgtatatgtgaatactatgcagctgtataaaaggatgagttcatgtcctttgcagggacattgatgaagctggaaaccaccattctcagcaaactaacacaggaacagaaaaccaaacactgcatgttctcactcctaagtgggagttgaacaakgagaacacatagacacagggaggggaacatcacacaccagggcctgtcagagggtggggagctaggggagggatagcattaggagaaatagctaa

SEQ ID NO: 830106 - DNA, 424 bp, Homo sapiens
actaatttttcaaatttcttgtagagatagagtcttgttttgttgcccaggctggtctcgaactcctgccctgaagtgatcctcctgcctcagccttccaaagtgttaggattaaaagtgtgagccaccaagccctgcccatgatcaattttaacttgcaattgcatcatttaagaaaaaagttttattcagagctagtagctacagctagcagtacattcagttgctggtaacaaaatccagacagactgaacaaagtagggatcatattctctcatgtaaggacaaactaaaataaagctgtcctgggctggtatgaaagctcaaagrttaatagagaaccagactcccatctttctttagggcatggctttgcatcttcaagcacacatatgatgtttcctagaactccagacattgtgaa

SEQ ID NO: 830107 - DNA, 411 bp, Homo sapiens
tttttattttttatttattaatttattgtttttagagatcgtgggtcactgcatcctccacctcctaggctcaagcgatcctccaccycagcctcctgagttcctgggactacaggcacttgccaacatgcctggctaattcttgttttctttttttaatagagactaggttttgccatatggtctagtctggtctccagctcctgggctcaagggatcctcccaccttggcctcccaaaatgttgggattataggggtgagccagtgtgcctagccacttcatgagtctttaacttttattccccagctcttatcactctatagcaagctgtgctcatcttctgaacttacaactagaattagcaaatgccctaagaggaaaagtcatcctgactgtcgggttcacctct

SEQ ID NO: 830108 - DNA, 617 bp, Homo sapiens
cttgctgatctggcttcatgcacagccacagagggactgaaactgttcctaatcacttcagtcactgaaatgggccctagatcaaagtactgcagccttaaatttcatcagtaacatcactcctcaaaggctttttgaaaaaggtctgcatgttgaccatattactgcaatgtgttatgtgggagaggagcatttaatttattataagtctgcaggactgggggggccctggaggaaccagagagggattctgatggaagaaatagaggaaggaaacaaaggaggggcaagacagcattgacaggttggagccccctgaagaacctgaaggccagataccaggttctgagagagtcccgcattcatgggcattccgtgatggtgccatgcactgacatctgccaacccaacaacaggccgttgcagaaaaatattattgtcctgaatctgctaaagaggaagtaaagtcagtttcatttttcatgagaaaagtggaaatgataataatcttttcctccccacttgcttcccatttttcctattcgctgtattttgagttttkgtttggcttgtttaaactgttgttaacagaagtattaatattttcctcaaacttt

SEQ ID NO: 830109 - DNA, 616 bp, Homo sapiens
gcctgcactttcctgtgcacaccaggctgtttctggccttggtggtgtctaaactgtgcttatctttgttggctgagatttcagaacaccactaatcttakaatcacagaaaggtgaagatagatcttaaaagaccagcccactcagcagcccccttttatagactatgaagctgaggttcagagacacatgaattgcctgaggcttctcagccagctgggaatttccagaattccctggaatgtgtctttaggattctttctaattcctagagagtctccccctttcagatgcctttctctttctttcctttctgcttcccctctcttttccttcttgcctcctctgtacacgaacacgacaaaggatatctccctgccagtccctcccttattggacattctatgttataacctgtaatcttgaaatggggctcttcctctgttactccttactctggtttggatttcttgaccttggacttgctattctttgtgagttgattcctatttgcatacttgtttactcacaggcctgacctgcgttactaccctcatccccctcacctgcctcgatcctcataactcgggcctcagctagaagagtttactctcct

SEQ ID NO: 830110 - DNA, 577 bp, Homo sapiens
caaagtcaggagatcaagaccatcctggctaacatggtgaaaccccgtctctactaaaaatacaaaaaattagccgagcatggtggcgggcgcctatagtcccagctactcaggaggatgaggcaggcaaatggtgtgaacccaggaggtggagcttgcagtgagccgagatcccgccactgcactccagcctgggcgacagagcaagactccttcccaaaaaaaaaaaaaaaaaaaaaagaaagagtaaaatatttagtctcatcaaatgatcgcaaattagtaaaatgctatattattttcacctattcacaatattagaaaggtaatattcagtgtttactggggtgtgataaacacatacacagtgttacacagtgttgatgacttataaattgacccaaaagcttgtggaaaagagtttagaagttaaccccttttaaaaacatgtayacctttttacaatgcaatttttcttctagaaatctattctacacagaaatatataaatgttacatataatgatgtttattatactatatttgcaaaaccaaatttttgaaataatctaagtaat

SEQ ID NO: 830111 - DNA, 633 bp, Homo sapiens
cccaacaccatgtggaagctgccaaggcttgggacttgcaccctctgaagcaatagcctgagttgtacattggaccattttagctgcagctggatcagctgtggtgcagggcaccaagtcccaaggctgtatacagcagagtgaccctaaacctggcccagcaaaccatgtttccctcctggacttgcgggcctatgttgagagaggctgttgtgaaggtctgtgacatgccctggagacattttccccattgttttgatgactaacatttgggtcctcactacttatgcaaatttctgcagccggcttgaatttctccccagaaaattgggttttctttttttatcacataatcaggctgcaaactttccaaacttttatgctttgcttcctcttgaatgcgtctcacttagaaatttatttcgccaaatatcctaaatcatctctctcaagttcaaagatctactgatatccagcgtgggcaaaatgcttccagtctctttgcacatagcaaaagtaacttttactccagttccccaaaagttcctcatctccttctgagaccatatcagcctggacaccatggtccatatcattttgatcaaactatycaacaagtctctgtgaagttgc

SEQ ID NO: 830112 - DNA, 431 bp, Homo sapiens
ttgtactatgtagtaattgttctgatctgacaatttctatggactgttttaagatttttaaaagcttgactttttttyttttttaaagttaatacattcccttagcacttaacccatatttaatacaaagacttagatgtgttttcttcctttcagattttaggcaaatttgttgagacaattctgtttgtcatttcttaaacaaaaatgaaaatttaccaaaatactctgtgtgctagaatggtattatggaaaattaatatttttatttttattgcaaacattattataatctgtttaatttttgcgattaacaagtatcacggctccactaaagtacacattcatttgattcacacctttctaaaggactaactatagattgttttattttctaacaagcaacagatgcaagaatgcagtttgaaata

SEQ ID NO: 830113 - DNA, 614 bp, Homo sapiens
ttctcccacctcccaatctccctttttttattttgtgtataatctcatgtgctsttttcatttcattgtaattttcttcataattaagaatctatgacttatttcctttccctatcatttcctttctcgtaacatagcaaaacaatgtggcaaaatcagtgatttgttacttaagtaatgtaatcagtgctcatttaaaaaaacaaaaaaagaatattttaatcatattttttctttatgagtctctacttgtttgcacatatttgtagtagggaaaaaagttgatatagtaaacattattttccttccttttctttttctttattctagcagttgctcattgaatcaactggtataccgaaattctgtcttttgagcaaaggcataggtcccagacagtggagtgggaagaaatatgtagagacagtgtctgggggaaaagggaagaaaagaagaatatttgtgcactctaacagcagagacaactcatatgctatttctttgcatctgaatgaagtcaacaaaactcatggggaacagacactgttctctgagttctacaaaaaaacagagcctgaggcaaagaacccgtatgttaacaattatttggcaag

SEQ ID NO: 830114 - DNA, 555 bp, Homo sapiens
cctccaaaaatcctaacggttacttatatgtttaagtttcatagcactgtccagtttatttcatggtttgcattgttccaaatttagatataatttmtgtattatttttatatgaaattggaagtattcaagcagtaacacactttataaggaagtatccctgagagaatttcactgattgtgttttaataagatgagatatactaagatttcagttccatattattgtcttgttgtagaaactgtccttattcagtgatgcagaaaacatttagtttcctcttaaattcatagattcctattgagatacaaatgaattggatctggccttagagttttaatattcatattttaattttttatgaatgtgcttttcccctactaatctcttcttttcagcacacacttttattaatactaagtaacaacttttgtcttactagcatccatacttgctaacgacagatagattagcatagaaaatcactaataaaaaaacttaataaaagagttctcaaagtatatgacttagaaactcactaaaaagtgtttaaa

SEQ ID NO: 830115 - DNA, 584 bp, Homo sapiens
catttatccttacatcttttgctactgctgttttgaatgcagcagtgcgtaatagctttatgaaaggaacctgattttgatctcttcgctttcacattcacaaatgtgaaaagtgagagtcaggtgtaaactaaagttttatcccgttttgctttgtttcttttgcttggcaatattgattactttttagttcactgagtgctcagtgcaatgtaataggagatgtgggacaattgcttgaaccaggttatttgtaagctaatgagatagttggtgaatagtaaatggaaaaatgacacgtgaaacacaagaagagaagccattgagaaacagaaaaatgtttacaaatattttatttttagaagataaatgggctaggtaaggtgcaggtaactcttccttctctcattaaatctatattacccaataggcttttggatttagacttaatattgtgttctgagaaaactgaggttaccctaagacatggaaaagcaagcacaaccaamacaatccagtcacattcaccttaaaagtagtttattataggtatcctattaaactcattcattaacccttctcta

SEQ ID NO: 830116 - DNA, 552 bp, Homo sapiens
caagagccttacacagatgggtttaaccagctccctcaatcgtgaaaggtcacatctttagaatgaatcacttaatatatctaatagaacacagtgcaatgtactggtcaagtttatttcttgatcagtgtgtctgttatgcaggtgtgttccatttttgaaataaactagctatacatttataatttgcatattttatatatgttatttaataaaggattatttgaaagttatgacttattcaggataaaatgtcaggcttcataattattcacttgtatgagactaagaaaagtgaaaaagtatacccgaaaaattgttaacattgaatatgctttaattaattatgagagctatataacaacctttataggaaagacagtgtaaaacaatgtctctcctttgtgatctttagaattacgtgcttacttactgaattaggttactgaaatcattgaaaattgactgtrtctattgtagctgaatatttattttctgaattaacattacatcaaatgaagttggcttgcaatttttaaatatgcaattaaa

SEQ ID NO: 830117 - DNA, 583 bp, Homo sapiens
aatcttttctttttgaccttttctcttaaccaccatttagatttaatttctgcatttcattttcactctcattgtcacaagttttatttggcttattgttatgagtctcaggttaaattaattaygcctatgagttctaattttcacatgcctttaattaaatgtgttttaatggtagtaccataaatttattttattttttcattaacatatagaaaataatttctatttgtggccttaagtacaatgtgaaaccaaaaataagtctgcactaaacatgagatatgtatatctttgattgtaggttattttatgaaaggcttttcaatgtttagcatcgctgtttatatccatgattgtcccaaaggttggatccaaagtttatggggcaagagtgggggtggggctggtcatgaatggctccttacattcattgtcagtaatagtagtagatgctttctgttgtataaatttgaaagtattcaaatctattctcagtttaccctatcaatatgtaaaatatcaagaacttttttatgtttctttagttttagggataaaacatactttcttttatatttat

SEQ ID NO: 830118 - DNA, 531 bp, Homo sapiens
ctgaacatggaaatgcagacatatggggtcaaaggagcgccttgggctatgtattgtgtctttggtaccagagactagtggcagagagtaaaaagaagaataaaaaatatatttcagtcagggaggaagtggttctcattcatttttctacaaacatttgttaattcaacaaatatccactgtactgaccactaggaacgctaacggtgaaaaagagaaagaaaacccctcagtttatggggcttacattgcactagtgaaaacagatactaaacaggtaaagaaataaattaacaccagtgcattaacttcctattgctgctgtcacagatgacaacaagctgagtgacttaaaataccttaagaatattttcttacagttctggaggtcagaagtctaaaagagcatcttatgggttaagtcaaggtgtcaatggcacagtgttctgtctgagaatccatttccttgcctcttccattttccagaagccacgtgccttcatgggatcckggctcccttcctgccatggc

SEQ ID NO: 830119 - DNA, 543 bp, Homo sapiens
catttcatctttgcttgaccgaatggagaagaaacacagctggttttcacacactctgtaatgaatgcttgctattcttattgaggttaaagtggctcaattgcttctaactttatacagtggccgtattttttaaggagatagatatgggtgaatatgcattatattatatatttattattatatgtactatatatagtatagatatatatgtattaacacacacacacacacgcgcacacacacacacacacacacacccctccacagcaatgtaggctatgctttggttgattttaaagcattgctaatagaacaagttggcgtaagtaatgttctggaagacagaagctatggatgagtaattctcaatgctatattcattggttttaagccagctttgccattaactatctggatgatcttaggcatatcataaagcctcctctgtaaaatgaggagcttagkttagatgaaatctaaagatttttcctgaaccagcagtctttaacagtggtttccaaactgttcatgtcctggagt

SEQ ID NO: 830120 - DNA, 615 bp, Homo sapiens
tccagtaaagacatctctttctgagcactgctttttctcctgcctgcatggtttggtttcttcatcttaactgtctatttgcattttgcctttgcataaagggcttctatatgttttttccctctatttgagacaagcttttctcatttttatagaagcagctatgatatttgaggtgtatgatatagcattaagagagaagaaaggaatctagtttaataagcagagctactaataacttcccagtgacttgggaacttatccctttctcccaacccccattgtcatgccaggagtcaccgccacataacagtgatggtgactgatggtatggcagtgccttctggggccaattcatcacacacaaactcagctcggtgctgcttcacttgcgctaaatgtggcctccgagactggagtttggctctgctccaaggcccctttctggcttctgtcctggagtttttatatatgatctgcaggtgttactgatataatttgtccaggagtyatatatgatgtcatgcttactaacctagattttcctgtggtcagtatagtataggagaaaactgtaaaaatgatattactgacgattacacaataaaataatat

SEQ ID NO: 830121 - DNA, 585 bp, Homo sapiens
ttgtcagttaaaaataacactagtaatagaaatatttttctaaataaggacatttttagacaaaaaaaaagagatgagaatatttattgccagcagaaccatactacaagaaatgtttaatgaatttctttagactgaaggccaatgatctcagatggaagcatgaaattgcagaaagaaacagaattgaaaagagtaaatatggaggtaaatataaaataaaaatttttactttgtaaaaaagactaaagcaaattatgggatttatagcatatataaaagtaaaatatatatgaacaatagcaaaaaaaagaccaggaggaattgaaagcatctgaaattatttgtaaagtggtaaaattctaattcaaggtagtctgcattaagttaaggatgcatactttaacatatagcataagcactgaaaggaaatacaaaactgtattaataaaaagctaataaaatacataaaatagaatgagaaacatgcttgaataatytaaaagaaggcacgaaagaaacaacaaaggaaccaaacaaaatgggcatcagagaaagcaaaatgatagacttaaacccaaccat

SEQ ID NO: 830122 - DNA, 594 bp, Homo sapiens
cttgaagaatgagacaatttagactgcaaaatatttgtgaaacttaaatataagaaatgttgaaaactgggataggaagacatctgtgtacattggctcttcctgaatggcaatagctgactcacacttttcatatgtatgaatagtcgtctacacactcactgccttcccttccctccattgcaaagtcattgtttgtttttctctttctccaaatagtaaccagttattttctcagagaaggatattcctcatctgtaaaatgtagatggtaatttttacctctttgtatttatgaggatttaagcaattgtgtctgaagcacctgatgcaaagcaagtgctggtgattgttagtcccacttcctctgtctgcctggccaagagatagcaaatgcatcacatacgtgttctattccctattttaagaccaggttagacaataagaatcttcgtaatactttcagagcctaaaaagagccttagcatccctttcagcacaacactttagacagctaccatcaatcagatggagtttacacatgagagaaygtatttgtcatctcgtcctagattataaactcattgaagggat

SEQ ID NO: 830123 - DNA, 591 bp, Homo sapiens
tcggtttcagattactgctattatattttatttataatatctgccacaaaataaatagtaagacacatgagtaaacaggataatataattttaaaacagcaggataaaaagacataaaaacagaaccatacagtatacagataatggtggtatcaaagatttttaaataactatatgtaatatattcagagagattttttaaagcttgatagttttagcaaataatttagacaattaaaataattgaatgaaaatttgataactgtgaaacatagtaatcaaaattaaaaactcaacggatgtattaacatcaggttagacaaggtatctaaagagtgaatcagtaacctggaatatagctctgaagacaatatttactatagaacccataaaacaaaatggtggaaaaaagatcaaatgataagaaatataagagctagaatgagaagtcactatatatgtaattgatacccccaaagagtgaaaaagcagaagggtatagaaaaaataagcttaatagctaaaaatttttcaraacaaccaaaaagcattatgcttcaagcctcaatattctacaggcgctacaaaccc

SEQ ID NO: 830124 - DNA, 591 bp, Homo sapiens
tcggtttcagattactgctattatattttatttataatatctgccacaaaataaatagtaagacacatgagtaaacaggataatataattttaaaacagcaggataaaaagacataaaaacagaaccatacagtatacagataatggtggtatcaaagatttttaaataactatatgtaatatattcagagagattttttaaagcttgatagttttagcaaataatttagacaattaaaataattgaatgaaaatttgataactgtgaaacatagtaatcaaaattaaaaactcaacggatgtattaacatcaggttagacaaggtatctaaagagtgaatcagtaacctggaatatagctctgaagacaatatttactatagaacccataaaacaaaatggtggaaaaaagatcaaatgataagaaatataagagctagaatgagaagtcactatatatgtaattgatacccccaaagagtgaaaaagcagaagggtatagaaaaaataagcttaatagctaaaaatttttcaaaacaaccaaaaagcattatgcttcaagccycaatattctacaggcgctacaaaccc

SEQ ID NO: 830125 - DNA, 493 bp, Homo sapiens
agatagtaattattttgaaaaaayagggcttaagctacgttgttatacatttcactgaagaattgaaggagggagattgggcttgaaggaaagatagatgaaagttgagaatatctgagcttacttataatcagaagggaaaggattcttgaagaaaaagactaaccaggattcagacagctcacaggatgtggtctctgtggtatggacgtagcagctacttcagaaaataagcaaaggcatctctacctctgggtcataagggaagaatgggtgtccctataagaatgtctacaagagggaatgcaaagtcatggatatcccacctgataatcttttctctgtgaggtaacaatctatagagcatgatggcattgaaagtacaataggattcagaataaaggctttggtatagacattatggaaactcaaaaggaaattgaaaagagacagaaaaatgatttccaaacagttctgatggctcagtagacac

SEQ ID NO: 830126 - DNA, 660 bp, Homo sapiens
tgaatttgctcaactccaacagacaatataaaaataygaagatagatagacagatgggaaatagatggataaacagatggtcatatcactttggaaaaataaagttaaaacttgcttgtcattcaaattaacagtgaacagcattctttaaacttgcaccttggatcagagctaacagtataagtgctaaaccatagcactatatcatgtgacctttaaaataaaaacaagtacaaagactatttcgagatttttacttcagatctcaaacaattcaaaagactgctgatacaagtaatttccatgtttatggcagaaaataaaattttataattaatatatttataaaccaaagatatccagaaattagtttaccttccctactcaggattgaggttcaagggagaactgtgtttttaaagggactgaaaccttgaagaggtctttcacatcacttgtaagttggattcctaggtattttattctctttgaagcaattgtgaatgggagttcactcatgatttggctctctgtttgtctgttattggtgtataaaaatgcttgtgatttttgcacattgattttgtgtcctaaaactttgctgaagttgcttatcagcttaaggagattttgggctgagacgatggggttttctaaata

SEQ ID NO: 830127 - DNA, 669 bp, Homo sapiens
acagaattagctcatggccctgctctgtcactaactagctgtgtgaaatgtggataagttacttaatcttttatgcctcaatttcatcattgtgaaaacagtaatagcattataatcaattcctctgtggctggtgaaaagatgataataggcacacatgtttagatggccatcaaatcatggttaccttcccattctgagtgcagatccaattgagataggcataatgaggcataaggaagtgaagatgttggctgcattatgagaaaggtaattggaaagcatgactttagacctacagccaagagtgtttaccagtactttaccctcaatcagacttactaacccagtcactagtgcaaccgagttactacaggcttcccctgaagcggcactgcatagcacagggcagtccagagtgcacccatctgcctggcagactggctcctaaacaagcctggatggacttcagccttaccttttaaaaactcatgtattagagatgtctttcctcctctttggcatgaacaagcaatacaaagaggaattagaaataatgatctactctgattgaattttctccagaagaaagaaagtttttcataaaatggagcccagtaccatgcataatagaagtttctgctgaatawtccatcttattatcactat

SEQ ID NO: 830128 - DNA, 583 bp, Homo sapiens
ccttttgctaatccttcagaaagatcattaggtcataaaattyattcatataaaaggctttttgaaaaaagtaagtatgtggccaggcacagtggctcacgcctgtaatcccaacactttgggaggccaaggtgggtggatcacttgaggtcaggagtttgagacagcctggccgaaatggtgaaaccccatctctactaaaaatacaaaaattagccagtggtggtggcacatgtttgtaatcccagctactctggaggctgaagcagcataatcggttgaatctaggaggcagaggttgcagtgaaccaagatcctatgactgcactctagcctgggtgacagagtgagtgactgtgtctcaaaaagaaaagaaaagaaaaaaaaagagtaagtacatgagtcagattagccatttcatcagaagtcaaaaatagaaaaattaaagaaaaatgatccattatatatagaagaacacacaatttcaatgattgcagacttttcattagagacagcggaagtcaggagaaactagaccataaagagtgggtttctagaaaagatccatggaaaagacacgtgt

SEQ ID NO: 830129 - DNA, 651 bp, Homo sapiens
cattgtattgacggctttatttatgtttttatttaattyccaaatgatattaaaaagaaagcatcatgacatttttatagaagagggaactgatgaccagtttaccttgatgatctaaggttatacaatttatcattcaagaaacattgaaagtttttgacaagggaagtaacatgatggaaagtgtaagttcctgcagttatttgacattagcaaattaaaattcctgccttactttacactgaaggcaaatttagaagctcttgattactatagatgccaacagcttattcttcatatagcatatggtaatgtcttagtagcattccttctaaaaacaaaagtgacacccagctcccagcatttcactcatctccctctttgcagcatatcagtgaaggggcttttgccttttctggtatataaaacaaaagttatctaggcaattattcaatgcaagttttcattgagggataaattaatccatctattctcatgaaaggcactagtttagattcatttttcagtttcatttgcagagaagtgaaccttgagcaaatttgaaacatgacaggaaaatgtgattaaggaaagaactaagtttccaaacacaattctatgcaagaagaggggcttaattgagtggctaaa

SEQ ID NO: 830130 - DNA, 440 bp, Homo sapiens
gagaaggtatacttaggagagtaatatcaatatgtatatgaagaataagaagggataagattagatatttaaacagttaaaagaatatttaatatagaaaattattatagacaacataggatagaattttggcaggaaatatggtacagattgtagttagtctgtattaagaatagattaatctgttaatcggttaatatgtattaatcaaataagaagaataaaagaccatggagtatgcttaaagaaaactggatagtacactcttttgtcattttcctctttctcccgctaaagacctgcatgccagtgtaatggctggagcatcagcagttcttagaccaactgagagamcttgaaaataaagtcgtgaatggaggaatatagcagaaatgtagaagcctggatttctaaagactctggcgctgtctgtttagagc

SEQ ID NO: 830131 - DNA, 625 bp, Homo sapiens
aaacaatgttaaggaaaaaagtccttctgaattctttgcaaacataataagtctgtgaaaaaatttcatgtttcttatcacaaaaaactaacaatatatcactgatatgaaatgttcttcccataatctacaaagtattattttattttaatgatactatattaataacttaaagataaaagttatcataattaatttataattgtggaactaaggataggaataagtaaatactgaagtacaaaaagaaaaaatgggctccaagattttatcttgttttttgtttttctctaatgtttcacccaaactctctgacccttagtttcagaagatgtaggagagggttgatacacatattttaaaactttttcctcagggaggtatctggaagatcattgaattgcttctcttcagtgctgtgagcttttctgagattgggacattctgaatataatataatctgatgggagatgtcaacattctaagaaatactagtctttaataaattgcaaactaatgaaatttaaaacattaagaaattctgtagcttcacctttattcaayacttactggatgactctattattcataacaaattgaaaaaccacttatggatattaaaatt

SEQ ID NO: 830132 - DNA, 625 bp, Homo sapiens
aaacaatgttaaggaaaaaagtccttctgaattctttgcaaacataataagtctgtgaaaaaatttcatgtttcttatcacaaaaaactaacaatatatcactgatatgaaatgttcttcccataatctacaaagtattattttattttaatgatactatattaataacttaaagataaaagttatcataattaatttataattgtggaactaaggataggaataagtaaatactgaagtacaaaaagaaaaaatgggctccaagattttatcttgttttttgtttttctctaatgtttcacccaaactctctgacccttagtttcagaagatgtaggagagggttgatacacatattttaaaactttttcctcagggaggtatctggaagatcattgaattgcttctcttcagtgctgtgagcttttctgagattgggacattctgaatataatataatctgatgggagatgtcaacattctaagaaatactagtctttaataaattgcaaactaatgaaatttaaaacattaagaaattctgtagcttcacctttattcaacrcttactggatgactctattattcataacaaattgaaaaaccacttatggatattaaaatt

SEQ ID NO: 830133 - DNA, 577 bp, Homo sapiens
aattcttgagaaaggtgagaatttgaatccttgagtagaaatacgtagcttatcagtacaacaaagtgatcacaacaaagactaacttatcctttgttacttarcgtgggcagagctttaccgctgagaattcctcagcctttgagtgttctcttatttacaactgaagttgataagatggtattaaaagtgagattcctagtaagtaaacttaaaggcctgaaggaccagtgattaatgggaagtgctaataagtcatatttgaggttatccaacccgagattctgatttaattggtttaaggatactatcaccttgtgggttagatttgaaaaataataattgctttaaggaaggaacctgttggtatttaaacaaaaaactttccttcctgattcttacatgccgtcacttagacaaatctctggtctacatggctggatctctttctgctagttaaattctgtgctaccctgtgaaaaagaactgagattaataaaacggtagtgagaacacagggaaagataaaaatcatagcaagcccatccagtcatgctgtagtcatcctcacaaggat

SEQ ID NO: 830134 - DNA, 617 bp, Homo sapiens
ttcacagtatgtatatggtcatattatttagcattttttcaattgtgttatttgtgtttttcttgggctttataaaaactctatttatattgtagataccaaccttttwcataaccacaaatatattttctcatatctactcatccttgaaagctgaggaaactatatattagaatgtataaaaacaaatcctgtatagaaaaactatagaaaaatataaatctctttttaatcttggaaaaaaatctaggaaattacattgacccgaagagcttttcaactaaggctagaaattcaaaatctatgaaagaaaagaagcctatttggatatataatgaagaaaactactttatgtaaatcaaggtaaaaatatttctacatcaaattaactggaagcctattttattgcatagatactgacctcaggatttcagagtaaatggacagttttctgtggcttgacagaacttgattagtaaaaaggaaacgaacactcagtttaatggcacaaaatccagactttatttgataaagtattttagtccctgctgtcgttcccttttgtctcagaaacaattgaggagacaatccccagagaaagggtatcagggagcaaa

SEQ ID NO: 830135 - DNA, 561 bp, Homo sapiens
aggggattggacaggatgcctggatgataaaaatgatcaaatgatgatttggattcctaatgaaatcaacagtcacttatttctcattcttgaaatgctgtgcaagaaaatttaaagtagccaatgcacttcatcttctaagaactcctggagaagttggcagactatggccaaatctggacaatggcttttttctgtatggccctcaagctaagaagtgtctttatgttttaaaagtattgttaaaaaaaaaaaaacaaaaacaaaggctgggcacggtggttcatgtctgtaatctcagcacttggggacactgggataggtgggttgcttgagctcaggagttggagaccagcttgggcaacttggtaaaaccccatctttaataaaaatacaaaacattttgctggatgtggtggcacatgcctgtagtctcagctactygggaggctgaggtgggaggatcacttgaattcagggtgtcaaggctgcagtgagcaatgatagcagcactgcactccagccagggcaatggagcaagatcctgtctcgaaaaagcaa

SEQ ID NO: 830136 - DNA, 683 bp, Homo sapiens
gggggccatttcggttcactgcaaactccgcctcccaggttcattccattyttttgcctcagcctcccgagtagctggaactacaggcactcgccaccaggcatgggtaattttttgtatttttagtagagacggggtttcacccaccgtgttagccacgatggtcttgatctcctgacctcgcgatccgcctgcctcagcctcccaaagtgctggaactacaggcgtgaggaaccacgcccggccactagtttcctctttattaacttaaacatttaaaaatatgcaacatttatatctatatgaattaattatttgagcttctgtaaattatactttgatgccattagatcacaccatataagaatctgtttattttggctatgagcacagcctcttctgcatttcttctgtagataaaaatataagcttttacttatgtgtgtataataacattgctctcctgcttctaaaaaggaattgaagtagcttacatttaaagtaacagtgtggcacgtttgaacccatgtggaatcctctgctggatttgaaaaatgtctgagcaagtttgacaaatgagtgggagatactcatcagaataccattttcctgatgatctgtgaagtgttttggcacctagtgcattctagagaacagaatgcccatttggtgttatcattttg

SEQ ID NO: 830137 - DNA, 683 bp, Homo sapiens
gggggccatttcggttcactgcaaactccgcctcccaggttcattccatttttytgcctcagcctcccgagtagctggaactacaggcactcgccaccaggcatgggtaattttttgtatttttagtagagacggggtttcacccaccgtgttagccacgatggtcttgatctcctgacctcgcgatccgcctgcctcagcctcccaaagtgctggaactacaggcgtgaggaaccacgcccggccactagtttcctctttattaacttaaacatttaaaaatatgcaacatttatatctatatgaattaattatttgagcttctgtaaattatactttgatgccattagatcacaccatataagaatctgtttattttggctatgagcacagcctcttctgcatttcttctgtagataaaaatataagcttttacttatgtgtgtataataacattgctctcctgcttctaaaaaggaattgaagtagcttacatttaaagtaacagtgtggcacgtttgaacccatgtggaatcctctgctggatttgaaaaatgtctgagcaagtttgacaaatgagtgggagatactcatcagaataccattttcctgatgatctgtgaagtgttttggcacctagtgcattctagagaacagaatgcccatttggtgttatcattttg

SEQ ID NO: 830138 - DNA, 599 bp, Homo sapiens
ggaatacagtccactttccaagtctgtgacgccttcctacttttgcatcagagccttctgggtttcaggagaggctccttttagartccagactctgaccatgtcacagagaagttgactggtgaatactcatcttgttttatgcaaatgatcttacttctgacctaacatgttagtctgaaaacttgcccactctaatgaactcagaaaggatgaggaacaggaaagctgcccttgattcatgactctagctccagctgtacttatgataatggatccgggctgggcgcccttgggaaaatgtgtatttgggggaggatgatgcctggacagtatattgagatttcctgtgctgccatgagcaatttgtgacttaatgactgtatttataggtacattacaggtcctttatcatttcagaaatcaatgaagtaattttcttatgaagttggagtgatttgtggctgtatcagctgcctctatttattttatcataaagagaaaaagaattcatccattagggagaactgaaaatggaataatttgtcggaaggaaatctggcttcaagaagattgaatgaaaagtcgtataaagaaag

SEQ ID NO: 830139 - DNA, 632 bp, Homo sapiens
attcacactcgtattcccttcattaagagcaatctaaacttttctagcatagtgtattaccctttgtcactttgtattacttttggtccttcaaggtccaaaaatragaaaaagttagccataacaactcacacgggtgtcatttattctttctgtccacagaaatgctgttttaaattatccagtcaaaaacctattgaatgcagttaattaggtctcgtatttctaagccaggcatgcatattgcccatctttcagaagacaaacatctaagctataattatcataaaaagcttatctatgagaattatactatccagtctcccaagttaatataatgcaacattgtataaaaacaggaaaatgctgagtgatattaattattacatgaaaatgttttaaaatgagcttgctaagtaattcagtggctatttttaggatgtaataggaaaagcactgcagtaccttggaacatttggtgaattgagcaacgtagagcaagttgtggctatgattgatgaagaaatgtgtatcaactgtggtaaatgctacatgacctgtaatgattctggctaccaggtaagaatcctgctggaattagaatgctatgagacatgtttcttcttgttttt

SEQ ID NO: 830140 - DNA, 667 bp, Homo sapiens
acttctttgccttttctgtttttttttttaaggccagtcacattccttggctcctggcccccttccatcttcaaagcctgcaatgtttaccgggtttcatgctgctgtctctgttgggtctccctgatgtccccttataataacctttgtagttatatcaagcacacttggatgatccaggctaatctccctattttaaggtctgctaattagcaatgttaattccatctgcaactttaatttcccttggccaggtaacctgacgtattcacaggttacagagattaggacatggacatctttggtggttaggaagggtgggggcatcgctccgcctaccacactgttctttctctttttatagaaggcaagatttagaatgcagtactgtatctacttaggcagaaagtgttacccgaatattttagaaaggctttaaaaaatagatctgtaaacaaaaatgactcggttgacaatgaaacaagaaaatatgattttaattaaacaacctgggtttgcactactgtgcagtttacaaastgttttcacacacatctgatcctcgtagataacctttgcagtaactaggaaagatctgacagttaactaaccccctcccgccctccttttcttgctttctttttctttttcttttttttcctccttt

SEQ ID NO: 830141 - DNA, 624 bp, Homo sapiens
atgtacccctgaacataaaagttttaaaaaaggaaatgcaaatcaaaaccacaatgagacaccacctcacagcagtcagaatggcaattattagatcgtcaagaaacaatagatgctggtgaggctgtggagaaataggaatgcctttaccctgttggtgggaatgtaaattagttcaaccattgtggaagaaagtgtggctattcctctagaaccagaaataacatttgacccagcaatctcattactgggtatatatccaaaggaaaataaatcattctactgtaaagacacctgcactcatatgtttattgcaacactatttacaatagcaaagacatggaacgaatccaaatgcccatcaatgatagactggataaagaaatgtggtacatacacaccatggaatactatgcagccataaaaatgaatgaggtcatgtcctttgcagggacatggatgaagctggaagacatcatactcagcaaactaacacagaaaaagaaaacaaaacactgtatgttctcactcataactgggagttgaacaatragaacacatgggcacagggaagtgaacaacacacactgaggccagtcagaaggtgggagctaagggaaggga

SEQ ID NO: 830142 - DNA, 614 bp, Homo sapiens
tagaaatattaacacaaactgttacctgatagaaaataaattgatatccaaaccctgagtaggtctatttggttggtgtccaatgacaaaggatggttacagctgcatgaagttgttataactaactggtttgtaaccatctgtttgaaaatgtgcccaacccattttataccaaacaaagtgaatataaactttccacttatttgggttaacatttcaacttttaaaaatcctgttcagacaatgatacaagggataactatttaaaaatctgctctcccatataatgtagaataaactccctttaatatattttgaagtttctcccattatcctccgttcacttatatgctttttgttggattatttagtccctcttggtgttagtagagaaatatgtgaactctatatacacaaatggcatgctattctatatggcagccactatccatatgtggatatttaaatttatgaatataaattgtaaaaatcagtttattagtcatacaasacatatttcaagagcttgaaaggtaaaatagaacactcccatcttcattaaaacttccataggactctgctgttctaaaaagctaaatataaaagaggaatat

SEQ ID NO: 830143 - DNA, 575 bp, Homo sapiens
aacaaacctacaaatgtactcctgaacttgaaatagaaattgaaagaaaaaggaaattaagacatcctccttgatttaaaaaaaaaaaawatatatatatataaaatctctctgcacatctaaagaggtaacaaaaaagaagataatgtttaagtatctcctagtgtgcactaaaaaaaaataaagtggaaatatgagaaaaaaataaaagatatagagagtcgatccaggagatctaacactggacagttaagatattcttacagagaagaaagaaaacttaagagaaaaaaaaaacaaacatcacaatcaaattttctagagccaatggagaacactagtctttaaataagttgaaaggggcaatcttgtgtagggcaagattaaaggaaaaagtacccaactctaaacattctaaagaaccacagaagatcctataaacttttacagagagaaaaataaatcccatccacaaatgaaagattattcaactttccatcagccaacttaatgctagtggcataatatcttcaaagttaggaaggaaaataattttgagcctagaatttgataca

SEQ ID NO: 830144 - DNA, 645 bp, Homo sapiens
ttcacatgcacacacacagaagcacatacatggtttgacacatacacgcatgcagtcttgtgcatacataagcacaggtgtgtacatccagacacatttactttcatattcctttcttcattgtgacttgcaatttgaaagcctcagtatcaagtttatgataataagaaacataatgacatatattattattgcaatcagtcatttttccaagaagcaattttcaccatatagaccacggtccaaatctgatggattaaaatataataaaggtgcctgtaatcccagcactttgggaggctgaggcgggtggatcacaaggtcaggagatcgagaacatcctggctaacatggtgaaactccgtctctactaaaaatacaaaaaattggccaggcgtggtggcacgcacctgtagtcccagctgctcatgaggctgaggcaggagaatggcgtgaacccgggaggcggagcttgcagtgagctgagatcacacccactgcactctagcctgggcaacagagcgagactccrtcaaaaacaaaacgaaactatataaatgtggggggtgtgtatatatatatatacatatatatacacacacacatatatatatatacacacacatatatataaaaattatagga

SEQ ID NO: 830145 - DNA, 605 bp, Homo sapiens
ttttctgtgtggcatttggtttgaagagcagagctagctgcaggtcagacatagattgaacatggggaagggggcaatagccacatagcaagttggggtgaggtcacacaagcattcctgaggcttggaagacccagctgagggtatcactgtgaagaccttggtggtctatgattctgttagcatgtgaaggtagagatttggattgggataggggatgatttcctttagaaggaaggcccgtttgtcctttgacgattctcatttggcaaaaactcagttttgcagaaacttagctatctgccttccccatgcagcccctgaggaactgagccctgggccaaatccatgcccaccctcgatgctgctggcagtctccctacgtttcttgggtcatgccactctcccaccctccagacaaccatctcacaccacctctgttctcctcaaacctccaggctccccattgccctctccttctcagcagatggccttgcttcctgcttcccagcagccagggactgtcagtttctacttaaacacacacaccacttcctaccttcgcctgttcatagaggcccrtccttctcctctccagagctcat

SEQ ID NO: 830146 - DNA, 335 bp, Homo sapiens
ctttatctggatccagacaaactmtgtccaggaagtggcacaggaacttccttgtttggttgcatcttttctcttaatttggcaccaactcctgtcctgtcatcatctctcctctatttcttgttgaactgtctcatgggagctgatagttaaattttcagaaattttgcaagctggctactaagcacaaccattaatcaaaatttaataaatataaacttaaaatgaagttatattaaaatgaagttatattaaaataaaggtaataaatactgaaaactcatgtcttcataattattttactacattttattattacttatgcttctgaagtt

SEQ ID NO: 830147 - DNA, 500 bp, Homo sapiens
ggaattattctaaaggatgacacagtccaaggtacagtcatacctataattagctaaatatataaatgcaaragtcagagtttagcaaacaaggaactaagagcaaaaaatgtattgaaggctattagcgtaatagttgaaatcaccaaaatgagtagcaagggtaaaggacaaaagcatagccaggtgctatcatcaaggaaggtcagcaataacagacttcaaaagagaaaaggttgttgaaagatggtttaaagaagatagcacgaaaggagcagcaggaaaaagggtgcaccacagaagcaggaagaagagtgaaaaagggtaaaagtgtcaggactcgtttcaggggaatacccaaaatgccagttgtggctagatggaaggaatagtcaaggaaaattttaaagggaaattttgtttggattcattcaacagctaccaacaaatatttattcaaggcctactaactcttataggtgcaggagagaaataaacat

SEQ ID NO: 830148 - DNA, 587 bp, Homo sapiens
ttctattaaactcagagtagaaaagtttttaaaagattagcctgagaattaagcagattttgctgtcatacaatcacttatgagtccttgcaagtcagccttaccagataccagctaagaatgagaatttgagtcataaagagcaatgagtactacaaagaaacaaaagcatattcaaatctaattggatgattaatactaaaataggaagagatttaacaggagcagacacatttgaacttgtcccttttccattttctcttagagatatgacatttcatcctttcctcaaaacctaatagtataggttatgtgtcatacatataaaataagcacatagtattccctttgtttccagtttatcacttaagagtgcctctttgtgggtctgaagttgtatattcttagagccagttacctgcatataaatatatagaaaaaagtgaataatgcatgtttctcttccctaattccctaatatacaaaatataagagagttgaggtttttaacwcatgcactgggagactcagtaatctatctatggcttctttggcaaggttgtaattgtgatgcagtacaggatgca

SEQ ID NO: 830149 - DNA, 587 bp, Homo sapiens
ttctattaaactcagagtagaaaagtttttaaaagattagcctgagaattaagcagattttgctgtcatacaatcacttatgagtccttgcaagtcagccttaccagataccagctaagaatgagaatttgagtcataaagagcaatgagtactacaaagaaacaaaagcatattcaaatctaattggatgattaatactaaaataggaagagatttaacaggagcagacacatttgaacttgtcccttttccattttctcttagagatatgacatttcatcctttcctcaaaacctaatagtataggttatgtgtcatacatataaaataagcacatagtattccctttgtttccagtttatcacttaagagtgcctctttgtgggtctgaagttgtatattcttagagccagttacctgcatataaatatatagaaaaaagtgaataatgcatgtttctcttccctaattccctaatatacaaaatataagagagttgaggtttttaactcatgcactgggagactyagtaatctatctatggcttctttggcaaggttgtaattgtgatgcagtacaggatgca

SEQ ID NO: 830150 - DNA, 631 bp, Homo sapiens
agtctatttgtctcctatcagcagtcccccagcattgcaattgaatttgctgtaattaacacatttattaccatttatcatttgagattatagatgtagaaagtgtaagagggagcaaagatgtgctaggaaatgttaagatgaaaaaaggaagtgcaaatatgttagattaacaaataagacagaagatgtagaataataaaatatatgggctattcagaacacctaagagaaatgatcatttatataccaaataacactatattaaaaaaaaaagtgagactccaacacatttattagtataaattgtgattttaacatgtcattttcaggatttgatatacatgtagacaaaaaataattaacatagggtgggctatattaatccaattaaccaagtgggatctttcaaaactccggtattaatcatctagcttaaatcaatttcaaaggcagtagaaaaggcaatgtcaagttggtgaatacagtagggagggatctaacaaccaactctttcaaaccagtgagtayggtcatctctagcatcatctcaagccacttggcctccaagtcatcctggaagaaaagaactagaatcttcatagacaaatttttaaatgccattgtctta

SEQ ID NO: 830151 - DNA, 467 bp, Homo sapiens
gcctgagtgtttcccatctgaaagacaaaaccacccgcggttttggtttgttttgcttgtccccctgcccaagaacccacaatggtccctggaccctgctgatcggaatrgttgcactcaccgacgcagcagcagaaacactagttttcctcccagaccacatggaggaccaaggaaggtcggatttagtggcccttaccaacacattctcgaaaaactgttaagggtcctaagcattctcctgttagtattgggactttatccctgtcctataaagatgttatgccccaaaaatgaagtggagggccataccctgagggagggaagggatgtccaaggctggaagagtgacaccttttatcttcacttacatgaataggaaggatacaatttctgaggctcctcatagcataccttcaggaatagcttttgttaggcctgcttgtctgaggagggatcctaaaatt

SEQ ID NO: 830152 - DNA, 630 bp, Homo sapiens
ttgctggttctgattttcttcatttgctcaataaggatgataaatagctactcctcagggttgctgtggggatcagatatgatacgagtaaagggctggcactactggtttcctaaacccaactcccttccatcttgcccatgtcccatgcaggtattggaaaacccaagcattgactctccagaccagcctcgcacctaagaacgccgtgggatgcagtttcagacagtgagaaatctgctggggatgcctgggaaagggacatacctggcaggtgccgctccatggccttcttgctgccttgaattgggacatgagcctgagtcgcagcagccgtcttgtgactgagaggtggcaagcaggaggaagaggctaagagaatagagacactgttgagctgctgaagcacagcaagcggccacttctctatgcttcttgctatttgactgttaagctagtgcaagttacttttctggtcagaatgaattcataactgaaacaygctttaaagtatgactattattattaaatgcagcataagctttccatagctgctacacgatcacacccactgctgtctcagactgaccagtggccgactaaacatgacagcaagtactgttgccagcc

SEQ ID NO: 830153 - DNA, 505 bp, Homo sapiens
ccttcaaaaacagagttgaaataaaaacacttccagagaaacaaaatctgagagaatttgtcaccagcagacctgccatgaaagaaatgctagaagatattctgtaggctgatggaaaaagataacaaatggaaactagtatctacaggcaggcaatcagtgaactggagagagggacaggtaaaagactatagagctgctgcttctcatacttttcttaaaaaaacaactctttcaagcagaaatgacaataccgtaaggttagacttgtaacacagaagtaaaacatatgacaaaacagcacagaggatggggatggataaatagaattatacataatattgttatgtaattacatgtatgtagtggaaggtagttaattgttaagtagaatgtatgaagtgataacacactgattctaaagagactttgctaatttawggatgtatatttttaacccaggagcaaccactgaaaaaaattttaaaaggtatagctaagaagc

SEQ ID NO: 830154 - DNA, 575 bp, Homo sapiens
attttcccactttcttatataacttcctacagcagttactaattaytgagtacacaggaatatctcactcaacttggcagtttaatgaagttatctgttttaagcagacccgttgttcaacctctgtaactataacactacaaaacagacttaacacatcccaggagggcaggcatgggggagcagaggaggatcatttcttttggatgttccctttaagaaaaagaggaaataaaatccagaaaggaagtactcctcgccttttacagttagagggcagaaagattttttgtagcaaacaacgacattagatctcttcttatgtcacatgcttttcaacatttcctgggtgctgttacccggctgctaaacttatttgctgtgtaactaatgttgttttagtttttccagacctaactggcactgctcctacccaagctgcaatcacatggctaaacaggtctggtcagtacatcatgaccatgcaatgtctcatgcttcagattccattctcagctccccaaagggtcaggagagtctggtgctgggatcctggcaggagcatgctagcaaaa

SEQ ID NO: 830155 - DNA, 616 bp, Homo sapiens
cagttctggtacaatgttgaattgagataatgcaaccattccaactacatttctaccacactccagtaaaagccattacaattttgggtaaactataacccacctttccctcatgccctcacaaaaattaatagctaagttcaaaagaagagatagtcaggtaccaaacacgaagaaattagagacagtgagttaggtttcatgctgtatgaaggcagcctgaaaaggaatcagattcagacatgtgtcatgacagctgggggctggaatcttcatgtgcacgcagagatttaagctgggactgagaaccacacaacttgaagagctaaccctcaaagaagaacttaaaaatgatgccaatgaaaataagaaaatgaatcttatttctgctttgatgctagagtggaaaaagaaaatttcctatgagaacataaaatcccaaatctgagctatacgtaaatatgaaacctgaatatatgccttyccaatggtataaggatcttcagttcaagaaactgatctgcaattggccctatgcttgtaaatatttttggagatcacagaagaaactaatgtagacccatactcaagagaaacttctataacccaggtgtca

SEQ ID NO: 830156 - DNA, 591 bp, Homo sapiens
tacgtaagagcttaaaatgagaattactggtgtttgcacaaagcatttgcctcttgttcatccttgctatttatttgaaaagttgccccaaagaatgtcaggttgtggaatgagtaagactgagatgcccaggcgttgcttggccccttttggttatttgtgtacatgggaaatgcggaaatctaatgaaaagtcttttgttttaaattggtcgtttgctgtatctgaaatggatagattatgctgctggcttaatacagaaaaaaatctgtctctgtactcctctcacagggccttggtgtcactgtttccttttccatgaaaggcagggggcaggtagacaaaagcaagaggtgactgaaccctgctcaggggagtcctttttctaccactattttcttgatggggactttcaacagcacctccagaccttttacacctcctacctccagagtgatggagtgaatgatccggttggggaccacatttctgcttagatgaatgtagcaamggggactaatttgatctctctctccttcctcctccacatgatcaatagaagacaaatgcctgggtaaatgcctctgctcc

SEQ ID NO: 830157 - DNA, 620 bp, Homo sapiens
tagcctctcctatcagatgaggggccctcaggcccagctcgcaggttgctaggcaaactggagagagctcagcagggtcactgggtcattcttgtctgcacagggacgagaaggatacgcctcctttccctctcatgtccaccaaaccttggtctcttctattttgccctatagtctaaaacaatcctaaacccccgcctttgtgttgtcaggccccatcccccaccagctttgcccaatggagaacaaacatgctctgtgcctcatccatgctgtcaagaatttctttttctcacactctgcatccttgagcagtcccttcatgaaaccacagcagatgtttctcagtcctttcattttcttttttcagaggaattgtaatcggctgcgctttaattaggatctccccgaggatacttcggctttcttccacacccgggagtttgcagattccctcttagtgcaccaggctgattagatttcttaattccctaaaatatgctgtctcgaagcctaatacccctgtagggatgaggtctgtttctctgcctctcctcycattacagtgctaaatccaggcagtggtctcccttacggcacttgcttcttccctggctccg

SEQ ID NO: 830158 - DNA, 624 bp, Homo sapiens
aaacctcaaaagtagggaagctgacagtgcagccttcagtctgtggccaaaggctcaagaktccccggcaaaccactggtgtaagtccaagagtccaaaagctgaagaacttggagtctgatgttcgagggcaggaagcatccagcacgggagaaagatgaaggctggaagactcagcaagtctgctctttcctctttcttcttcctgctttattctagccccactggctgctgattagatggtgccaacccagattaagggtgggtctgcctctcccagtccactgattcttatgttaatctcctttggcaacaccctcacatacacacccaggaaaaatactttgcatccttcaatccaatcaagttgagacccaatattaaccatcacagcacacataagatccttcatgaaccctctaatgctctctggagtcaagggcacacagggcttctcatcatggccctgacaaaaacctgaccctccgtgattttatgactttgttcttgctgtaacgttctcatcctttcttctctgcctggtgagttcctcagcttaaatgttacctctattgtgatgcctaactccaccaggcaggtaagctcttctccactctgtatatt

SEQ ID NO: 830159 - DNA, 562 bp, Homo sapiens
acaaagagaaagcactacacaaatcccagggagtgaaattccaaagtcccctaatatgaaacgaatgccttcgcccccaagtgtgcasagtccactctggggtttgtccaagcatgcaaaccacttaggcagaacatttctgtaaagcttcaaacaggctgaccgtgaaaaaacccagcctgctaaaaggaagcttgtggagacaaagatgccattttttttgcctgagtatctattcttccactcccacgagctctgaaaatttgcattcttgagcaaaggtatctatccctcagatccaagttactcctggcagatgaacctctggaatttgcttctcagcaatgaagagttttctaaccaccttctcatgccaactaagcttcagatggtttaaagctgcaaagatcatggttttcatcagaggaccgatttctatcactccagaggagaaagtctaataatttaacttatgaactaagacttctctttgtttataattatttatttatttatttctacacagggtcttgctctgtcacccaggctggagtgcagtggt

SEQ ID NO: 830160 - DNA, 562 bp, Homo sapiens
acaaagagaaagcactacacaaatcccagggagtgaaattccaaagtcccctaatatgaaacgaatgccttcgcccccaagtgtgcacwgtccactctggggtttgtccaagcatgcaaaccacttaggcagaacatttctgtaaagcttcaaacaggctgaccgtgaaaaaacccagcctgctaaaaggaagcttgtggagacaaagatgccattttttttgcctgagtatctattcttccactcccacgagctctgaaaatttgcattcttgagcaaaggtatctatccctcagatccaagttactcctggcagatgaacctctggaatttgcttctcagcaatgaagagttttctaaccaccttctcatgccaactaagcttcagatggtttaaagctgcaaagatcatggttttcatcagaggaccgatttctatcactccagaggagaaagtctaataatttaacttatgaactaagacttctctttgtttataattatttatttatttatttctacacagggtcttgctctgtcacccaggctggagtgcagtggt

SEQ ID NO: 830161 - DNA, 398 bp, Homo sapiens
attttctgaatatttgaagaatatattactttaggcaccatttttaactatatgtaacccaaatatctccaagccagtgaccagagatattagtttaatatgacacctgagttttttagactcctttatcccttgctgttaacatcccacctgcactcctgtgggttttgccaattatttttaggtatttgagagatctaccagagcattcacactactcaaataaatgctgtgttcttccctgaactccttggaacctctaggttcctgcccttgtgactgcttcttcactgggyttcgcttcactggcctacaaagtttttgccaggtggcgaaacaacgatgccattgccccttcagtgcaaaatgaattttgccttctccatttcccttagctc

SEQ ID NO: 830162 - DNA, 512 bp, Homo sapiens
aataagtcaagccaaagacatggaaaaaaaaattgctagttatatatctaagacaaggcttatccagaatagataaatcactctcaaaacttaataagaaaccaaataatccaattaaaarcagtcaagtatttaacacacacttcactaaaacagatatactgatgacaaacacatgaaaagatgcttagcatcattactccctaggagaatgcaaattaaaaccaccttgaaatactaatatatacctattaaatgtctaaaattaaaaagtcctgtcatttcaactgtgtatgtggaacatgtgaaactgtcatgtattgctggaaggaatacaaaatggtgcaatcaccttagaaaactgtttggcagcttctttaaaaattaagcatatgcctgccatgtgattttacctttatctcaaggtatttctcgagaaatgaaagcatacttccatacaaagacttttacaccaatgttctttgcagctttatttgtaaaaaccaaagact

SEQ ID NO: 830163 - DNA, 644 bp, Homo sapiens
cccagtaatttactgtgttggggatccccaagaccaccccctggtttgatacttccctataaggactcacaggactcaacttataatcatgttcatggcaaagaytggttacagggaaaaggaacaaatcaaaatcaagaaagggagaaagcacatggggcagacgtcagaggaaaccaggcataagctatcaagagttgtcttccaggggagtcacacagaacgttctttattcccccagccagtgatttgtaacaacatgtgtgaaattttatctgccagggaagcttgttagagactcagcaccctgggtttttattgggggctggtcacatgggcactctctatgtagcttgtaccaaaatgtcaggtttccaaaaggaaagcagatgtctagcataaaccatattgtttatgtaatttaggcacagtgagccactcttattatttagggagagttttatattagtgcagggaaccatttgccacacaagctcatagacaccagccaagagacaaccttgcaagcagatgtctccaaagatagcagttccaggctcttttctgcaaatatgccaaggtaaatttctggactattttttaagactgaagagaagagatcttagcttttctggacaaccctg

SEQ ID NO: 830164 - DNA, 627 bp, Homo sapiens
gctggaagaggtaacatgactggattaattaaacctcaggtacrtggtatgtgctcactgacttggcacatgtgcttttttccatccctaatagaaaacaggataataaatctttcacattcacatgggatagagggtaatattctcctatatttttgcctttatgttacgtgaattcttctgcccttgttcacaatacagtagtcccaccttatctgtggttttgctttccacagtttcggttatccatggtcaaccatggtatgaacgtattacgtggaaaattcaggaaataaacaatccaagctgagagctgtgactgcctacagggtttccagatggctcactctttggatcgggggactgggtctgggatgggtactttcctcatcagcaagatgcaggaagagtacccagacaggatcaagaacacgtttagtgtggtgccctcgcccaaagttttaaactgcatgccattctgagtagcagaatgaaatctcaagctgtcctgctctagcccaccctggacgtgaatcctccctttgtccagcatctctccactgtgtacactacccacccattagtcacttagcagccatctctgttatcagatcgactgtcacagta

SEQ ID NO: 830165 - DNA, 627 bp, Homo sapiens
gctggaagaggtaacatgactggattaattaaacctcaggtacgtggtatgtgctcactgacttggcacatgtgcttttttccatccctaatagaaaacaggataataaatctttcacattcacatgggatagagggtaatattctcctatatttttgcctttatgttacgtgaattcttctgcccttgttcacaatacagtagtcccaccttatctgtggttttgctttccacagtttcggttatccatggtcaaccatggtatgaacgtattacgtggaaaattcaggaaataaacaatccaagctgagagctgtgactgcctacagggtttccagatggctcactctttggatcgggggactgggtctgggatgggtactttcctcatcagcaagatgcaggaagagtacccagacaggatcaagaacacgtttagtgtggtgccctcgcccaaagttttaaactgcatgccattctgagtagcagaatgaaatctcaagctgtcctgctctagcccaccctggacgtgaatcctccctttgtccagcatctctcyactgtgtacactacccacccattagtcacttagcagccatctctgttatcagatcgactgtcacagta

SEQ ID NO: 830166 - DNA, 624 bp, Homo sapiens
cattatttgtcctaatgctctccctccccttgccccccaccccccaaaaggccccggacacctctattttctaayaattaatctacccccctttttcataagcaagcttgatttggttcctgttatctgcaactaaaagatcttatctgatacaatacatttcaaagaggcaaacttctgccttcacctgatgaactttccaataaataatacagttgttccaaaatggaaaacgcttctcttatcattttgaggtttagacagcccttcatcactgtgtagaagaaattctgtctattataaatagttgaactagataaactgaaggtcccttgctagtttgagatcctctgacaaatatcaggaaagccatgatatggaaaatagaatagtttcactcttttgggaaataaaaaataatgagtctccaagtgctcgataacattccaagaaaggatgtgtgagagtgtattacattgcagggggaaaactgacagattctagatttagcgtttgttggaaaactggaaccaaagtttacaatgatttctcttttattaaattaatacacacaaaaagcctagaagctcagtatttgggatgcataaaatataaaaataaaat

SEQ ID NO: 830167 - DNA, 533 bp, Homo sapiens
caaggatcctgggctgtctcacatcatgcttttgaatatgttctaccttagccaaagttggcctcccccattttgtctatctgggtaaatccttctgcgatcatcctctaataggtaaaggttcctcctctaggatttttttcttgactctcacaaccaaggatttttgagttcttctttattaatgtcctacggctgcctcaggacatgttctgtgagttacagatatttatttcattcttgactctgaggtctttagtgtcaggaactgtgacttcaacctccttaccaccacttcttagtctggctcctggcccatgacagatagtcagtaaatgtgaaattccggaggaaggagacggtggagggggaaattcatctccattcgtcttttaaaaaaaaaaatctacatcttgctaagggaattcaaggtcattctcttgcccacccttagctaaaatgcacagtaagctgkattcttgctcaaaggaagccttgtaatggagaatattttggataccaagattagtttt

SEQ ID NO: 830168 - DNA, 636 bp, Homo sapiens
tctgcccaggagacattcttgcaaagatggtcccattgatcaatatctgtaaggaacccaaaatggagatttttttatcaagtcatctggttgtacatraaataattactaacactcagaatgttgactgcatcatgacacttacgatgaagaaaaaaaaaagtttccaatgagccttcctttggattttaagacaaacattgaggttttggtcatcagataagtgatcagtgaaaaacaaaaatcagtaaagataattacttaacaaaaaatattttatgaaaatgatgacctacaggaatttacctcagctgtcacggggaatgtggtcctgaaaaatcttgagcttaatggaaccttgaactgcaaaacagcaaaaggttgatctatatatctaaactatcgatctatctctctctctctctctatatatatatatctaaaacttacctcccccgactaaagctttaagtttgaccctcttgagtacagaggtcatctatcaaaaaactaatggtgttcctttattcttggtctgctttcctgtgtaattgcagggtttccactatactctgagaccccttaccatggcaatatagtgacagccacccaaaatcatctgtataattcaagaaa

SEQ ID NO: 830169 - DNA, 549 bp, Homo sapiens
ttcagtcaacatgtatattatcaggttgaatgaggtaaaggtaagcttatcaatcttcaactgacacctagctataagggaagaacaacaatataggtgacagaatcaagattcaaaaatttgtctaggctggattgtaggtgagaaattggcaagatgcaatgtaacagacctcattattgagtttttgttttaagttattttcaaaaaacaaggtgagggtatcagtgacttgggtttggtagttgtacatgaaaaagtaattgaagtgctttatttgatgtgctgaattttatttgccaatgtgatgtagctataaaaaattagccctggaatgccttagtaaaagcctgttcttcagaatagaagaaataaataaaagttctgccataatctgtatttttttaggaaaaatctaggaagttacatttaattctaaaactcatacttagagagaaatttcaagaagtatagtgtatttggaggaatatctgcatatcrtaagtaagaactgtttaaaagaaattagaaacagtttcccaaagaaca

SEQ ID NO: 830170 - DNA, 652 bp, Homo sapiens
ccacaatccaagaggatcttggactgtttttactttctccctttctaacaccccagtccaactttttgaagttgctgagttcatttactactggttaggatttcccttacactgtgacccttctgtttcaaaaatctttatttagcacttagatgacacattctcataatctatccttaacttagatttatgtacaagtgttcctccttctccaccctctctctttacttcctcttttctcatattgaaatttctgccgtatttctttccttgcttgtttacaaatttttttcgctgaagtattgtccttggatggaatgaaggggtgctcttagatttcttacatatgcttgaatatctttctttgctctgacacatgaatgacatcttgctcagatataagattcttgaattattgttcttttttcttaatgatctgtatgtaggggctattcctttgccttgtggcttctgatattgctcatgacaagtccagtgagagtccactgtaagtaacttactcttttctgcacataaactttttaactttgaaatttagaaatgtttgcctttgtgtttcccttatttcattaacttagtctggaacatggacagcrcttttagaaaaatttttatttttattttttaccat

SEQ ID NO: 830171 - DNA, 517 bp, Homo sapiens
agctctgtctgcaacaggtttctggtgaggcctaaataaattaatgcgtaagcagtgctgagagcagaggctggcacatcataagtgcttgagagctgttaactcttattatagcggctgttaggattattagatgagaaacctggggcacaggaaggaggactgtctggtttgaggtcatgcggtgagttagaattcagatcttcccgtcgtggcaagctcacggagctgcggagtgtggcagtggtggaggtggggcagggtggccttctcctcatgctctgggctgggtccctgcccctcctcacccagcctgtgctgcagaggtagctagagaacctgcagcagccctgttttcttgaaggaatgggcttggcccagaggggaaccackcagctgtccttggagaacttgttagccttgtctcctggctccaggcccttgtgtttttggtgggctcagtgtctaggcaagggcttgtcaactgtttgtcacaaggaggagacacctgggagcc

SEQ ID NO: 830172 - DNA, 683 bp, Homo sapiens
ccctgcctggggccctcttcccacagatctccacctggctaatgccctcgctgcagctggggatctgccaaaagtcacccctgcagaaagccagggtgaggaccgaaaggccgtcaaccttgcagggaagagtctcccttacttgcccctctctgtccacttacactgctttgttcctcttcagagcagcatctttcacagctggtatctcaaattataattatacagtgatgtgtttgctaattcactggaagctcctcctgccctttccccaagtgtgagccccacaaggccaggagcttcatctgcttagtccacggccgtaccccagtgtcctggtccaatgcctggcacatagtcagtgctcaataaatattcattctgcagatgaataaattactgtggaggaaagggatgcaaaggctggagggcagaaggaaaaaaatggccacgcccctcctcaccagccatacccctggggcaagtctgtgggattgggaggcccgggtcccaccttctgagtccctgaaagtcccagaagcatgaggggagccagcaccagagsagtggctgccaggggattcaggcctcccagaccactttcagaaaggggccctcacagctcatacttggtcacgcaggagtcacacgtgacttgagggatcctgatccacttctctctt

SEQ ID NO: 830173 - DNA, 511 bp, Homo sapiens
gcttcctcagcagccagatggcagactcagtaccaacactgagtgctgatttgtaatgcgatagcttgtctttgcttagttcaggtttctattattgtagcaatgctctttaccactattttttttaagcatctatgcttactgttaaagagtgagtgagctgctttttactgagtgcttgtcatatgggaagcatcctgctgagtacttcacatacatcatcccaatcagtcctcaccaccagtctgcattatagtattataataccaatttcacagacaaggaaacacaatttgccccagtctccctgctaaatgtcctgtcaccagtgaacccacaccagtctgattccagattttttgttctttccattaaaccaccagcctctatgcatatttaaaagaaaaatggtacctgcatacacattakgaaacaagagacagaatgccctcattgcagttcttttgttctatgtaaatttggacattgtcatcctcgtatgcatcaacaa

SEQ ID NO: 830174 - DNA, 593 bp, Homo sapiens
ttttatatgtgttagatttgatttgtcaacatgttgttaactatttatgtatctacattcatgagaggcactgatccttaagtttccctttcttataatgtctttgcctgatttttaatactggtctcataraattagttatttgttatctgcaaataaggacagctttatttcatccctcacaatctgtgagtggtgaaaagggcatccttccttgtcttgctcctgcacttagtgcttaagtgtttccttaagtttctattttctgggaaagattatagagtactccttctgcttctattttctggatgagattgcagaaaataggtataatttctgccctaaatgtttggtagaatttaccagtgaacccagcaagtgctttctgcttggaaaggttattactgattttctttaataaatgcaggtctattcagattatctgtttctccttgtgcgagttttggtagagtgtgtctttcacgtaattggtctatttcaactaggttaatgaatttgtgggcagagagttttccaaaatattactttattatccttttagtatctatgggatcagtagtaatggtcactct

SEQ ID NO: 830175 - DNA, 627 bp, Homo sapiens
cttcacagtatctgacatgtgcaagggtctcaacagatgtttactaaattaatggataaacacacattcacatttacagggaatagaggaaggcaggagagtacatttgaaacagataaaccagaccttgtaacaactgagtcccgggtgttttaatgtaggcatctaagaatggcataaatttaaaataaaggcttagaataaaaacgctgggtggcatgtgaccaagcacgtgagaatctaatgcacagcacacgatgacatgggaggaaggagaggacgtataggtttttgacctaaaaactctggaattaaatcctggctttgccacttacaagctgtgtggctgtggacaaatttaatgtctttgtgactcggtttttataaatcgggagcattcagagtagatgtaagcactacacagatttcttgtgaaaatgaaattaatgaattgatgcagagttccgagaagagcttcccacgtgcaagggctcagtgggaaggatggtcggcactgctgctgtcactactgtgaattataccttcagcaatttcaaattagttgttgtctrttgtttagcaaaaactagggttatttagtgttacttactcaaaacctattatctt

SEQ ID NO: 830176 - DNA, 578 bp, Homo sapiens
cagacagatgcttctgtgtaactagggagagttgctgctggaaggccctgcttgtgttctctcttgaactcacaatcccaaaggaatactctttcctcctytctcccgtaactcatgtgacaaatttcagggaatcacatgcccatccctgaactaggatggtggaatactctattggtcaggtctgggggtgcccaccaaaactatatgtaataggatacccaaagttagtgggattctatttatagaaggaggagagtaggagtactggccaaatgtttgaataaataaaggccatccactattgttatctctggttcttttaaagaggggagatgtccactggaaaaaagtagagctcatcacgtatccaagaactgccttcatgcgtgagtttggcctgatatgtgcttgcactatagtccacttggtatccaggtcacacagaacagatactcccagcacatgttccaaagcagccccctgtccaattttccttagcacgtaggctcaagacaatgccccacttcccaaaggccttgtggcaatgtcctctttttctttcacatatatgattt

SEQ ID NO: 830177 - DNA, 556 bp, Homo sapiens
agaggtggagactggagtgatgtatctacaagccaaagaacatgaaggattgccagcaaacaccaggaacttggaagaagaaaggattcctctgcaggtttcagagggagcatggctctgctgacattttcttttgtcttttttttttttttctttttttgagacagagtctcgttctgtcactgggactagagtgcagtggcacaatctcagctcaccgcaacctccacctctgggttcaagcgattctcctgcctcagcctcccgagtagctgggactacaggagtacaccaccatacccggctaatttttgtatttttagtaaagacagggtttcaccatgttggccaggctggtctcaactcctgacctcaggtgatccacctgccttggcctgccaaagtgctgggattacaggtgtgagccaccacacccggcctctgctgacattttcatttcagacttagcctccagaataagacaaamattttttgttgttttaagccacctagcttatggtactttgttatagcagtcataagaaactaacacagg

SEQ ID NO: 830178 - DNA, 494 bp, Homo sapiens
tgactattgtaatttaaagcttgtcattttytatttagtaataacactcattagtgtagtatctatgatgaaccaggttctgcacaaagtaccttatgttcatggcctcatatcgtcttctccaaaactctgcaagataggattcatcaccacttatagggagagatctgaaagtttaaaattgtacccaaggtcacacagctggtaagtgccagagctgggattccgtagggtgttcagagtgcctctcctgccgtaggcttatcacaaaaagtcaaagtttggtcataataaagcctgaagtttggcaggatttaaaaatagtcaccagacttttgagttggagcatcccacctcactgctgttcaccttctgtggcagggagagtcatcatttccatttcagcttgtggaatatcttgtcattaacattctcatgcaaaagccattttatggtgcccaatgaagatggttgagctactgccccaagcctct

SEQ ID NO: 830179 - DNA, 494 bp, Homo sapiens
tgactattgtaatttaaagcttgtcattttttatttagtaataacactcattagtgtagtatctatgatgaaccasgttctgcacaaagtaccttatgttcatggcctcatatcgtcttctccaaaactctgcaagataggattcatcaccacttatagggagagatctgaaagtttaaaattgtacccaaggtcacacagctggtaagtgccagagctgggattccgtagggtgttcagagtgcctctcctgccgtaggcttatcacaaaaagtcaaagtttggtcataataaagcctgaagtttggcaggatttaaaaatagtcaccagacttttgagttggagcatcccacctcactgctgttcaccttctgtggcagggagagtcatcatttccatttcagcttgtggaatatcttgtcattaacattctcatgcaaaagccattttatggtgcccaatgaagatggttgagctactgccccaagcctct

SEQ ID NO: 830180 - DNA, 455 bp, Homo sapiens
actaagccaagtgttaattccctaatcatcccactatttcaagctctggtggagggaatagagaagggtcatttctgaccattgagggacttttttctagyagtttctgccaaagttcgaaatagcagtcacatgatttctggtcaaaatgatgaacttgtgtgaacctcaaaaacactgaaagttcatctcagtttggtgatctaactggaagtaatttttaaataagaaaatatttttaagtccatggaaaaacactaaactcattattgtttcatttctcttttataaaaaatgtgatgtatgaaaaactgagggtctgctttaatttgacaataatatattttcttcagctttgatttgaactgttttaaagatctgtatacctgggactcaagaatctccgattcaatgctaattagctgaatgctacgggcaagtcatttaacatcttt

SEQ ID NO: 830181 - DNA, 469 bp, Homo sapiens
cacgtccccaccagactcaggagcccagctagcttcacccagtggatcctgcaccggggctgcaggtggagctgcctgccagtcccacgccatgcrcctgcactcctcagcccttgggtggtcgatgggactgggcactgtggagcagggggtggccctcgtcggggaggctcgggctgcacaggagcccactggaggtgtggggagtctcaggcatggcaggctgcaggtcccgagcccttccctgccctgcgggaaggcagctaaggcctggcgagaaattgagcacagcagctgctggcccaggtactaagcccctcactgcccaggccggtgggaccggcgggccgctccgagagtggggaccgctgagcccacgcccacccgaactcgcgctggcccgcaagcaccgtgcgcagccctggttcccgcccacgcctctccctccacatctccctgcaagctgaga

SEQ ID NO: 830182 - DNA, 631 bp, Homo sapiens
caacatatttgactaaacattattctgagtgtatctgtgagggtgttttagatgaggttaacatttgaatcagtagactgagtaaagcagattgccctgcttaatgtaggtgggccttatccaatcagttgaaggcctgaacagacccaaaaggctgacctccctgtaggagagaacttctgcctgactgcctgagatgaaacactggtctttttctgcctttgggttcaatctaaaacatcagctcttcttggatctcaaacctgctgccttttggactaaaacttacacacttggctttcctgggtgtcattccttcaaactcactactggaactataccactggctctccaaggtctccagcttgccaacagcagatcttggaacttctcatccaccctaattgtgtgagccacttccttatagtaaatgctcttatgctctggagaacccacataccgcaaatctttttaactctaatttcattaccgcctcttaagattttcttttagacattctaatgtgtgtgtkttggcatcacatgacagtgtcactttgcatttgcctaaagattaatgatgtgaaatatttattcatgtgctcattgggcattgatatacctattttttg

SEQ ID NO: 830183 - DNA, 550 bp, Homo sapiens
  misc_feature 278: n = A,T,C or G
gcttgccatgaatgtgccacaggctgtcccctgccatccatcctgctggacaggatgggggaagtgagggaacaggcagggtggaccccttgaattcagggagaggcaggtgcatgctgggaggtcaggacctgtgagggctgtgggggcatcaggtggagtgggctccaggtgcaccctcagtgcaccaggcaggtctcaggccaggctccctggaccccggctgggtgatgtggtcactccctgggggactgttgtcagaccctggccaccctccntgggcagcaccgtcccatcccagaactggactttctgagttctaaaacaggacagtgctgcccaggcctgacagactgggaggacctgtgaagtcctccatccctagaccagcctcccaacagcagggacagtctcctacctttaccttcaggtaaaggtactgrtacatctcattctaaggcaaccaaggcagagctgaggacctgtgccaggctgggagccagttctctccctaaatgggccttagggaagcctcatccctgtcccagtg

SEQ ID NO: 830184 - DNA, 459 bp, Homo sapiens
ggtgttctctgttgatagtttcttttgctgtgctgaagctctttagtttcattaggtcccactcgtcaattcttctttttgcaattgcttttggaatcttcatcatgaaatatttgcctgcgyctatgtccagaatgagattttctaagatatcttgtagggtttatatagttttgggtcttacataagtgcttcatccatcttgagatgatttttgtatatggtgaaaggaagggagtgtacatgcccctgtgatattgttcctaatatccaggttgggagaggatattatactgaatattgcaggaagtgtcgaccaccctgaatgttgcttttaatatccggggagagagggggatattactcccaatatcatcctctccccccacaccctgcatagtacaagcaatatcaaagggggtctgtgcaacacgtgcaatattgggagtaatatcctcc

SEQ ID NO: 830185 - DNA, 459 bp, Homo sapiens
ggtgttctctgttgatagtttcttttgctgtgctgaagctctttagtttcattaggtcccactcgtcaattcttctttttgcaattgcttttggaatcttcatcatgaaatatttgcctgcgcctatrtccagaatgagattttctaagatatcttgtagggtttatatagttttgggtcttacataagtgcttcatccatcttgagatgatttttgtatatggtgaaaggaagggagtgtacatgcccctgtgatattgttcctaatatccaggttgggagaggatattatactgaatattgcaggaagtgtcgaccaccctgaatgttgcttttaatatccggggagagagggggatattactcccaatatcatcctctccccccacaccctgcatagtacaagcaatatcaaagggggtctgtgcaacacgtgcaatattgggagtaatatcctcc

SEQ ID NO: 830186 - DNA, 296 bp, Homo sapiens
gctccaccacctgggcacccagctacaggcgccgggcgactcccaagctggctggcgcgcccagcctcgcagaactgaggctagatgtcgccgtggctgtgaccaagccaggcggtctgcccaggggcggctgcaccggggcaggaaccgaccctcagccccatccccggtggctgcagacggcccctggggcggcccmgatctctcttctgaggaggagaggggcaggagtcacggccaggcgggccctcaggcgggaaggaatgcgcgcctgcaattccgggacgtcccgcgcc

SEQ ID NO: 830187 - DNA, 515 bp, Homo sapiens
ttacaattttttctggcatatggatcttaggatgcagcagacccaatggtcctgaatggaaccgtgacagatgcctcctcagatctctggcaagtcccaacaggagaataccagcacattcctcttgaaattcarattaaatgcatgcccctttctgccatttgaaaagctgctcctggtgtataactgagtcttggtaaattctaaatgcctaaatatgggagactaagtgattttgggtcccaagctgaccaaacatgggaaaaaagacaaaacacatactgagggataaaaggaggcaactgattattttatgtttattcttctaatttagtattttactcttttctacctgttctgttccttgagatgctgaaagtatcccctgggctctcttggcctgtagcttctagttatatttgaccaatgacaggaaatgaaatggaggaggagagtatgagattatttattaattccctatattttctctctgctgaaatgaagtttagcagtgg

SEQ ID NO: 830188 - DNA, 594 bp, Homo sapiens
agacggctttttaaagggggtccccaatcatgtttctcttcactcgatgggacctgccaacaagggtctccatccacctcctacaagtgtgtttagatcagcaacatgttcatacatccatgaaacagaggtcccagaggaaagggaaggccgacaccttgactgtttcacagccttcactgttaatacctccaggtactgcaatattcaaggcgactatggactggagtagaaccccagcatattacacaaggcatacaacaaaagtggacagactgttgcatgggtgcccattcccataactcttcaccaggcagatcctccaggccttggcctctagtcatcccttgccgggttatcgagccattagcagctctgcaactccttgaacagagctcctggggaactgaaagcctctctgccaccacctctgcagtgaaacttcccttgctaccctcatactaatgaaggagcaaagacactaagtgcyttatccacacctccaacaagctgcagtcaacccaagaagaggaggccagtccatctcccatgggatccaactacttctccacctgctcatcaccaaacagcaca

SEQ ID NO: 830189 - DNA, 648 bp, Homo sapiens
aaactagcaatccttaaagaaaattggcagagttgataattatgtttgtgtcatatttttatttattcataaattagttgtttaatctgaatttgatgattcatgatgcccagatatgtggggctgacatatagttggattaaccaattggttaattaattcacttaatcaacctatatctcttgagccaattttatttgacagaccaattatataataggtttgtgcttctttaactgggatctttttattgatcaattaattgaaatctatgagttcgctgacggaacctcagtgctgtagtttgaatttcagtggccagttctcttgatcagaagccacatttaatagaacagaatttgtgcaacatttggcacatattcatgcacacaatatataactaaatcatacataaaatgttttagattattttcttatttatttatttttaaattaacaaacatataagccaaactataaagcaatgtgtcaaagaaaatgtaaagccacagcgaaaatatgacctagcttttcaaaacaacagtcagcttgaatattttaagaaagaactttttataatttaatgtcaattaataatgtraaataaacaataaagtttaaagatcagcatttctaaaatatagacaa

SEQ ID NO: 830190 - DNA, 631 bp, Homo sapiens
atcacacttccacaatatacattaatcaaaactcccctctaaaaggccaacagtccctgagctccttggttcttgcttctctaatccctgtgttttattagactcctgctttgtccagagaggggctacaaataagcatacctctttcccacttcagtatgcaatgcattcactctttattttctgtattgctactgcattattttctctcctctttcagtaagaagattgataatttattaagaacacttaagatttctgcactttgtagggatgtatatttcaataaatgtttgtaagataaaaactgccttctaaaattctgtgagcttgccaggaaaagctaaggaactcactgtaaagaacaactcagctcagtccaaaactacaggaagcttttgataatgaagggtgaagttgcatacaacattagtttcatatattctgccaacatattttctgttaactaaagccagtttctcccagggaaggtttgttgagarctggagatagtaaacaaagttttttttaaaaaaacaaaacaaaacaaaacaacagcactgtttaaaacatgctattgaagttagccttccttattaagggtccattcttatttgtctcatggtttgtg

SEQ ID NO: 830191 - DNA, 619 bp, Homo sapiens
acatagaaaagatacagtattataacctcatacttccaccattgtctatgtcgtctgtcatcgacagatacattattatgtagcacatgactgttgcatattactatttgttctctacttttatatattcttaatttgttttactgcctttttttgaattgagtagtttttatgattctattttcccaccattattactaattatctatacctcctaattgtactttctttaaaaatggttattcttgggctttactatccaataaggcaggcactatccctatgtagctgcttaaatttaaatttttaattaatttacagttaaatgcttgaaatttcatatccttaggtaatctaatgacatttcaagtgtgcagtatccacatttggctagtggctaccatattggacagtataaatatggcacatttttatctacacagaatgttttcttggacagtgctaccctgaagcttaaaatatgtcactttgtctcacagtctaccttcaaataatatactgycttatgtatatcataaatatgttcccgcagtgtgcttttgtttcatgcctctatctactgctttaaattccatagtgtattattattttgctttag

SEQ ID NO: 830192 - DNA, 586 bp, Homo sapiens
gagtaatatttgtactttattaacacatttaaaaagatcttgtatatgtaccacattttccttatayggtctatcattgttgggcatactatgcagccataaaaaggaataagataatgtcctttgtagggacgtgaatgaagctggaagccattatcctcagcaaactaacacaggaacagaaaaccaaacactgcatgtcctcactttataagtgggagctgaacaatgagaacacatggacacagggaggggaacaacatacactggggccttttggagggtggggtttggggagtgatagcattaggaaaattagctaatgtatactgggcttaatacctaggtgatgggttgataggtgtagtgaaccaccagggcacatgtttacctatgtaacaaacctgtatgtcctgcacatgtaccccagaactaaaaataaaaattaaaaaaatcttgtagcaggcctcaaaactaccataatttgaagtagtgatgagcattcaatgacacttcaacatatctgcaataactgagatgtgagatgaagaatgtattcgatttcttttgatgacaagtttgtggg

SEQ ID NO: 830193 - DNA, 581 bp, Homo sapiens
aaatattaaggatccacactcaatcttcttttctgcctcaccatcttagtttgggasttttgttgtggtgggaacacagctctttagttttaaatatcgtgtctgcattccagcaagaaagacaggaaagggcaaaggaaaacaggtacacggcagtgagcttggctctttctgtcaggagaatggtacctttgtggaagtcacgcccagtgaaagctgacggcattcggtggtcagaacagggttacttgaccactttggaatgaatcatgtttctgcttgcagggaagatggggagaagggatgttgggttggcatttacctgtgtctgtttatctactcagtcattttcagtgaatttatatacacgtatatacatatatagaagtgtctctgtcttttaagatacatgacgtctactctagatattgttctacaacttttttcccccctacttatcagtttgtcttagggatcaaacgctacgtcagtacatgtttatcagtttcattcttttcagcagcggctgtttttccatagtatgtgtgtactgtagtgcatttaacccttattctcttgat

SEQ ID NO: 830194 - DNA, 581 bp, Homo sapiens
aaatattaaggatccacactcaatcttcttttctgcctcaccatcttagtttgggagttttgttgtggtgggaacacagctctttagttttaaatatcgtgtctgcattccagmaagaaagacaggaaagggcaaaggaaaacaggtacacggcagtgagcttggctctttctgtcaggagaatggtacctttgtggaagtcacgcccagtgaaagctgacggcattcggtggtcagaacagggttacttgaccactttggaatgaatcatgtttctgcttgcagggaagatggggagaagggatgttgggttggcatttacctgtgtctgtttatctactcagtcattttcagtgaatttatatacacgtatatacatatatagaagtgtctctgtcttttaagatacatgacgtctactctagatattgttctacaacttttttcccccctacttatcagtttgtcttagggatcaaacgctacgtcagtacatgtttatcagtttcattcttttcagcagcggctgtttttccatagtatgtgtgtactgtagtgcatttaacccttattctcttgat

SEQ ID NO: 830195 - DNA, 581 bp, Homo sapiens
aaatattaaggatccacactcaatcttcttttctgcctcaccatcttagtttgggagttttgttgtggtgggaacacagctctttagttttaaatatcgtgtctgcattccagcaagaaagacaggaaagggcaaaggaaaacaggtacacggcagtgagcttggctctttctgtcaggagaatggtacctttgtggaagtcacgcccagtgaaagctgacggcattcggtggtcagaacagggttacttgaccactttggaatgaatcatgtttctgcttgcagggaagatggggagaagggatgttgggttggcatttacctgtgtctgtttatctactcagtcattttcagtgaatttatatacacgtatatacatatatagaagtgtctctgtcttttaagatacatgacgtctactctagatattgttctacaacttttttcccccctacttatcagtttgtcttmgggatcaaacgctacgtcagtacatgtttatcagtttcattcttttcagcagcggctgtttttccatagtatgtgtgtactgtagtgcatttaacccttattctcttgat

SEQ ID NO: 830196 - DNA, 572 bp, Homo sapiens
tatgagatcaccataaaagataaaataataatgaaaaatattgaaatattgcgagaattactaaagcttataagctttactcaatttttgatactgaakttttacaaattgaaggttttttgacaacactgcattgagcaagtcagttggcaccatttttccaacagcatatatgctcactttgtgtctttatgtcacattttggtaattcttaacagtatttcaaaacttctgtgttgttactatatctgtaatggtgatctgtgatcagtggtcattgatgtaattgttttggggtgccatgaaccttacctatataagacaacaaacctaattgataaatgtttatgttctgactgctccaccagctggccagtcctatctctctcctctcctcgggccttcctattccttgaggcacaacagtgttgaaattaggccagttaataaccctacagtggcctctaagtacataagtgaaaagaaaatctctcactttaaatcacatttctcactttaaatcaaaagctagaaaggattatgcttagtgaagaaggcatatcaaaagccca

SEQ ID NO: 830197 - DNA, 587 bp, Homo sapiens
tgttcttaacattgaaatatctttgtttatttttaaaggacagcataatcagagaatataattatgtattgaattaatctatgataagggtgaaacatcttgtcatccttctctaactcwgttataaatagactggataagatgatttttttttttaagtgtaaaactcttctgttttaaatttgcttagtatggggaactcccatttttaaaaaaatcaggctgagcgtggtggctcatgcctgcaattccagcactttgggaggctgaggtgggtggattgcttgaggtcaggagtttgagaccatcctggcctacatggtgaaccccgtctctactttaaaaatacaaaaaaattagctgggctaattagctgtggtggcgggcgcctgtaatctcagctattcaggaggctgaggcaggagaattgctcgaacccaggaggcagaggttgtagtgagccgaaattgcatcactgccctccagcctgggtgacagagtgagaccctgtctcaaaaaaaaaaaaattaaaatagcttttattttaaatattaatgcttattgttaataattaaaatagttcagta

SEQ ID NO: 830198 - DNA, 604 bp, Homo sapiens
caatactgcaatttgcttcaaaatcatatggctggaggagaaaggaatggataagggtatagatgaaacagattgaccatgagctggtcattgttactgctaggtgctgagtacatagagattcattttactattcttttctttttatatatgcttgaaatttctatagttaaaagttgttttaaggacatctctagcaaagcctacagcatatgcaaaagcccctggacacgaaggagtctgcatattccaggtcccaaaggtgtgactaggcctagggggtgaagaaagtgtgtaggactgggggatgagggggctagattgtgtagggccctggagcctaaaacttgcccccttggagcttatgggggggctcctttgaccctcggggtgaatacaatccagggaagtcaattctccttttgcaaaccaaagagggagggtggaaacgtataaatgggcacctggcatatgaatacctcttgaatcactgatgcaagggtctctcttgcaggtagcccagtcactgtgggtcatttctcagctgggaracaagacataaggccaagtaaacagtcttgaactaagaacacaaaaacacggg

SEQ ID NO: 830199 - DNA, 524 bp, Homo sapiens
ctataatctaattgcaggaaggagcatgaaagtatagctaaacaaaacacattgcatcagtctacagtcacagaatgaaagagctgagaaggcaactaaattgaatttgagactagattcaatactcattagggtgaaggcagtcaacatttttactgttgatgaaaaaaaaatcaatgaaattttacaaagaaatttctcaagtaatgccataccagtcaaagatatgcctatctttgtatttccttatctagatttgtttactagagaggaagctgaaagttaaagtatgatggttaatgctgagtgtaaacttgattggattgaaggatgttaagtattatttctgtttgtctgtgagggtgttgccaaaggagattaacatttgagtcagtggactgggagaggcakacccaccctcaatctgagtgggcatcatctaatcaattgccagcacagctagaataaagcaggcagaagaagatggaagagcagacttgctgagtcttccagtcttcatcttt

SEQ ID NO: 830200 - DNA, 626 bp, Homo sapiens
agaagaagatggaagagcagacttgctgagtcttccagtcttcatctttctcctgtactggatgcttcctgcccttgaatattagactgcaagttcttcagcttttgaactcttggacttagcctgtgatttgccaggggttcttgggccttcacccacagactgaaggctgcactgttggcttccctacttttgggacttggactggcttccttgctccaaagcttacagatggcctattgtggtagttcaccttgtgatggcatgagtcaatactccttaacaaaatccctttcatatatacatctatcttattagttctgaccctctagagaaccttgacaaatacacctagtgttactcttttttgatgttttttctcttgagaatcgctaatatttttctttttttatgttgagcaatttctgatcttgcccggatattgtgaatattatattgtgattactctgaattcagcactatgctttgaaaattatagtttttattattaaaccagaaataaacagggataaaactgcaaactctgtctcttgagtggcagctcagacctttktacagactttttatgtttagttgggttgactgaagaatgtgtgattcaatgt

SEQ ID NO: 830201 - DNA, 491 bp, Homo sapiens
agaagtttctatttaatattatgctgaaagataaaagcaaaaccattrgtaccttaccagtatactattaactacttaaaaaaatctaacagaaaaaaatacagtgaacaaaatatatactcacagtcataatgtttataagatttcaagggataatttttataagatttgtactagaacatacagaaaagcataaatgttactaaagaacaacataagacattcatgaaaatttgcactgaatattgtacagatgacaattatctctaccagttaaaactggatttgatgcctgtattagtccattgtcacactactaataaagatattcctgagactggagagtttataaaggaaagagatgtaattgactcacagttcagcatgactagggaggcctcgggaaatttacaatcatggcagaaggggaagcaaacatgtcctttttcacatggtgtccggaaggagaggaatgtgaaccaagtgaagga

SEQ ID NO: 830202 - DNA, 491 bp, Homo sapiens
agaagtttctatttaatattatgctgaaagataaaagcaaaaccattagtaccttaccagtatactattaactacttaaaaaaatctaacagaaaaaaatacagtgaacaaaatatatactcacagtcataatgtttataagatttcaagggataatttttataagatttgtactagaacatacagaaaagcataaatgttactaaagaacaacataagacattcatgaaaatttgcactgaatattgtacagatgacaattatctctaccagttaaaactggatttgatgcctgtattagtccattgtcacactactaataaagatattcctgagactggagagtttataaaggaaagagatgtaattgactcacagttcagcatgactagggaggcctcgggaaayttacaatcatggcagaaggggaagcaaacatgtcctttttcacatggtgtccggaaggagaggaatgtgaaccaagtgaagga

SEQ ID NO: 830203 - DNA, 596 bp, Homo sapiens
tttatttgatctatacttgaacatcattttcagttcatacgtttgttatcaaatagatggagcatccagaatctgtgagaaagaatgaatagctgtagagaacacacagacttaagcacagagtacgtatgctcaatagacctatagttagatgtgaatattatgtcaaacacaaatagtggaaagtgaaggcaatgatgaatgtgggaaagggaagctaaatattaactaaatgtggaagtttctcacttatgtgttagggagctcagagtccctttcagtattaagcaggaatgtctcctttggtctgtgctctgccttctgcaatgacaaatttcccttcaacaaggcaacctgtttggtagttgactcttgtagtgtggttggcccttgaataacacaggtttgaaccacgagggtccacttacatgccaattttttttgcccaaatgcagatgaaaaatacagtatttgtgttatttgaaacttgtgtataccaagagcccacttttcctgtatgtgggttccacagggcagacagcaggacttcggtatgtaaggatctggstgtgtgaggggatcctggaaccagtccc

SEQ ID NO: 830204 - DNA, 643 bp, Homo sapiens
tagcctagaccttgaaagagctttgtgcgaggcagtctctagactctccttactctccaaagcagagccagtaggcttaaacacatgctaccattttgcagcttcyggtccccttcaaggacaccttgtgtttttgttttgttttgtttttaactttcttctacatatattaaatacactacctttatggaaggcagggagcagggagggtcaaagaatgtgactttccctggactctgacatcaaccttgattccacttacacctaaatcatttgtttacgagaatagggatttctgtctgctttgctaactgctatatctctagtgtctgtaacatttgtaacatttgtaataaacaaatgttatgcattagttcaataaccttttcatacattcagcaaatgtatgacgtggtgcgtctaggaatggaaaatgttacaaataagcagggcactttatagttccttcactatgttccactgtctaaacaaagaatcagtgctatctgtatattattattattattattgatcattaatgtctactcctcatttggaagcaggagctatatcatttgccttctggcattcctagaacctacccaactactgagcaaatgcatactgggtagactcaggttca

SEQ ID NO: 830205 - DNA, 641 bp, Homo sapiens
gtacaccttgagctgtcatcattggaaagtctggttaaagagatttgagctctgtgcattattgaggcatgaaaaataatattctaacacattagaatatataatttcactgaaatcttcctaaagatctttatataattgttaccaaatccaacgtttaaaaaacacatatgtatctgtgatttattctattcaaaaatgtcttaaaagcccaaatttcaccactatacaatttatccacgtaactcaaagccacttgtactcccaaagcgattgaaatttaaaaagaaagaaagaacatgtctttatacagtcaaaatagatctcccactgtcatattctacttatctttagttgtgttacttttgggtggaagaacctcaaattccatatatttctgtaattagaggtagtctcctattatctttgggcagtgtgagaagagtttttgccattttctaaagcacagtttcctttggcccagttgaaactccagggagttgtgaccctgaaggaaagataatctctgaagagacaaytgagtatttctagttgaggacagcatggtgtaagaatgggaaagtatgagagttcacagtcaattgatgatatcagagtggaaggagggacagtagaagagt

SEQ ID NO: 830206 - DNA, 593 bp, Homo sapiens
tgctctttctcttgaatgactgtttcacaatctscttctgaaacttaatcagaagacatgtttcatattctcttataatttctctgctacccctctgctgttttttctccttctgtaatatacatcagaaagacacaaagaagatgaaaatcatactcacacaggtgcgtagtaaactggatttctgcaaacacgtgaattcccatttccaacgcaggaagactcccacacccacctttgtgactctttatacatgttggctacgactgaatagggccttctgtttatattctgttggcctcattagacagcctatagaaataaactttgctcagaaagtacaatgtttaaagataaatatttaagtttagagttaaaaatgcattctaaagcaaggaagaaaaggattttatctagcagcatatccaaaaagtatgagttatagtggtgataataataacaataaacgtaataatcttctttttattgagttcttaatctatgacaaccacagtgtacatatctccattaattcttacaacttgattaactaaaattaaatagtattatccccattttgttgttgagaaaac

SEQ ID NO: 830207 - DNA, 430 bp, Homo sapiens
gacacagtctttttatagaatatgcaaacggatatttcggagccctatgaggctgtagtgaaaaaggaaataccttcacataaaaattagacagaagttttctcataaaattctttgtgatgtgtgtattcatctcacagagctgaacctttcttttgattgagcaatttggaaacagtctttttgtagtatctgcaagtggatatttggagcactttgaggcctatagtgcaaaaggaaatatcttcacataaaaactagacagaagcattctgagaaacttctgtgatttgtgcattcatctcacagagttgaacctttcttttgattgaacagtttggaaacagtctttttgcagaatctgcaaagkgatatttgggatccctttgagacctctgatgaaaaacggaataccttcacataacaactg

SEQ ID NO: 830208 - DNA, 624 bp, Homo sapiens
atggacatatcacagagaagtttctcagtatgcttctgtgtagttttgtgcaaagacattttcttttccactgtaggcctcagagtgctccaaatatccacttccagattctacaaaaagagtgattccaaactgttcaatgaaaagaaagtttcaactctgtgagataaatgcacacatcacaaagaagtttctcagaatatttctgtgtagtttttatgagaagatatatccttttacactataggccacaaagggctaaaaatatttacttgcagattttacagtaagagagtttcaaaactgctctataaaaagataaatgcaactctgtgatttgaatgcacacatcacaaaacagtttctcaggatgcttatgtgtaattcttatgtgaagatatttccttttccaccataggcctcaaagcactccacatatacacttgcagattctacaaaaatagtgtttcaaaactgctcaatctaaagaaaatttcaactctgtgwgttgaacgcactcatcgcaaagatgtttctcagaatgcttctgtgtaattttaatatgaagatatttccttttccacaattggtctcaaagcacttcaaatatcctcttgcagattc

SEQ ID NO: 830209 - DNA, 631 bp, Homo sapiens
gggatcccaaatatccttttgcaggttccacaaaatactgtttccaaactgctcaatcaaaagaaaggttcaacwctcagagttgaatgcacacatcacaaagaagtttctcagaaacttctgtctagtttttatgttaagatatttcgtttttcaccataggcctcaaagggctcctaaatatccctttgcagattctacaataagactatttcctaactgctccatcaaaagatagtttcaactctgtgagatgaatgcagtcatcacaaagatgtttcttagaaagattatgtctcgttttaaagtgaagatatttctttcttcatcataggcctccagcctctcagaaacatccctttacagaatctacaaaaagactgtttccaagtactcaaagaaaagaaaggttcaactctgtgagtaaaatgcgcacatcaaaaagaattttctgagaatgtttctgtcgagtatttatttgaagatatttcctttttctccattggactcaaagggctcccagataaccctttgcagattcctcaaaaatgttgtttccaaactgctcaaacaaaagaaaagttcaactctgtgagatgaatgcacacatcataaagaagtttctcagaaa

SEQ ID NO: 830210 - DNA, 631 bp, Homo sapiens
gggatcccaaatatccttttgcaggttccacaaaatactgtttccaaactgctcaatcaaaagaaaggttcaacactcagagttgaatgcayacatcacaaagaagtttctcagaaacttctgtctagtttttatgttaagatatttcgtttttcaccataggcctcaaagggctcctaaatatccctttgcagattctacaataagactatttcctaactgctccatcaaaagatagtttcaactctgtgagatgaatgcagtcatcacaaagatgtttcttagaaagattatgtctcgttttaaagtgaagatatttctttcttcatcataggcctccagcctctcagaaacatccctttacagaatctacaaaaagactgtttccaagtactcaaagaaaagaaaggttcaactctgtgagtaaaatgcgcacatcaaaaagaattttctgagaatgtttctgtcgagtatttatttgaagatatttcctttttctccattggactcaaagggctcccagataaccctttgcagattcctcaaaaatgttgtttccaaactgctcaaacaaaagaaaagttcaactctgtgagatgaatgcacacatcataaagaagtttctcagaaa

SEQ ID NO: 830211 - DNA, 631 bp, Homo sapiens
gggatcccaaatatccttttgcaggttccacaaaatactgtttccaaactgctcaatcaaaagaaaggttcaacactcagagttgaatgcacacatcacaaagaagtttctcaraaacttctgtctagtttttatgttaagatatttcgtttttcaccataggcctcaaagggctcctaaatatccctttgcagattctacaataagactatttcctaactgctccatcaaaagatagtttcaactctgtgagatgaatgcagtcatcacaaagatgtttcttagaaagattatgtctcgttttaaagtgaagatatttctttcttcatcataggcctccagcctctcagaaacatccctttacagaatctacaaaaagactgtttccaagtactcaaagaaaagaaaggttcaactctgtgagtaaaatgcgcacatcaaaaagaattttctgagaatgtttctgtcgagtatttatttgaagatatttcctttttctccattggactcaaagggctcccagataaccctttgcagattcctcaaaaatgttgtttccaaactgctcaaacaaaagaaaagttcaactctgtgagatgaatgcacacatcataaagaagtttctcagaaa

SEQ ID NO: 830212 - DNA, 559 bp, Homo sapiens
ttgcaacatcggccatgaagggctccaaataaacacttgcaaattctacaaaaagagagtttcaaaactgctctatcaaaacataggttgaagtctgcgasttcaatgcacacatcacagggaggtttctcagaatgcatctgtgcagtttttatgtgaagatatttccttttccaccataggcctgaaagcactccaaatatccacttgaagattctgtgaatagagtgtgtcaaaactgctcaatcaaaagaaaggttcaattctgtgagatgagtgcacacaaaacaacaagtttctcagaatgcttctgtgcagttattatgtgaagatcattccttttctacaacaggcctaaaagagctccaaatatccgcctgcagattctacaaaaagagtgtttccaaactcctcaatcaaaagagaggttcaactctgtgatatgaatgcacacatcacaaagaagtttctcagaatgcttctgtgtagtttttatgtgaagatacttccttttccacattatgccacaaagggctccaaatatgcatgtgcagattct

SEQ ID NO: 830213 - DNA, 405 bp, Homo sapiens
agcctctaaatttgagctaataggcttaaatcagggaaaggctgacataatcttttgaatccaaatagcctagaaccttttgctctgctgaaaaatgcagaggaggtggtgtgtttctggggtttaactggaaggtcccaggagttgggtttgagattttttgagatcctccttacagagcctatatggtcttcaggataggataaagcagagcgtgttcatacttgctcacccaaccaacccatctctaccgtctccactaatttcaaaccactatcagatagatcccttcctctctatcctcaccccagcattccagtgcattcaagcttgattcaatgccatgtytacatcacagctaaagcttcattccttactcctccacgtactcatttaacaaacact

SEQ ID NO: 830214 - DNA, 540 bp, Homo sapiens
agtgtaatcaagttgtactatgcgtaagaaaaggagtagctttctttttggaaatatgaagtgtgatccggatgggggatgctgaatgaaaactttgaagtgggcgtcctcttcgtwtaatccatgtgacacaggtgttgtgtttgctgaggagtctaaattggaggcctttggtgggtgagcagtctgggccttgaggccacccaggcttttcggggacaggccaggatgtcactgctctgacctgggcactgattaaagtcccatgaaatggctcccaggtaacaatgaccctcactttgaaagtgactttgtcagaactaggcttaaagtcctctatgctgaggcccacgctgctcctctcactcctttgttaaaatcccagttcctcctgggaagggctgcagaaaagcgacctttagacactcacctttgagtgtgaattagttagttcatcagcccccttgcaatgtggctgtctgctgttctctgtgacacagaagcacactggatggcaagacttggcttggcttgacttgg

SEQ ID NO: 830215 - DNA, 591 bp, Homo sapiens
agccaagaatattacagtgtaatcaagttgtactatgcgtaagaaaaggagtagctttctttttggaaatatgaagtgtgatccggatgggggatgctgaatgaaaactttgaagtgggcgtcctcttcgtataatccatgtgacacaggtgttgtgtttgctgaggagtctaaattggaggcctttggtgggtgagcagtctgggccttgaggccacccaggcttttcggggacaggccaggatgtcactgctctgacctgggcactgattaaagtcccatgaaatggctcccaggtaacaatgaccctcactttgaaagtgactttgtcagaactaggcttaaagtcctctatgctgaggcccacgctgctcctctcactcctttgttaaaatcccagttcctcctgggaagggctgcagaaaagcgacctttagacactcacctttgagtgtgaattagttagttcatcagcccccttgcaatgtggctgtctgctgttctctgtgacacagaagcacactggatggcaagacttggcttggcttgacttggctgggtggkgaaaagccacaggctcaggggctgcaa

SEQ ID NO: 830216 - DNA, 631 bp, Homo sapiens
gcatagatatttctactgtcataataactctttttattacaagattacagtragtaaatacataaataaataatttttggccctaaagggaacaaggccttttgcatttcatattctagaaggtctacatgtccataatactttccttgttgctggagaaaattttatgatttaaaaaatagtttgttgcctttttatgaccataagcatgaatacatccactgtccttcattttcctcttggggagaagagatgggctgtgcctcagatctaatgtatctctgtccatccaataccataatcctaccagcaatctactgggaacccataaaaacttaacataaggggaaagcctcagaaccctgttgattgattcagcggaagtggcttccaatttcactgcttctctccccagccgggtgacttataagactctttgtacctggacgacttccaagtttatcatgtgagtgttttagtaggtcaatgagatcattttcgaaactttcttcctattctttccatgatcatcccacagcacctcactctgacacaagcccatctaacacaccttgggggaggaagagttggtatctgtgaacttaaagcaacattagacttgcacatgaat

SEQ ID NO: 830217 - DNA, 703 bp, Homo sapiens
tagtgatgcggtgttcttttcagcttgttgtaccaggaggcacacgatgtcggtttgtcctattattgaaaatgttcactttgatcacttgtcaaagatgatactcccagarcactccattgtgaaggcactattttaccccttggcaaactataacaaatatgtaggaagatcctttgtgaatatgtgaatattattctgctcctcatcaagttttcattcaatggtttaacattcatggatttgtacctgagtcagttattgctgtggacttgcaaaatgtttttttctatttgtttccttctaaatttatttatttatatttattcatttttgaaaccgaatcttgctctgtcatccaggctggagtgcagtggcacgatattagctcactgcaacctccacctcccagttcaagcgattctcctgcctcagcctcctgagtagctgggattacaggtgcccgctaagcccagctaatttttgtgtgttttttttttttagtagagatgggatttcaccatgttggccaaggggggctcaaactcctgacctcaggtgatccgcccacgttggcctcctgaagtgctgggattacaggtgtgagccaccacacccggcctatttccttctaaatttattagttggcattccactttaaagaaaagctttccctcctccttttatatgaatgtatttattt

SEQ ID NO: 830218 - DNA, 580 bp, Homo sapiens
agagtgaagaaaacttagacttatgggacaccaacaaagaaatgaatatgtgcattttggaagttacagaaagttaaaagaaaaagaaaagaacgaaaagtttatttaaagaaataatgactgaggtcacttccaagatggccgaataggaacagctccggtctgcagctcccagcaagatcgaagcagaagatgggtgatttctccatttccaaatgaggaacctggttcatctcactgggactggttagacaatgggtgcagcccatggagggcgagtccaagcagggtggggtgtcacctcacccaggaagtgcaaggagtcaggggacttccctttccttgccaaggaaagctgtgagtgactatacctggaggagtggtacactgctgcccaaatactgagcttttcccacggtcttcacaaccggcagaccaggagattccctcctgtccctggctcggcgggtcccatgcccacggagccttgctgactgctagtgcagcaatcygagatggacctgggacactggagcttggtggggggaggggcgtccaccattgctgaggcttcagtagg

SEQ ID NO: 830219 - DNA, 636 bp, Homo sapiens
tagccaagacaatcctaagcaaaaagaacaaagctggaggcatcacactacctgacttcaaactatactacaaagctacagtaagcaaaacagcatggtactggtgccaaaacagacttgtagaccaatggaacggaagagagccctcagaaataacaccacacatctacaaccatcagatctttgacaaacatgacaaaaacaaacaataggaaaggatctcctattcagtaaatggtgctggtaaaactggctagtcatatgcagagaactaaaactggaccccttccttacaccttacacatgaattatctcaagatggattaaagacttaaatgtaaaacccaaaaccataaaaatcctagaagaaaaactagacaatagcattcaggacataggcatgggcaaagacttcatgacaataacaccaaaagccaattgcaacaaaagccaaaattgataaatgggatctaattaaactaaagagcttctgcacggcaaaagaaactatcatcatagtgaacagrcgacctacagaatgggagaaaatgtttgcaatctatccatctgacaaagggctaatatccagaatttacaaggaacttacacaaatttacaagaaaaaaagcaaacaac

SEQ ID NO: 830220 - DNA, 636 bp, Homo sapiens
tagccaagacaatcctaagcaaaaagaacaaagctggaggcatcacactacctgacttcaaactatactacaaagctacagtaagcaaaacagcatggtactggtgccaaaacagacttgtagaccaatggaacggaagagagccctcagaaataacaccacacatctacaaccatcagatctttgacaaacatgacaaaaacaaacaataggaaaggatctcctattcagtaaatggtgctggtaaaactggctagtcatatgcagagaactaaaactggaccccttccttacaccttacacatgaattatctcaagatggattaaagacttaaatgtaaaacccaaaaccataaaaatcctagaagaaaaactagacaatagcattcaggacataggcatgggcaaagacttcatgacaataacaccaaaagccaattgcaacaaaagccaaaattgataaatgggatctaattaaactaaagagcttctgcacggcaaaagaaactatcatcatagtgaacaggcracctacagaatgggagaaaatgtttgcaatctatccatctgacaaagggctaatatccagaatttacaaggaacttacacaaatttacaagaaaaaaagcaaacaac

SEQ ID NO: 830221 - DNA, 530 bp, Homo sapiens
ctctgtgatttttcctctccataacccttaaccccagtctaaccatgagaagaacatcagacaaatcccartagaagggcaccttatgctatacctgaccagcgctgctcaaaaactgaaacacctcaacttttagaaaaaatagaagaaaaatcttcatgaggttgtagtaggcaatttttttaggtggaacacaaatagcgcaaactataaagtgaaaccctcctaaactgaactttaagaaaatagaaattttatgctcttcagaagctgttaagaaaataaaaagataagccaaagatttggagaaagtattcgtaatacaaatatctaacaaatgacctgtatccagaatatacaatgatctcttataattaaataattacaagcaaatttcccatttttaaaatattggcaaaataatcaaacacacaattcacaaatcattgctcataagagaaacgcaaattaagtccaaaatgagataccaatacacaaaattgtttgctaggatggctcaaatagtaaga

SEQ ID NO: 830222 - DNA, 530 bp, Homo sapiens
ctctgtgatttttcctctccataacccttaaccccagtctaaccatgagaagaacatcagacaaatcccaatagaagggcaccttatgctatacctgaccagcrctgctcaaaaactgaaacacctcaacttttagaaaaaatagaagaaaaatcttcatgaggttgtagtaggcaatttttttaggtggaacacaaatagcgcaaactataaagtgaaaccctcctaaactgaactttaagaaaatagaaattttatgctcttcagaagctgttaagaaaataaaaagataagccaaagatttggagaaagtattcgtaatacaaatatctaacaaatgacctgtatccagaatatacaatgatctcttataattaaataattacaagcaaatttcccatttttaaaatattggcaaaataatcaaacacacaattcacaaatcattgctcataagagaaacgcaaattaagtccaaaatgagataccaatacacaaaattgtttgctaggatggctcaaatagtaaga

SEQ ID NO: 830223 - DNA, 529 bp, Homo sapiens
tggctcatctcagccaggagaggtcttgggctgggagccctgcccacccacccccagcctcaccccagtctggctcccacaccttcctggggtccacccagcaatcctgggaacctggaagcacagaccccctatccccacccgtgcctggcattgaccccaaccccacccgtgcccaacactgaccttcccaccccaagcagggctccagtgtcctggttcctgctccttccacacccacagaggccagaggaatgttctcaggctcccatacccatatcctgcccccggccttcactcttgttggaaaagtccttctacttttatttcctctcaaaggtcactgtctcagaaactgcctggaatgtcttcagcaagaaaccaggatcatgcattcacccattcaacaagcagcagagaccatccactcatccacagcagacacaatcattcagccatttaacaaacagtccaggtatgggccatcmccagggaatttgctcctctgcccataagaactttccaaagt

SEQ ID NO: 830224 - DNA, 624 bp, Homo sapiens
gcctgtccttgtgcatctgtcctgaggggctcctgcctgtctgtagcctctcaggacacccgtgtagctcctcacacccatcacaccgcaggcccaggcttggcaacatcatgcttgttccatctgctgcccctagaccatcgtgacccaacaaacttcctgccagccacaatggaaggttctatctctgcagtgtccaatacaggatccgctacccacatgtggctttgagcactggcactgaggctcctgcagctgagggactggacccatttcttgtatgtaattttaattaattgaaatataaagagccacatgttagagtcatatccaaccaacccccaagtcctgtccatgttgcccacaaaccaatcttgagtggctcctatgccagacaataaggctccagctaggggtgggcaaacctttcctgtaaagggggagatggtacgtgttttaggctttgtggtctctgttgcaactattcaccgttgtacctgaggcgtaaaggyagccgtagacagtatgtaaaacaggaggtgtggctgtgtgccaaggaaactttatatgcaaaatcagggggccaggaggatttgcgattggggctgcagtcagccgacctct

SEQ ID NO: 830225 - DNA, 624 bp, Homo sapiens
gcctgtccttgtgcatctgtcctgaggggctcctgcctgtctgtagcctctcaggacacccgtgtagctcctcacacccatcacaccgcaggcccaggcttggcaacatcatgcttgttccatctgctgcccctagaccatcgtgacccaacaaacttcctgccagccacaatggaaggttctatctctgcagtgtccaatacaggatccgctacccacatgtggctttgagcactggcactgaggctcctgcagctgagggactggacccatttcttgtatgtaattttaattaattgaaatataaagagccacatgttagagtcatatccaaccaacccccaagtcctgtccatgttgcccacaaaccaatcttgagtggctcctatgccagacaataaggctccagctaggggtgggcaaacctttcctgtaaagggggagatggtacgtgttttaggctttgtggtctctgttgcaactattcaccgttgtacctgaggcgtaaaggtagccgtagacartatgtaaaacaggaggtgtggctgtgtgccaaggaaactttatatgcaaaatcagggggccaggaggatttgcgattggggctgcagtcagccgacctct

SEQ ID NO: 830226 - DNA, 630 bp, Homo sapiens
tgcctgaaagatgtcctttcatcctccccacccacctgaaagatgagaagtggaggactgatgagaaccttccagatgggttctccaagccacacagctaacaggtgccagagtcggaatttgaactcagctgtgacttacttctgttaccagcagaagtgggtgagaaagccggccacagtccactaaacacgggctatgaccaaggtctctttgacaacataatccaacaaataggcttgttttagaatataaatctcaaggaatttggggggagttgatatactcttgttttttactttttattttgaaatatttttagattcacaggaggttgcaaagaaatattcaagaagatcctgaacactcttcacttagccccgcttcaatgttaacattatgcataacgatggtgcaatagtcaaaccaggaaactgacagtgatgtagtcaacagaaactagtcagactccagtagttataatgtatgtatgtgtgtgtgtatgtgtgtgattctgtccaattgcatgtgcaacttcatgtaaccaccaccrcaatcaagatatttaattgtatcatcagcaaaggactgcctcatgctaccccattgtagccacatgcacagtccctc

SEQ ID NO: 830227 - DNA, 481 bp, Homo sapiens
aaggaaaccttggccaaatatctactatatctactccacccaccaagttaattactatttgagagaggatttaaaaatttttttaaaaaggagtagtcttgcactaggcgactaccctattccagctatcttatttgagtgtaatttttttcataatacacactctcctaataaagttaatatttgtttgatggctagtcactagattgccctgtgcattcaaagaaatgtttaagaatgatgaagagccattaaaaaaacctctcaaagtagatattaggaaaaaatgtttgcctgtatgccccacaattacatttctctctctttttctctctttttccttttgaagaattatataaaacaacacatgctaaaaatgtactatcagacatgaagctaacyaatccaatattaattttaagaatgtaaataaacacgagtcccaaatttcaaagtcaagtttccacaggtaaattaacct

SEQ ID NO: 830228 - DNA, 463 bp, Homo sapiens
cctaatatgctgtaacctataaattagtgaccaaargtttgagaatttattaatatatcaatcccaagttattaaattttgactcagaagaaataaccacggttgtgttggtggccccttctcttcaactctaaaaaaaaaaaaaaagtaaaatttttagcatatggccttagtaactccaactctatctggaaaaccatgatggcattttttgttgtgtggtgtcagtgtcagaaaagacaacttatcaaacatttcttacaaagtcttgacattttttaaaattatgctggtaaatccatgcatgtcctttggcattacagggctcttcctcaaggggacctgatctctacctgtggaaatgacctatggatttgtgaactagaaactgagggaagaaccatacttttcccttttttccatgtttcccggctttaatgaaaggtacaattggtatgcaaaa

SEQ ID NO: 830229 - DNA, 463 bp, Homo sapiens
cctaatatgctgtaacctataaattagtgaccaaaggtttgagaatttattaatatatcaatcccaagttattaaattttgactcagaagaaataaccacggttgtgttggtggccccttctcttcaactctaaaaaaaaaaaaaaagtaaaatttttagcatatggccttagtaactccaactctatctggaaaaccatgatggcattttttgttgtgtggtgtcagtgtcagaaaagacaacttatcaaacatttcttacaaagtcttgacattttttaaaattatgctggtaaatccatgcatgtcctttggcattacagggctcttcctcaaggggacctgawctctacctgtggaaatgacctatggatttgtgaactagaaactgagggaagaaccatacttttcccttttttccatgtttcccggctttaatgaaaggtacaattggtatgcaaaa

SEQ ID NO: 830230 - DNA, 463 bp, Homo sapiens
cctaatatgctgtaacctataaattagtgaccaaaggtttgagaatttattaatatatcaatcccaagttattaaattttgactcagaagaaataaccacggttgtgttggtggccccttctcttcaactctaaaaaaaaaaaaaaagtaaaatttttagcatatggccttagtaactccaactctatctggaaaaccatgatggcattttttgttgtgtggtgtcagtgtcagaaaagacaacttatcaaacatttcttacaaagtcttgacattttttaaaattatgctggtaaatccatgcatgtcctttggcattacagggctcttcctcaaggggacctgatctctacctgtggaaatgacctatggatttgtgaactagaaactgagggaagaaccatacttytcccttttttccatgtttcccggctttaatgaaaggtacaattggtatgcaaaa

SEQ ID NO: 830231 - DNA, 694 bp, Homo sapiens
ttgctttacatgatcatttactctccagccaaaattacatttagtcctttaatttttccagctacccaaataaacctgaggttaattgttttccaactctgagtcctgaattgcacactatcaaaaatgtacctataaatgtatttcaaatttactatcttttcaaagaggattaggttttagttttaaaaaactgttttagaacatgaattgccatttcctgggaggggcctatgtaaaaacttaggaaacctccaaaccatggcaagttcacaagtgcattttccctggcgtagatttccttatactgaatcctggctctgccatttactagctgtgtgatggaaaagttatttcattatttagttcttcaacatcttcatctgtaaaatgggtataatatggaattatacctactttatatgattatctgtaatagttcctgtgaggattaaattacttaatcatggaaacctcataaaacagtatctgccatgtagtaaaattcagtagtatttcacttgtatttaaagataacaaaggcttttttggctctggaaccagagtaatcaaaggtaatgaaagaaagaaackcagtcctaatccttctttccttaatgactgctaaggtgatatgagcatagggatcctgttggtcattattcctgactcaatggaagaatctgcctgtagt

SEQ ID NO: 830232 - DNA, 575 bp, Homo sapiens
agcactctgtaaaaacgtaccaatcagcactctgtaaaaacgcaccaatcagcactctgtaaaaatgcaccaatcagcactctgtaaaaatgcaccaatcagcgctctgtaagaacgcatcaatccgcactctgtaaaatgggccaatcagcactctgtaaaaaggaccaatcagtaggaagtgggagggccaaataagggaataaaagctggctacctagtgccagcagcggcaacccactggtgtcctgtaccacactgtggaagctttgttctttcgctcttcacaataaattttgctgctgctcactctttgggactgcactatctttatgagctatgacactcactgaggtctgttgcttcactcctgaagtcagcaagaccatgagcccaccaggaggaacaaacaactccggacgcaccacctttcagagctgtaacactcactgcaaaggtctgtggcttcactcctgaagtcaagcgagrccatgaatccaccggaaggaagaaactccggacacatctgaacatctgaaggaacaaactccagacacaccatctttaagaactgt

SEQ ID NO: 830233 - DNA, 555 bp, Homo sapiens
ttattgtcattttgcagatgagtaacctgaatttctgaaactcagaacatctccaagatcacaaaactagtaaatcacagcaccaagatttaagatcagatctttctctaaaacagactttatatttctagccagtaccctatattgtgtcaccagagaagcaggggatgcttattttgatatttatatgtacatacttgcacagtcaaatatatactcaaaaatgatgtgacttgactggttgccagtttatccagttaacagttcactaaaaatacccagggaaggaatttgtgattataaattgtcactttttggtagctgaagatccctccagtccaccctatcccacccctaaaatgcacagtgaggtgcttgacaggtgagataaagcaaagttttctggtatttccaaggagcacccgaatgcctttaatcmtaaaacaaggaaagacaaagtgggatcgatatcgtcagctgccaagaggagggctcagttccccgttgagtattctcccagatcactccttcctggaggacagatctgctgtttat

SEQ ID NO: 830234 - DNA, 526 bp, Homo sapiens
aatatcttgcagaaacactacagcatatgccaacacagaaagagggttgggtaggaaagtgtgtgcatgtgaaaaaataaacatcccagtaaagaaatacgcagaaccacgttgatatatatacacaatgtcaggttccttttgactcaacaacaataatctggtcacacagagtgaaactgcaaccctatctggcccttgatgtggaaggtgctgaatcacctgcccaggggaaactgcagacatttagcactttcaaagatgagaatgagctaataaaattagagtctggctcactaagcaaacatcactgtgtgccagcctctctttggagcaaacctgctttctcaaatgcacaccacaatttactctccatgtaccatttcccttatgtcagtgaatgcctttctcatgtctwtgaatgtctttcttgatagcatacgaaaaatgaagagaaggtgagttgagaggggaaggagtggggaataataacatttaactagatttgtcatctactatttctatt

SEQ ID NO: 830235 - DNA, 618 bp, Homo sapiens
ttcacacaaaactatatgtaaatacttacagcagttttatttataatcaccaaaactggaagcaacccaaaagactgggagaatgaattaataagctatgatatagccatwcaatggaatactactcagcaacagaaaggaatgaactattgatacacacagctcggatgaatctcagaggcattaggctaagtgaaagaaaccagtctcaaaggttatatattgtataattccatttatgtaacattcttgaaaagacacaggtatattgacagaaaacaggagcttggctgccatggatctgctcagggttaagggtggagaaagagttgactgcaagagaacagcagggagtttcatggggtaatggaactgttctgtgtcctgattgtgatggtattttaagaatttatgtctgtgttaaatgtcatggaactgtgcaccaaaaaggtcaattttactgtatgactttaaaaaataaaactttaaacaagattacataaaataatgcatgtttaatagagtccctggcagacagtaaattttatctatgagttctttccaagactgtggtatagagtatatctccatgcatctaatttaatagagccaactggt

SEQ ID NO: 830236 - DNA, 584 bp, Homo sapiens
ggaatgagatgggagctagactagaacawtcaggtggcttcactcatttcttcatctccctccttctcccgtcatatcaactttctacaaatcccccaggtcagggatgtcttctagaaggaagtgacacttctgcagagacctggaggataacctgaatttcttcttcataaccctcatcatacttaaaaatgtctggtttgttgtctatctcacctatagattatgaattccatgagggcgagaccacatccattttatttcatcattgtgtcttcagtgttatgtatagcaccctgtccataatgtgttcaataaacattttaatgaataaataaataactatgtagaagtcatcttttactgttcagaagttgtcacttctcctgaatctatttttgctgtgtgctatagtgtaggtctacatactaaatggaacagaaagatgaagtactacctgaattatccccacaacaacacaaagcactccattctcaattatgtatgaagttcaataaaaatttgtttttgaatgtgacaagaatatctagacaatttattcaattaatgatctgttcatttga

SEQ ID NO: 830237 - DNA, 567 bp, Homo sapiens
gcttcatttcattagtttcttccaacctcttgcacatgtggccgctaaaggggttaggatggaattagttaaaagacgagtcaagtgggccaggcgcrgtggctcacgcctgtaaccccagcactttgggaggccgacgtgggtggatcacgaggtcaggagaccgagaccatcctggctaacatggtgaaaccgagtctttactaaaaaaattcaaaaattagccaggtgtggtggtgggcgcctgtagtcccagctactcgggaggctgaggcaggagaatggcgtgaacctgggaggcggagcttgcagtgagaggagattgcaccactgcactccagcctgggcgacagagtgagactctgtctcaaaaaaaaaaaaaaaaagactagtcaagtgatgaaatcagtcatttctgtgactatgggtataggtagcgtttcctaataaacatactgaatgcctcattagcccatttaacttgggtgggctccatacgctcttagcaaaagagaaaaataagcagagtttttgggagggaggctaagattttgaatctttattaga

SEQ ID NO: 830238 - DNA, 638 bp, Homo sapiens
atcacagacatcttggtggtcataagcgccatcgacagttaaggctcattactccagtattaatggagtaactaytctattataagtatttttagaccaggcatagtggctcatgcctgtaattccagcacttcgggaggccgaagtgggcagatcacctgaggtcaggagttcaagaccagtctggtcaacatggtgaaaccccatctctactaaaaacataaaaagtagctgggcatggtggcgcatgcttatagtcccagctactggggaggctgaggcaggagaatcacttgaatctgggaggtggaggttgcagtaagccaagatcgtgccacctcactccagcctgggtgacaaagcaagattgtctcaaaaaaaaaataaataagtatttttacttattaatataaaagggaaataattagaagtatctgtctattttcattggaacaggttttttttctttaatgagaaatatgtgttaaataaaattttaggttcctttggactctagccagaatgcatttatttgcaatttcccagccatgcaaatacaaaccatattcacaagatcctgaggaaactttttaatttttacttcgaatacttccttctaccaaaaatagagacaactt

SEQ ID NO: 830239 - DNA, 592 bp, Homo sapiens
gaacgtgcaggtttgttacataggtacacacgtgccatggtggtttgctgcacccatcaacctgtcatctacattaggtatttctcctaatgctatatctcctctagcccccccaccccctgacaggccctggtgtgtgattttcccctccctgtgtccatgtattctctttgttcaactcccacttacgagtgagaacatgtggtgtttgattttctgttcctgtgttagtatgctgagaatgatggcttccagcttcatccatgtccctgcaaaggacatgagctcatcctttctttttatggctgcatagtattccatggtgtttatgtgccaccttttctttatccagtctatcattgatgggcatttgggttggttccaagcctttgctattgtgaatagtgctgcagtaaacatacgtgtgcatgtgtctttatagtagaataatgtgtaatcatttgggtatatacccagtaatgggattgctgggtcaaatggtatttctggttctgtatccttaaggaatcgccayactgttttccacaatggttgaactaatttatacacccaccaatagtgtaaaagcatt

SEQ ID NO: 830240 - DNA, 646 bp, Homo sapiens
agagtattaaagcaattacataaragcagtgtgttacaaagcaataaaagaaggacactatgagtcctgaggtgctttctaattgactctttcaatttcaaaatataagtttacaaagcttcacatgcaaataaaatgaattatcaagaaattaaggtgatcacagtatcagaaagttaatatatcaattttccgtaagcattgcatatgtctgttatttcatgttatattcaaacgtaatagggtactaaaaatatataattgcgtgtgagtgtgtttgtgtgagtatacatatatttcccttaccatagaagaacatcttttttcccaaaaatgtagaattcaggaaattacagtacatatggatatctgtctttagatgttcaattgtttgtccttacaggtttcaaaaaggcgtatagttatataaattaaacattaaaataaagtgccatgaagcgcttttccactccttacctatgactaagtgctacatgaggaactgtcccctcatcatatttcatttatttgaaggtttataaattaaataaatacaagagaaaagcagaaaagcttaaaaggagagatagtacatgcaatggtataccaaagaagagaaaatagtttaagattatggattcatact

SEQ ID NO: 830241 - DNA, 516 bp, Homo sapiens
catgcagcccccagtcatgtaccccctgcttgctcaatcgatcaggaccccctcacgtggacccccttagagttgtaagcccttaaaagcgacaggaattgctcactcagggagctcggtttttggagacgtgagtcttgctgaagctcctggccaaataaagcccttccttctttaactcggtgtctgaggggttttgtctgcggcttgtcctgctacattataactgtggggtaaaaagacttattaaacatatagaaatagtgcataggctgggcacagttgctgatgcctgtaatatcagcactttgtgagctccaggtgggtggattacttctggtcagaagttcaagcccagccaggccaaaatggtgaaaccccatctctactaaaaacacaaaaattagcraagtgtggtggcacatgtctgtagtctcagttactactcagaaggctgaggcatgagcatcacttgaagcaggaaagcagaggttgcagtgagctgagattgtgcca

SEQ ID NO: 830242 - DNA, 612 bp, Homo sapiens
gatccaccctcatgatccagacacttyccaccaggccccacctccagcattgaggattataattcaacatgaaatttgggcacaaaaaaaaatccaaaccatatcattctgccccagcctctcccaagtgtcacctcctcacattgcaaaatataatcatgccttcccaacagtcccccaaatcttaactcattccagcattaactcagaagacccaagtaagttcaaagtgtcgtctagagatgagttccttcacttatgagcctataaaatcaaacaattatttactcccatgatacaatgggggtataggcattgggtaaacattcttattccaaaagggagaaatcagccaaaagaaaagggctacaggcccctttcaaaacccaatagttcaaaacccagcagggtagtcattaaaagttaaagctccaaaataatctcctttgaatccatgtcccacacccagggcacagtggcacaaggggtgggctctgaaggccttgagcagctctgcctctgtggctttgtagggttcagccccatggctgctcccatgggttggagttgaatgtctgtagcttttccaggtgcagggtgaaagctgccagt

SEQ ID NO: 830243 - DNA, 612 bp, Homo sapiens
gatccaccctcatgatccagacactttccaccaggccccacctccagcattgaggattataattcaacatgaaatttgggcasaaaaaaaaatccaaaccatatcattctgccccagcctctcccaagtgtcacctcctcacattgcaaaatataatcatgccttcccaacagtcccccaaatcttaactcattccagcattaactcagaagacccaagtaagttcaaagtgtcgtctagagatgagttccttcacttatgagcctataaaatcaaacaattatttactcccatgatacaatgggggtataggcattgggtaaacattcttattccaaaagggagaaatcagccaaaagaaaagggctacaggcccctttcaaaacccaatagttcaaaacccagcagggtagtcattaaaagttaaagctccaaaataatctcctttgaatccatgtcccacacccagggcacagtggcacaaggggtgggctctgaaggccttgagcagctctgcctctgtggctttgtagggttcagccccatggctgctcccatgggttggagttgaatgtctgtagcttttccaggtgcagggtgaaagctgccagt

SEQ ID NO: 830244 - DNA, 629 bp, Homo sapiens
tgaggtgaatcatttctaaatttctgaatgatttctccaatctttacaaacttattaatagaatattagaaattttgaaatcaatttaggggaaaaagattacgtatttaatttatatgaaacttttggcggccgggcgcggtggctcatgcctgtaatcccagcactttgggaggccgaggcgggtggatcacgaggtcaggagatcgagcccatcctggctaacacggtgaaaccctgtcttttctaaaaataccaaaaattacccgggcgtgatggtgggctcctgtagtcccagctactcgggaggctgaggcaggaaaatggcgtgaacacgggaggcggaagttgcagtgagccgagatcacgccactgcactccatcctaggcgacagagcaagactccatttcaaaaaaaaaaaaaaaaaaaacttttagagggataaggaaattaagacctagagaggtttaagttgctcaaagacaaaagtcacatcgctatgatagaggaaggaatggggaaaatcagagagcatttagattagaaaagtgactttattattatggtcatgagtkagtgatggctgaattctaagaagaacttcttaacatcaaggctgtggatcaat

SEQ ID NO: 830245 - DNA, 599 bp, Homo sapiens
gaagtgagactcagatggaaggggcttgaccattggatgggatgaaagcagataatgcagcccaggtcagtctcagaaatcagtcatctccttatgccagactccaggagctgctttttaaaccctagtgaagaaaggggctaaaaatccatatcaagaggcatgctcctcttatgaaactttagggtataggtctatgtataaaagtgtcaaacaaatcaataatgcaggcagccttctcgtctcacagttcagctccatcttcaccaggtgggtatggagaccaagaatgtgctgctttgacacgctccaaaatttaatgtgtctttagtggagttgatagtggcatcaaaaaaagcaggactagggccatgatgggagaattaattcgtgattacactgggaatttaatcaggtctcttcatgagtatccttaaagcttgccctggggactcacaaagataaatgcaggtattgcacaaagcttggaggctcagcaagggctagtgaaaataagtgtygaaataataagagctatcactaatttggcataattttaacccctaacattatgcggtatgaagtatgaaaatgttcaa

SEQ ID NO: 830246 - DNA, 624 bp, Homo sapiens
atttatcacaaacactatattgatagtttctgaacgttacatgagtggccttctcaactaaagtctaaacaacttaaggtagggattgtgtttagtacttctgtctccttcacaggctcagcatattgaaggttcttatacaataatcgcttttgagtaaatgaaagatattgatattgtgttggtaaatcacagacttcagcaggagatgctattaagccagtctattgctctcattttatagatgaaaaaatggagccccagaaaggggaacatgactcaaggttaagccttggcaatgtctgaccttgaccaagtacccccaaggtagtgctcctcccattccatgaataaagccggagcctaagagccactggggagcctgttaaatgctgattccatggcccacccccagtaagtctgactcgatggaccctgagtaggattcgaaaatcttctgtggcaaccagaggaccacatttccagaaaggctccatcacatcatggttcctttcccacctctatgctacagtgacactacccamcccaccacggtgagattctaatctagcaaaacactgcttcctttacattgaatttaaccttacaaataaagcagggagt

SEQ ID NO: 830247 - DNA, 624 bp, Homo sapiens
atttatcacaaacactatattgatagtttctgaacgttacatgagtggccttctcaactaaagtctaaacaacttaaggtagggattgtgtttagtacttctgtctccttcacaggctcagcatattgaaggttcttatacaataatcgcttttgagtaaatgaaagatattgatattgtgttggtaaatcacagacttcagcaggagatgctattaagccagtctattgctctcattttatagatgaaaaaatggagccccagaaaggggaacatgactcaaggttaagccttggcaatgtctgaccttgaccaagtacccccaaggtagtgctcctcccattccatgaataaagccggagcctaagagccactggggagcctgttaaatgctgattccatggcccacccccagtaagtctgactcgatggaccctgagtaggattcgaaaatcttctgtggcaaccagaggaccacatttccagaaaggctccatcacatcatggttcctttcccacctctatgctacagtgacactacccaccccaccayggtgagattctaatctagcaaaacactgcttcctttacattgaatttaaccttacaaataaagcagggagt

SEQ ID NO: 830248 - DNA, 592 bp, Homo sapiens
actttaattaaaaagcaaagattgtcagatcggatttaaaaaaaaaaaaaaaagcacaggaaatctaccacaaatataaaatgtctacactcctcactggagcctttaragtctcaactagatggtgtctaaaagaaatgcactttaaatataaagacacaaataagttaaaagcaaaaagatggggtaaaaaaatatataccaataaaaaaaagaaaagcttaagtagctatatgaataccaagaaaagtagatttcagagccaaaaaaacaactaccacagataaagagaaatattttataatgataaagtaatcaatctttccagaagacataacaatcctaatgtttatgcatccactaacaactccaaaatatatgacctaaagtagggaataggtagggctaatattcaacggtaataattttaaaacaattggattttgtaaatggctgttgccctcgaggcccccaaatgtcttccagccaactcagtcactccccaaggatcttcccacaactcacaaactgaaaggctataacacctgtgtaacatagatcctcccagctaacacctgtataacatggatcc

SEQ ID NO: 830249 - DNA, 665 bp, Homo sapiens
accggtgaattccttctggtcgactgaaaatagtattaatagtgtataaatatatgtgtgttagtttgtaatagggaggagaggaggcasgcacaggatatattttgtttggaattattgactaacagttgaaacctgaccaatgatttggtacattcattcattcctttattcaatgattcatacagctgttctgcaaggagatattcattcattcaatcattcatacattcattccacaaaaacatattcagtcactcattcatacattcattttgcagggagatataactgagcactcactatgtacctgggacttatccatatgtgaattttcttgagaagagaacttgggacttaacattaaggaatttaaaatttagatcagtaataagattgcatgagagttgaataaggacataagaattgaacaggaaatatcataagagacaaactaagtgttgcagaatgaaagtggcagagtagttaaggaaaacctagatgaaaagaataatcctgaagaatttaggattcaatttgatacttgagtttctaagatgggatagatttacataggagtgaggacattccaggtggggagaatggtgtgagcaaaaacctagaagcagaggtatgctgggggcattgacattcaggccagccaa

SEQ ID NO: 830250 - DNA, 665 bp, Homo sapiens
accggtgaattccttctggtcgactgaaaatagtattaatagtgtataaatatatgtgtgttagtttgtaatagggaggagaggaggcacgcasaggatatattttgtttggaattattgactaacagttgaaacctgaccaatgatttggtacattcattcattcctttattcaatgattcatacagctgttctgcaaggagatattcattcattcaatcattcatacattcattccacaaaaacatattcagtcactcattcatacattcattttgcagggagatataactgagcactcactatgtacctgggacttatccatatgtgaattttcttgagaagagaacttgggacttaacattaaggaatttaaaatttagatcagtaataagattgcatgagagttgaataaggacataagaattgaacaggaaatatcataagagacaaactaagtgttgcagaatgaaagtggcagagtagttaaggaaaacctagatgaaaagaataatcctgaagaatttaggattcaatttgatacttgagtttctaagatgggatagatttacataggagtgaggacattccaggtggggagaatggtgtgagcaaaaacctagaagcagaggtatgctgggggcattgacattcaggccagccaa

SEQ ID NO: 830251 - DNA, 665 bp, Homo sapiens
accggtgaattccttctggtcgactgaaaatagtattaatagtgtataaatatatgtgtgttagtttgtaatagggaggagaggaggcacgcacaggatakattttgtttggaattattgactaacagttgaaacctgaccaatgatttggtacattcattcattcctttattcaatgattcatacagctgttctgcaaggagatattcattcattcaatcattcatacattcattccacaaaaacatattcagtcactcattcatacattcattttgcagggagatataactgagcactcactatgtacctgggacttatccatatgtgaattttcttgagaagagaacttgggacttaacattaaggaatttaaaatttagatcagtaataagattgcatgagagttgaataaggacataagaattgaacaggaaatatcataagagacaaactaagtgttgcagaatgaaagtggcagagtagttaaggaaaacctagatgaaaagaataatcctgaagaatttaggattcaatttgatacttgagtttctaagatgggatagatttacataggagtgaggacattccaggtggggagaatggtgtgagcaaaaacctagaagcagaggtatgctgggggcattgacattcaggccagccaa

SEQ ID NO: 830252 - DNA, 569 bp, Homo sapiens
aacattatggaatcacagggaggaaggacacacattttaaggttacaggtggctgtgccacctgccagtcaattctcaacagacggagtaggagcttcattttttttattccasagcacagcagtggatgtcgggaagatacctgaacttcactgaagctgttttccacagggtctggtaagccaaggagtttccacactggggtgagtggatttgacagcagaggtggaaggaatctacaggaaagagctgcctaattaatcacaagctatcagagcctttcagcagtgagagtctctgaggtcttaacaacacccctcagtaaagttaaaaaccatcttggtatgacttcattttcttagagacacatgattgatctggctattggtgaatggagacactgcggcttctttctgtagatggtgtcattagatgagaagattaagtgcctttgagcaaaggctatgtgaagactgtgagtgattcactgggaatggaagaaagataaagaaaactctgaaatatgtacttttaaaggcaaaaccttagactttacctcatttattagc

SEQ ID NO: 830253 - DNA, 569 bp, Homo sapiens
aacattatggaatcacagggaggaaggacacacattttaaggttacaggtggctgtgccacctgccagtcaattctcaacagacggagtaggagcttcattttttttattccacagcasagcagtggatgtcgggaagatacctgaacttcactgaagctgttttccacagggtctggtaagccaaggagtttccacactggggtgagtggatttgacagcagaggtggaaggaatctacaggaaagagctgcctaattaatcacaagctatcagagcctttcagcagtgagagtctctgaggtcttaacaacacccctcagtaaagttaaaaaccatcttggtatgacttcattttcttagagacacatgattgatctggctattggtgaatggagacactgcggcttctttctgtagatggtgtcattagatgagaagattaagtgcctttgagcaaaggctatgtgaagactgtgagtgattcactgggaatggaagaaagataaagaaaactctgaaatatgtacttttaaaggcaaaaccttagactttacctcatttattagc

SEQ ID NO: 830254 - DNA, 627 bp, Homo sapiens
atatgtgctgtgaaggacaaagccaggctatgagaacataaacaagkggatccttaacctggaagatcagataagacttcccagaggaggtgcgtcgaaacagtacacagaaggaggagtaagtgagacgacagcagagactcacatgtattctacatattttgatcacaatctgatccagataacttcctacttttgagaagccttcattttatcaagggatacaaaactgcaaattaattatttaactcggtagtacatgagtgaggagaaagggggccacaaatttctaggactacacagtacaggcagattttttgaaggaatttgtcataaataattaattttgactgtgtcagttttatgtaataaaaatatcactgagtttgcctttgttagtacgcactgcaaaattgtaaatgcatacctttttgcatgttttaatcatgccaagaaatacgttctatgaacaaaataaagaaaattcttcccatttgtaaaaggaaagaccagctaatattttgtggtccaggtctttcctgttcaccattaaacataccatatctccttgcatacttactacacaaaagaggtaccaagtacaattctgtttggtggttgaataca

SEQ ID NO: 830255 - DNA, 559 bp, Homo sapiens
gtgttttataaatcagaataaactgggtttttttcttttgaaatcaagtttcccttctttttttttttgtttttttttttttttgagacacagtcttgctctgtcccccaggctggaaggcggkggtgtaatctcagctcactgcaacctctacctcctcggttcaagtgattctcctgcctcagcctccttaatagttaggattacaggcacatgccaccatgcccagctaattttttgtatttttagtagcgactttagtagagggtttcgccatgttggccaggcagctctcaaactcctgacttcaagtgatccgcccaccttggcctcccaaagtgctgggattaaaggcatgagccaccgtgcctggctgaaatcaagtttctattagaaaaatggaataatggtaatgtctcgccctgtcacccaagctggagtacagtggcgtgatctcggctcactgcaacctctgcctcccaggttcaagcgattctcctacctcaaccttctgaataggtgggactacaggcgcgcaccactattcccagctaatttt

SEQ ID NO: 830256 - DNA, 625 bp, Homo sapiens
agatattatgcaggatcccatgaaggtaaaacaaacactttaagccctctgatagtggtgctagtttagrtcttgccctattttatatacaatacatgtcaattctagtcatccagtggttgggtggttttccagttgttttccttagaagcctctgaccaatcatccaagccatttaccatcattcatgagtttgtatgtattcttctcttgggccacttctctttccacacaaagtagatgatcaaatgcattgcctgaaactgcccactgggaccattttcccttgctgctatcatttagggccaccctgagaagagctgcagagcagcagttttgcaattcctgcttgcacttacctactgaattgacaaaaccaaacttgaggtttttctttttttctctttaagctgactataagagactccttggacaaacatagggataaattcagggagaggtgctggtgcaatattagtgaataatatgggggtctgggctacctgcttgttcccttaggccctacttgtgcacaattctcaacgtaccacttccatcttgtagattgctgctgggcctgctcaaactcatgactttcaggatctaatagaactactcgaaatgg

SEQ ID NO: 830257 - DNA, 644 bp, Homo sapiens
gtctaatgagatattatgcaggatcccatgaaggtaaaacaaacactttaagccctctgatagtggtgctagtttagatcttgccctattttatatacaatacatgtcaattctagtcmtccagtggttgggtggttttccagttgttttccttagaagcctctgaccaatcatccaagccatttaccatcattcatgagtttgtatgtattcttctcttgggccacttctctttccacacaaagtagatgatcaaatgcattgcctgaaactgcccactgggaccattttcccttgctgctatcatttagggccaccctgagaagagctgcagagcagcagttttgcaattcctgcttgcacttacctactgaattgacaaaaccaaacttgaggtttttctttttttctctttaagctgactataagagactccttggacaaacatagggataaattcagggagaggtgctggtgcaatattagtgaataatatgggggtctgggctacctgcttgttcccttaggccctacttgtgcacaattctcaacgtaccacttccatcttgtagattgctgctgggcctgctcaaactcatgactttcaggatctaatagaactactcgaaatgggctatttcaag

SEQ ID NO: 830258 - DNA, 482 bp, Homo sapiens
tataacatgtgcttggttgatggccatgcatyttcagtcagaatttatatataaatatatgcacccatttttttgagtgcatataatttagacctaaaaatccttatgattaggtgaaacaccaaaaatataaggaaaataacacagcagaggaatagctcagcctgaacagtgtgatggtcccagctactacatcagatgcggtttttttgctcccttatgttcttcggatatggttatggcatttgtaggcttggaggtaaagaactgaagataactggtgctggatagaggagccttattttttattatggcagcttgctatttttataacatggtgattgagttgaacacaatcaaagtacagtagtaactgatgtccccttcttcctggatgaatgagcagataaatattgatgtcagcatccttgaaccatatcaaagtgagcagtgtttggctactgcttctatttgaaatggtg

SEQ ID NO: 830259 - DNA, 544 bp, Homo sapiens
ctcaagcacccctcccatctcagcctcctgagttgctgggactacaggtgcctgctaccacacctggctaatttggtttagaaaataattttttaaatgtagtgaagagacggttgaaaatttagagttaccagaatcacaacagatgtctgtattttttttttttttgagacagagtctcactctgtcgcccaggctggagggcagtggtgtgatctcggctcactgcaacctctgcctcctgggttcaagcaattttcctgcctcagcctcccaagtagctgggattacagatgactgccaccatgcctggctaatttttgtatttttagtagagacagtgtttcaccatgttggccaggctggtcttgaactcctgacctcaagtgatccgcccgcctcagcctcccaaagtgctgggattacaggcrtgagccaccatgcctggtccagatttctctacttttaatggcaccttcggttccctcatagaaggtagaaacactttgctgctcatatcttagagaaccgtgttttaaatatt

SEQ ID NO: 830260 - DNA, 634 bp, Homo sapiens
ggatctaggactgtgcaggacgtgcctcattaacagtatgtttacaggcagtatgcttggtaaaagtcatcgccattctccattctcaattaaccaggggcaaaatgcactgtggaaagccgcagggacctctgcccaagaaagcctgggtattgtccaaggtttccccccactgagacagcctgagatatggcctcccgggaagggaaagacctgaccatcccccagcccgacacccgcaaagggtctgtgctgagggggattagtaaaagaggaaggcctcttgtggttgagatgaggaaggcctctgtctcctgcatgcccctgggaacagcatgtcttggtgtaaaacccgatcctatgttcgttccattctgagataggagaaaaccaccctgtggctggagccaagatacgctggcggcaatgctgctgttactctttgctacactgagatgtttgggtggagagaagcataaatctggcctacgtacacatctgggcatagtaccttcccttgaacttatttgtaacacagattcctttgctcacakattttcctgctgaccttctccccactatcaccctgttctcctgctgcattccccttgccgagatagtgaaaacagtaatc

SEQ ID NO: 830261 - DNA, 609 bp, Homo sapiens
caatgagtagataaactgtgagatacatatatatrtatatatgtgagatacgtgagatatatataagaaactgtgagatacatatatatatatacatatatatgcgatagaatactactcagccttgaaaaggaatgaattaatggcatttgcagccacctggatgagattagagcctattactctaagtgaagtaactcaggaatggaaaaccaaacatcttatcttctcactcgtaagtgggagctaagctatgaggatgtaaaggcataaaaatgatgcaatggactttggggactcagcgggaaaaggttggaagagggttaggataaaaggctacaaattgtgtgcagtgtatgctgctcgggtgatgggtgcatcaaaatctcacaaagcaccactaaagaacaatcatgtaaccaaacaccacctgctccccagtaacctatggaaataaaaaaatataaataataataatatctcaacaggataagtacggataattttaaaaattaaagtaatgtatgacttagtttactctttgataaagtatcagctttattgagatataatttacacaaataaaatgtaccaattttgatttttaaa

SEQ ID NO: 830262 - DNA, 519 bp, Homo sapiens
accagcctgtgttggaaataattctcttctagataatttaccttattttcttggcttgtactaattgaatggaagtggttaatttgttcagagtttattgccgtttgatgccaccccagtctatagttctgtgtgactttccatattgaaagagtagggttagtagccaggttgtcagtcttttacaaatgtctacataaatgtctacataaatctgaaagtggtttatattcaaggttagtttttcagtagcgtctcctccttattcattcacttttactgtgaagactgaaatccaaaagccaggttccccaaaaaagtatttttaaaaaattttaggggaccaaaataaatagaggaagaccaatataaaaaaatatgttcaactattccattttaaatttaaagcagaaaaaaaaattgtgcccctcagacytaaaggcagctttaaatgtatatagtttggtgaaacatttgggaaatattaatttggaggtttagaagcatacgaaaaacaaa

SEQ ID NO: 830263 - DNA, 619 bp, Homo sapiens
gcatgacaccaaaagccctattcataaaaaaaaatatatagatgaatttgacttcaaaataagaactcstgccctatgaaagacactctcaggagatgaaaagaaaagccacagtctatgagacaatatttgcaaacagcatatctgacaaaggacctatatccaggatatataaagagttcttaaaacgcagtaacattttttaaattatttaatgggcaaaagatttgcacacacttttccccgaagacatatggatgcctatgagcatgtgaaaagatgctcaatatcactagtcatcatagaaatcaaaattaaccccataatgagatatcactacatacctattataatggctgtaactttttttttttttttttttttgagatggagtttttctcttgtcacccaggctggagtgcaatggcacgatctcggctcactgaaacctttgcctcccaggctcaagtgattctcctgcctcagcctcctgagtagctgggattagtaaaggcacctgccaccagcccagctaatttctgggtttttttagtagagatgaggtttcagcatgttggccaggctggtcttgaactcctgaccttaggtgatcccccta

SEQ ID NO: 830264 - DNA, 619 bp, Homo sapiens
gcatgacaccaaaagccctattcataaaaaaaaatatatagatgaatttgacttcaaaataagaactcgtgccctatgaaagacactctcaggagatgaaaagaaaagccacagwctatgagacaatatttgcaaacagcatatctgacaaaggacctatatccaggatatataaagagttcttaaaacgcagtaacattttttaaattatttaatgggcaaaagatttgcacacacttttccccgaagacatatggatgcctatgagcatgtgaaaagatgctcaatatcactagtcatcatagaaatcaaaattaaccccataatgagatatcactacatacctattataatggctgtaactttttttttttttttttttttgagatggagtttttctcttgtcacccaggctggagtgcaatggcacgatctcggctcactgaaacctttgcctcccaggctcaagtgattctcctgcctcagcctcctgagtagctgggattagtaaaggcacctgccaccagcccagctaatttctgggtttttttagtagagatgaggtttcagcatgttggccaggctggtcttgaactcctgaccttaggtgatcccccta

SEQ ID NO: 830265 - DNA, 528 bp, Homo sapiens
gtataataattaaataagattttttaaaaattaatctgatttttattgatagtgataatcttattgagagtaatgacagktataaaacataagtagttgccctaagcaactaaaatcattacttttccataaccatgtgtatgttttcagctaataaaaaggaaactgttctgaggcccactggaagtatccataactcagatccagattttttttgttttgttttgagagggagtctcactctgtcgcccaggctgcagtgcggtggcacgatcttggctcactgcaacctctgcttcctgtgttcaagcgattctcctgcctcaacctcccaagtagctgggactacagacgcctgctacatttttgtatttttagtagagatggggtttcaccatattggctaggctggtctcgaactcctgaccctgtgatctgcccaccttggcctcccaaactgctgggattacaggcgtgaggccttgtgcctggctttattattttttttttccacaacaaatgatttcc

SEQ ID NO: 830266 - DNA, 586 bp, Homo sapiens
agtgtttgacttgggctcctctcataaacacaggaactggtagaagtttgaagaaagactactaaagggtggggatggcatgattaaatgtgggcaaagtctgtgcacgttttccagaggaggaggaggaggtgatggttttgaaagctctgtggcaaagcggcaataaaataccactaattaaggaatgaatcatcaggacaaaatcattacggggaagccttatgtgaaaaacctcacaagtattcccaagtagaaagtagctgaaagggacttgtctctgaaatgtttatacgcaatgaaatcctacattcacccaccaacagtttcctgtaatcaagttaaactaaactcatacaacacaaatcagttctttttccatgtgctcttacaccttgaatcacaatccacacaggctttggtggccctggagatggacaaacagcagctgcaccacaggacagcaggcaatatgcgggactcaccagtcgtgggacaagtgggtattaagtaacttcagtaaccattgactgcaaagtcccasgaagtgtgtgcggagctgacctctgcactttccaacgatcca

SEQ ID NO: 830267 - DNA, 497 bp, Homo sapiens
cggtcactatttgcatatcaggcagaatcctttcccatctttgcacctcctgttctgagcatggcatgtgtgcagaagctttccaraaaagtctgttgatttgaaccatgatggccaaaataactctggacagggtggcaccgttttgagctgcgtgtaagcacacatgtgtgcaggtgcacatacccacaccgatacacgggcatgcacaccacggcctgaggtcctctgccgctggaagaaaaggcaggttggcatctgtcatcgttgcatttctttgacaaaacatcaaccttcttctcacaacttttctttgccaagtgacttttcaaggaccttcccaaactgacatctctgaaatctttctttttctgtactctaaggggtgggcgaactttctgcaaaggctagggtggtaaatattttaaactatatggtctctgtccaacttctcaactcctgcatcgtatcacaaaagcagccacagacagcctgta

SEQ ID NO: 830268 - DNA, 569 bp, Homo sapiens
gggttgttgctatcccccagggttgattgatctgtttattctaagcttgaggccagagctggaagggaggccgtttgttttgggcactgctgagaaaaacagactaatcacctaaataccaccttggggaatgaagttacttgaaaagaaactgaatggagcctgggcttttatttggaatgaggaggcaaacctgggaagctgcatgccgctgaatgatgatgaaaagcacaaagctactgaatgcctctggcttggccgccaaagagaattggtttctgtaagtgtcggagagggaagacccgcattccagagctgcacccctttcttcacatttccggtccctctcccccagctcctgcacaccctgatgctggaccaaggggcctgggcagaggtgtggtgtgctgggcgggaaagtacgtcatggatgcctcaacttgccatggatggcaggttgacttccttcccagcaacttgcagatgttcagatgcgcasagttaaggtctaaaacaagaaaagtttgctaacgtagagaggccgctgggtcttatctttccgtcttcaa

SEQ ID NO: 830269 - DNA, 441 bp, Homo sapiens
agcaggcagtggtggctggctctggtcacccctcctccagcagtttggtgggcttaggcagattccagctgagaggctgcaagaatctgtgcgttccacgtttgggatactaggtcctggtgatgtgggttcacaagtgggatcttccagtccatgggttgtacagttccatgtaaaaagcacagtttccccactgggtagtgtgctcactcactgcctcccttggctggggctagggagctccccttccccttgtggctttcaggtgggctgccacaccacactgttcttccttctctccatgggtcacaccagccttctggtcaattttgatgagagaacctggataccttgtttggcgtctggaatatctgtccaawgctgaaagtaggctgttgaaatcttcagctattgtattggggcccatctttctagttagct

SEQ ID NO: 830270 - DNA, 629 bp, Homo sapiens
tgttcttccttctctccatgggtcacaccagccttctggtcaattttgatgagagaacctggataccttgtttggcgtctggaatatctgtccaatgctgaaagtaggctgttgaaatcttcagctattgtrttggggcccatctttctagttagctttaataatatttactttatatagctgtgtgctccagtttgggtgcatacatattaaaattatgtcctctagctgaattgatacctttatcattatatagtgacattctttctcttttcttagagtttctgtcttgatgtctattttacctgatatacgcttagcaattcctgctcttttttgatttttattcacatggaacatctttttttatccctttattttcagtctttgtgtatctttataggtgaagtgtgttttttctgggcaacagataaatggttcttattttttcatttattcagccagtctatgtcttttgattggatagtttagtctatttacatttaatgttattattgataagtaaggacttactcctgccattttattattgttttctggttttctcttccttgtttggttcttttttgtcttcttctagtgaaggtgattttctctggtgatatgat

SEQ ID NO: 830271 - DNA, 629 bp, Homo sapiens
tgttcttccttctctccatgggtcacaccagccttctggtcaattttgatgagagaacctggataccttgtttggcgtctggaatatctgtccaatgctgaaagtaggctgttgaaatcttcagctattgtattggggcccatctttctagttagctttaataatatttactttatatagctgtgtgctccagtttgggtgcatacatattaaaattatgtcctctagctgaattgatacctttatcattatatagtgacattctttctcttttcttagagtttctgtcttgatgtctattttacctgatatacgcttagcaattcctgctcttttttgatttttattcacatggaacatctttttttatccctttattttcagtctttgtgtatctttataggtgaagtgtgttttttctgggcaacagataaatggttcttattttttcatttattcagccagtctatgtcttttgattggatagtttagtctatttacatttaatgttattattgataagtaaggacttactcctgccattttattattgttttctggttttctcttccttgtttggttctttyttgtcttcttctagtgaaggtgattttctctggtgatatgat

SEQ ID NO: 830272 - DNA, 630 bp, Homo sapiens
ttatctattaagatgtgtgtttatgagtgtgcctatatttgtgtatacacacacatatgcaagtatattatgtatttaatatagtggtatataaataaattcagattggtatttactgtactcactatttttaaggtaactttttatgttgatataattttaaactttcatatagtttccaattttggtacaaggaactcccatataccctctattcagatttaacaattacttacatttttcctatctgttctcagcattttataacttgctgttttagtagcaaggataccatattttctagaaattactaaatatgcttgtactgcatgattctaatgatgatgatggggatgatgttgacaacaatgatggtgattgctaaatagttattggacacttttatgtgtcaggcagtgttctaattgctttacatgtaatattttaatccttaaaataactaggaggtatatattcttattgctctatgttaaaagagtacaaaccaaacacaaakaagtgaagcaacacaaactggcaggtgaaaagcaaggaattggttagggaaaaaacctcaaccttcgtagcagaggcgctgaaagtaaactgtactactcattggatcagagc

SEQ ID NO: 830273 - DNA, 610 bp, Homo sapiens
tgtgaattatagttcaatgaagctgttacaattttattaaaagaatacctactgtatgtttccatttatacgaaattctagaagaggcgatattataatgacaataattaagtagatcagwcatcatcatggaccatgtattagtctaattctcatggtgctattaaagacgtatccgagactcggtaatttataaagaaaagaggtttaactgagtcacagtcccatatggctggggaggccttacaatcacggtggaaggccaaggagaagcaaattcaggtcttacatgatggcaggcaagagagtcttcgcaggggaactcccatttataaaatcatcagatctcgtgagacttatttactgccacgagaacagtatgggggaaactgcccccatatccaaaccacatcagaccaggactggggagagggatggactgcagaaaggcccaagaagaattttcaagtttatggaattattctacgtcatgattctgtggtggtcatgttacagtatacattgtcaaaacatcatttgttcatttaaaattaaggacttttaatatattgaaattatatctcaaggctgattttcaagataaaaattt

SEQ ID NO: 830274 - DNA, 610 bp, Homo sapiens
tgtgaattatagttcaatgaagctgttacaattttattaaaagaatacctactgtatgtttccatttatacgaaattctagaagaggcgatattataatgacaataattaagtagatcagacatcatcatggaccatgtattagtctaattctcatggtgctattaaagacgtatccgagactcggtaatttataaagaaaagaggtttaactgagtcacagtcccatatggctggggaggccttacaatcacggtggaaggccaaggagaagcaaattcaggtcttacatgatggcaggcaagagagtcttcgcaggggaactcccatttataaaatcatcagatctcgtgagacttatttactgccacgagaacagtatgggggaaactgcccccatatccaaaccacatcagaccaggactggggagagggatggactgcagaaaggcccaagaagaattttcaagtttatggaattattctamgtcatgattctgtggtggtcatgttacagtatacattgtcaaaacatcatttgttcatttaaaattaaggacttttaatatattgaaattatatctcaaggctgattttcaagataaaaattt

SEQ ID NO: 830275 - DNA, 553 bp, Homo sapiens
aggatttcagaaaacaaaatttcacagtgaacttttagtgagagaagttttttgttttaaaaaactgtttaaaatagaagaggtaaagaatatcagtaccagtggaaagggactagatagaaattcacaaacactagatttgagatttagcgctaccactgtctagataactttggacaagtcttaaccttactctatcccagtttctttcaaaaatgaaggtgatggacttaatcctaaatatctctttgaatcttaaattaagtgattctatgcaatactttaaaaaaaagttaacgtaaattttacagcctccagtaggttcaagtgcaatgctgtggttgaatcttaaattatgtgattctagctaatacttttttttaacttaatgcattaatgcattagaattccaacagaaatcytaaatcagagatcagtagcaattgtaagcactgacatatattcatatgagaaataaaaccaagttagaaacataattgaacattatctcaagctggtttcacgttcttcaacagcctatatagtgagtgat

SEQ ID NO: 830276 - DNA, 433 bp, Homo sapiens
gtccataattcaccctgaagagctggtacaatgatagcaagaggcctcccaaatatattcataacaatatacaactaaagatttctgttttatatgggtcagtggagaatcatcaccgctgaatcaatgtatctaacttctcaaatgtctacatttaaaaagaatacattcccgctaagattcctatcagcttttgctgattacgtttcatagaaggaaattcttataaggtgagcttttaaaaggaccaattttctccttctcttgactatataagacgttcaggaattaatgggaaaaaagcaatgcctgtctggtttgtaagcatcacagtcttatttctgcataaattctcacaagtcaactcagaaaacagttcagggtcaaaatctcrtctagtcacctagattaaaaattaatttctctaaagtat

SEQ ID NO: 830277 - DNA, 627 bp, Homo sapiens
ttccccctccccttttcttccccaatgagataaccatttctttcacaatgatgaaccatccctttttacggaaaaatggctttctttctccattggatcaggacaaagacatcacttcttggccacactggccacagccttcttggctgcatcctccaggtcaatggctgaagtaatggggagtccgctgttgttgagtatcttctgggcctcttggacgttggttcctagaagggggacagggaacaatcactgaatgaaactagaggtggcgccttatgaagtttgcacaaggacacacaagactcacctgtctacagcttttcactaggaaatgaattaaatataggttctcatcaaggtcactgacagaaaagattatgtgatgaaatttatctcaagctgtggtccagctagaaaagaagatgaaagcaagggcttgcaagagggaaatgaacatattttactgatggaagctgagttgtctgctgataatcacagccatgtggatttaatgcggttttggcccayaccagaagtcacttgtcttaaagccctctcagacgtcatcaggggtttgggctgtgacctgatttgagaaaggaagttccgagaatctgcccagct

SEQ ID NO: 830278 - DNA, 627 bp, Homo sapiens
ttccccctccccttttcttccccaatgagataaccatttctttcacaatgatgaaccatccctttttacggaaaaatggctttctttctccattggatcaggacaaagacatcacttcttggccacactggccacagccttcttggctgcatcctccaggtcaatggctgaagtaatggggagtccgctgttgttgagtatcttctgggcctcttggacgttggttcctagaagggggacagggaacaatcactgaatgaaactagaggtggcgccttatgaagtttgcacaaggacacacaagactcacctgtctacagcttttcactaggaaatgaattaaatataggttctcatcaaggtcactgacagaaaagattatgtgatgaaatttatctcaagctgtggtccagctagaaaagaagatgaaagcaagggcttgcaagagggaaatgaacatattttactgatggaagctgagttgtctgctgataatcacagccatgtggatttaatgcggttttggcccacaccagaagtcacttgtcttaaagccctctcrgacgtcatcaggggtttgggctgtgacctgatttgagaaaggaagttccgagaatctgcccagct

SEQ ID NO: 830279 - DNA, 621 bp, Homo sapiens
tttacaaactgtcctctgaggacccctgagatggtggaggtttccataagagaccacgttgggggcatccaggaaaactaaacaggtgagggtcttcattttacgccctgttctagtccattcagctgctataacaaaataccgtaaactaagtagcgtataaacagaaatttatttcccacagttctggaaactgagaagtccaagatcaaggcaaattctgtgtctggtaagggtgctttctggctcacagcatcttcttgctgtgacctcacatcaggaagaggcaagggatctttcttggacttcttttgtaaggcactaatgccatttatgagggttcacctcatgatcaaatcgccaccaaatcccgcccactgctaatactcgtcacattgtggattaggattcaacacatgaatttgggggaaacatgagcattcagatcatagcacacctcaagctcaaccagatcagcactacttctatctatggcttccacataagatttatttggaaatggctcccagataaaacaagcatgagaaccacttcattttactggtgtagaaacggaggctcagaaagggtrtgatatggccaggtcacatgggaagttag

SEQ ID NO: 830280 - DNA, 620 bp, Homo sapiens
tattggctatctcttggtggagacatctgtcctcacactgtgttcatttgttttttacatatccaaaaartaaagactcagccctacaatgctttagacaaaatatgttcctgaagattctgaagaggagatggatgatggtttcccctagctattggaagataggcacacatagtgcaaaagtattcaaggaggatataaaactaaaaaagagcaaaattatgttcttcttcctctgaactggtcattagggaggattctgttttaagctctagaagagggtttggcgatccacagcccacagatcaaatccagccacactcattcacttcagtatgtctgcggctgctctcgcactacaatagcaaaattgaatagttgtgacagagatgtgacagagaccatatggttcacaaaacccaaaatacttcctatattcaatattaaatattactggtcctttacagaaaagatttgctgatctctgacctagagaaatttgttctagtgccagggactccaaaatttggaattcctatttgtatttttcttgttgtgtggttggttggtttctgctgctagggaggaaacttcattcttggtggaagggaggaatgagg

SEQ ID NO: 830281 - DNA, 535 bp, Homo sapiens
ctgctggagccaacaacttcatacccagcaacgatgcttccatttctgcagtgattatggggaaagagaaatgagattcactacttatttattcattcactcccggcctatgctgtgtgtacatgccayggggtccataggaataaagtaaacagagcttacattctagtggataaggcaaggcaaataaaaaaacaagtatccaccaaaaatacatatatatatgatatatatatatgtataaatacatctgtatatatacagatataattatggggccccacattaaataaagctggttatggaaggcttttttgtgctgtgggtctttgaagctgaggcctgaggccagctatgcaaagaagaaaaggccagctatgcaaagaacactggtgtggaatgtcagcacaagtaaaggtcctaaggcgggaaaatgcctgtgagtttgacaagcttaaatactaggatgattgaaattcagcagcaagggagcaatagcaggagatgatattggagtggtaccaggagtcagatc

SEQ ID NO: 830282 - DNA, 474 bp, Homo sapiens
aaggaagctttcatcattgccttatcacatggcccatccagtcatctgaaytgccctccaaatgcaaataaagacaaaaacaaggtaataatagttctgcctgacataatgcaactaacatgatgcaacaaccctgcttacagctgaaaactcattcataccttccccagaattcaggtttcagggtttcaacatttgggatttattgtgattttcaagattttagactagagattttgatccttcggtatttcaacccaaattatgattgaaattacagattatcatgttcaaaattgcatctttcagaattatgatcagcactgcttaattattttattttatttgatcatgtagaaaatcaagccatattcttctttagaggaactcaaaagacattaattatccccaaatttacctatacacttaacataatctcaataaatatatcaataggtttttgtggtgtgtggg

SEQ ID NO: 830283 - DNA, 641 bp, Homo sapiens
attttgcacatatgaaagtatgtgtgtaggttgtatttctagaaatagaattgctaagtcaagtgwtatgtaaatgtaaacatttggtacagatttactgacttatattcccgctagttatatatgacactgcctatttcctcctacctgcaacaatgttgtcattaacgcttttgatcttttacctgagaggtaaaaataatatcccatcattgctttagtcttcatttttcaagttatcctagatgtttccttgcttttcatagactttagaactatttgtatgcttttttggtggatttatttatatccttttgtctatttatctggttgattgtcttttttcattgattccaaagaactatttgcatattaggaaaaatttattaaataaattgaaaatagcttttttttttccagatcattatttctatttggatgctgtttattgtattgctgaccttgcagaatcttttctcctttttatgtgaagacaccaaaaaaataccatttttttctttttgtgacatctaggttttgttcttactttaggaatacctttgccattaaaccaacacattatttaaagaatgtatcagcaacaactgttttcttctactatctttaaagtttcatatttt

SEQ ID NO: 830284 - DNA, 624 bp, Homo sapiens
atgaggaaatgaaatggaatgatgaaatgaaatgaaaagatcaaatggtgaagtgaagaaatgatatgaaatgatgaaatgaaatgaaatgaggaaatgaagttaaatgattaaatgatgaaataatgaaatgaaatgaaatgatgaaatgatgaattgatgaaatgatcaaatgaaatgacgagatgaaaagatgaaatgaaatgatgaaatgtaatgacgagatgaaaagatgaaatgagatgaaatgatgagatgaaatgaaatcatgagatgatgaaatgataagatgaagtgaaatgatgaaatgatgagatgaaatgaaatgatgaaatgaaatgaaatgttgagatgaaatgatgaaatgaaatgaaagaatgaagtgaaatgatgaaatgagatgaaatgaaatcatgagatgaaatgatgaaatgatgagatgaagtgaaatgatgaaatgatgaaatgtaatgaaatgatgaaatggaatgatgaaatgaaatgakgaaatgaaatggtgaaatgaaatgaggaaatgaaatgatgaaatgaaatgaagtgaaatgatgaaatgatgaaatgaaatgagaagatcaaatggtgaaatgaagaaatgatatgaaa

SEQ ID NO: 830285 - DNA, 674 bp, Homo sapiens
aaaaagagacatttttaaagtatgaagtcgtgtgcacaggttcatcgtctaggtgtgtactcatgaaaacaaatctcttgtgttgcagatagcgctcgttaaggttgatttctgcatatcagtgagagttcagtgatcttacattcaacataaatatgacaactttacaaacatcccccctttcatccactgagtgagtttatcaggaaaacccaacaaaatccttccaggcctccctgggggaaggtacacagtcccctgctctggaggaggatatggaggcagacatggaggctcacgctggttaagggagttttccaaagtcaccagcagcaaggaaccttctgaaactgctgacaagtccgtgcttttcccacgtccacttacattatttaggcaagacccacttgggaatctattttttcaaggcatgatcgggactaggttcaggatggtagagcagggctgtttttgaaaggcggtctctttctctttgcaccaagctttctgtaagtgtgtgggtgaccctcccaacttcctcctctctcccacaaccacsgccctcgctgcttctctcagcttctctccccgacacctggacactcctcttggctacctgggggctggcattgtgggaggcagccgacgccagtgggtgctgctgggatccctgc

SEQ ID NO: 830286 - DNA, 674 bp, Homo sapiens
aaaaagagacatttttaaagtatgaagtcgtgtgcacaggttcatcgtctaggtgtgtactcatgaaaacaaatctcttgtgttgcagatagcgctcgttaaggttgatttctgcatatcagtgagagttcagtgatcttacattcaacataaatatgacaactttacaaacatcccccctttcatccactgagtgagtttatcaggaaaacccaacaaaatccttccaggcctccctgggggaaggtacacagtcccctgctctggaggaggatatggaggcagacatggaggctcacgctggttaagggagttttccaaagtcaccagcagcaaggaaccttctgaaactgctgacaagtccgtgcttttcccacgtccacttacattatttaggcaagacccacttgggaatctattttttcaaggcatgatcgggactaggttcaggatggtagagcagggctgtttttgaaaggcggtctctttctctttgcaccaagctttctgtaagtgtgtgggtgaccctcccaacttcctcctctctcccacaaccacggccctcgctgcttctctcagcttctctcccygacacctggacactcctcttggctacctgggggctggcattgtgggaggcagccgacgccagtgggtgctgctgggatccctgc

SEQ ID NO: 830287 - DNA, 596 bp, Homo sapiens
tccaagtgactgtgcatacagttttaaaaatatcaccgaacttgtttttcttaccccagccattttttataactatatctagggaatgggttggttgactctaaagagcaaggaactaaagaaaagataaacrtggaaacttcaggttttccagaatcttgcatatttccctcctgtttccctattataatttacatttaaaatggagagatatgcagtttaagccaaatgttttgagtcatgaaaacaagtgaaactcttttgcctgttcatgataaaccttcagatttggtgacttctttccaccaaggcaagataggtttcactggggggaactgaactggtgtggtgttttctgccttcagccatctgtgtgtacactgtgacaatatggttctgtgctggatgagacgcctactattttttcatctcactaaagagcctcaagtttctcagctacaacctggaggaagtgtctgaaagctgattttctgatgcccagccccaggactccttttccactgcacaatatcagacctgcttttctctaaatcagaattaggcacgccactccagatgaaagagccctgtcgttg

SEQ ID NO: 830288 - DNA, 563 bp, Homo sapiens
gtaatactatcacatttccccaaatggctactttaagtgcatcctacaaattgtgatatattctgtttttgttttcatcttcgttctctttgaaatactttctaagttcatctgtgacttcctccttgactcaggaatttttagaagtgtgttgtttcatttcagaacatttggaaattatttatttctagtttcatttagttgtgcttagagatcatactgtgtatgatttctattctttttaatgtactgagacatgtttatatagcccagattatcatcaattttagtgaatgttttaaatgtgcagttgctaacaatgtcgtttatattgctgtttagtggactgttttagaaaagtcaatcaggtaaatctgattaagagtattgtttttcttctatccttttgctggtttcttatctcattctattagttactgraaaaaatgggttagaatctacaatctccaacaataacgggatatatccatttcttttttctgttgtatatttcttctttgtatattttaaagctctattgttgggcaatatttggtattgtt

SEQ ID NO: 830289 - DNA, 563 bp, Homo sapiens
gtaatactatcacatttccccaaatggctactttaagtgcatcctacaaattgtgatatattctgtttttgttttcatcttcgttctctttgaaatactttctaagttcatctgtgacttcctccttgactcaggaatttttagaagtgtgttgtttcatttcagaacatttggaaattatttatttctagtttcatttagttgtgcttagagatcatactgtgtatgatttctattctttttaatgtactgagacatgtttatatagcccagattatcatcaattttagtgaatgttttaaatgtgcagttgctaacaatgtcgtttatattgctgtttagtggactgttttagaaaagtcaatcaggtaaatctgattaagagtattgtttttcttctatccttttgctggtttcttatctcattctattagttactggaaaaaatgggttagaatctacartctccaacaataacgggatatatccatttcttttttctgttgtatatttcttctttgtatattttaaagctctattgttgggcaatatttggtattgtt

SEQ ID NO: 830290 - DNA, 550 bp, Homo sapiens
gattgaagaagagccaaaaactgacagacagttagtaatcattgcagatgtttgctgaacaattgcaaggtagcaagcactattctacttttcacctgtataattctgacttatcctcaagatttatcttgaaattttccagaaagccttcctataccatcctttctcactctaacctctacctcacctctcacactaggttaggtagccctcttttttagttttactgcacactgggtttccagtgtttttaaatctactactctttattctattagatctttttatttttaatctccatggctaggctgtgaattccatgagggcaaagactatgactattgtcttgtgtcatagtcaaatgacctctcctttgcccagggtgtgttacattctcaatgtgtatttcatgaaagaatggatgaataaatggtgtctcccactagaytgtgagttcctcagaggcagaaattacacttttcccatgttttcgtgaccctggttcaatatatatgattgatgaaaaagagcgtttcagcaattacagttt

SEQ ID NO: 830291 - DNA, 522 bp, Homo sapiens
ctccatcaactcaaccaggaatcttgtggagaaaccccctaagaagaaaaaaaaaagcaaaggaacatgtctctcagtgggtgtattacccacgaggaacgaaaatgaatgtacgggagtctggttggaacagacagaaggggagatcctgagaagattcttccagcaaaagatattaacaggaaatgggcttcagagaacccagtacatgaagatgtgcaaaatgccttgtatagccttttttagtttgcctttattgctgtattgtaatagatattaaaatagatatttacgaatgtcttcagggtgagtcacagctcttgtttcccagccctccctttctcaagtcttccattcctccattgcaagttttccagcacagatattttccgaagctggattcctgtattggggaagttgttctgcactttaatcaccgacttgtacctacacaagggkagaggttgtaactcgggaagctaatgtaaagagaagctgtaccattcaacctatgtatatgaa

SEQ ID NO: 830292 - DNA, 558 bp, Homo sapiens
agacagactttcactccatcaactcaaccaggaatcttgtggagaaaccccctaagaagaaaaaaaaaagcaaaggaacatgtctctcagtgggtgtattacccacgaggaacgaaaatgaatgtacgggagtctggttggaacagacagaaggggagatcctgagaagattcttccagcaaaagatattaacaggaaatgggcttcagagaacccagtacatgaagatgtgcaaaatgccttgtatagccttttttagtttgcctttattgctgtattgtaatagatattaaaatagatatttacgaatgtcttcagggtgagtcacagctcttgtttcccagccctccctttctcaagtcttccattcctccattgcaagttttccagcacagatattttccgaagctggattcctgtattggggaagttgttctgcactttaatcaccgacttgtacctacacaaggggagaggttgtaactcgggaagctaatgtaaagagaagctgtaccattcaacctatgtatatgaawgttgtcatttttactttacatg

SEQ ID NO: 830293 - DNA, 524 bp, Homo sapiens
tcaaaaaaagaaaccaaaacaacaacaacaaaaaaaaaaacaaaaaaaaaaaggacaatgtacgytttgtaaactttaagtctgggagatggctaacattatgggggaagacttggccaagacagcccagaaaccacaaggtgaataacagcacccagaacagaaggtccaccatgaagataaggacttaatctatcaagaaggattaaatgtaaccgtcaagagtaggcttgatggaggagggtgaatctgaatggagccttgagctacagtggggtttacagcacaggcaaatcctggtgactgcatgctagatgaaaggaattggacaaatgaaataactgaggcaagagaggttgggcatgttcaaattcgtatctgtattgcatagatagcttaagaatgaagtagagccagaaaaaacatactaggctcagattacggaacatgtttaatgctaggctaagaactgtgttctattatatatgcaaagaggatccatgatcgctttttgagcagaaaaa

SEQ ID NO: 830294 - DNA, 303 bp, Homo sapiens
agacttggccaagacagcccagaaaccacaaggtgaataacagcacccagaacagaaggtccaccatgaagataaggacttaatctatcaagaaggattaaatgtaaccgtcaagagtaggcttgatggaggagggtgaatctgaatggagccttgagctacagtggggtttacagcacaggcaaatcctggtgactgcatgctagatgaaaggaattggacaaatgarataactgaggcaagagaggttgggcatgttcaaattcgtatctgtattgcatagatagcttaagaatgaagtag

SEQ ID NO: 830295 - DNA, 611 bp, Homo sapiens
tcgctttttgagcagaaaaatcacccaacttaatgtgatgttttaggaagatacttgggtarcaatgtggaagaggcactgaagcaagcagattgaaggcagatgctacgtataagaccataaagcttttgcactggatttgatcagttgcaatgaaggcttgagtttggatggtggtcttgggaaagttcaaaaaaaaaaaaggagaggaggggtcataactgaaagccattttatcatgactaagaagtcaaacatgttaataacctcaagagatattggaacaagcagaaaatattcctcttttgtgcatccatacttttattaagaaaagcttaacggagcttgagatatttatagaaaaggccagtaccatgaggaaggagatgtgttcctagaacacgtttaaaatgatagtgttctttaattttaaaatatgatggaggatagttttcgaattttgtgtcgcagtttttgcaaagttactaaagtttccaaattctaaaaccacatggtagtctgccagctacacatggagcaaattacctgccctgatgctccccacttgtaatccagccagcaagccctgtctctccattcccaaggctgtg

SEQ ID NO: 830296 - DNA, 611 bp, Homo sapiens
tcgctttttgagcagaaaaatcacccaacttaatgtgatgttttaggaagatacttgggtaacaatgtggaagaggcactgaagcaagcagattgaaggcagatgctacgtataagaccataaagcttttgcactggatttgatcagttgcaatgaaggcttgagtttggatggtggtcttgggaaagttcaaaaaaaaaaaaggagaggaggggtcataactgaaagccattttatcatgactaagaagtcaaacatgttaataacctcaagagatattggaacaagcagaaaatattcctcttttgtgcatccatacttttattaagaaaagcttaacggagcttgagatatttatagaaaaggccagtaccatgaggaaggagatgtgttcctagaacacgtttaaaatgatagtgttctttaattttaaaatatgatggaggatagttttcgaattttgtgtcgcagtttttgcaaagttactaaagtttccaaattctaaaaccacatggtagtctgccagctacacatggagcaaatwacctgccctgatgctccccacttgtaatccagccagcaagccctgtctctccattcccaaggctgtg

SEQ ID NO: 830297 - DNA, 623 bp, Homo sapiens
ttattctgtaggtgaatggggagggggattggaatcgtaggtccgagtgggcagtaacttgaagtcaatggagatatttacaaaacagaagcacaatcacgatccagcagttctggagctgctaactttttctgcctttttctaaatgtccaataataaggttctaatggagactgaagatccatcacctgctccacatctccagggggcccatgtgtgcatcgcagtgcagatcatacatgcttctttcccctcccatggcaaggggaatactgaatgatgacaactcacatgtgtaacccaagggctttgcttgggtttgcaaggactagtgcacaatacattctttgagtgttataataacattaagtcaatgcacgaattataatccctatttcacaagtacaaaaacacattcaaagaaattaacttccttgctcaccaaacagttattgacaaaaattacaatatttatgtttcttttgaaaaatattataaagattctcaaattgtctaaccaatcatattatccgtatttgtctcttctcaagctgytaataaagacatacccaagactgggacatttataaaggaaaaaggtttaattgactcacagttcggca

SEQ ID NO: 830298 - DNA, 544 bp, Homo sapiens
cctctggataattaggaatcggtagtaaaaagcaattgcacttttccaataaaataatatgctcagttgttcaaacccacattcttgataaaaacaactagaaattctgcataagatagaagaaaaagaagattttgaaacaacaaagagcatacaagatggtaaggaattacaagaccaaaatctaagtgatgtcttgatctcagaaaagaaagctaaatgttgaattccctttggcccttggagaattcatgaaagcagtgaatttgagcttcagtttttcagtctctgtggagtgataggaagaaggaaaaaatctcaagtctccagcaacacgcatgtgataatagaagactttccccctataaacaagacctccaaagagctataatttcacaataagcataaaccaaaagtaaacccacactacctcactcctgcttccatgtgtcrgcaaggaagtgttcgttggtgctaaacaaagcatggggaaatgctgctgttgcataaattacaatctcaaaaactcaagctataaatttag

SEQ ID NO: 830299 - DNA, 544 bp, Homo sapiens
cctctggataattaggaatcggtagtaaaaagcaattgcacttttccaataaaataatatgctcagttgttcaaacccacattcttgataaaaacaactagaaattctgcataagatagaagaaaaagaagattttgaaacaacaaagagcatacaagatggtaaggaattacaagaccaaaatctaagtgatgtcttgatctcagaaaagaaagctaaatgttgaattccctttggcccttggagaattcatgaaagcagtgaatttgagcttcagtttttcagtctctgtggagtgataggaagaaggaaaaaatctcaagtctccagcaacacgcatgtgataatagaagactttccccctataaacaagacctccaaagagctataatttcacaataagcataaaccaaaagtaaacccacactacctcactcctgcttccatgtgtcggcaaggaagtgttcgttggtgctraacaaagcatggggaaatgctgctgttgcataaattacaatctcaaaaactcaagctataaatttag

SEQ ID NO: 830300 - DNA, 483 bp, Homo sapiens
gggtgtggtggtgcccacctgtagtcccagctactcaggagcatgaggtgagaggatgacttgagctaaggagttcaarcctgcagcgaaccctgatgacgccactgcactccagcctgggcaacagaatgagaccctgtctcaaaaaataaataaataagctgcgtgtggtggtgtgtgcctgtagtcccagctgcttgggaggatgagccattgagccttggaggtcaagaggtcaaggctgtactgagctgtgatcttgtcactgaattccagcctgggagacagagtccttgtcttaaaaagtaattataataaaaataaaaagtacaaaaccaaccaaacaaaaaattgtttcttcactctgaaataacagtggttaacaccatgatgccactggaaagttaaaagaaaaacactccctcctgctatcaagatccaacctgccctcttgctctaaatttctgacccatggtttaaacg

SEQ ID NO: 830301 - DNA, 483 bp, Homo sapiens
gggtgtggtggtgcccacctgtagtcccagctactcaggagcatgaggtgagaggatgacttgagctaaggagttcaaacctgcagcgaaccctgatgacgccactgcactccagcctgggcaacagartgagaccctgtctcaaaaaataaataaataagctgcgtgtggtggtgtgtgcctgtagtcccagctgcttgggaggatgagccattgagccttggaggtcaagaggtcaaggctgtactgagctgtgatcttgtcactgaattccagcctgggagacagagtccttgtcttaaaaagtaattataataaaaataaaaagtacaaaaccaaccaaacaaaaaattgtttcttcactctgaaataacagtggttaacaccatgatgccactggaaagttaaaagaaaaacactccctcctgctatcaagatccaacctgccctcttgctctaaatttctgacccatggtttaaacg

SEQ ID NO: 830302 - DNA, 483 bp, Homo sapiens
gggtgtggtggtgcccacctgtagtcccagctactcaggagcatgaggtgagaggatgacttgagctaaggagttcaaacctgcagcgaaccctgatgacgccactgcactccagcctgggcaacagaatgagaccctgtctcaaaaaataaataaataagctgcgtgtggtggtgtgtgcctgtagtcccagctgcttgggaggatgagccattgagccttggaggtcaagaggtcaaggctgtactgagctgtgatcttgtcactgaattccagcctgggagacagagtccttgtcttaaaaagtaattataataaaaataaaaagtacaaaaccaaccaaacaaaaaattgtttcttcactctgaaataacagtggttaacaccatgatgccactggaaagttaaaagaaaaacactccctcctgctatcargatccaacctgccctcttgctctaaatttctgacccatggtttaaacg

SEQ ID NO: 830303 - DNA, 633 bp, Homo sapiens
aattacacacatcttcaatgaaaaccccaaaatgaatttaagaaaacacttcaatttaaaatagcataaaaaaagaaatattaattaatttggaaaatgtgatacaagattttactctgaaaattaaaaattattgtttaaagaatatttaaataattagtaaacaccttacacccatgaattggacgatttgatattgtagtactttacaatttgaactacagatttgatgaaatccctgcaagtatcccaacagacttgtgtctagaaactgacaagctgattctaaaatacacatgaaattgtaagggactcaaaatagccaaaataatcttgaagaaagaaaacatattaggataattcacaccccatgctccaaaccttactgcaaagtatcagtaatcaagacaacacaatattgatgaaggaaaaatatatagattgatggaagagaattgagagtccatatataaaactatgtgtctacagtcaatggattcttaaagtggtgccatgtgcaattcaatgaggaagagacagtctttgaacayactgggtcaacaacgtacacgtggatcaccacttgcaaaataataaattagaacccttaccccaaagcatacaaaaatatta

SEQ ID NO: 830304 - DNA, 504 bp, Homo sapiens
taaaaacagtctcttcaataaatagtgctggaaaaactgaatatccatatgcagaagaaggaaactagacccctatctcttgccatatacaaaaataaagtcaaaatggattgaagacttaaatctaagacctcaaaccatgaaactattacaagaaaacattggaaaactctccagaacattggtctggacaaaaacttcttgagtaataccccacaagcacaggcaaccaaagcaaaaatggacacatgggatcatatcaagttaaaaagcttctacacagcaatagaaacaatcaacaaatcaaagagacaacccaccgaatgggagataatatttgcaaactacccatctgataaaaaattaatcagaatatataaggagcycaaacaactctatgggaaaaaaatctaataatctaattttttaatgggcaaaagatctgaatagacatttctcaaaagacaacatacaaatggcaaacaggcatataaaaaagtgctc

SEQ ID NO: 830305 - DNA, 485 bp, Homo sapiens
catgctttagcattgcttgaatttggttaagcagccagaaaatcagtgttactttttattcctgagacactgaaagaaaaatttggtttagcagatattaattcaggtattagagttccctcctttattgcattcctgatcaaactaaatgagcattgtccaaataagagaactggatgtcagacacttttcttttttcttttaagacagggtcttgttctgtcacccaagctggagtgcagttgtgtaattatagctcactgtaacttcgaacttctgagctcaagggatccttccacctcagccttccaaacagctacgactataggcgtgcaccactttgcctggctaagttttttattttttgtagagttggraactcactcttttgcccaggttggtctcgaacccgtagcctgaagtgatcttctagctttggcctcccaaagtgctgggattacaggcatgagccaccatgcctgact

SEQ ID NO: 830306 - DNA, 485 bp, Homo sapiens
catgctttagcattgcttgaatttggttaagcagccagaaaatcagtgttactttttattcctgagacactgaaagaaaaatttggtttagcagatattaattcaggtattagagttccctcctttattgcattcctgatcaaactaaatgagcattgtccaaataagagaactggatgtcagacacttttcttttttcttttaagacagggtcttgttctgtcacccaagctggagtgcagttgtgtaattatagctcactgtaacttcgaacttctgagctcaagggatccttccacctcagccttccaaacagctacgactataggcgtgcaccactttgcctggctaagttttttattttttgtagagttgggractcactcttttgcccaggttggtctcgaacccgtagcctgaagtgatcttctagctttggcctcccaaagtgctgggattacaggcatgagccaccatgcctgact

SEQ ID NO: 830307 - DNA, 485 bp, Homo sapiens
catgctttagcattgcttgaatttggttaagcagccagaaaatcagtgttactttttattcctgagacactgaaagaaaaatttggtttagcagatattaattcaggtattagagttccctcctttattgcattcctgatcaaactaaatgagcattgtccaaataagagaactggatgtcagacacttttcttttttcttttaagacagggtcttgttctgtcacccaagctggagtgcagttgtgtaattatagctcactgtaacttcgaacttctgagctcaagggatccttccacctcagccttccaaacagctacgactataggcgtgcaccactttgcctggctaagttttttattttttgtagagttgggaactcactcttttgcccaggytggtctcgaacccgtagcctgaagtgatcttctagctttggcctcccaaagtgctgggattacaggcatgagccaccatgcctgact

SEQ ID NO: 830308 - DNA, 418 bp, Homo sapiens
gccttagatactagtttagctcttgcattttacaggctaggaaacagactcccacaaacattaattaaaataatatatcaatarccagatgatgataggattagagcatagttatgactgctaatccagttttcctaataaattattatcgctttcagattaaattttattttttgttggggtggttgttggtgggttgatttgcagactaattagctctttggatattaaattaccatgtgatttttaatatgactaattagattatttaatttttattagaatggaaccctatgatgaccacagtaatatggaagaaaaaattcaaaaggtgagacaacttataaaaggagaaatttaatcttttaaaattctgtgatacgcagtgtttgcttaattagtgggactcttatagtct

SEQ ID NO: 830309 - DNA, 465 bp, Homo sapiens
atacaagctgaaactgagaaagccagctggaagaaaggaaaactgaacagatgtacagagcgaaaaagagatgccaaaccttgcagttcctgaaagagagagacagaatatgcagtcttaatttctaatagcttgccagctccagtttccaacaggcacagctgtacagtgatgcctgtccatggagtgtcgtgatccccagtatgcccacataacaacagtcccttccattaccttctgaagtcagctcctctgattctccattcttttctttcttttttttttttttgttagggcctctaccactagctgttctatctatctgaataagaaggtattttaggatcatttcaaagtgtcctttgtgagrgaggaaagaaagattgtgatttacccaagtgaagtgctggacgtatccaatcagaatgttagcattaaaacgacaactatacattataagtccag

SEQ ID NO: 830310 - DNA, 655 bp, Homo sapiens
tccaaagtacacacacctaaaagttgaacaatagtgcttgtttttattagygtacattcaaacactccaaaccactttggccaagaataatttgacaatttttcaggtctagttcggcaataatcttttcccttcttaccaccacgttctctgaaattaataagcaaaaactaagaagctggtttataagggagtccttgctttcactgtattgttctctgggaattcatatgcctctgagtatttgtctatttgagcaaaagcagagttacctgtattaattctataaggggccaagaaaaccaacatgtctagagttttgcacatggcccatgattctcctcctcaactgcaggctaacaatacttattcaaaagtaatagcaattgtgcacaagctgaagactatgtgagccccacctgcaatactgctttgcaaaatgattttcatcatttccatagtcaaggatttcactgatatatggcagattccttataaaaaaccaacaagaggccgggtgcagtggctcatgcctgtaatcctagcactttgggaggctgaggcaggcagatcgcctgagcccagcagttcaagacttgactgtccaacatagcaaaaccctgtctctactacaaaaattagctgggcgtggtga

SEQ ID NO: 830311 - DNA, 564 bp, Homo sapiens
cctaggatcctcaggccacccgtacaccagagtagttgtgcacctcatactacagtcaagacagtgccctccttcttggggttcccasgcttccagcataccagagtagtaaaacctcttctcccagcaccatggatgaggcagcatcttgtcctctggcggcttcaagcccctggcacactagagtagctgtaccccttagtgccacagctgatgaggtgtaccatattccaagggtctggaggatatgctgacccatgtagccacactctgcggggctgatcagacatagtgccttgcatcccagggaatcagagtcttggttgtgctgtgccaccagatcctccaggctgaatagccacagtatcctgcttatttacaattgggctagccccttgcagtctgagctgctgagatgccttacttccgtggagaaggtagttattggtgtgctgcttccctcccaccagggatcaagccacagtagtgccttgacattcctgggtccttgctgctactgcacctggcctcatagaccctgggccactgccatatcctaccacc

SEQ ID NO: 830312 - DNA, 614 bp, Homo sapiens
catgggctggcgttgagtgtctgcggcttttccaggwgcatggtgcaagctgtcagtggatctaccattctggaggacagtggctgtcttctcacagctccactaggcagtaccccagtagagactctgtgttggggctctgaccccacatttcccttctgcactgccctagcacaggttctcaatgagggctcagcccctgcagcaaacttctgcctggacatccaggcatttccatacatcctctgaaatccaggcagaggttcccaaaccttaattcttgactactgtgcacccacaggctcaaaaccacatggaagctgccaagacttggggcttgcacactctgaagcatgaccagagctgtaccttggctccatttagccatggttagagcagctgggacacagggcaccaagtcactatgatgcacacagcaggaaggccctgggcccagcccacaaaaccattttttcctgccagtcttctggacctgtgatgggaggggctgtcacaaaggtctttcacatgctctggagacatttcccccattgtcttggtgattaacatttggctcgtagttacttatacaaatatatgtagctgtcttgaat

SEQ ID NO: 830313 - DNA, 507 bp, Homo sapiens
tttttgtgtgctcttcagattacataatctctatttatctataagctctgattcttctgcmaattaaagtctactgttgagcttctctagtaaatttttcatttaggttattgtaatttttcaactctatcattccattttgctctgtttttttcttagcaaactttttttttttttttgagacggagtctcgctctgtcacccacgctggagtgcagtggcatgatcttgactcactgcaagctctgcctcccaggttcacaccattctcctgcctcagcctccccagtagctgggaccacaggcacccgccaccatgcccagctaattgttttgtattttcagtagagatgagatttcaccgggttagccaggatggtctcgatctcctgacctcgtgatccacccgcctcggcctcccaaagtgctgggattacaggtgttagcaaactttttatcgcagaacagtttaaaacatacagaaaaattgtaaagacagcccagtga

SEQ ID NO: 830314 - DNA, 507 bp, Homo sapiens
tttttgtgtgctcttcagattacataatctctatttatctataagctctgattcttctgccaattmaagtctactgttgagcttctctagtaaatttttcatttaggttattgtaatttttcaactctatcattccattttgctctgtttttttcttagcaaactttttttttttttttgagacggagtctcgctctgtcacccacgctggagtgcagtggcatgatcttgactcactgcaagctctgcctcccaggttcacaccattctcctgcctcagcctccccagtagctgggaccacaggcacccgccaccatgcccagctaattgttttgtattttcagtagagatgagatttcaccgggttagccaggatggtctcgatctcctgacctcgtgatccacccgcctcggcctcccaaagtgctgggattacaggtgttagcaaactttttatcgcagaacagtttaaaacatacagaaaaattgtaaagacagcccagtga

SEQ ID NO: 830315 - DNA, 586 bp, Homo sapiens
tttttaccctgagcattcacaggattgggccctgacccaggaatggaatgttgtgactatgcragtagccacctgcctgcaggcttattatttctcttattaaatggaggattcgatgagataatcagtgaaacttcttttcagagagaaagctatgatttgatgaattatgaattgaggacgcaggagctgctctattgggtcttaatagttgtaagcctttgtggggaaaaatcatgtaaacaaatagcaactagataagaaattaaaaaaacaattattatagtggacaagctgtaagggaagagctgggaatcttaagctaagaatgaaacagggcttaaaatgaagaaatctttgagctgtgtgtggaaagacatgtaacattcccaatagggaaagaaggaactcatttcaggtcacaaggacagcctgagcaaagataaagtttgtttggttgattagctcaagatagctggggcacactataggtgaacaggtgtaatagaagataaaaatactgatcttaattactgggatttgagagaaagaaaaggtttggtcttgatgcacaagaaagctttaa

SEQ ID NO: 830316 - DNA, 588 bp, Homo sapiens
ctgtgaaccactgaatactgtacctgtatccagctcagccactcactgaaggctcctcagcagaactgcttctgctgtcagagtggaaaaacaagaattgaagagtcccatccctcatggcaatcttggaggaaaagctgacaaactgagagaatcacactagttctccatcaccagcaatccatctagtcacagttcttgacaacatctccccctttagaaatttagagcctgctctctacctgccatttctttgtcttttaaaatccttttgacaacaatgcttcttcaagaaagaatattatgcaattttcctcattggtataatttcactaagtgcataggcccccttgattttctatttctataataattttattctctttccattgatgactttcagacataatgaattaatctctctttcaatgggcacagccatgataaacctctataaaacagrtggtgtgacttatactgaaaatgacagttaattgcttttacaattatgatatttattattaaaaatacatttttaaaacatctgttagtactctgagttgaagtgttccacacaagatggaaaat

SEQ ID NO: 830317 - DNA, 574 bp, Homo sapiens
tgggctccgaggaacattccaaagaaaaataagggcctagtgagctgttgagggaggagggaggagggaggaggaggaggaggggagggggaggagcaggagcaccgggctcaggcagccaggaggatggagtaacagagctgctgattgggaggctgcacaacagcgagggattagcaaattatttgattaaaacattggatgctagtcatattttttaaaatattctaatggttacctcctatttaacagcgcttacacttaatttaactgcgtgctgtggaacagctggagtttctaaaggaaattacaacattctgacagaaataggtttccagaaaggttttcttccgagttgcttttaagattctgaacatgttcccatctgaggctgtggaagcaaattctgatattcatcagttaagaaaatagattttcttaaaaggggggattgaagagtctcttgatttttgtaaggcagttattcccttggccattttcatcaatcacaaaaactgtcaaaaatgcartggttcactaagtaaataaatctgaaaggctattaaaaatatgg

SEQ ID NO: 830318 - DNA, 579 bp, Homo sapiens
tgtttcttgaaattacagcatagttatagaaacaggcagatgtggcagacaggaaactgaagaaaataggcccattgattgctcttctatgctagggcttcattaacaatctagagaaccctggaattcyttatggcaagtgtttgtaagtgtttgtaaaaaaatgctttaatgttttaaaatgaatgcccactttgtaactgtattataatggaaaatatcaaaataattttgtttctacagctcttgagagctttagtggtctggcaacacagcaaggtgaactgaaatcatgctagcctcctctgagctttcatcatcttggacatccatctatatgagcttggcaacactcaaagaaggattacaatgcattatgattttatggttgctaaaggtactagcaatatgcttgacacctgtctctgtgtctataatgttttactttaaacaatataggtaaacaaagtggttacaagttctttccttaacttcaggaagtgaaggacatccaagtgaattgcttcattctgttgaattgtctgtagtttgggtttattttattttatttattttttg

SEQ ID NO: 830319 - DNA, 527 bp, Homo sapiens
agaatggcactgaaatatgtttaatttttaggattgaatatctcaggttcctagtcttgcatgagcaaacctagatataagagcagaagttaatctgacctaaactttttgcacataaaacctcaagttgcttagcacctcaaagacctgctgccaaatattttaactcccacctcaatctgattcctaaggtataattctgagaccaacaaattctttatcttgcacatttgttgctagaaaataatttcacatttctgaagggcaattaggtaattccagagtacatgtcttaaaatacacaatattgagttatcttctgtttaaaaacagctttattataattcacctaccataaaattcacccatttgaaagcgtacaattcaatagattttagtatgtttacagacatgtaaaaccatccccwcagtcaagtctaaaacattttctttgcctcaaaataaaaccttgtacctttagctatcatcccctacccaccaacctccatctgatccctcagtcctaa

SEQ ID NO: 830320 - DNA, 311 bp, Homo sapiens
ggacacagagagagagagagagacagagagagattgagaaagcgctcctgtgtgctctctttggaggaaccttcctgtctcccaatgggccgggcagcctggctgctccgttcagcggggacgagtgtcaggttgctgcaggtgtcgctgacggccggtgagtgattgcaccatcagcttcctaccgsgatccatcatgcggccccagccggtgaagaatcacagcctcagcaaggtgctgagcccagcaacatatcattaaacaaggttaccaccggcagatttgttcccatgatcaatctggtcaataa

SEQ ID NO: 830321 - DNA, 523 bp, Homo sapiens
acagaatctaaaggaaaagaaaaatttctacatggaaatatctgcagtgtcaaagaaaagatgccacaggaagaaagcagccctaaaataaaatgcygacaggcataaaacaaaagttatatatctataatatgctataatttaacgaagatacaaaatgaagaggagtaataatataaagataatgtattaagtctttaaatgaagacaaaatgtacattgaaatattttggttaactggcaggaactaaacaagacttttgatgttagggctgattatgctgaagtgttgttatttgtgtgccactaaattttatgatttacctccacaaattgcatgagcaatttatggaactatcatccagtgaacaaaagacaggataacaaaatgaattaatattacagtacatggtgttcaatactattattctagtgggaatactctcggtctgaactgatccagcagtttttgtgaaatgtaaacctcttcaatacaaatgggcattcattactgaaatctggc

SEQ ID NO: 830322 - DNA, 542 bp, Homo sapiens
gttgtgacatgattttgtcattgtgtgaacatcatagagagtacttacacaaacctagatggtacagcctactacacatctagggcatatgatatagcattttgctcccaggctacaagcctgtatakcatgttactatattgtaggcacttgtaacacaaagataagtatgtatgtatcctgtatccaaacatatctaaacacagaaaagctacaggtaaaaatgtgatataaaagatttaaaatggtacctctgtatagagcatttgccatgaatggagcttgtaggactggacgttgctttgagtgagtgagtgagtcacggtgagtgaatgcgaaggcctaggacattactgtacactaagattttataaacactgtacacttaggctgcactaaatttatttaaaaaatttttcattcttcaataataaattaaccttagcttgctgtaatatttttactttataaaatttttcatttttaaacttttgattcttttgtaataaagtttagcttaaaatacacattgtacagctgta

SEQ ID NO: 830323 - DNA, 631 bp, Homo sapiens
cagtaattataaggctggggatgtggatttgattgaaaaccaactgcaccaatgtgttcctagcgtttaaartaatagtgtatgtattattattatctgagacaggatgtcactctgtcagccaggctggagtgcaatggctctgtcatggctcactgcagtctcaacctcctgggctcaagtgatcctcacacctcagcctcctgagtagctgggactaaaggcacatgccaccatacccagctaatttttgtattacttgtagagatgtgatttcaccatgttgcccaggctgtcctgaaactcctgggcccaagtattctgtcccccttggcctccaaagggctaggattacaagtgtgagccaccatgcgtggcaatagtgtatatattaatctctactgaatttattgaagctttttatatatgaaaaattatttccctctcttctgaccacctctcacatacttttctccctctctgttttgcacttctcatgtcatgtctccttgcctctaattcactcccactcagtgtttgcccctttgagaaagcctaccagaaatatcaactccattttcagaatgcccgcagtatgccagttgtgtgcccaggtatcttcccaacatct

SEQ ID NO: 830324 - DNA, 577 bp, Homo sapiens
aataatcactattaacatttagtgcttatattttacttgtttttaaatgtatctcaaaaaaattaatcatttttcacccattatactggcaaaagttaaaaagcatgtgaataagtgctgacgctgttgtaagggaatgaacacgctcatgcgctgttgatcagtgtaaaatgtgcatattaacacattggaaggcaaagtgacagaatctgtatgttacgactgcatgtcggtgccctcccctgccacccccaattcatgtgctgaaactttaacctacaatgggatggtactaggagactgagactttgggaggtaattaggttttcatgaggtcatgagttagagactgcattttgggattggtgtccttataaaaagaaaccaagactagaactcactctatccaccatgtgaggcaatgatgaggaggcagcatctgcaaaccaaaaatatggccttcaccagacactggaaaggccagtgcctakatggtggatttcccagcctccaggtctgtgagaaattaatgtttactgtgtaaaccacacagtctatggtattcttgttatagcag

SEQ ID NO: 830325 - DNA, 512 bp, Homo sapiens
ttatttttgagacagagtctcactccattgcccaggctggagtgcagtcactataacctctgcctcctgggttcaagtgattctcctgcctcagcctcccaagtagctgggattacaggygcatgccaccacactcggttaatttttgtatttttagcagagacagttttcaccatgttggccagactggtctcgaacacccaccctcaggtgatccgcccaccttggcctcccaaagtgccgggattacaggcatgagccacctcgcccggccacatttttagtttataaacaacgcccctgcattttcattttgcactgagctactacaactctgtagccagttgtgggccagatggtgtctattttcagctttgtggaccataggtccctgttgcaactactcaagtctgcaggcagcgggagcagcagccagggacagcaggtaatgaatgagcatggcagttctccagtaacattgcatctgcaaacacagccggcatcccggattt

SEQ ID NO: 830326 - DNA, 624 bp, Homo sapiens
ttcaagcatttttttttctcaaagcatgtagaattaagtgtatgttcttcatgtttgccctgaaaacyctcacatttagcattatccacctttccagattgatgctccatcattacattttcccttgctcttcttccaaacagtagtcttcctgctatgctatgtctttcttcaaataatttgttagattttcttcagtctactctttctcccatctgccttgccatttataaaagttttacacattttttaaaataaagctcaaattctacttctttttgaagagatgaaacaaaggcccgtttacttaggaattttaacctgctgatgttgacatgttgaaaggattaaaattagcagagataggcaaagtaggtagaaactgttgtaacattaggcatgaatgttagcaattttgattctcaactcctctttgctagaatttctctcttccttctccacacataagcctttgtgtccttgatcagcctggtattaaatctacttttatacctctgtagctatgctgacttatgagctcctgaataagttcatgtgccttctgcttctgtgaccacagtgcctagcagagggctctgcacagtgcatgaacccagtaaatct

SEQ ID NO: 830327 - DNA, 624 bp, Homo sapiens
ttcaagcatttttttttctcaaagcatgtagaattaagtgtatgttcttcatgtttgccctgaaaactctcacatttagcattatccaccttwccagattgatgctccatcattacattttcccttgctcttcttccaaacagtagtcttcctgctatgctatgtctttcttcaaataatttgttagattttcttcagtctactctttctcccatctgccttgccatttataaaagttttacacattttttaaaataaagctcaaattctacttctttttgaagagatgaaacaaaggcccgtttacttaggaattttaacctgctgatgttgacatgttgaaaggattaaaattagcagagataggcaaagtaggtagaaactgttgtaacattaggcatgaatgttagcaattttgattctcaactcctctttgctagaatttctctcttccttctccacacataagcctttgtgtccttgatcagcctggtattaaatctacttttatacctctgtagctatgctgacttatgagctcctgaataagttcatgtgccttctgcttctgtgaccacagtgcctagcagagggctctgcacagtgcatgaacccagtaaatct

SEQ ID NO: 830328 - DNA, 624 bp, Homo sapiens
ttcaagcatttttttttctcaaagcatgtagaattaagtgtatgttcttcatgtttgccctgaaaactctcacatttagcattatccacctttmcagattgatgctccatcattacattttcccttgctcttcttccaaacagtagtcttcctgctatgctatgtctttcttcaaataatttgttagattttcttcagtctactctttctcccatctgccttgccatttataaaagttttacacattttttaaaataaagctcaaattctacttctttttgaagagatgaaacaaaggcccgtttacttaggaattttaacctgctgatgttgacatgttgaaaggattaaaattagcagagataggcaaagtaggtagaaactgttgtaacattaggcatgaatgttagcaattttgattctcaactcctctttgctagaatttctctcttccttctccacacataagcctttgtgtccttgatcagcctggtattaaatctacttttatacctctgtagctatgctgacttatgagctcctgaataagttcatgtgccttctgcttctgtgaccacagtgcctagcagagggctctgcacagtgcatgaacccagtaaatct

SEQ ID NO: 830329 - DNA, 516 bp, Homo sapiens
tccagtctactgatgagcctttcaaaggcactcttcatgtctgttaatagttttttattttgagcattttcttttcatagagttttcatctctctgcttatattaccccgctgttcttgcatayagtctattttttctattagagaccttaacatagtaatcataattattttatttatttatttattttgagacggagtctcactctgttgcccaggctcaagtgcagtggcgtgatcttggctcactgcaacctctgcctcctgggttcaagtgattctcctgcctcagcctcccgagtggctgggataacaggcatgcaccaccacccccggctagttttttttgcatttttagtagagatggggtttcactatgttggtcaggctggtctcgaactcctgacctcaggtgatcctcccaccttggcctcccaaagtgctgggattacaggtgtgagccaccgtgcctggccttaatcataattattttaaattcctggtctgataattttaa

SEQ ID NO: 830330 - DNA, 548 bp, Homo sapiens
ataaatttatgaagcagcaactggtgagtggtctgcatgcctacagataagatttgtaagagtgacgggagaagagtgaggccgagtacagtggctcatgcctgtaatcccagcactttgggaggccgaggcgggtggattacgaggtcaggagtttgagaccagcctggccaacatagtgaaaccccgtctctactaaaaatacaaaaatcagccgggcatggtggcgcacacctgtagtcccagctacttggggtgctgaggcaggagaatcgcttgcacccgggaggctgaggttgtggtgagctgagatggcaccactgcactcctgcctgggcgacagagcaagactctgtctcaaaaagaaacaagaaacaaaaaacaaaagacaggagaagagtgtgaaactagttcraacattagtttgacgcaaattgtggatgacttgagacattggtctttatcctataggtattaagtagctactgtaaattattcagagagggaaaaaaaagatacaatttacttagtctttccaattttctttt

SEQ ID NO: 830331 - DNA, 372 bp, Homo sapiens
gaacattgatgcaaaaatcctcaacaaaatactggcaaagcgaatcyagcagcacatcaaaagctcatccaccacaatcaagtaggctttatctctgagatgcaaggttgtttcaacatatacaaatcaacaaatgtgattcatcacataaacagaactaaagacaaaaccacatgagcatctcaataggtgcataaaattcttctgatacaattcaacatccttttctgttaaaaatcctcaacaaactaggcattgaaagaacatactttaaaatagtaacagccatttaggacaaatccatagccaacatcatactaactgggcaaagaaatatggaagtattcctcttggaaactggtacaacaccag

SEQ ID NO: 830332 - DNA, 471 bp, Homo sapiens
ttggcaggtgtgtaaattatttaaaatattgtggatagcagtgtggcaattcctgtaagacctgaaaacagaactaccatgcaacagagcaatctcattaccaggtatatacacaaaggaatttaaaacattctatcataaagacatatgcatgcagatgttcattgtggcatgaatcacactagcaaaaatgtgagatcaacttaaatgcccatcaatagtagactggataaagaaaatgtggtacatatacaccatggagtactaactaatgagtgctaggtttaataccttgttgaactaatctgtacagaagctttctctggtttgcagacttaattaaacattttagacatttaaaatttaaagctattctaaattttaaaagcttatggaaaatatttagcattatttagcctattcaaccgaccmctaaaaagaataaaaataacaatatttttaatatcaaac

SEQ ID NO: 830333 - DNA, 584 bp, Homo sapiens
acttttgaccttagaaaaatctttggaggttgcataatgaagtctattataaaatgtacaagttaaaagggcacttatgattccaagtggcttcttttgtaaaggggattcctttgtctgttctatattaattaccattatttttgcttgctgcatagaatatgtgctatttattctgcagaattcctgtgcatggaatagaatattacttttaaattgagtttcaaatattttaattaaaataatactatttcaaaaagatgctgattgtgtaaagaattttagtgggtaaacactacagctatcttatttttaaacagatatttgattagtatacttaaatgtaaatctttgtttctctgactgccacctattggatttatgctaaatgggatttcatttcttgtactcagtcatgaaacctgctgcattctagtgatgtaactttggtcttagggaatgtctttgtctggcaggytccttagaataaagagcttgaaggcaaaatagagtttgatgctttatttattgtgaaagataatcccaggacaggagaaagagaaaaaggaagtggacaaaactag

SEQ ID NO: 830334 - DNA, 624 bp, Homo sapiens
agcatatcatgatccattagccactgacaaaaacatttgcaggttaaaacattctgcttactaaatcaaccctcttttcattccagtaagcttgcctacgttgtctccagtgccaaagatatgcagcttgccttttgtcgcttcagaaatttatgtcactgaaatcgggaaacccatttgaacagtggcatctctcacaattatattctgctagtagtggggagacattgcaaaacttctcaaagatattatccccacaccgtgccatatcctcaatgcatttcctaatgccttttgaagaaatatttttttggtcaatccacgtaaaatgcttttttggatgttaagcagtttgcaggcacatgggtagtcctatctccataagctttgtgattccttcccatatattacatggagctgtgctacttcaaacccatttaatataggccatgtatgaatctgtgcttaagttaaaccaaacttattcttcatttctagttatcaagataacayaatgaatctacagtccagaatttctatgtaagtaaacccatttggataaattcatcctgattcaatgttatgctcctttttgttcctgatctgacatactatatccctgca

SEQ ID NO: 830335 - DNA, 624 bp, Homo sapiens
agcatatcatgatccattagccactgacaaaaacatttgcaggttaaaacattctgcttactaaatcaaccctcttttcattccagtaagcttgcctacgttgtctccagtgccaaagatatgcagcttgccttttgtcgcttcagaaatttatgtcactgaaatcgggaaacccatttgaacagtggcatctctcacaattatattctgctagtagtggggagacattgcaaaacttctcaaagatattatccccacaccgtgccatatcctcaatgcatttcctaatgccttttgaagaaatatttttttggtcaatccacgtaaaatgcttttttggatgttaagcagtttgcaggcacatgggtagtcctatctccataagctttgtgattccttcccatatattacatggagctgtgctacttcaaacccatttaatataggccatgtatgaatctgtgcttaagttaaaccaaacttattcttcatttctagttatcaagataacataatgaatctacagtccagaatttctatgtaagtmaacccatttggataaattcatcctgattcaatgttatgctcctttttgttcctgatctgacatactatatccctgca

SEQ ID NO: 830336 - DNA, 611 bp, Homo sapiens
gttttacttcttctttgatggctctttcccttaggaagtcatataaacatgagccatacactaacttaggcaaagattatcagagggaaactagagaaaaaagactatatacattttttaattttcaagtttcaaagctgtggtccaagtgtaaaacaaaaaatattttagaactgatccaggtcatttcttgctgcttgctgttagatcaaaaattccgtggacttcaaaatgggtttaaagggaggactggactatgtgtgtggtaatcataaagaaactcacagctccactttcacaagtgccaattttccccaggaatgtcatcggagccattgtctataaaccagcagtctctatacaagagctcagtaccttatccttgccaaggctatcttaagtctagatgtccctaactggtgtctgacttccctctgtggaagtttaaatttcactcaacagtaaagcctgtacttgtcctgaaatatggctcattcactgtttcatgtatgctgtgtagactacatattttccaatgatctaggaaaatatttttaagatgctcrtaacagaggcaaaactttggatccctaggaaggcagttgtactag

SEQ ID NO: 830337 - DNA, 626 bp, Homo sapiens
tggttattgagtaaaagagggccctgtaatgtggacttgacatcttccctccataccttggctttctgccttctttgccttttcawtccttcaccttcaccaccaccattttattgtaccaaaagcagctttaaacttgggatgtttttcctgcctctatctgatttttcttcagcagaaacatctttaatgctacaaaatggaattatagcagttgttttttctgggaaccatgttgttggagaaatagtcattttaactgaactgctttgtaatgttgcctaagaaaatatggtataatcaaattatagtaaaaaaatgaagtgcactcataattacttttataaccttcctttttcagtgttccctggggctttccctccctggtaatcttagccagccatagaccattctttctagaatcagtttcctaatcctagtgtggtctgtagtctcatattgaccaaaattggtcttactcaaacttatcattttcttttatatttatttttgtcctcttccattttctgtcatcctctggccttaattgactcacctggctcatggaagaaaaaggaagggaaataaatccaggctagtgaaatatagctggttctatccctctg

SEQ ID NO: 830338 - DNA, 653 bp, Homo sapiens
ctggactctagctgcactggatccagagtgactcgcaactcagacatcttagctttacaatcttctatccatggcacaaggtcttccacatgccactgatatttctgagctttctgcatacaatccttgagcctggattgtctgtctgcagtttttttactaagctcttcccaatggtttttgagctcaaccaactggttttgtagagtccttttctcttctccaggaggtacagaaagaagtagagattccccttcagccacaatcacctcataggagccactgtgttgattaagacttttctgaaactcttcattctcctgtagctgagactgtagccgctccaattttgcagaaattgggcagttttttgcttgctggctttgtttatcatccaaccaggtcctcaactcatcaaacatttgctggaactgctgggtgctggcaagagctgcctggagtctgttaatgcgatcggctgaaatgagaaaataaaattgaaatcaataaagcctgaaccctggcatttaaaatgtttgctgagagtatacggtctaatcttgggggaarggaactaatgttacttgagggcctaccaaaaagaggcatataattaggctccttcatgtacactatcttatttaatcctcgta

SEQ ID NO: 830339 - DNA, 606 bp, Homo sapiens
ctctttttggtaggccctcaagtaacattagttcccttcccccaagattagaccgtatactctcagcaaacattttaaatgccagggttcaggctttattgatttcaattttattttctcatttcagccgatcgcattaacagactccaggcagctcttgccagcacccagcagttccagcaaatgtttgatgagttgaggacctggttggatgataaacaaagccagcaagcaaaaaactgcccaatttctgcaaaattggagcggctacagtctcagctacaggagaatgaagagtttcagaaaagtcttaatcaacacagtggctcctatgaggtgattgtggctgaaggggaatctctacttctttctgtacctcctggagaagagaaaaggactctacaaaaccagttggttgagctcaaaaaccattgggaagagcttagtaaaaaaactgcggacagacaatccasgctcaaggattgtgtgcacaaagctcacaaatatcagtggcatgtggaagaccttgtgccatggatagaagattgtaaagctaagatgtctgagttgcgagtcactctggatccactgcagctagagtccagt

SEQ ID NO: 830340 - DNA, 606 bp, Homo sapiens
ctctttttggtaggccctcaagtaacattagttcccttcccccaagattagaccgtatactctcagcaaacattttaaatgccagggttcaggctttattgatttcaattttattttctcatttcagccgatcgcattaacagactccaggcagctcttgccagcacccagcagttccagcaaatgtttgatgagttgaggacctggttggatgataaacaaagccagcaagcaaaaaactgcccaatttctgcaaaattggagcggctacagtctcagctacaggagaatgaagagtttcagaaaagtcttaatcaacacagtggctcctatgaggtgattgtggctgaaggggaatctctacttctttctgtacctcctggagaagagaaaaggactctacaaaaccagttggttgagctcaaaaaccattgggaagagcttagtaaaaaaactgcggacagacaatccacgctcaaggattgtgtgcasaaagctcacaaatatcagtggcatgtggaagaccttgtgccatggatagaagattgtaaagctaagatgtctgagttgcgagtcactctggatccactgcagctagagtccagt

SEQ ID NO: 830341 - DNA, 606 bp, Homo sapiens
ctctttttggtaggccctcaagtaacattagttcccttcccccaagattagaccgtatactctcagcaaacattttaaatgccagggttcaggctttattgatttcaattttattttctcatttcagccgatcgcattaacagactccaggcagctcttgccagcacccagcagttccagcaaatgtttgatgagttgaggacctggttggatgataaacaaagccagcaagcaaaaaactgcccaatttctgcaaaattggagcggctacagtctcagctacaggagaatgaagagtttcagaaaagtcttaatcaacacagtggctcctatgaggtgattgtggctgaaggggaatctctacttctttctgtacctcctggagaagagaaaaggactctacaaaaccagttggttgagctcaaaaaccattgggaagagcttagtaaaaaaactgcggacagacaatccacgctcaaggattgtgtgcacaaagctcasaaatatcagtggcatgtggaagaccttgtgccatggatagaagattgtaaagctaagatgtctgagttgcgagtcactctggatccactgcagctagagtccagt

SEQ ID NO: 830342 - DNA, 512 bp, Homo sapiens
cagtcatgtatcccaggaaaagccaagcttagttatggatcttatattaaataagagttaagattccaagtgagctataaagtctgtagttttttttgtttggtttttttttggggggggtgctttttgtgttggcaaattcagccagcgtgaggttttttgtttgtttcttttttgtttttttgccttaaatctggattcaaagttatgttctggggcttgaaattaccagaagcctgactggattttggggagttggggagggagttctagttcataggcaatatacagtctttactcttcagatatcttcactcataaatgaaggtagtagtgacagagagaatgaaaacagacaactttttgcctcctttaaaccttattttggtcagatgttcaggtgatatatatactacattctgttttgatttgtgtyaaataaggagaacattagaagatttgattctactgttgctactcaccaggtgattggacaaatctttctttaagcc

SEQ ID NO: 830343 - DNA, 651 bp, Homo sapiens
atatcctgcaaaaattaagcaaaaagtacacatgtactaagagagagaaaagaggggttttgatttaacttcagaggtttacgaactgttgcatctgctttacctcaagyagtcagtgtgcttaccccagggacagtggcaaagcaagacgctagcagcagagtgggctggtcctttatacacagagacttgcttattatacagttaacatatctgctatgggtaggaaccttgacaaggctgatgtgtcatgaatttatctctatttttgaagaacccacagatggtactaaacccatataacttatataactgttatcatggggtcaagccgctgtataaccgtcaaaaatatattttttagaagaactgacattgtgtgtgtgtttatttcctttttagcacgaggtagaactaacattgaacttagagagaaattcatcctaccagagggagcatcccagggaatgacccccttccgctcacggggtcgaaggtccaaaccatcttcccgggcagcttcccctactcgttccagctccagtgctagtcagagtaaccacagctgtacatccatgccatcttctccagccaccccagccagtggaaccaaggtatgtactgatctccattatgcccttcttccccaat

SEQ ID NO: 830344 - DNA, 646 bp, Homo sapiens
aatgaggcatggtgagtccacacctgttacagtgagctatgatcgtaccactgcacttcagcctgggtggcaaagtgaggcctcatgtctttaaaaaataaaaaaaagctgggcgcagtggctcacgcctataatcccagcactttgggaggccaaggcgggtggatcacgaggccaagagatcgagaccatgctggccaacatggtgaaaccccgtctctactaagaatacaaaaattagctgggtgtggtggcgtgcacctgtaatcccagctactcaggaagctgaggaggagaatggcttgaacccgggaggcagaggttgcagtgagccgagattgtgccactgcactccagcctggtgacagagtgagactccgtctcaaaaaaaaaaaaaaaaaaaaaaagcagaagaaaaaaagaaagctggaatgacaaatatatcttgctcaattagatagtgaagtgggagcggtactacaaccttgtctgtatatcacctaggtgtccttcattctcaccttccaactcatctacctataaggcagtttccttcctagaatggagataccacttsattaggttgactgctgccagcaaaaggtgtcagaggcgccctatgacagcagaaccatttttgctctgt

SEQ ID NO: 830345 - DNA, 637 bp, Homo sapiens
gagaattgcttgactccaggagatggaggttgcggtgagctgggatcgygccactgcactccagcctgggtaacagagcaagactctgtctcaaaaaataaataaataaataaataaaagaaaagaaagaagagcatatgggggaatatataccctaactttggtgagtggtggtgaattaagggcttcctagaggaagtgaactctaagctgagatctgaagaatgagtaaaaattaacaaatagctgggccccctccgttactttatgcaatggagaagcaagtaagttccaagagcatgtaaaggcccagaggaaagtgagagcacagtttagccaataaactgaaaggaatcaatataagcagatgctcaagtataaaggaaggtgacagataaggccaaataagtagactagatcccagtgggtaggggctgagaagagagttaaccaggtaatcttgagggcaacagggaaccataaaaagggctaagcaaggatatggcattttagaaagattccttagtagtaaggagaatggactggaaggtaaaaaccaagaggcaagaagaccagtagaagctactataataataacagtgaaagcagacagtggttctaaactacaataatatct

SEQ ID NO: 830346 - DNA, 638 bp, Homo sapiens
ttctcaagaacttaagtattttctaattgtgcaacaaaaatcatgcatcataartagaatattacaaattgcacttcatattagttttctttattatttactgagtaaatatccaccatattaataaaaagatataataattttctttaagaatgaaaatggatctcatatagccctctgtgattcaacattgactagcatttgtcatgataaattcctttcactgtgatgtagattatcatataattcaaggaagatgtttttgtacttcaaccattaattaatacttacttgtaacatagcatgattcattcattacatattctagaatagtaaaaatctacttattgcaaaactagcttaaggcaattcagataactatgtgtctccatcctcattccaaagaacatcagtttaattataggaattatttaatatttatataatgtgccagactatgctctaggcagctctaatgtatgaaaggcatgttttgccctcaaggatattcttctactctcaaactgacataaaaacaaaagagaacagttttcataaaatataaacaataaagtttccatctctactgtggtgtttaatctgcagaatgtagctatagactgcagttgtgtaatcag

SEQ ID NO: 830347 - DNA, 638 bp, Homo sapiens
ttctcaagaacttaagtattttctaattgtgcaacaaaaatcatgcatcataaatagaatattacaaattgcacttcatattagttttctttattatttactgagtwaatatccaccatattaataaaaagatataataattttctttaagaatgaaaatggatctcatatagccctctgtgattcaacattgactagcatttgtcatgataaattcctttcactgtgatgtagattatcatataattcaaggaagatgtttttgtacttcaaccattaattaatacttacttgtaacatagcatgattcattcattacatattctagaatagtaaaaatctacttattgcaaaactagcttaaggcaattcagataactatgtgtctccatcctcattccaaagaacatcagtttaattataggaattatttaatatttatataatgtgccagactatgctctaggcagctctaatgtatgaaaggcatgttttgccctcaaggatattcttctactctcaaactgacataaaaacaaaagagaacagttttcataaaatataaacaataaagtttccatctctactgtggtgtttaatctgcagaatgtagctatagactgcagttgtgtaatcag

SEQ ID NO: 830348 - DNA, 638 bp, Homo sapiens
ttctcaagaacttaagtattttctaattgtgcaacaaaaatcatgcatcataaatagaatattacaaattgcacttcatattagttttctttattatttactgagtaaatatycaccatattaataaaaagatataataattttctttaagaatgaaaatggatctcatatagccctctgtgattcaacattgactagcatttgtcatgataaattcctttcactgtgatgtagattatcatataattcaaggaagatgtttttgtacttcaaccattaattaatacttacttgtaacatagcatgattcattcattacatattctagaatagtaaaaatctacttattgcaaaactagcttaaggcaattcagataactatgtgtctccatcctcattccaaagaacatcagtttaattataggaattatttaatatttatataatgtgccagactatgctctaggcagctctaatgtatgaaaggcatgttttgccctcaaggatattcttctactctcaaactgacataaaaacaaaagagaacagttttcataaaatataaacaataaagtttccatctctactgtggtgtttaatctgcagaatgtagctatagactgcagttgtgtaatcag

SEQ ID NO: 830349 - DNA, 645 bp, Homo sapiens
ttttgagaaaagaatttttcattttgtcatagattcacatgcatgaaagtttcaagacagraaacaacagagcctggtgctaaattaacatctacccatttggaataatgaacatgcatgtatgtgtgtgcctctgaatacgtatcagtgtcaaggggaggagatacattattggaaagaatggatatgataagaaagggtggcagagagcctctaaggaaacttcaggctttgagcattttgaagttgcctatggcccttcaaatcttgaaagcagtttctcctgtacctttcttacctaaaacaggattctgaagtcaagatttaactatagctaaataaacaagtttcctgtttcattttattttatctaatataaacaagggagtagacaataaaatctatctggaagcaagagaaaacaggaaaaacacaaccatgtaaattagcatgtacctaaacactttcataatatttaaattttggaaatatggtccttatgtttgaaatttaatttcaagtctggtctaaagttctcctttatcattcaaacccaacaaatatactcaatcttctagatatgtctcagagtgaaacaaaagagtggcacaaaaatctcctaaggtatatttttttttagtagtc

SEQ ID NO: 830350 - DNA, 645 bp, Homo sapiens
ttttgagaaaagaatttttcattttgtcatagattcacatgcatgaaagtttcaagacaggaaacaacagagcctggtgctaaattaacatctacccatttggaataatgaacatgcatgtatgtgtgtgcctctgaatacgtatcagtgtcaaggggaggagatacattattggaaagaatggatatgataagaaagggtggcagagagcctctaaggaaacttcaggctttgagcattttgaagttgcctatggcccttcaaatcttgaaagcagtttctcctgtacctttcttacctaaaacaggattctgaagtcaagatttaactatagctaaataaacaagtttcctgtttcattttattttatctaatataaacaagggagtagacaataaaatctatctggaagcaagagaaaacaggaaaaacacaaccatgtaaattagcatgtacctaaacactttcataatatttaaattttggaaatatggtccttatgtttgaaatttaatttcaagtctggtctaaagttctcctttatcattcaaacccaacaaatatactcaatcttctagatatgtctcagagtgaaacaaaagagtggcacaaaaawctcctaaggtatatttttttttagtagtc

SEQ ID NO: 830351 - DNA, 668 bp, Homo sapiens
acattattcagatggagggcattttgaaatagcagacaacgtatttcccagaaaagcagaagccagaacaccaaccttggaatactattttgatgtgatgccaagtggtattgatctgccactattcccttttcactcttccctcattcgtgaactctgcaggtgattctttcttacagcagtagaaagtggttgtgaattttagaagataagaatcccaaaggtgcaatggatactaagtcacactccagaggagaatcaacagggtaataaaatacattttaagtgtcttcttccaaaataaacaggtaaagggttgtgttagttgtttgacatgtctgttaatattggagtcatatataaatcacacaaaaaattaagctcatttctggagattttccagagctggttgtggattttgattctgcctttaagcactacaaggcccttgggaaagttaattttgctttcagagcatcagtgaattttcactaaaatgagacgaatcacacctacctccgaagtttgctcttaggatgaaatgagaaaataaacataaaactccycacttggtacctagcacataacatgtattcaataaatgttgtcatactgttttaataagtatagttttcaaaattaaaatactgtaaacatttcacactaaa

SEQ ID NO: 830352 - DNA, 614 bp, Homo sapiens
ttcagagctgcgtccttcctagaggggcctcccagggccaggattgagctgcagacacaaagtcgagaaggctctgcagccctggcctggctctgccacccaccttcagattccaggaagcgtgaggactcctgggcccagggatttcggtgagccgtctggtcacggtgactggcacgtgcactttgatgccctccgacctgggacttcgcatctttctcgagtttttctcagtcaagcctcctgtgccctgtgtgtgcctctggaatcttccggtcagtcccgcctttgctttcaatgaaccatgaaggtgtggccacgctcaccccggggggctggataggaaactcctatctcagaaaaaacacagggttaggaggtcctgagaggcaagcgctgtctggctgtgacctctccctacctcgcacctgccccggcgctcacgattctctctgtgaatgtgtgcagtgtgtcaccactccrccagagaactgtggggttctgggatgctcctaaaagagcctctttcccttttcaaggctttcgggatgtgagaaccagagacaatcgggccagtaagccaggacctatgtcctctcccccggggagccgca

SEQ ID NO: 830353 - DNA, 627 bp, Homo sapiens
ggcttcggtgaaaggtgccctcctacctagcagggtctcggcactctgctgtgttctttgcaccgcggtcactatttcagaaacacggtcctgatactcatcctgataatctcttaagagcrcccgagaagaagaatgaaacgcctgtatatcctggttaagtttctataaaataagaacatacacgattcataaaattatatgattaatgatcacagtataattacataagaatttgttatatatgtttctatagaataataacatacccacacaattaatataagggatatgttgttaactggaagggtgtaaagcagaagttcttcggcccgggcctgtcgatgcccgccaggactgttttcatgctgcctgtgcctcggctcacttacagaagttctgactcaatacatctgggatttctactttcaaagcagtacatgtgattttatgcccttaaagtatttaagaaacagaaagtcaagtgtttcaccaatttccgtaggaagggccgctcactgcacggtggggcgatgctgggcgcgagccgtgtttccgtctattgttgacttcctcacgatgctggctcaggctcagagcctctcatcaccgcctgtgaaatgggga

SEQ ID NO: 830354 - DNA, 575 bp, Homo sapiens
ctccctttgctgctgtgtttgtcaggcagcccccacccgattccagcctccagcagcttcacttggtgttgcaggggggtgactgggggtggggaggtgggaaactacacccagcactgggcttacacccgggagcagcagatgtcagtcttgctgtcaaggttgaatactggtggacttttcccagttttcagggaagttctagcccagttaatatgtttgtccacagctgccattcatgccaccctgtgcaggagcccagtcaaaacacgtagcttcccagaccctgtgcccccatgggaacctgagccatctgagggctgtggacagaagtctccaggccccacttttaatcacagtgagagtcactcaggggagggcgggatgttgactttggagagtccagttttgctattcggttttgtggttggtgtcatctctctgtgattttagaaatgaaaagaaaattagtctggacrgaatgagggaagaaagttcaagcgtcccaaccctgttcttggcatcttttatttcttaaaggcttaaagtctctttaacagccaaaaaacaaatcg

SEQ ID NO: 830355 - DNA, 649 bp, Homo sapiens
tgttgatttcctcatgtgtaaaatcaggaggttgggcaatggtgatatctgatggccctttcagctctaatattctrtatgtctataacactagattgaaaattttaaattctgagccagaactccaagcccaggtgtttcctcatatgagggtttttctctttgtggaagatataagaagttatatcttcttcaactgtcaatttaccatcttcagatccctttctccatcaatgaacctagaaagaaaaggaatgtgtcaaagtcattgcatacaattttttttttcattatttaacagaaatttgaatgccagttgtgtgccaagcacaatgctagatccaggggactcagcaattgaaacgttagccatggtcttaaacctcatggagctcacagtcttgagtcaaatcaagcatggtatgcaagggaagcagaagatgccatacagaagacaggaagggcacctctcccagtctcaaaatatcaaggaaagcatttgggaggcagaatgttgcagacaagggggaccagcatctgcaaagactgaaaggcaatagagaaaatgacacactctagaaacgaaagacatcctggaagaacagggctaagaatgtgaagggaatatggtcacggatgagacaggaga

SEQ ID NO: 830356 - DNA, 589 bp, Homo sapiens
ggaagaaaggacgcaagaccctggacacatgctgacgtacaaaaccccaagtcaaaacgtcagaccacgcacttgatctytcaagtcacccgcttggccttcttccaagtgtacgttccttcctttcattcctgctctaaagcttttgaataaactttcactcctgctctaaaacttgcctcagtttctccctctgccttatgcccctcagtcgaattctttcttctgaggaggcaagaattgaggttgctgcagaactgtacagatttgcggccggtaagagaagcaaacaaaacagaatgctgacaaaccagaaacctcctaggaaatccgaaacgagagagaaaagacaaagacatcctttatttgataaagagtaacacaaaaggaagaggaggaggaaggggaggggaaaaggtgctgaggagaaggagaaaaagcaaacactgagtttcatgacgaaactttagagtcacgaaacgataaggacatcaggaactttctagaatactgctatcatagtgccttcctgatacttttctgcgggtgctggccaattcaatgtaaggaacagaactgacagaatgtg

SEQ ID NO: 830357 - DNA, 624 bp, Homo sapiens
cagcttccaacctgcccaggagtgatccctgattggaagggatgtgtgtgtgtatgtgtagctcttcccttcctctcccataccatgggggctggcctggagagtgtgccttggtcttccttcccactgtgctactgtgctgtgggagctgatttggggagggggttgcagtcgccttcagagctggcagcttgttggggtgtctgtacaattcgggagccccattgaggccacacagctggcttggtgggtctcctagcttttatcagggatacctacctgactcctgtctttctcaattgatctttcaaatgttgggtcagggaaaagggattgtattggcctcttaaaacctcaacatgaaaaaaaccaaaaactcaaatgtaaattatctgtttggagtacacagagggaaatcttgtttctgacccagaacctttgtctgagcccagaggtccctgagaaggtggggctggtgcagggtgatgctggttgkttggttgagggggtagagcttcttggggtagagctttttttggggttgaggttatttgggcctaaggccatgtattcattctcatgctgctaataagaacatacccaagagtgggtagtttataaagg

SEQ ID NO: 830358 - DNA, 468 bp, Homo sapiens
gttttttgaaagaagatagatagaatgctagctagactaataaagaaaaaagagagagaagaaacamataaacacactctgaaatgaaaaggtgacattaccatcgactccacagaaatacaagaaaaaaacttcagagattactgtaaatacctccatgtgtacaaactagaaaatccagaagaaatagatacattcctagaaatatacaatctcccaagattgaaccaggaagaaagtgattccttgaactgaccaataatgagttctgaaattgaatcagtaataaaaagtctatcaaccaggaaaagccctggaccagatggattcacagccaaattctaccagatgtataaagaagggctagtaccaatcctactgaaactagtcccaaaaattgaggagtaaggactcctccctaactcattctatgagatcagcatcattatcatactaaaatcttgtggc

SEQ ID NO: 830359 - DNA, 468 bp, Homo sapiens
gttttttgaaagaagatagatagaatgctagctagactaataaagaaaaaagagagagaagaaacacataaacacamtctgaaatgaaaaggtgacattaccatcgactccacagaaatacaagaaaaaaacttcagagattactgtaaatacctccatgtgtacaaactagaaaatccagaagaaatagatacattcctagaaatatacaatctcccaagattgaaccaggaagaaagtgattccttgaactgaccaataatgagttctgaaattgaatcagtaataaaaagtctatcaaccaggaaaagccctggaccagatggattcacagccaaattctaccagatgtataaagaagggctagtaccaatcctactgaaactagtcccaaaaattgaggagtaaggactcctccctaactcattctatgagatcagcatcattatcatactaaaatcttgtggc

SEQ ID NO: 830360 - DNA, 583 bp, Homo sapiens
gctttagctaccttgtcagcagaagtgttgccctgagcgatgggatctgatgccttttgatggcccttgcagtgaatgactccagcttcctttggaagtaaagcagccttgagaagagtttttattaaagaggcattaatgatggaggacccttgcgtagtgaggaaacttctttttgcctatataacagcatggtggtgcaggatatggaaggcatatttagagtcagtataaatattgacatgtagtcttttgcaagagtgagggctcgagtcaaggcaatgagttcagcttgctgagaggtggtggaagggggcacaaagtatatgcgtcaggtgtgaggaagaaaatagattttgcaagttttgagaactgtagagagtgagttgagcatagttttttattttgagggcctctaaaagtattaaagcagcggcagccgccgcacrcagacatgagagctaagctaaaacactaaggtcaagttgtttggacaaaaaggctacagggcgtggtcccggctcttgtgtaagaactctgaccgcacagccctgcactttggctgtgtgtaatgaaaagggag

SEQ ID NO: 830361 - DNA, 583 bp, Homo sapiens
gctttagctaccttgtcagcagaagtgttgccctgagcgatgggatctgatgccttttgatggcccttgcagtgaatgactccagcttcctttggaagtaaagcagccttgagaagagtttttattaaagaggcattaatgatggaggacccttgcgtagtgaggaaacttctttttgcctatataacagcatggtggtgcaggatatggaaggcatatttagagtcagtataaatattgacatgtagtcttttgcaagagtgagggctcgagtcaaggcaatgagttcagcttgctgagaggtggtggaagggggcacaaagtatatgcgtcaggtgtgaggaagaaaatagattttgcaagttttgagaactgtagagagtgagttgagcatagttttttattttgagggcctctaaaagtattaaagcagcggcagccgccgcacgcagacatgagagctaagctaaaacactaagktcaagttgtttggacaaaaaggctacagggcgtggtcccggctcttgtgtaagaactctgaccgcacagccctgcactttggctgtgtgtaatgaaaagggag

SEQ ID NO: 830362 - DNA, 576 bp, Homo sapiens
atccaaaagtagatgtttatgcaccttctatttacgacattggcaccaacmagccaattacagcagtggagataaggccatgaaatacagacataacttctggggtctactgctagaaattaaaagatagttcctaaagaatggggaactgctttaagttgagaaaccaatgcaaaagtatattttaaacgatttctgaaaaaatacactccatgcccatattacagaaattctcggtattatcctaataaaaaatctggaatagtctgtgagacagattcaactgcagtgtagtatataataaaaatagagtacctggttttaaataccatatatactgtgataataattagattcctatctccagaccagatattccctctgagtaaacagactcacagtgaacttccaacttcatatcctatgtgagtatctcaaagtcctaacatgtccagaaaatccttatgcctaccctactctttctcatactatgtttgttgctcaaacaaaaacccagaaatctatcctggatttctcaatttctgtcagcccccatactgcatccaaacttgttaa

SEQ ID NO: 830363 - DNA, 647 bp, Homo sapiens
tgctcatcctgtcaaccagcaccagttgttacctcatcccttacaargcttttcttaatagctattaccactacttaaagttatatatttactttgtattctgtcttttctaccagaatttaactctatgagatagggtctctgtcttgttaactgcagtattctcattgtctggaaaaattccaaaacatatttgctgaataaatgattaaatcatataaaatttaacttggtaatgagcatttatataatctgattaaagtacaatttcttttactgcctcattagccttttgaataaacatcagcaaaacactatggtatacaggaccagctttttcactgtttctctaattaaccatgttgacctacttccagctccccctctgactcgattactaaccagccttcttacacgggagagttactttgcagagcatcattgatagaagtaattttttttaattacactttaaattctagggtgcatgtgcacaacgtgtaggtttgttacctaggtatacatgtgccatgttggtttgctgcacccatcaactcatcatttacattaggtatttctcctaatgctatccctcccccaatcccccagcccctgacaggccccggtgtgtgatgttccctgacctg

SEQ ID NO: 830364 - DNA, 670 bp, Homo sapiens
  misc_feature 1, 2, 3, 4, 5, 6, 7, 8, 9, 10, 11, 12, 13, 14, 15, 16, 17,18, 19, 20, 21, 22, 23, 24: n = A,T,C or G
nnnnnnnnnnnnnnnnnnnnnnnnttttgtaaacaatacattttggttataaattcacactastaatttcatagcaaatgtataacacatgtaccaccatgaagtcaaggcatgctgtaatctgtaatcagactgctttgtgaatttactataacagaatgattagacactggatttaatcatgccatgtgtgggatttggcattctatcaattgtagcccagctgccagtcctgccacagtgatagaaacttaccagtttttttgtaataaggcatgtctgcagctatgtcttttattatgatagagagagggagagagacagaggtagggagagagaaacaagtatgtacatcacctgcatttgcagagatggcatgactctcataattagaagcttttcttacatactttactacccaattgtgtctatttgagtagtaagcaccatgaacccaagaaatgggtgtccataaagtttttatgatcatactaattctaataaattcagatgaggatgcactaatactcaaaaagttcaaattgtgttatacttcagtatacagtagcttgctatttcattatgtactcaactttccaagttctcaagttttataagtgtgtgtgtgtgtgtgtgtaattatagaaatatgcttattataacaaatttt

SEQ ID NO: 830365 - DNA, 517 bp, Homo sapiens
gcagggatccaaaccttcattcctgaagggtctgtgccatttgtagtccttcgtggattgggtcattgtaagtttccccttgaccttaatcagggcataktcatactaagaaatgccctattggatctcctgtacttcacatatactattccttacctgcattgtggagtaatagactgatttcatcttgatagtttgggtcaatcaccacagccaacactgtaactcccctcgtaagctgttgacttagaggaaaagaggagcccaaagtggtccagggcaatcttaacttccaatttaatggaattattgttgtgtctcctggtggcagcattccccactctggaactaaaacctctgggccagcagaatgtaatatcacagtaacacaaaacaaaaatgttgctagtgagtcactattgatagggacaggaggcacgagggtggcatccctatggagggcttcacccttaagcctggacccccggccctaaactataaaaggcattccagtttt

SEQ ID NO: 830366 - DNA, 517 bp, Homo sapiens
gcagggatccaaaccttcattcctgaagggtctgtgccatttgtagtccttcgtggattgggtcattgtaagtttccccttgaccttaatcagggcatattcatactaagaaatgccctattggatctcctgtacttcacatatactattccttacctgcattgtggagtaatagactgatttcatcttgatagtttgggtcaatcaccacagccaacactgtaactcccctcgtaagctgttgacttagaggaaaagaggagcccaaagtggtccagggcaatcttaacttccaatttaatggaattattgttgtgtctcctggtggcagcattccccactctggaactaaaacctctgggccagcagaatgtaatatcacagtaacasaaaacaaaaatgttgctagtgagtcactattgatagggacaggaggcacgagggtggcatccctatggagggcttcacccttaagcctggacccccggccctaaactataaaaggcattccagtttt

SEQ ID NO: 830367 - DNA, 350 bp, Homo sapiens
tgacacagtaacatcttaatttgggatgctataacaaagtttcatagastgggtggcttataaataatagaaacttatttcttttagttttagaggctggacatctgatatcagggtgccagcatagtcaggttgtggtgagggctttctttctgattgcagatgactgacttttcagtgtatcctcacatggaggaaagaatggagagagctctctgaggatctcttttataagggcactaatcccattcatgaggatttcattctcataacctaatcacctttcaaaggacccacccccgaatactgtcagtggaaggttagaatttcaacgtaagaattttggagag

SEQ ID NO: 830368 - DNA, 350 bp, Homo sapiens
tgacacagtaacatcttaatttgggatgctataacaaagtttcatagagtgggtggcttataaataatagaaacttatttcttttagttttagaggctggacatctgatatcagggtgccagcatagtcaggttstggtgagggctttctttctgattgcagatgactgacttttcagtgtatcctcacatggaggaaagaatggagagagctctctgaggatctcttttataagggcactaatcccattcatgaggatttcattctcataacctaatcacctttcaaaggacccacccccgaatactgtcagtggaaggttagaatttcaacgtaagaattttggagag

SEQ ID NO: 830369 - DNA, 520 bp, Homo sapiens
atattttagtattattgatgcttttcccacctgctttttaaataacgggccctacattttaawtttgcagtagacccttgaaattatgtagtcaacccttgaaccagtttacaaatggagaaagttgagcatgtctaagcctatgtgaaagataaaaaatgattaatagtatgcctaggtaaccttagccagagcatgggtaaaccctgtttacttacatatttggacgcaggaaggtaggctgcacaacatatgtttatgtattcataacactttaagttccctaaatgtttctacttgagagaaagagaatctatgggataaaatattagttttattctgtgctgtaatcaattctccctcttcccacttttgggagtgctaaagtgagggattatttgagattttgttgtaatctgtagaaattttataacaaataactaacattattgaaaatctaatcttttataaaaaaaataagagtgctattaatagtaaaatctaatataaaggagagaaa

SEQ ID NO: 830370 - DNA, 617 bp, Homo sapiens
atttatgtatatttgcaatatgtagtgcatttgtagtataataaaatattaaaaataaatttatttatttgttcatttttttttgagatggagtcttgctctgtcgccaggctggagttcagtggcttgatctcagctcactgcaacctctgcctcccaggttcaagtgattctcctgcctcagcctcccgagtagctgggactacaggcacgcaccaccatgcccagctaatttttgtatttttagtaaagacagggtttcaccatgttggccaggctggtctcgatctcttgaccttgtgatccgcctgcctcggcctctcagagtgctgagattacaagcgtgagcctccgcgcccagtcaataaatttattttttaattctaaaatttacagattgatatcaaacactctaggcttagaataaatatgtgaaatatacaatacagatagaaagtgagatgtaaattaagatatttacgatgactgggaaagcatacaarctattctgattataactaccttcattgtcttaaagcattacattggaaattagtgtgataaaagttacaattggcatcatgtcactcgtcttgttctataagcccttaagaaat

SEQ ID NO: 830371 - DNA, 617 bp, Homo sapiens
atttatgtatatttgcaatatgtagtgcatttgtagtataataaaatattaaaaataaatttatttatttgttcatttttttttgagatggagtcttgctctgtcgccaggctggagttcagtggcttgatctcagctcactgcaacctctgcctcccaggttcaagtgattctcctgcctcagcctcccgagtagctgggactacaggcacgcaccaccatgcccagctaatttttgtatttttagtaaagacagggtttcaccatgttggccaggctggtctcgatctcttgaccttgtgatccgcctgcctcggcctctcagagtgctgagattacaagcgtgagcctccgcgcccagtcaataaatttattttttaattctaaaatttacagattgatatcaaacactctaggcttagaataaatatgtgaaatatacaatacagatagaaagtgagatgtaaattaagatatttacgatgactgggaaagcatacaagctattctgattataaytaccttcattgtcttaaagcattacattggaaattagtgtgataaaagttacaattggcatcatgtcactcgtcttgttctataagcccttaagaaat

SEQ ID NO: 830372 - DNA, 627 bp, Homo sapiens
ttgttgttgtcttttctgtttcagcagacaatcatctcatttaagaacagactgggggccgggtgcggtggctcacgcctgtaatcccagcactttgggaggccgaggcgggcggatcacgaggtcaggagatcgagaccatcctggctaacacggtgaaaccccgtctcgactaaaaatacagaaaattagctgtgcgtggtggcaggcgcctgtagtcccagctacttgggaggctgaggcaggagaatggtgtgaacccgggaggcggagcttgcagtgagccgagatcacgccaccgcactccagcctgggtgacagagctagacaccgtctcaaaaaaaaaaaaaaaaaaaaagactgaaatttctaacctgtcttctgcgtactgatcattctaatttcagttcatttttaatgtgtttgcagtgttctttcattttatgtgacaactggtggacagtctacagcctggctggtggtctatcccctagttcaatttgaaaagcttttgatatgatatttattatcagattgacacatkagaagtttgttagtgagttcttgagttcacactcaatttcatgctatagctttgttgaggtttttccttgtgctcttctcctt

SEQ ID NO: 830373 - DNA, 506 bp, Homo sapiens
gtaatcatggacaaaatagaaatgtatataaggaatccagaatagcatctagcaagtagaacaagctcaatgaatgctggtatgtctatatctatatctatgttcattattattacatcagtcaatcaatcaatcaatcagtcatctgtgtgtatgtgggtgggggtgtgtgtggtgtgtgtgtgtgtgtgagagtgtgtgtgtgtgtgtatgtgtgtagctatatctaccttcatctctatacatggtgagagaaacagagaaagagaacaaattatgtatgtggtaatagaagaagaaaggagacctttttctaaactctataaagtaaaatgtttactagttcaatagggtgaaataaaagagatgaaaatcatatttgaacttgatatgtcmtaggggtatctcgcctttgaacagaagttctgaatctcatattctcttattaagtgctccaacccatcacagagcttctctattccacattgcaagagaagccattctaa

SEQ ID NO: 830374 - DNA, 356 bp, Homo sapiens
actctgtctcaaaaaaaacaaaaatgtacatatgtaagttgcctccaacttttatgtattataaatatattcttgtacaattctttcaattctttgtrtggatatatgtttttatttaccttgggcaagtccaggagtagagttgtatcaaattatgtgtctatttcattttatgagagttcaaaatagatttccaaagtggctgtacatataggagtttctgtttctccacacccttttacatatttagtgctgagagtctttttttgtatttccctggtgactaatgacattgaacactttttatgtgcttattgaccatttttgtgttttctttttgatctgtctggtcaaat

SEQ ID NO: 830375 - DNA, 576 bp, Homo sapiens
taaacaaatgctctttgggatccttcatactttttaagaatgaaaaggagttctgagatccagaagctgagaactgctggtctgttctcttctatacacgctttggaggttaatgaagaaagaagayattacattatttgtattagtgttactgaatattattttgaggaaggagtgttctattcaaataggaaaaatgattcttgctcaggttaattttttaaactgacagaaatgagtaatggctgtgaggtgtgtgttgtctttatttcagtctgtgggcattcagtgagagtggtgacgaaagtcatctgttaataatttccagtgaatggattgtctgagcaccaaattgtaaagtaaattatgacaaagctaaatgtaaagcccttagaatggacgccggacctagttgtgtcaggtggattagaactcccctgtctgcttggacatcaacaaaaccgctctgagcctcagtttcttcattttaaagtgattaagttgaactaatcattttgctgatcactaatgtgccccaagagctgccagtgtaatttcctttgaagaatcaaaata

SEQ ID NO: 830376 - DNA, 539 bp, Homo sapiens
cacttatgaagcttagtttggctggatatgaaattccaggttgaaaattattttctttaagaatgttgaatattggcccccactctcttctggcttgtagggtttctgcccacagatctgctgttagtctgatgagcttccctttgtgagtagcctaacctttctctctggctgcccttaacatttttgccttcatttcaaccttggtgaatctgacaatcatgtgtcttggggttgctcttctcgaggagtatctttctggtgttctctgtatttcctgaatttgaatgttggcctgcctgctaggttggggaagttctcctggatatatcctgaagagtgttttctaatttggttccattctcaccatcactttaaggtataccaatcaaacgtagatttggtcttttcacatagtcccatatttcctggaggctttgttcatttcttttcacttttttttctctagtcttgtcttctcactytatttcattaatttgatcttcaatcattgatacccttccttcgcttgataaaat

SEQ ID NO: 830377 - DNA, 528 bp, Homo sapiens
aataaattctttgtcttaattttggaaataacagaagatatctagtggtgggagataattaggaaatagaatccttctagtttcttattttcaatttcatatttatttcccagatgtgtaattttaaagatactgtatacatgcatttgagctacttaaaatgttaaatatatagaaattacttaatacatttttctgaagctaataatgaatatctggactgcttaatggataataaattctccaatatatgttgtattctgtaagtatgtggtgttatcccattatctaaatcagatggataaattcaatgtacacttgtctaccaaagatgggaggtattacacaatctattttcaatttatggcaaaaggatgtagtaaattacacaattttatgtayaaaatgaaggcaggtactgagaaatttactcataggaaataaaatctattcatttgagaggaaattaccatatgctagaagatgttatgctttattttctaatagccataatttgttgaatcctta

SEQ ID NO: 830378 - DNA, 572 bp, Homo sapiens
aattatacaatgcacatgtaactaaaattatgtaactttgatacatacaaaagtatatacaaarcataataagtgaacacccatgaacttatcacacaatttaagaactactagaacattaccaatatccttgtatcacctgtgcactactcctagttcatcatttatcaggctaatgaagtctcctgttcctagttgctaagagggtttctttttttaaattatgaataagtagagattttatcaatctttttttttagatcaatcaagatgatcatgtgtatttttttccaatcagtgtggacatgcatttaaggttttctaatgtaaaaccatctttgcattcccagaataaacttaatttagtatgtgagttttaatatattgttggatttgttttataaatatttagcttagaattgtttcatctatattcatcggagagattaatcgctacttttttttccctcatgctaacttcgcttttaatatcaaagaataacagcattatagattgaattggagactatttcatgaaaattttaatttttgaaagagttttcagaatatta

SEQ ID NO: 830379 - DNA, 490 bp, Homo sapiens
tgtgcatgcattattacaaatgaagacaagggtttcttagtaagtaatatccccttgaggtcttgaatgcttttctgcttcatattcatatgtatctataatatttttaaaaggcccatggcattgcaggcatagtaacccatgcacataatatatttaaggatttgagagcctggatctgtattcaaaagcttctgtatgtggatcctaaggacctacctgagtgggaccttcctcccagatctcttagagtcccatcagcccctgtgcttgggcatcttccagcccaggagaaacagaaaaacaaatgagtgagtggccatgagatgatgcctgtctaattgattcatttgaacatacagagagaaggtcatktctggggtgaagcattttcctcaaagaaaagatagctgctcctgatgaaacttggcagttgttccgttgtacattcattctccttgaaaaactgtgttgtgactcagtgagtcag

SEQ ID NO: 830380 - DNA, 647 bp, Homo sapiens
tctctatgaatctgggtaattttaaacaagagctcttcatctttccttgcttcagttgagaaatcaagacaagactaataattattatgcctgctcatgaagaaagcaaatcaaaagggacagtgaatgagtatctctggagtcctttctgcagaaagcttggaacaaagtagttaatgatcattagaattcccagtgaccagagagaaaagtaaggtttctatgactctaattcgtagtggtgatatcaggcaagtttcttaaccactgtatgcctcgtttcctcatctgtaaagtggattaataatagaaactaccttacacggttctgtggaatattaaatcgctatgaatctcctggtaagccctctgttttggctcttactatcactgttattatgacaaaggggcttaagattctgctttgatatgattatataagcacacaacttgctcaaaaagaaaaatcctgactgattatagatacaagtctaggcttggaacatagattttataacaggcttttctttacatggtgaaaagttgtaaaaaaaagttttttcctcctcattctgtggtttagaggtatgtacacatacagaaacacctamaggatcaagtatcttaaaaaaaagttaggttgatac

SEQ ID NO: 830381 - DNA, 571 bp, Homo sapiens
aatataagtatgtgtatatatatatatatatataaatctaacataaatatatcctatatatcttagaaatctaagatatatacataccttgaatatcttagatatatctatcttagatttaggaagtctgagggtttcctcagtgtagtgtagaggttatctcactcacttgcctaacacgagatgaggccctcagatagaaagacagatgttatataattataaagcgtctattcaccgaagggacacaactgtcctaaatatgtctgtttctggccacagagcttcaaaacttatgaacaaaatggataaaccagaaagaaaatagaaaaatccaattacagttgcagacgttaacactcctctctcagtaattgatagattcaggagaaaacaaatcagcaaacattttagagaacagaacaacaccatccaccaatggatctaatagactttataaagcaaaatcacaatttatgtagaaaggcgagccaaaaaaatcaaagaaaagcaagatcatattataagtaggaaatcacgartggtcagagtgcagaaaagtgacattatt

SEQ ID NO: 830382 - DNA, 607 bp, Homo sapiens
tgaaagcagaaaccccttataaaaccatcagatctcctgagacttattcactactatgagaacggtgtgggggaaaccacccccgtgattcaattatcagaacacatggggattatgggagtataattcaagatgagatctgggtggggacatagagcacagagccaaactatatcagttatagcaattagttcagatttgagtgtttttttctttttcatttgcatctcttgggtactgaaacaattttgttgtaatcccttcaaagcagaataaagtgaatcactcttttccattctcaatgttttttacattttagcattttaaatgagaaactactcatgaaatcaatcacatgaaaaggttttacattttagcattttaaatgagaaactactcatgaaatcaaccacacgaaaaggttttacattttagcattttaaatgagaaactactcatgaaatcaatcacatgaaaaggttttacattttagcattttaaatgagaaactactcatgaaatcaaccacaygaaaaggttttacattttagcattttaaatgagaaactactcatgaaatcaatcacatgaaaaggttttccttgaa

SEQ ID NO: 830383 - DNA, 658 bp, Homo sapiens
actaaagaaaaagaacaaaagttgtaataaagaaagctgccaaacatcctaaaggaactattaacaatattaataattatagaggtcatytaattttttctattaagtgaattaaacttaatatgtcattttgtacttccgaggcttagggggaaaagctttgcatattcctgaagaattttcattacctatagaatattaatttccacttacggttcagttccaagttacagtgagatagtgctgtctcttccaaactttggtatccattaactctcttttgtgactgtccttaaataggccaagtaaacttagctgaagaaggaagcaaagatattaacaacgcaccaaagcatcttgctgagtcaaagtccaaggggataagaagtctcaagttaggactctggaaaaattggaatcaaggaacggatcactatcagaattccctttccaacttcctgctttctatctctccgtttaactcactgtactttcatgtagccaatcatatttatttatttccaatacttgaatcagaatatgatagtcaagagtgtacatgtttacatttcattacttaaaaatagataacaagttgagttgaaattttagtaggatccaaactaaggaaccttcctaatcagactgagaaggattc

SEQ ID NO: 830384 - DNA, 608 bp, Homo sapiens
tttaggtctacccaagaactccaacaactgcctgctgggaaaagaaaaagagggaaatgcttaatgagcaaagatctatgtaaaagtcctaaagctaaatcttaataggaaaggctttatttcaaccacttggaggcatacatgaaaatttagcacaaaataagggattggaaaataggcttaccatattgatgacagtggtggactttagcagacagagaatatgcaaagatgcaacaggtatgcaaataactccaggcagtttcagcatgtcacgaatatattttataggcaatagttactctggttcttggttaatccaaatattttccagtgaatttatttgagaaaaataattgagtgaaataaatgtaatgtttcagattaagcacaagttctaaagtaaatattaatttcaatccttcaatcttattcacatcgcctatgaagcgcaaaagctggctagtgtttatgaggtgtttaagtgtgtatgtatgtgtgtatgtttcagatggaagaggagggagaataagaaaacgttaagaacaaatgacacaacttttgaccaagcatattttcacrtaaaattgaaattaaagtcccatgtt

SEQ ID NO: 830385 - DNA, 655 bp, Homo sapiens
aggaagcaaaaaataggatgctgtgagaaagcatagtgagtgggtggttggagcaactctagatcgggtgtttagggaatccttcttgagaagacrgtaggtatgctgaggtctgaaggaagaaagacgggggtcagggagattccaagaagagggaggagccctacaaagggttaagacaagaactgagcatgttttaggaaaagaaagaaactggtggatgagtagagttagtaagaacaagaggtaggtgaggtgagcagcagccaaccatgcattgcccaatagtctgtgctaagaagattccatattattccaagtgctgtattaaacggttttaaactggatatgacatggctctatttacatacagaacagttctctggctaattgtaataataccctgggattggggcagtcagcataccaagaaagggattgggcaaaaaaagtgaggaggatatttttatattcaggtaagagattatcaaggcttaaatggttcatagaaatagagacatagatggatctgaaatgttttttaatggtcgaatacaatgggcctagggataaattcggtgaagagagtggtatgcgagatgaggaagagaatgtaatcaagaatgattctgaggtttctgggatgaggacctgg

SEQ ID NO: 830386 - DNA, 585 bp, Homo sapiens
gcatatcagttggcttttcctgtgtagcaaactaccttatcataggcttaaaatgacagttattattttttatgatcccatgggtcagttgggtggttcctcttgtgtggggtatgtggctgatctccaygggcagctggtggctcggctggggctgtatgatctagcatggcctcactcacctatccggcattaagcaggctaactggtcctgaagggcttcagttgggagggctcatctctgctccaggtagcctctcatcctccaggtggctaactcaggcttgttcatatggtggactcagggttccaacgagcagcaaacaagggcaagtgccaaggtacagtactattcaaagctctacttgcggggctgggcacagtgattcatgcctgtaatcccagcactttgggaggctgatgtgggcagatcacttgagcccaggagttggagaccaggctaggcaacatggtgaaactccatctctacaaaaaatagaaaaattagctggtcatggtggcctatgcctgtagtcccagctaattgggaggctgaggtgggaggatcacttgagcctgggaggt

SEQ ID NO: 830387 - DNA, 594 bp, Homo sapiens
agtgctcaatattttccttatgctaatcatctaatagttaaatgcaaacaatagaacattcccataatgaaattctattacacttcartctactttttaaagaggccaggttctcatctcaaatcatttttgttggcatttctactaatttttcatgttttaaacaataactgatattttaccaaaaaaaaaaaaaaccttgtaatcaacttccaaaataacagctattttcatatattagtgaccttatagaaagaacgcccagaacttaataaaaccccagaagactttagaaagtcctggttcacaggaacacagtgcttctttggtttcaggccattggctacctcattgttgggattttccaagtcagatagtattacacttggaatatgccagtgaacattaataatcatgaccataaatgaaaagttggccttctccaatgggatataaaagactggcgctccacacctcctcagagcagcagagggcagtgaaagcactggtaatggataatataaacccagtattaccatcgggagagaaacgtacttttttacaaatacattttccattttaaacgaacaccat

SEQ ID NO: 830388 - DNA, 561 bp, Homo sapiens
cacaataaggcaaagttcctctgtcacatattccaaataacccatattccaaattatcttcttgacaattttgagtattttctctacctgtcacataggattaagyagtaatggtattaatctcacaatatgatgaaaagtatccataggagcacaggcgaagagtcagctctgctgtattcttgtttttctgttgtgcttgaaatgtgttatctttaattattaacttcctttcagacgtattttaataggaatcattttgtgagagtcaatttccttgaaactagataattatatggaaattcacttaatcaggcatagtaaaacataatatattgcaaaatactgaaagagaatgaattgacgagaaaccctccaccctgctgggaggtgggtcccctttttggtgaggtcaccaaagcactgtgggaagtacataactgtctgtctggcccacagaccagactggaccaggataccactgtaaatccacatagtaaagtagattcaatgttagttagtgctcatttccttttcattttgtagatgaaaataaatgta

SEQ ID NO: 830389 - DNA, 663 bp, Homo sapiens
tagatctgtattctgcaggcattttctcagctggactcaacagccaggatctayattctagaagagatgctacaggtcagctaatatcttgtttgtatttcaaactaggaagcaaactcaaagttcaatatttgggttcttaaattgtatgttacttgtgcaatatggcagaaacaccaattttctattattattttttaacttattttgggttcaggtgtacatgtgcaggtttgttatataggtaaattgcatgtcatggaggtttggtgtacagattatatcatcgcccaggtaataagcacagtacctggtaggtagttttttgattctctctctcctccccaatccatcctcaaataggccctggtgtctgttgtttccttctttgtgttcatgtgtactcaatgtttagctcccacttataagtgggaacatatgatatttggttttctgttcctgcatgagtttgcttaggattatggcttccagctccatccatgtggctgaaaaggtcatgatcttgttcttttttatggctacacggtattccatggtgtatatgtaccacattttctttttccaatctactgttgatgggcatttaggttgattccatgactctgccaggaaacgccaattttctgaagctgccatcgtgtt

SEQ ID NO: 830390 - DNA, 657 bp, Homo sapiens
gaaggtactgaatcaataaytaaaattcaaaatatgacattattgtaaatacatataagaaactctagctacaaagttttctagacagatttgtttgtaaatgtattgctattttggaaatacaatattactttccttgcagcaagaataaaccttggagaaatttaaaaattgacttgtgacccacttaactgtgtaaaaactgatgcagaaattaagtcatttaaaacaagaatatgatttttattttataaaaataaaaatatttaaaattttctttcattattactattataaaaaagaaatgggtggcaaattatagcaactaaacatatagcatctatcatttataatttatagttatatcatattttcaatgataatgactgtgagtcccctaaattttttaattcctcaaaacagttaagtggaaaattaagaaaaaatttttgactattttatgattgaaaattagctctttttgtcacagacttaatggttaattttttttaaataaaatataatccaaggaaataattttataatatgattacaggcatttactggtgatcgaattttctagagaaaaatagttgaaactgtggttattactaaatagaattccttttttgactagtgttatacaacttattaaat

SEQ ID NO: 830391 - DNA, 646 bp, Homo sapiens
ctctttattttttattattgataagacataatgttaggatcaaaaagggccctaaagatgaccttgaccagtcctgtactttgacagatgaggaaactgaggcctagaaaagtaaagtgaatcattaaaggctatacaactgggtggtatctgaaccgagtctaaagcgcaagtcctctgactctcagaaaagtctttcttccattaccatgctgtttcccagggctttcttgaaatttcatgtaagaaagagagagaaagaggtatgtgcttgagtttcaaaactttggagagtgttgaatatttaatgtcctgactacagagtttgcaaatgctgtgctgctacctagtaattgttattaaacaatgagatagatagatagatagatagatagatagatagatagatagatagatagatgatagatagatatatagatagatagatgatagatagatagatagatagatagatagatatcatttgaatttttataaaatttacctgtgctatcaactttggaaaaatgcattctgcctrtatgtgttgtactggcattatacagaaattggtcaggaaactgtgttgatctacacagattaaactttgcctttataatggaaatgtattaaatatgtacatttg

SEQ ID NO: 830392 - DNA, 646 bp, Homo sapiens
ctctttattttttattattgataagacataatgttaggatcaaaaagggccctaaagatgaccttgaccagtcctgtactttgacagatgaggaaactgaggcctagaaaagtaaagtgaatcattaaaggctatacaactgggtggtatctgaaccgagtctaaagcgcaagtcctctgactctcagaaaagtctttcttccattaccatgctgtttcccagggctttcttgaaatttcatgtaagaaagagagagaaagaggtatgtgcttgagtttcaaaactttggagagtgttgaatatttaatgtcctgactacagagtttgcaaatgctgtgctgctacctagtaattgttattaaacaatgagatagatagatagatagatagatagatagatagatagatagatagatagatgatagatagatatatagatagatagatgatagatagatagatagatagatagatagatatcatttgaatttttataaaatttacctgtgctatcaactttggaaaaatgcattctgcctgtatgtgtygtactggcattatacagaaattggtcaggaaactgtgttgatctacacagattaaactttgcctttataatggaaatgtattaaatatgtacatttg

SEQ ID NO: 830393 - DNA, 646 bp, Homo sapiens
ctctttattttttattattgataagacataatgttaggatcaaaaagggccctaaagatgaccttgaccagtcctgtactttgacagatgaggaaactgaggcctagaaaagtaaagtgaatcattaaaggctatacaactgggtggtatctgaaccgagtctaaagcgcaagtcctctgactctcagaaaagtctttcttccattaccatgctgtttcccagggctttcttgaaatttcatgtaagaaagagagagaaagaggtatgtgcttgagtttcaaaactttggagagtgttgaatatttaatgtcctgactacagagtttgcaaatgctgtgctgctacctagtaattgttattaaacaatgagatagatagatagatagatagatagatagatagatagatagatagatagatgatagatagatatatagatagatagatgatagatagatagatagatagatagatagatatcatttgaatttttataaaatttacctgtgctatcaactttggaaaaatgcattctgcctgtatgtgttgkactggcattatacagaaattggtcaggaaactgtgttgatctacacagattaaactttgcctttataatggaaatgtattaaatatgtacatttg

SEQ ID NO: 830394 - DNA, 624 bp, Homo sapiens; identical to SEQ ID NO: 818337

SEQ ID NO: 830395 - DNA, 598 bp, Homo sapiens
cacaggaattgtggctgctctgactgtatttctccccttcaaaagaggtttcattggaaatgatgtcatgacatggactgagaagatagactagctgctttctcctctatgcccaggaggktgcccttcacatgaagaacccttttcaatcattccagactgaccaaaatctatgcaagtggtaagattgtttaaacttccctttgctggaagttcacctcaagtgtctcattctctaaggttctcaaggcagaggtcttatcttggttgttgttggtccccagttattaaagtgcaattattacttcaaaaacaactggagaaaagcctcaatacgtgatggtagtgagagttcaatggcatgccacaccagttcctggtgaagtttatgagaagtcaagaaattggtgcacttggagaagagtatttgggggagaaagaataggatatgcaaatgtcttgggggtaggaaacatggaaaaatgcatggaagaaattaggtatgaatatgtgtgtcaattacagagaaacactgttgggtacagctctcctacctccacatgtttttttttttttttctttgatattggaagctcca

SEQ ID NO: 830396 - DNA, 513 bp, Homo sapiens
tttaaaattaagctgcagccaaaccaccttgggcacctgttcttgggatgtcctggggctatatcatgggccattgttcactcacatttggctcagaataaatatcttcaaatattttacagwgtgaatctttttgtcaacattgtatgagcaataagttaaagaagaatatttaaaactgaaaaactaaattgtaaaatgttaagtagtaaagtgggactaagagcattaaaaatcatgtaaatactagagtaaaaaatagagtataaaaatactaaccattaaaattatgtaaataaaaagggaattattagaaccaaatataaacctttttaaatatcaaaacttagctaagtcaaaaataataaatacacatcttacaaagaaacatagcaaatatgtcataatacacataactcaatgaaaagttttaaaatttaactcacaatgaaacaactaaattttgtatcttgtactaaatacatttaaaacaaatgaattgtgaaaggctaa

SEQ ID NO: 830397 - DNA, 555 bp, Homo sapiens
aaaatggagaaaatgtctccagggcatttcagagaccttcatggaagcccctttcataacagrtccagaagtcgagaagggaaaaatggttttgtgggccaggcccagtgctcaaatgctctctgcagcctctggacatggtgccctgcatcccagctgctccagctccagccatggctaaaaggggccacggtatagcttgggccgtggcttcacagggtgccagccctaagccttggtgggttgcgtgtggtgttgggcctgcaggtgcacagaagacaagaatcatggtttggaaactttgcccagagttcagaggatatatggaaatgcctggatgtccaagcagaagtctgctgcaggggcagagctctcatagagaacctctactggggcagttcagaggggaaatgtgaagttggagcccccacaaagagctcccactggggcactgcctagtggagttgtgagaagaggaccactgtcctccagaccccagaattctagagccaccaacagcttgcaccgtgcacctggaaaagctgcaggcactca

SEQ ID NO: 830398 - DNA, 395 bp, Homo sapiens
cctcttgaaacagctcttgtaagctgtttcagcatggtagatttgagttgtccttaatgaaatattatttcaataactgaaaagctgagtaatagtaaaatatgtgctttgttttactggaaataatctcattctgaaaatgaaaaattatattttaatcattttgctatctctctttaatagactaagccatattggctaattatcttatttttcattggcaaaactgtcaaaaccaacataatagcctcagtcacagtattttgagtgtaataaatgctgtctttacccttgagaatgtgtcctgcagcaaccaacmgttaacatgttaaaaaacaaaagctttaaaaaatgcgttacatcacggctacaaaaggcaaatgttttctaatcac

SEQ ID NO: 830399 - DNA, 613 bp, Homo sapiens
gaggaattagagtaagaacaaaaaaagtaaggagaggagaagaggtcttagtgacaacacacaggataaaattaacagtttaagaataattcggtagctagctgagtgaatatccttaatttgattgaaatttacttagctggtttttcccactaataatcttaatgttcttaacaaaatgcagcacaaaagttgatagtgtttacagttagaagccttacttaaatagttacccgaatgatttgacaagtttccacatattaatggaactttaacaaattcatgatcattttagactatactttcctcaagagagtaggaaataatacttctacttgaaatgttttattttcagagaaatgttgtgggatgaaattagataacatatgtgaaatttctgtgctaataataaagaaatttaagttctgttaatttcaaataagccttctattcatatctgttgatatcttgaaattatgacaatctatgtctgcctccctacttcttakttgctaccggcttaatttcaaatgtcttaatttaaatattcttagattatccttacgtatattttgagtgttctctttctcctaaaatgatataaaaagcattg

SEQ ID NO: 830400 - DNA, 625 bp, Homo sapiens
tctgttcccactggcccacacccgtcttcaggcaggaagtccccaggaccagcacagcccctccccacacagyggccttagcagggaggggttcagcccctccaggctgatccagggctcagggcccaggtgggtcgctgcagcgaatcccctcattgggctcatcatcacccgtgctcatagactgtccccatgtagattccgcagatggtgaaccttcagctaccagtgtgtgcgtccaagacttttccacaaaaacaagacatcgcagaaactctccccgcccaggttgtgtgtctgggctccagcctcagttccctcaatctgaggtcctgctcccattgtgtgtcccttgaaccctgtccaggagatggacagaggctgcctgcctgctcccgtttccacaccctggccccaggatgcatccttctgcctactggacattagctgccacttccacctgcagcaaggagccacggtcacaaaccttaggccctgggccctgcctgatgggtgagaccatccttgttggtggggtctcagacttggtacccgtctctggtccatcctgatttacttgaaggacacagccatgcctccctacaggcagcagccgagcaaggac

SEQ ID NO: 830401 - DNA, 519 bp, Homo sapiens
ctctgacccccttaaaggtgactggggagccacagaggatctgctgcatggagatgtcaaatcctagtgagcagtctggatatctgtgacttgctcggagtggctgcaggggcwggtgggttacactattcatgtggacactccctgtagggagaggccagggattctgacagatgcaccactttttttcaccctgtttgatattactctccagctaggtgagagtgatggaaatcatgcagcaaacaatttaatgattatctgctttggggttcttgcaccagaataactgagtgttgagttgtcatgagcaggcaagaaaggctagagctgcatgtcgtgcaggcagagagtctgtcagaaggaaagggaattgccacctgtcctagaaatgaggcatagcatggtggggatgaaagaatgctggacagagaagcaagaaacctgggttctaacttgccttctgcagattaactagttctgtgacatgtgtaagccagtttactcttagaggcccca

SEQ ID NO: 830402 - DNA, 660 bp, Homo sapiens
caattatccataagaaggcataacaagaatgttaaaattatgatacaatttaattgagtttgtgcatattagaacatgaaacattaaaartattgatttttgtgaaattttaatagtactccttccctgcccccacatttgtttccgtagtcctatgtacaagcatccatatagcaatctgaagacacagtatactggtcaggctcacagaatctggagccaaaaacacaacgtgtgtgattgtgagtaaatttaatatttctctgcctcagtttcctcaactgtgtaaactaaggctactcacaatacttacttcatagaattaggaagactacatgttaaaataatattatccacctcatggaactctgaaaattgaagcacttataagagtatctcagagttattaagccaccaataaatgctagctattactgtcacttcaacatcgtaataaccactactatcgagttttggaattcctgggaagaacaggcctgtgttttattccatttttctaccttttctgttgagcacagtgactgtcaaatagtatgaattcaggaattatttttagtttataaattgtatgtgtttgtctctaccaacagtgtttatttagatggatggaattttggttggggagctctatccatgtgc

SEQ ID NO: 830403 - DNA, 605 bp, Homo sapiens
actatttcttttgctgtgcagaagttttttagtttaactaagtcccatctatttatctttgttttattgccataataaaaaaagtaatagrtgttgacgtggttgtggtgaaaagggaacactttcacactgttggtgggaatgtaaactagtataaccactatggaaaacagtgtagaaagaactaaaagtagatctaccatttgatccagcaatcccactaccaggtatctacccagaggaaaataactcactataagaaagatacttgcacgtgcatgtttatagcagcacaattcacaatcacaaaaatatggagccagcccaaatgcccatctatcaatgggtggataaagaaaatatcatacacacacacacatacacacacacacacacacacacacaccatggaatactactcagtcacaaaaaggaacaaaataatggcatttgcagcaacctggatggaattggagaccattattctaagtgaagtaactcaggaatggaaaaccaaacatcgtatgttctcactaataggtgggagttaagctatgaggacgcaaaggcacaagaatggtacaatggactttagcaacttgggg

SEQ ID NO: 830404 - DNA, 623 bp, Homo sapiens
tttttttttcttttcttttttttttagaggactttcaaacttatttggccacagaattcctttattcaaaaaacatgtattaataaccaaagggataccggttttacaaaacaacactggaaaaagcagatataaatgtgtccagtgaagcagaaacacagtgataataatgaaactgactttggtaaatatgggcaaatccaatacaaaattttcaggtcaaatataattcctttcaggcctaatcattcctgcaaattatcttcaaagctaaattagctctcaaacttcttaagcaggtaggtctttgtgtacagatattaactttacgtgatttgcattttaaaaaaggaaaggtttcaggcttttctatacaaattgaggaactattgaagtgtactctggtttgtgttgtcccttcagtgactgagaactctaaaccaatttgcaatccgacaaatccaacaccttttggataatgcaaactaagaaagtgctaaytggtttccatggtcatacctacagctttatttaaatggattaggaacataaaaaaaatacagaatatataactgcagagccatttaaattataatgaaaaacagtctagttgaatgaagtgg

SEQ ID NO: 830405 - DNA, 623 bp, Homo sapiens
tttttttttcttttcttttttttttagaggactttcaaacttatttggccacagaattcctttattcaaaaaacatgtattaataaccaaagggataccggttttacaaaacaacactggaaaaagcagatataaatgtgtccagtgaagcagaaacacagtgataataatgaaactgactttggtaaatatgggcaaatccaatacaaaattttcaggtcaaatataattcctttcaggcctaatcattcctgcaaattatcttcaaagctaaattagctctcaaacttcttaagcaggtaggtctttgtgtacagatattaactttacgtgatttgcattttaaaaaaggaaaggtttcaggcttttctatacaaattgaggaactattgaagtgtactctggtttgtgttgtcccttcagtgactgagaactctaaaccaatttgcaatccgacaaatccaacaccttttggataatgcaaactaagaaagtgctaattggtttccatggycatacctacagctttatttaaatggattaggaacataaaaaaaatacagaatatataactgcagagccatttaaattataatgaaaaacagtctagttgaatgaagtgg

SEQ ID NO: 830406 - DNA, 627 bp, Homo sapiens
gccaattccttgaactcctgactctaatatccaacgacctaatgataattgaacactaaataagtgtctcaaatttaaaatctgctaaactgagctcctcattcctgcctgctgcccaccatgtccccaaattctgtttgtcctcaccatctccccatgtaggaaattgcaatgctacccttcctattgttgagggaaaaatccatgtagtctctgattcctatttgtcatattctctatagccaggcagcaacagtatcttattaactctaccttaaaaataaaactaaattcggatacatctcctcttcctcctaatttctccaaactcatcttcatgatcctctctgccccctacagtttattttccatattgcagcccaagttgtgtctaaaacttgtcagttcaaaatcttctgttgattatttgacctcactcaaagtaaaaggcaaaggtcttacagtgttttctatagagctctacatcatctcactccccattgctgtggtaatcagaatgctaagatgttccccaagattctcagcccctggtgyagctgctctacataacacccgccccttgattacaggttgcaccgtgaatatatgctgcctgtaattatacac

SEQ ID NO: 830407 - DNA, 638 bp, Homo sapiens
tgggtccgatgcatggagctgtgtggagtctcagcagagcagctactcaggcatgcagagagacccaggagctttacatactctggcgctggatccctgacaaaggygaatacaactcagccaaggcaagaggtccatacatacccctgggaaaggggctgaatccagggggccaagtaacatccgtctgcaggttccacttccatggcccctcacaagaaaagatctactggcttggagttccagccaaccactggcaacagggtaaatcctgcctgagatgggacagaacccccaaggggaagggtgggccaccatttttgctgtttggacaactcagccactctagcctgtgggttttggagagtccaaatggctgggatgaggaagcaccccctgtactgcagcacagctgctttaccaaacgtggcctgactacttctttaagtaggatcccaatccatttctcctcactgggcaggacctcctagctggggtctccggccacccccactggtattctaggacagagctctgatctctctctgggacagagttcccaaaaggaggagcaggttgccacctttgttgtttgggcaactcagccattccagcctgtgggatttggagagtccaaa

SEQ ID NO: 830408 - DNA, 503 bp, Homo sapiens
agccactctagcctgtgggttttggagagtccaaatggctgggatgaggaagcaccccctgtactgcagcacagctgctttaccaaacgtggcctgactacttctttaagtaggatcccaatccatttctcctcactgggcaggacctcctagctggggtctccggccacccccactggtattctaggacagagctctgatctctctctgggacagagttcccaaaaggaggagcaggttgccacctttgttgtttgggcaactcagccattccagcctgtgggatttggagagtccaaaccgacaagggcagaggcagtttgccagcatcgcaccactgttttgttgaggagtgaccagattgcttccttaaacaggacsctgattgattcctccacagtgggcagttactcccagccaaggcctccggccaccactgcccaaattctataaacagagttctgatttatccctgggacagagtggctgtggggagatgtggg

SEQ ID NO: 830409 - DNA, 600 bp, Homo sapiens
tttgaaactgtagaacagattagtggcttccagaggtttmggatggcataaggatagaaaggaagtggatatggctttaaaagggcaacataaagaatcttgtgattaggaaactgtttgtatcttaactgtatcaatgtcaatatcttggttgtgatatggtactatcattttataagattttatcattggggaaaaattaggtaaaaggatcactctgtattatttcttataactgcatacaagtctacaattatctgaaaatcaaaaaccttctgcccagcattgatttcctctttttataacaacaccctaatgtttcttgcagccacttttccttattttcagtccatgtggttcagatgttcaaagccaaccttggacttagtaggtggacctgtaattcagacccgatcaatgagcatagtctatctttttgaccatagtgattggttcatgaatagtcatatgatttaagttggtgcagtatactcaaacctatgggttttactaaactataagaaaggataagccctttttgctgaagttgctaagtattgttaagtaaaagctccaaccaacaggcccaccacatcaaat

SEQ ID NO: 830410 - DNA, 517 bp, Homo sapiens
actaggattgcaattcctgcttttttctgtttttcagttgcttggtaaaatttcctccatccattttatytgagcctatatgtgtctttgcatgtgagatgggtctcttgaagacaacatgttgatgggtcttgttttttttatccaccttgccactgtatgtcttttaactgggaattttgcccatgtacatttaaggttggtattgttatgtgtggttttgatactgtcatcatgattctagctggttattttgtagacttgtttatgtggttgcttcagagtatcactggtctgtgtacttcagtgttttgtagtggctggtaatgatttttcattttcatatttagtgcttcctccaggagctcttgaaaggcaggtctggtggtaaataattccctcagcatttttttgtctgaaaaggatcttatttttccttcatctatgaagcttagtttggccagatatgaagttctgggttggaatttgtttcctctaagaattttgaattttggcc

SEQ ID NO: 830411 - DNA, 553 bp, Homo sapiens
aaaggtctagtatccagaatctacaaggaacttaaacaaatttacaagaaaaaaaaacccatcaaaaagtgggcaaaggatatgagcrgacatttcttgaaagaagacatttatgcagccaacaaacatgaaaaaaagctcatcatcactgatcattagagaaatacaaatcaaaaccacaatgagataccatcttgcgccatgaatggcgattactaaaatggcaattattatcagaatggcaattattaaaaagtcaagaaacaatagatgatgctgaggctgtggagaaataggaatgcttttacactgttggtgggagtgtaaattagttcaaccattgtggaagacagtgtggcgattcctcaaggatctagaaccagaaataccatttgacccagcgatgtcattactgggtatatgcccaaagaaatataaatcattctactattaagactcatgcacacgtatgtttattgcagcactattcacaatagcaaagacacagaaccaacccaaatgcccatcagtgatggactggataaagaagatg

SEQ ID NO: 830412 - DNA, 593 bp, Homo sapiens
aagcagattggaaaaaattgttatatttttctgaggatttcaagaaaaccaaagagttaaatatagttgtagagataaaataaagtctatataagcttgaaaagaaaaaaaatagaattcaaaaacgtagtgaaaactcagttatctcaatccaattaacccaaaaatgtttcttttgtaatgaaattataacttccatcatttattatttccattaaaaaaggagtctggcctgattcactcaacatataatttataatttaagtttctaaattgaatccttatgttatatgattactcaagccaggtgtatgttggagtgagcaatagcacgtagagaataataagcatcatcacttgaactaattttattggtgactatgtgattgaggtaatgtttacggttggttgtggccaattgcattaactaaatgcaattcttttctaatttgaacaatttcattcagaactaaaggtaaaaaaaaaaaacctttttctatattaatctgttgtatcagaaaaatacagataaatgttaacttttattaaattaaaaaaagaaatgataaccaraaagccccaaatttatgtgt

SEQ ID NO: 830413 - DNA, 527 bp, Homo sapiens
  misc_feature 1, 2, 3, 4, 5, 6, 7, 8, 9, 10, 11, 12, 13, 14, 15, 16, 17,18, 19, 20, 21, 22, 23, 24, 25, 26, 27, 28, 29, 30, 31,32, 33, 34, 35, 36, 37, 38: n = A,T,C or G
nnnnnnnnnnnnnnnnnnnnnnnnnnnnnnnnnnnnnnagctagaaaaagagctacagagtaaacagaaagtagaaaaaaggaaatgacagagaaaaaawttaaggaatagaaaataaagttatagtagagtgaattaaagccaaaaatggtttattaaaaattataacaaaataaacaaaccttaggtaaaattaatcaaaataagagagagcaaaacttaaaatatgtgaacaaaagtataaacacaaaagagaatgataaaaatataatgtttgtgccactaaatatgaaaacatagacattatgaacaatttcttcggaaactacaacttgactaacgactcaagaaaaaaaaaaacactggacaggtttatacattttaataatataattacttctcaaaagtcagccaaagagccactagacacagatagatttagaatcaagttctaaaaatgattgaagataaagtattttgaaatgaaactttttaaaaatggacaaagatgttttattcatcttatg

SEQ ID NO: 830414 - DNA, 617 bp, Homo sapiens
aaaacagtttgctcttgaaaaagggcctagtttttcatttwttttatttaacaagcccttgtattttattaacttttaggagaagttctgagtactttacaaataataacccatttgatctccttagtcacttaataaggtattattattctcattttagtgatgaggaaactggggcacacaaaggttaactatgtagtttaaggcaatgagactaataagtagttaagagctatgttattcacaggtagaacaattagaaaatggcactacatcctttctgctgactgatctgtgcgagggtacaggatctatcaaacggagcttgagtgggatttcagagccttgtccagtggctcttcctttatgtaatctgttaatccttaggaaaattttacacagtcctaagccaccctcccccattgcttgctcatgtaataatctctgctccttgtgagagatataaagagtattacacttgatcctatacaaaatatgccaaatgtcaatgcatcctgtgatttttgtcattccttttttggaacaggagctatatttacacttgaatgaataacagatgcaaattttgtacttaaatttccttggtttaagtattt

SEQ ID NO: 830415 - DNA, 413 bp, Homo sapiens
tttaatagtacatattaataagtgattcagcttatataaaacaaatttccttacttccactttcaagacctttttctcatctggacttttggcaaagcaaaatgtaaggagacaaaagtaggataaaagtattgatctcaatttatgttagcaattcatattctgagtttcagaatcgtaacataagaatgtgtttcttcctgttgtgaccaaaatacctaaaaatattgacctagtattctcaacaacatatcccacctattgggtcttgaatgcctagaattaatattgggtcttgaatgcctagaattaatttgacatctttctaagatttatattttccaatatccattgactgacacataaaatttaggcaaattgartaatagaaaatggaaatggctttgtcaaag

SEQ ID NO: 830416 - DNA, 505 bp, Homo sapiens
ttttttaaatatatttgaggaagtcaagttcaatttatgttgatgttactctattatatctacctatgaagggcaaatactctccatagagattgagggaagggagagaggaaggaacaggaggggactaggaggaggacaagctctttggaaaggtaattcatttctaggaatttatcctgcagaggttcctctacaggtgtgaaaaagtcacacacggctatttgctcaagtactatttggactagcaagattttttaaatccttcaaattggtagcaaatgtaaacataaaacatatctaagttgaaacactataaactgtcttttaaggaaacagaatggcatccatttatctggaaagttgttcagtatatactaagtggggaaagaagctctataacaacaaatatagaaagatgcatttttgtcaaaaatttgtaaattgtgtgtrcatgtgtgtgtttttgtgagtgggttataggagacatatattttgtatatta

SEQ ID NO: 830417 - DNA, 510 bp, Homo sapiens
gttgacatatttcctgattttttgtgtgtttttttttaattgtgggcttggatctttatctgaggaattctttgaatccttgggtgaagrtgggtttctttagaaggtatttaggtatttgtgtttcttttgcccgagtgtcctagagacatacttctccctacaattttaatctaacttcttggcttgaaatttttcacatcatcctatattgtgagttcagactaaaaactggtgtgaatctggtttatagttaggaattctcaaaggaaatttttatcacctcttatttatcactgaatttcaagccagacaattttatttgcgatctactggggatacagaagcttatttctagttcacccttaaactgaaacctttgtggacctaattttattggagaaactcttctgagattctccatccccagtctgcccctaccctcaaatggctctgatcttgtcttctgccctccatgagctccacaaggtcagtaaaaggaaagattaa

SEQ ID NO: 830418 - DNA, 624 bp, Homo sapiens
caatttacttgatttcatgaagggctgtcaatatatytagtacacacataatacaaatcaattcaactgaaaaagttttacattaatattcttgttaaaatttattttcttgaaatagagatagggttttgttatgttgcccaggctggcctcaaactcctggcctcaagcactcaccaacagaggcctcccaaagtgctgagattacagacatgagccactgcctggcctaatattctaattataataatatgttaacaattattttaataatgtttcctttaatatgcaaaagaacttttaaggaaagatttgtgttgttcagctttcttaaaagtggtatacaaatagtttttaactgatgtccctttttgttggtaaaatttgtacaaacagctcctgtttagctgtccaaggcaggaagctgactgaatttgggatggaagccctgggtattaataaagacaatggttttcctagagtatctattgagatcatatctctagccatttaacatgactagccataggaatttttaaaagaaagaactgacttttattttattatttaattttattttattggagacagggtcttgctctgtcacccaggctggggtgcagt

SEQ ID NO: 830419 - DNA, 583 bp, Homo sapiens
tccgacttcagatttgtatgtatctaactcttgtgaacctgcttaggatgatatattaaagatacgtctgtgacagttagaagaccactttaatcaatgygatatattcagaggatataatcattatttcagtttaaaatacgagtctccctcctgcatcagtactgcacaaacaaatgagtgacatttgtaacgtttttaatccttgccttcaaatgctatgaatgttagagttctgattctatatgctaattttatgttctcagtgctaggtttatttgggaatgattttgattaaatcttagcagaaccagacttcctacataaacctggcatcctagatattttccatatggggaacggcttcttaaaagcaaggcaagaaatctattatttagggttgatggagtaagaaaagagcatggagtcagatttttgcatcagatacagctgggttcaaatcttggttctatcaatccctagtttgatcttcagcagtttcttaagtgctctgagcttctgtttatcactttaaacagactgaagaatcagactaataccatttactgtgcagaactgctat

SEQ ID NO: 830420 - DNA, 670 bp, Homo sapiens
aaccccatctctactaaaaatacaaaattagccaggcgtagtagcacatgcctgtgatcccactacttgggaagggctgaggcaggagaatcgcttgaacctaggaggcagaggttgcagtgagcrgagatcgtgccattgcactccagcctgggtaacaagagtgaaactccgtctcaaaaacaaacaaacaaacaaaaattgtcaggctgttcagtgtgtagcttataaagctacatcgtagtgtcaaaccctctgccttgcctttaattcaacaaatagcgcttgaaggggtactacctctcccttcagtgatacctactcccctcccttttctgcccatcaccaagttaccattttgtttttgtcttttattttgctgtggtttttaatatgagtacagtgtaaacataattatctttatattttttaattttttgttgttgttgttagagatggtgctgtgctgtccaggctggagtgcagtggctgtttacaggtgtgatcatagagcattacaacctcaaacttctaagctcaagtgatcctcctgcctcagcttcccaagtagctggaactacaggaatgcacaactatgcctggtgattagctttattgtaatggagaaaagccaagcggtgttcaaggcattctagacaaaaccattgac

SEQ ID NO: 830421 - DNA, 588 bp, Homo sapiens
cacgtgcccatgacctagcaattccactcccaggtattcaccgaagacgctctcccaactgtgcaccaggaagcacctgccaggatgttccaagcattatttgcacggaaaaacctgaaaacaatccaaatacacaccaaaaggaaagtgggcaaatcgtggtaatgccacataatagtgaaaaatgcatgaaccacagtccacatcatcatggatgaatttcagaaatgtaatactgagtccaaaaaaataaaaaataaaaccagcctcttacaaaggaatatacatagtttggttcctttatgaaaaagttagagaataagcaaaagttaagctaaggcttacatatatacatctatgtagcaacaccaaaaaggaaatcaaggaagttataaacacagaagtcagtagagaggttccctctggagctgaggctggggttgggttggagagggaacgggaccttcctgcagctttgctacgttcttytgcttaagtttggtggtgaattcatggatactcattttattattatgctttgccactaacatatacatcaagacacattctaaattttcttttgttatc

SEQ ID NO: 830422 - DNA, 525 bp, Homo sapiens
agtgctatgtaagtgtttgctctagttattttaacatttcagatgataaatatctaccctgttattcagatgacaagcgtccctaagctgataacatgatgaagaacttttgggtttyttaattaccatcagttttgtgagggaaaaaataccacatgaagaagagcaactgaagcaggcgtgaggaggaaacttggcttaagattggggggcttggggttattaggctttcatcttctcaaatgtcctaagctccactgataagaagacgcttagtatcaatccagctaaaaaggaacaatagaccccacaagacactgagttagagacaaaaatagcagggtaataaatgaaatatggaaaactacacaaccagaaaaataaacagctaccagtacccaaaacgtggttaaatctcacaggattatattgaatgaaagaagccagccacaaacgtgcacatactgaatgatcccatttatatgaagttccagaacaggcgaaactaattcatggtgacagagg

SEQ ID NO: 830423 - DNA, 614 bp, Homo sapiens
aatggcagtggatactgaaagaggtgaatgaatttgagatgtgtattgtatgctgaaatgccaagaaagtaatggttgtggtaggtttaggaaggggaattgtcgcagatgacttttaratttctgattttggcagctggtgagattgaggtgccatttactgagatgaagaatatagaataagaatgagttttggggagaaaaattaggagttcagcttctaatttttacttgtgaggaagacagatccaagtggaaatgtcaagtagtcagttggatgtgtggatttggatctgagaaaagagatgttggctagagatgtaaatttgtaaattgtcaccacatagatgttatgtatggtggcattacatacctggagaaagatgagaaagagaggcaggcccaagaccaagctctgaggaatccccaaactaagaggctgaacagataaagagaagctcgtctgagaatttgaagagatccagagaggtaggagtcaagtttttcaagagaagagagtattaaaaaaaaggagaaataaatgataacctccttaaaatactcctaaggggtcttctgagtttaaggatccacattacagttttcctttaaaa

SEQ ID NO: 830424 - DNA, 539 bp, Homo sapiens
acaggtcaagaaaagggaaatgggaatgaacagaaaacaataaaatagcaaacttaagccctcacataccaataatcactttaaatacaaatggtctacacacaaaaatttaaaacacaggttggtayagtggattaaaaaaatgtggccttgggccgggtgcagtggctcctgcctgtaatcccagcattttgggaggccaaggtggaaggactgcttgagctcaggagtttaagaccagactgggcaatacagtgagaccccatctcttaaaaaacaaaaacaaaaacccatatgttacctaaaggaatgctgtttcaatgtatcatgacacaggtaggctaaaaaggataggaaagaatataccatataaacattaataaaaaaagtaaccatattaataccaggaaaaagcagacttcaaagaaaagaaaatgaaaaaaaaaaagagcgtcattaaaaatgataaaaaagtctatccaccaagatgacattaacaatacaattctggaaacaacacagcttcaaaacacaggaag

SEQ ID NO: 830425 - DNA, 634 bp, Homo sapiens
tgttactattggatactcctaatcaactacttataaaatgcaagagtttgggtgactgtgcatgtgctacttttgaatatttttggcaaactaatgartataatgagattggctgattgcttctaatgttactagacaaattgggtaaagaaaaggatgaggtcagacatttgaattaccagctcaagtactgcataaatgacctgaaaacttccatgtgtgccccaaaggagagccttatctcctgtattgtcagggctgagattattgaaaatcaaacccagaacctcatcctgtgactggctgaattacaagacaatttgaactcccagccttgtagagtgtctgttgttaaagtcagagcattgattggaaagggagagtgatatgatatggatctgtttcaccatcctaatttcaggtagaattataatcttcaatgctggaggtggcgcctggtaggaggtgattggatcatgggggcggtttctcatggttcatggtttaacaccatctccgtcttggttctgtcatcacaatagtgagttcttgtgcaatctggttgtttaaaagtatgtggcacctccccctctagtgggactctttgtattttggaggcaacatatttctcatt

SEQ ID NO: 830426 - DNA, 607 bp, Homo sapiens
tacatcacacattttttgtgcgtgtgtggtaggaacacttaaaagctaccctctaagcaattttcaagaatacaataccttgttattaactatagtcatcatattgtacaataratcttttgaacttattcctgctgtctaactgaaattttatatcctttgaccaacatcttcccccctactccccacccccagcctttggtaaccaccattatactgtctacttctatgagttcaacttttttacattctacatatgagatcttatgctatttgtctctgattgcctggcttatttcacttaatgtcctccaggtttatttatccatgttgtggcaaatgacaggatttccttcttttaaaagggtgaataggattacattgtgtatatgtaccacagttttttggtatattcatctgttgatggacacttagactgattctcttagttattataaataatgcttcagtgaacatgggaatacagatgtttcttaggcttattccctatcttaactattataaataatactgcaatgaacatggaagtgcagctatcccttcaatatactgatttcctttcctttgggtacataaccagtagcgg

SEQ ID NO: 830427 - DNA, 473 bp, Homo sapiens
ggttctgcccatccaagtttccaaacgggctcctctggcccatggcctggggaagttcccctacacctggtcccaaatggagccaccatctgttaatrccaattcccgctcacctgctgtcctgcttgcccgtccctgccaggaagcccatctggtccagcgatgccctcgaggccctgtctccccaccacgccccggggccctggcagcccctgcaggccctggggggtacataaaaagctggtgagggcatttggtgcagggagtgggaggagggcgggtgtggggggcgggcagggaggttggctggaaacagcagctgtagtcactcacctggacccccctccggcctggggcccctgccttgccttgctttccctttggtccctgaaaaatcaagggccacatgatggaggctgcctggtagaggtgtgggaccctaggggctctggaaggagggactgagaggattg

SEQ ID NO: 830428 - DNA, 502 bp, Homo sapiens
catacatgtttgtgtgattgaaaactggtctttccaacaaatttgcactgatctggacagtggaaggtagcagagctgggagggtccaagtatgatgaaagggtwggtgaaaaaagatgatcaaagtcagaggctaggattgcttttataaaggagcctgggatgaattgcattttctggaagatttctagtgttgctctataatttctgtttaattggaatgtgaagttcttcataaattaaggagtgtagctgaagctcatgtctctaagttaggacactgaactaacttgactgcccaccctgagatcaatcaatggccaagagaactgagatgactacgacaatttagacccattatcattcatcttctggcactgagatagaaaaaaaagcctagccctgaaatcaaagcatctctctgtactgccaaaacaactcaggactctgttagcagggaaaaggggatggttgttagggaagcatccgacagggtctgccc

SEQ ID NO: 830429 - DNA, 502 bp, Homo sapiens
catacatgtttgtgtgattgaaaactggtctttccaacaaatttgcactgatctggacagtggaaggtagcagagctgggagggtccaagtatgatgaaagggtaggtgaaaaaagatgatcaaagtcagaggctaggattgcttttataaaggagcctgggatgaattgcattttctggaagatttctagtgttgctctataatttctgtttaattggaatgtgaagttcttcataaattaaggagtgtagctgaagctcatgtctctaagttaggacactgaactaacttgactgcccaccctgagatcaatcaatggccaagagaactgagatgactacgacaatttagacccattatcattcatcttctggcrctgagatagaaaaaaaagcctagccctgaaatcaaagcatctctctgtactgccaaaacaactcaggactctgttagcagggaaaaggggatggttgttagggaagcatccgacagggtctgccc

SEQ ID NO: 830430 - DNA, 554 bp, Homo sapiens
tgcccttttggcccccttgcttgcctgtcttccctgtgcttcctgtgtgtgggacactgagtatcttgcagttctcaaagtgttccaggatgtctmgtcatagctttgtgcacgcatggattctagagccagactacctgggtttaaaattcatacccaccacttaagtagctgtgagactgagaataagatccttagcctcactgtgtctcagctttcttatctgtaaaatggggataatactaggacccaatttgtgatgttgttgaacagactcattgactttatataacagatctaaacttggtacatagtaggtgcttaataaatattgttgtggctgttccctctgcaagaccaactctccctgatctggtgaacttaggcaggttctctcaggctcccttctctgtttgcagcctccaggaagcccaccctaactgcctgaggcagttacctccctctctctgtcctgccttcacagaggcctgcatgcctcccaggcagagaacttgtcatttgtgagagctgcgccctatctgagaccctgtgat

SEQ ID NO: 830431 - DNA, 623 bp, Homo sapiens
tttcaagaagaactgaagggaagggagcaaattatggatcttcctggggcaattgtaggtcttggtctgaacctgactcaatatgagtccttaaaacaaactgtggcagagactgctagcagccaaggccatcttgttctcgtctcccttgtcatccatacaaaatatatttcccatactcccttgcagctaggcatggtcatgtgactgagtggtagccaatggaacatgagtaggaatgatgggcaccacctccaggcctggttcatcaaaacatctcaggttcactcctatgtgttctttactgtcttaggcaaataaggataatgcacagggtacccttgaaagccatgtgttataatgacagtgttcatccagccttgattcctgtagagcagagtggaggagagcccctgggctggctcattcaccagctcaaaaatgatacaagactaagaagtaaacgtccataggattgtcatgaattttggggtctgtttgctacagcagtgcacttatactaactcatataggatcacacctttgtttgagctagagagaccacccctagtcctrtcctgtataagtctatagagtctcttctttttttttttttttttttt

SEQ ID NO: 830432 - DNA, 453 bp, Homo sapiens
ccttcttctaatttattttaggaaataatgcaragtactcacaaaaatttatatagaaagatgttcattgcagaattcattataataaaaacctttaaatgctctgagtgcccagcgtcagcatggtgataacatacatacgagggaatattgtgcagctgcagttagttcttattacatttcacaggcatcttaaatgctttgtgaacaccggtgcatagatttttttgtttggtatagatggcaatgattagatgggtgaaataatttaaaaaatggacatataattttaaaaatattgagtgacagaaaaaaatgaaaaaatgttaaagaactttttggttatgatattatcactaaaaggccgtgtctccttgctcccttctttggggacggttctggccttgcctggcccgtgggtgggaattgtggtgctccaagtgccttcagctg

SEQ ID NO: 830433 - DNA, 453 bp, Homo sapiens
ccttcttctaatttattttaggaaataatgcaaagtactcacaaaaatttatatagaaagatgttcattgcagaattcattataataaaaacctttaaatgctctgagtgcccagcgtcagcatggtgataacatacatacgagggaatattgtgcagctgcagttagttcttattacatttcacaggcatcttaaatgctttgtgaacaccggtgcatagatttttttgtttggtatagatggcaatgattagatgggtgaaataatttaaaaaatggacatataattttaaaaatattgagtgacagaaaaaaatgaaaaaatgttaaagaactttttggttatgatattatcactaaaaggccgtgtctccttgctcccttctttggggacggttctggscttgcctggcccgtgggtgggaattgtggtgctccaagtgccttcagctg

SEQ ID NO: 830434 - DNA, 577 bp, Homo sapiens
attgaataaatgaaccactactaagtgcttagaggggatggaaatgttgctataaagacagaataaaagctaagtaattaaaacttggcaaaattcttcaaaagcttttaaaatcatctcatcagatgaactactataagctttatatatgcctaacagaaaaagaattttggtaaatcagtaaatttggtaaagtcagtgaattggtcatttggcaaaattggcttaaaagacttttagaaatgctacctatggggaaaacataaattaattttaaactgtctttaaagttaatcattacaagattaaaaatttccatgtgaaacactaaaatttttgttatatttagcaggatacagtcataagaaaacaaaaccatactaagatcattgactatttttttaggtccccatgaaagcagaaccttgactattttttaaacttgcaaatgtagagaaaagttgcaaaaatagtgcaatgaatacccatatatcctctacttcrccaattaatgttttgccacatttgctttctctctgtatagaggtattagttgttgttagacaatttgagagaa

SEQ ID NO: 830435 - DNA, 648 bp, Homo sapiens
aggcgtggtggtgggtacctgtagtcccagctactggggaggctgaggcaggagaatcgcttgaacccaggaggcagaggttgcagtcagccgaggtggcaccactgcactccagcctgggtaacataacgagactctgtctcaaaaaaaacaaaacaaaaaccctcaacaaagtagccattaaaggaacatacctcaaaatcataagagccgtctatgacaaacccacagcaacatcatactgaatgggtaaaagctggaaacattccccttgagaaccagaacaaaacaaggatgcccactcttagcactcctatttagcatagttctggaagtcctagccagagcaatcaggtaagagaaagaaataaaaggtatcctaagaggaagagaggaagtcaaactctttctttgcagattatatgattctgtacctagaaaaccccctagtctgcccaaaagctcctagatcggaaactttagcaaagtttctggatacaaaatcactgtacaaaatcagtagcatttctatacacaataacatccaagccgagagctaaatcaagaatacarttctgttcacagtagctgcaaaaagaatagaatacctaggaaaacagccaacgcgggaagtgaaagatctctaca

SEQ ID NO: 830436 - DNA, 607 bp, Homo sapiens
ttaatattttgttgaggatttttcagtctatgttcatgagagataytggtctgtagtttgcttgtaatgtttggttttggtattagggtaatgttggcctcatagaatgagttaggaagtacagtggtacccccttatccatggggagatatggtcttggaatgttccagaacccccagtggatgcttgaaactgtggatagtactgaacctaaatgctgtcaattggaacacaattcttttcttgtcttccacccacaaatgtaatgcctttttcaactgaactaatcgcttgtcacgcactgtgttttaactattggggtttgaagtgccacggcaaaactagcatgagttttttttccttctttacaacttcacaaataaatttgttcttatcttagatcttagcaacagcaacatacagatgtttttctttatttatttgagaacctccacattttcatttttaaaaagtactttatggcttcttttggcatatctaaattgccagcaccactactcttgtgttttagggccattaaagcactgcgataatgcaactgttgatctgataaccaagatggctactaagtgattaatgggcaggt

SEQ ID NO: 830437 - DNA, 447 bp, Homo sapiens
cccggctgtgccatttagccactgtgtcctttcaggcaagtggcttgtctcagcctccctcagcttccccatgagtacagtggggctgactacacctgcgggagctattgtgagaattgcctgagtagctcayacagcgggtatccagttagccaccgtaggtgctcaggataagaaggcggcctcccctgctgcttccagtgtgtcatgggggaggagaccgaaaggtgctgcctgagatgagagttgtacagggacaagcaggcagccagccgagagcggggaagcttccacctggtacggcaggcgggatggtgataaggtggagggaaggaagtccaggccaggagagaggccggcccatgagtggcccgaggttgctgactgctggccgttgagcctgatgtagcggcctgatgtggcctgaggatggggccacacggtgtg

SEQ ID NO: 830438 - DNA, 523 bp, Homo sapiens
ttgagcctatgtgtgtctttgcacgtgagatgggtctcctgaacacagcacaccgatggatctcaactcrttatccaatttaccagtctgtgtcttttaattgaggcatttagcctatttccacttaaggttaatattgttacgtgtaaatttgatcctgtcattatgatgctagccagttgttttgcctgttagttgatgcagtttattcatagtgttgatggtcttaagggcttgaactcagctctggaccaaggggacctaagagacctctgcagaaccctccaccccaaatcaccagaatatacattcttctcaggaccacataacacttattctaaaatttaccacataattggaagtaaaacactcttcagcaaatgcaaaataacggaaataataagaaacagtctctcagaccacagtgcaatcaaattagaactcaggattaagaaacacactcaaaaccacacaactacttggaaactgaacaatgtgctcctgaatgactactgggtaaata

SEQ ID NO: 830439 - DNA, 532 bp, Homo sapiens
taattattaacttacatgatcacaagatcccacaacatgctgtctrcgtgcttgaggagcaaggagagccagccagagtctcaaaactgaagaacttgacgtctgatgtttgagggcaggaagcatccagcacaggagaaagatgtaggctgagaggctaggcccatctctccttttcacgtttttctgcctgctttatatttgctggcagctgattagatggtgcacacccagttaagggtggctctatctttcccagcccactgactcaaatgttaatctgctttggcaacaccatcacagatgcacccagaattaatactttctatacttcaatccaatcaagttgacactcagtagcaaccatcacatatgattaaaaaaaaactttcaaacaaatagaaaagtaaaatgtgtcatttctctgaaaactatcataaaaattgattataaaagtaataaaattaaaaaaacaagattagaaatgagtctttaagcacataaatatgaaatgctaattgtattttgtctc

SEQ ID NO: 830440 - DNA, 532 bp, Homo sapiens
taattattaacttacatgatcacaagatcccacaacatgctgtctgcrtgcttgaggagcaaggagagccagccagagtctcaaaactgaagaacttgacgtctgatgtttgagggcaggaagcatccagcacaggagaaagatgtaggctgagaggctaggcccatctctccttttcacgtttttctgcctgctttatatttgctggcagctgattagatggtgcacacccagttaagggtggctctatctttcccagcccactgactcaaatgttaatctgctttggcaacaccatcacagatgcacccagaattaatactttctatacttcaatccaatcaagttgacactcagtagcaaccatcacatatgattaaaaaaaaactttcaaacaaatagaaaagtaaaatgtgtcatttctctgaaaactatcataaaaattgattataaaagtaataaaattaaaaaaacaagattagaaatgagtctttaagcacataaatatgaaatgctaattgtattttgtctc

SEQ ID NO: 830441 - DNA, 634 bp, Homo sapiens
tcatcactgggcattagagaaatgcaaatcaaaaccacaatgagataccatctcacgccagttagaatggcgatcattaaaaagtcaggaaacaacagatgtgggagaggttgtggagaaataggaacacttttacactgttggtgggagtgtaaattagttcaaccattgcggaagacagtgtggcgattcctcaaggatctagaactagaaatatcatttgacctagcaatcccattactggacaaatacccaaaggattataaatcattctacgataaagacacatgcacacgtatgtttactgcggcactattcacaacagcagcgacttgcaaccaacccaaacgtccatcagtgatagactggattaagaaaatgtgtcacatatacaccatggaatactatgcagccataaagaaggatgagttcacatcctttgcagggacatggatgaagctggaaaccatcattctcagcaaactatcacaagatcggaaaaccaaatactgcatgttctcactcattmgtgggagttgaacaatgagaacacatgacacagggagcgggacatcacacaccggggcctgcagggggtagggggctagggaagggataacattaggagaaatat

SEQ ID NO: 830442 - DNA, 603 bp, Homo sapiens
attgttaggtttttcaattaaaaaaatacaatttaggataaattataggtaagaagggagaaagttgtacatgaaattccctgagcagttatgaagcacagatatttgacaagggagaattgcactttcagaatatgacactacgattctaagaaaattcttagaaaatctcacattggctgtcatcccaatatatacagaatttttgagttttatatcaattccacagatatttatggtgtgtctactaaataaaagcagaaaattgtgctgagtgaaatatcaggtttatacctaggaagcttacacattagcaaaataaatgagatattcccagatagctatcctttaattcaatatgtgaaaagtgacaaacgaattaagtgccagagggaagatagattccttttaattcagtatgacttaagtttaacttttttaaaaaggtatcgactaaactacaaaagattccacagtaccacaggctgcagtctcaaagattgttataagaatctcgtayctaccacagttctaccttcctctttttaggcttcccttgtggatagaatgttcacttgtgatagctcccagcttatgtcttct

SEQ ID NO: 830443 - DNA, 603 bp, Homo sapiens
attgttaggtttttcaattaaaaaaatacaatttaggataaattataggtaagaagggagaaagttgtacatgaaattccctgagcagttatgaagcacagatatttgacaagggagaattgcactttcagaatatgacactacgattctaagaaaattcttagaaaatctcacattggctgtcatcccaatatatacagaatttttgagttttatatcaattccacagatatttatggtgtgtctactaaataaaagcagaaaattgtgctgagtgaaatatcaggtttatacctaggaagcttacacattagcaaaataaatgagatattcccagatagctatcctttaattcaatatgtgaaaagtgacaaacgaattaagtgccagagggaagatagattccttttaattcagtatgacttaagtttaacttttttaaaaaggtatcgactaaactacaaaagattccacagtaccacaggctgcagtctcaaagattgttataagaatctcgtatctaycacagttctaccttcctctttttaggcttcccttgtggatagaatgttcacttgtgatagctcccagcttatgtcttct

SEQ ID NO: 830444 - DNA, 626 bp, Homo sapiens
ggatagatgaataaacaaaatgtgtacatacataggagggaatattattcagccttgaaamggaaggcaattctgacacatgctaccacacggatgaaccttaaggatacaatgctaagtgtaataagaagcttcgcagtgttccaacttacaaggtaaatatcactcaggtagctatatggctgcctgaaatctaatgacatttgggaactcaaatttttctgaaaaacagagtgagataacatttgctttggcctgagcttttaaagtcctactagtatattacaactatattctacataattttcagtaaatatattttttaatacaatgttgaacaaagagaatacaagagaatctcctaaaccaaacaataacaacaaaactaacaaaaacccacaaaggaaaagtggactcaaacttgaatgataagcaaataagtggtcttggaggcaaatgccaatatcaggtaataggaactgaaactcctggggtctctataaaaccagagagctgagcttgagtctgccctattaagccacagtcgtcgaagggggcttgtagtgaattcttataatcttatattgccttggcatccattttgaagacatatttaactattttat

SEQ ID NO: 830445 - DNA, 626 bp, Homo sapiens
ggatagatgaataaacaaaatgtgtacatacataggagggaatattattcagccttgaaaaggaaggcaattctgacacatgctaccacacggatgaaccttaaggatacaatgctaagtgtaataagaagcttygcagtgttccaacttacaaggtaaatatcactcaggtagctatatggctgcctgaaatctaatgacatttgggaactcaaatttttctgaaaaacagagtgagataacatttgctttggcctgagcttttaaagtcctactagtatattacaactatattctacataattttcagtaaatatattttttaatacaatgttgaacaaagagaatacaagagaatctcctaaaccaaacaataacaacaaaactaacaaaaacccacaaaggaaaagtggactcaaacttgaatgataagcaaataagtggtcttggaggcaaatgccaatatcaggtaataggaactgaaactcctggggtctctataaaaccagagagctgagcttgagtctgccctattaagccacagtcgtcgaagggggcttgtagtgaattcttataatcttatattgccttggcatccattttgaagacatatttaactattttat

SEQ ID NO: 830446 - DNA, 612 bp, Homo sapiens
agtttactgaaaaagacaccatgccaacaggaaagaagtcacggctaagtcattccgagatttcccacggcatgaatctagttccacaatcractgaggtttgcttcagtgaactctccatccaatttatggcaaattctaacttttagctcctcttctgtagtctttattaatctatttcttcccactgttcctctcattttagtttagtccactaggagacagcagtggacccttagggttcctttccacacttagttcccagggaggggaaaaatgaagtcgcccgtttggtttaagacacaaagtctgatagacagtaatctttgaaaaaaagaactagccagggagataatcatatgatatgaaacaatttcccgtctcttcttgagctgggtattttcagaaaagtgtcccttcattttaagaacaggatttcatagatccataacactttgatgaaaaaataagcctttaaaacatctaaatgtacagccctctaaacacactgtattttaatcctaaattttagtgctccccttactttttgccaatcttgcacacagaactcacttgtttattctatgatttacttaaatcacagtaaatcat

SEQ ID NO: 830447 - DNA, 542 bp, Homo sapiens
attggggtatttagcccatttgcatttaaggttaatattgttatgtgtgtatgtgtgagtttgatcctgtcatcatgatgctatctggttattttgcaaacttrtttatgtggttgcttcatagtgtcgatggtctttacaatttggtatgtttttgcagtggctggtactgattgttcctttccatgtttagtgcttcctttgggagctcttgtaaggcaggcctgatggtgacagaatccctcagaatttgcttgtttgtaaagggttttatttctccttcacttatgaagcttagtttggctggatatgaaattctgggttgataattcttttctttaagaatgttgaatattggcccccactctcttctggcttgtagggtttctgctgagaggtctgctgttaatctgatgggcttccctttgtaggtaacctgacctttctctctggttgcccttaacaatttttcctttgtgtcaatcttggagaatctgatgcttatgtttcctggggtttggagtatcttagtggtgttctct

SEQ ID NO: 830448 - DNA, 572 bp, Homo sapiens
ggtagtaattccttattataatggagtaaatagcaatcaagatgatccaaattaattttctttwctaaaaaagataagttgctttgaataaatacagagcagtgggattgctggataatgcagtagttctatttttaatctcctgaggaccctccataccgttctccataatgactgtactgatttacattcctaccaacagagtacaagggttcccttttctccacatccttgccaacacttgttattctttgccttttttatgatagctattctaacaggtgtaatgtgatttgtcattagatatctgcacttccatgttcattgcagcattattcacaatagccaagatatggaatcaaagtgtccactaacagatgaatgaataaagaaacttcagcccaaagcaatctagagattcaatgcaatctctctcaaaatgccaatgacatttttcacaaaaatatttttaaaatcccaaaatttgtatcaagccacaaaaggccccaaatagtcaaagcaatcatgactaaaaagaataaagctgcaggcatcatactatcagacttcaa

SEQ ID NO: 830449 - DNA, 614 bp, Homo sapiens
agagcgctggccaacaatgggaatagtgggggaagaatcaggtcccattcaggagggtggtgacagcagccctggccttgcaccaacccccatactgggatagatgatcttagagaacacaggctggcttgtacctgtttgggattggctgggcgtggtggctcacgcctgtaatcccagcactttgggaggccgagccaggcggatcacttgaggtcaggggtttgagaccagcctggctaacatagtgaaacaccattactactaaaaatacaaaaaattagctgagcgtggtggtatgcgcctgtaatcccagctactcaggaggctgaggcaggagaatcgcttgaacccaggaggcagaggttgcagtgagcagagatcatgccattgcgctccagcttgggcaacaaaagcgaaactccagctcaaaaaaaaaaaaaaaaatgaaagccttctcagctgggcacaagtggctcaytcctgtaatcccaacactatgggaggtctaggtaggaggattgcttgaacccaggagtttgagatcagcctaggcaatgtagcaagaccctgctctctaaaaagtaaagcgtttaggcctggagcagtggctc

SEQ ID NO: 830450 - DNA, 623 bp, Homo sapiens
cattttagaaaattactattttataygagcacaattatgcctattttaattgatggagctgacattaaatcatcagaaaaaaaatagctctttcaaaggaactagtgaaaatgatgtttgcattatatttcttcaaaaagttataatgtcatcaattttcaaataatatttttttagtgacattcataagagactcagtttccttctctgaccttgatttaatcatgtcaggacaatctgaggcatgtcctccatggttgcacaagattttgtcaagtggacaagaggttggggctagaagaaatcttagagatcatctagtccaacacctcactgaacagagagtgaaagttttaaagattccctaaaggccaaaaagccaggatgaggaagatccagagttagagcccaggtttccttgtttccagactaatgcttatcccacctgtcatactacatgatcattgcactggtctcccaaatctttctgttcacaaactaatttatataaggagaatgagcacatcatggtccccttcagaaaaagtgatagcttcaaagtggaaagcttaaagaaatgaattctaataaattagacaatgtgagatacaaacatttgtcga

SEQ ID NO: 830451 - DNA, 493 bp, Homo sapiens
gatgtatttttaaaggagaacaagcgtgacttgttgagtgagatttgaagggtgaggcaaagtcaagagcagctcccaggctttggaggagggcagaagcctgcactcctttccgaaatgaggagactgtggygggactgagttcgagggagaaagcttcagtgatgttttggagatctaaagtctgagtggactttggaacagccaagtggagatgtcatacttctaatatatacattcttctaattaaaaaaatcttctcatatgtgagtaatgtacttaatcagaactcatttttgaagttcaccatagtttttcaacccgttggtattaataatatcagagaggagtagacagacggtgacagcatgaaaagaaataccgcgtcttcctgtgctctgacacttctggtatcactgtaagcccaggaactttaaaagtacttcttgaaaacccattttagcactgaaaatacattttccacattcagtga

SEQ ID NO: 830452 - DNA, 573 bp, Homo sapiens
gaagcttgctctcagaaccttcaaaaacctaaaatctgggagtatagtaatcacatcctgaggttcatagcaaagcaccgagcccaaagcatccagcccagtgaggtttggtgggagggtctgaggttgaaattacctgggttacagtcacaggagggtgttggagtggagggcaggcaggacagggtgggggcagcagtccataaacactgcagggaagagaatttctttctgctgctagggcaggatgacccacggtgggaggtgagccttgggacctacaggaggcttcagggggacacccccccacccattgcctcctcctccactccttgtttccaggtcctcagaaggagggaagtccagggaccagggagcctggtggggccggacctgaggtactgcacgcagccctgggcccagtctcctcggccacctccctgcctctggtgtctatgagatctgcgggtgagctgtgcagctcctgagccctcatccttaggccctgtgggcactgacggatgctaaaatgaaaacctctggaaggatccgwgcccggcctggccctgtgct

SEQ ID NO: 830453 - DNA, 637 bp, Homo sapiens
ggctagggtttttcaaggatagtttggtaggcagtgggctaaggaatggggaatgctgattggttgggtcttggataaaattgtagrgagttgaaactgtcttcttgccctgactcagttcctaagtagtggtcacagaaccagttgagtcagtttcttcatacgggctcctggtccaagtggcaccagttggtccatcaaaatgcaaggtctgaaagataccccaaccaccagttttacgttttacaatagtgatgttatctataggagcaattgtggaggttgcaaaattcttgttacttttggctacataactcctaaacaataattctaacctcgtgtaattttacaaagatgcttttagtctctgagcaaggagtgggttaattttgggaaaggagtgttaatcatctttgttttaaagctaaactttaaactgaatttctcccatagttagcattgccaacactcaggaatgagcaaagagcttgtgagattaaaagcaaagatagggccaggcgcagtggctcatgtctgtaatcccagcactttgggaggcggaggcaggcggatcacctgaggttgggagtttgagaccagcctgaccaacatggggaaaccctgtctctactaaaaa

SEQ ID NO: 830454 - DNA, 583 bp, Homo sapiens
acgctcttatttttttaattttttttttctcgctctatcgcctacccaggccctggagtgcagtggcgtcatctcagctcattgcawcctccacctcctgggttcaagtattctcctgcctcagcctcccaagtagctgggattacaggcatgcaccaccacgcctggctactttttatatttttagtagcgatggggtttcactatattgcccaggctggtctcgaactcctgacctcaagtgatcggcctgcctcagcctcctaaagtgctgggatagccactgtgcccagcctagcccttcttcaaatgtttggtaaaattcagcattgaagccatcaggtcttgggctttttgctgggagattttttattatggcatcaatctcattacttgttactggcctgtttaggttttcagttttttcatggttcaatcttggtaggttgtttgtgtctaggaatgtatctgtttcttctaggttttccagtttcttggcgtatagttactcatagtagccactaattatcctttggatttctgcggtattggttgtagtgtccccttttttcacatctgtttt

SEQ ID NO: 830455 - DNA, 609 bp, Homo sapiens
atttcttaatttttatttttttgtgtatctattgttatgtttttagattygaggttacatgaggcttgcaaataatataacccattattttaaactgatgacaacactgattacataaacaaaccaacaagcaaaaagaaaactaataaaactctgcgttttaactttgtctccccactttgttgtactgtcttgaaaaattgttattgtttttgattggttcattttttatctttctgctggatatgagtagtttacataccacaattacagtgttataatattatgtgtttttctgtgtacttactattaccagtgagttttgtaccttcagatgatttcatattgctcattaacgtcttttctttctgattgaagaactccctttagcatttcttgtaggacaggcctggtgtttataaaatctctcagcttttgtttgtctgggaaagtctttatttctccttcctgtttgaaggataattttgctgaatatactattctaggttaaaagttattttccttcagcactttatatcatgccagtctctcctgtcctgtaaagtttctactgaaaagtctgctgccagatatattgggggctccatt

SEQ ID NO: 830456 - DNA, 587 bp, Homo sapiens
attatgacagacagtgaaagagatctaactggctctatcttggttctaacctttaagctgtcctttctccctcctgggcataggccgaactaactttgggaggaacttatagtttaaaacaaagacaataatagccctttcccaaaacaaaactctttcttgtgtggggactagactgcctctgtaggactaagaaattagccacaagattagaaattatggttttggagtcatgcagctggaggctacaagattctgatcctccctcaactgatcctaagatcagtgcttgagacattttgcagacccgcacttgatggatcagctggaaccaccgagatcgataaactggctcatctgatcttgtggcccccacccaggaactgactcagcgcaagaggacagcttcagttccctatgatttcatctcctacctaaccaatcagcactcctggctcactggcttcccgcaactcactaagttgtccttaaaaactctgatacctgaatgctcagggcgactgatttgagtaataataaaactctggtgtyctgcacagtccagctctgtgtgaattactctttct

SEQ ID NO: 830457 - DNA, 625 bp, Homo sapiens
tgcatatcaaaatccgtggatgcttaaatcgctgatataaagtggtrtagtatttgcatgtaatttatgcacacccccccttacactttaattcatttctggatgacttagaccacctaatataatgtaaatgctctgtaaatagtcgttatactgtattgtctagggaataatgacaagaaaaaaagtgtgcgtgttcagtacagaggcaattttttttccaaacatttttcatccacggttggttgaatccacagatgtggaacccacagatacagagggctgactatgtgtgtataccttgaagattaggatttcaacaaataaatttcgggggaacataaacattcaaaccacaccgaccataaaactgttagaagaaaacataggtataaatatttatggccttagattaggcaatgatttcttagatataacatcgaaagtacaagcaacaaaagaaaaaataggtaaattagacttcatcaaaatttaaatcttatgcttcaaaggataccactaagaaaacgaaaagatgcagacacgaagaggggaacaacagacactggggcctgcttaaggatggagggtggaaggagggagaggatcagaaaaaatgtctatt

SEQ ID NO: 830458 - DNA, 638 bp, Homo sapiens
aaaaagtaaaaagaaaaaattaagatacatcaccagaaaaaatcaccttcactaaaaagaggacaacaaggaaagaaagaagggagagaagaccacaaaacaactagaaaacaaataacaaaatggcaggagtaaatctttactcatcaataataacattgaatgtaagtggactaaactctccaatcaagagacagagagtggctgaatggataaaaaaacaagactcaatgatttgtggtctacaagaaacatacttcacctaagaagacacacatagactgaaaataaagggatagaaaaaggtattccatgcaaatggaaaccaaaaaagcaggagtagctatatttatatcagacaaaatagatttccagacaaaaactataaaaagagataaagaaggtcattatataatgacaaagggtcaattaagcaggagcatataacaattacaaatatataagcatccaacactggagcacccagacataaaaagcaaatattataagagctagagagtcaaatagacccaaatataataatagttggagacttcaacaccacrctttcagcattgtacagattatccagacagaaaatcaacaaatatcagacttaatctgtgctatagaccaaa

SEQ ID NO: 830459 - DNA, 620 bp, Homo sapiens
acacatgtaactaacctgcacattatgcatatgtaccataaaacttgaactataataataataataaaagagaaagtttcaacactgtgatataaatgcacccataataatgaagtttctcatgatgcttctgwgtagtttttatttgaagatatgtccatttccacgataggcctcaaatccctccaaatatccacttgcagattataaaaaagagtgtttcaaaactgctgaatcaaaacaaagtttcaactgtgaggtgaatgcacacatcaaaaagaagtttcacagaatgcttctgtctagtttttatgtgaagatatttccttttccaccatattcctcaaagcactgcaaatatccacttggaaattctacaaaaagagtgtttcaaaactgctcaatgaaaagaaagattcaagtctttgagatgaatgctcacatcacaaagaagtttctcagaatgcttctgtctactttttatgtgaagatatttccttttccactagaagcagcaaagcgctccaaatatccacttgcagattcaacaaaaagagtgtttcaaaactgctcaatcaaaagaaaggttcaactccgtgagttgaatgcacacatcacga

SEQ ID NO: 830460 - DNA, 460 bp, Homo sapiens
ctttccgtagagcagctttgaaacactctgtgtgtgggatccgcaagtggatatttggaccgctttgagacctttgctggaaacgggaatatcttcacayataaactggacagaagcattctcagaaacttcttcgtgatgtgtgcattgtactcccaaatttgaatcttccttctcatggagcagttttgaaacactctgtttgtgcaatctacaattggagaattggaacgcttggatgcccgtggtagaaaaggaaatatcctcatataaaaactagacagaaggattcacagaaaatgctttgtgatgtgtgcattcaaatcgcggagttgaatctttcttttgttagagcagttttgaaacactgtttctgtggaatctgccagcggacacttggagcgctttgagggctatggtggagaaggaaatatcttcacataaaaactagaaagaagca

SEQ ID NO: 830461 - DNA, 460 bp, Homo sapiens
ctttccgtagagcagctttgaaacactctgtgtgtgggatccgcaagtggatatttggaccgctttgagacctttgctggaaacgggaatatcttcacatataaactggacagaagcattctcagaaacttcttsgtgatgtgtgcattgtactcccaaatttgaatcttccttctcatggagcagttttgaaacactctgtttgtgcaatctacaattggagaattggaacgcttggatgcccgtggtagaaaaggaaatatcctcatataaaaactagacagaaggattcacagaaaatgctttgtgatgtgtgcattcaaatcgcggagttgaatctttcttttgttagagcagttttgaaacactgtttctgtggaatctgccagcggacacttggagcgctttgagggctatggtggagaaggaaatatcttcacataaaaactagaaagaagca

SEQ ID NO: 830462 - DNA, 561 bp, Homo sapiens
gaaacactctgtgtgtgggatccgcaagtggatatttggaccgctttgagacctttgctggaaacgggaatatcttcacayataaactggacagaagcattctcagaaacttcttcgtgatgtgtgcattgtactcccaaatttgaatcttccttctcatggagcagttttgaaacactctgtttgtgcaatctacaattggagaattggaacgcttggatgcccgtggtagaaaaggaaatatcctcatataaaaactagacagaaggattcacagaaaatgctttgtgatgtgtgcattcaaatcgcggagttgaatctttcttttgttagagcagttttgaaacactgtttctgtggaatctgccagcggacacttggagcgctttgagggctatggtggagaaggaaatatcttcacataaaaactagaaagaagcattctcagaaccatttatgtgaagcgtgcattcaactcacagagttgaaccttccttttgatagaacagttttgaaacactcttttgaacaattgcaggtgaatatttggagggctttgaa

SEQ ID NO: 830463 - DNA, 561 bp, Homo sapiens
gaaacactctgtgtgtgggatccgcaagtggatatttggaccgctttgagacctttgctggaaacgggaatatcttcacatataaactggacagaagcattctcagaaacttcttsgtgatgtgtgcattgtactcccaaatttgaatcttccttctcatggagcagttttgaaacactctgtttgtgcaatctacaattggagaattggaacgcttggatgcccgtggtagaaaaggaaatatcctcatataaaaactagacagaaggattcacagaaaatgctttgtgatgtgtgcattcaaatcgcggagttgaatctttcttttgttagagcagttttgaaacactgtttctgtggaatctgccagcggacacttggagcgctttgagggctatggtggagaaggaaatatcttcacataaaaactagaaagaagcattctcagaaccatttatgtgaagcgtgcattcaactcacagagttgaaccttccttttgatagaacagttttgaaacactcttttgaacaattgcaggtgaatatttggagggctttgaa

SEQ ID NO: 830464 - DNA, 409 bp, Homo sapiens
cagtttggaaacactctttttgtagaatctgcatgtggatatctggagcgatttaaggcctaaggtccaaaaggaaatatcttcctgggaaaaatagacgaaagcattctcagaaactgctttgtgatatgtgcattcgactcaccgagttgaaacttttttttgatagagcagttttgaaacactctgtagaatctgaaagtggatgtttggagctctttgagggctatggcggaaaagaaaatatattcacattaaactagacagcagcattcccagaaacttccttaggatgtttgcagtaaactcacagagttgagcatwcctttccgtagagcagttttgaaacactctgtttgtgggatccgcaagtggacatttggaccgctttgagacctttgctggaaat

SEQ ID NO: 830465 - DNA, 345 bp, Homo sapiens
ccaaatatccacttgcggaccccacacacagagtgtttcaaagctgctctacggaaaggtatgttcaactctgtgagtttactgcaaacatcctaaagaagtttctgrgaatgctgctgtctagtttaatgtgaatatattttcttttccgccatagccctcaaagagctccaaatatccactttcagattctacagagtgtttcaaaactgctctatccaaaaaaagtttcaactcggagagtcgaatgcacatatcacaaagcagtttctgagaatgctttcgtctatttttcccaggaagatatttccttttggaccgtaggcctcaaatcgctccagatat

SEQ ID NO: 830466 - DNA, 438 bp, Homo sapiens
cggaccccacacacagagtgtttcaaagctgctctacggaaaggtatgttcaactctgtgagtttactgcaaacatcctaaagaagtttctggkaatgctgctgtctagtttaatgtgaatatattttcttttccgccatagccctcaaagagctccaaatatccactttcagattctacagagtgtttcaaaactgctctatccaaaaaaagtttcaactcggagagtcgaatgcacatatcacaaagcagtttctgagaatgctttcgtctatttttcccaggaagatatttccttttggaccgtaggcctcaaatcgctccagatatccacatgcagattctacaaaaagagtgtttccaaactgccctatcaaaaggaaggttcacctctggtagttgaatgcaaacatcacaaagaagtttctcagaatgctt

SEQ ID NO: 830467 - DNA, 736 bp, Homo sapiens
aaagcgaagccaactatccgcttgcagatcttacaaaaacacgtttcaaaactactctatcaaaggaaaggttcatctctctgggttcaacgcacacatcacaaagaagtttctgagaatgcttctggctagtttgtgtgtgaagatattcccgtttccaacaaaggcttcaaagccctccaaatattcacctgcaattgttcaaaagagtgtttcaaaactgttctatcaaaaggaaggttcaactctgtgagttgaatgcacgcttcacataaatggttctgagaatgcttctttctagtttttatgtgaagatatttccttctccaccatagccctcaaagcgctccaagtgtccgctggcagattccacagaaacagtgtttcaaaactgctctaacaaaagaaagattcaactccgcgatttgaatgcacacatcacaaagcattttctgtgaatccttctgtctagtttttatatgaggatatttccttttctaccacgggcatccaagcgttccaattctccaatgtagatgcacaaacagagtgtttcaaaactgctccatgagaaggaagattcaaattgggagtacaatgcacacatcacgaagaagtttctgagaatgcttctgtcyagtttatatgtgaagatattcccgtttccagcaaaggtctcaaagcggtccaaatatccacttgcggatcccacacacagagtgtttcaaagctgctc

SEQ ID NO: 830468 - DNA, 548 bp, Homo sapiens
ggcttcaaagccctccaaatattcacctgcaattgttcaaaagagtgtttcaaaactgttctatcaaaaggaaggttcaactctgtgagttgaatgcatgcttcacataaatggttctgagaatgcttctttctagtttttatgtgaacatatttccttctccaccatagccctcaaagcgctccaagtgtccgctggcagattccacagaaacagtgtttcaaaactgctctaacaaaagaaagattcaactccgcgatttgaatgcacacatcacaaagcattttctgtgaatccttctgtctagtttttatatgaggatatttccttttctaccacgggcatccaagccttccaattctccaattgtagattgcacaaacagagtgtttcaaaactgctccatgagaaggaagattcaaatttgggagtacaatgcacacgtcacgaagaagtttctgagaatgcttctgtccagtttatatktgaagatattcccgtttccagcaaaggtctcaaagcggtccaaatatccacttgcggatccc

SEQ ID NO: 830469 - DNA, 561 bp, Homo sapiens
gtgatagagccagagtaagaacttgtctcaaaaaaatagtaagaaaaaaaaagaagacatactgtgtactattctgtttgctaggatgatgacttgtgaatttcaaatggtggttmtgcattttctaaagttattaacaaccatttgtacacagcaccacattttaattggactaggacttctatttcactccagtacctaggtgcagccagtgcttcattaaataacactgataatcagttcataagatcttacttcagtgagtgatcatctgtcatgacagacttgaaaacaggtttgtaatgcatgaatttatcagttgtcataagcaagcaaaggaattggctttcaatgtgtctgtagctatagtaatgaggagatttgttgagcctatacttaatcttctatattgtaatttaagaaaaccaacttaactatgttcaactaaattgtacatttcattaaaatttgaaaatcatagtaacaagacagggatttctgagttataatcaataagactaatttaatttaggggtagctgaggagaaagatgaaaatcaa

SEQ ID NO: 830470 - DNA, 561 bp, Homo sapiens
gtgatagagccagagtaagaacttgtctcaaaaaaatagtaagaaaaaaaaagaagacatactgtgtactattctgtttgctaggatgatgacttgtgaatttcaaatggtggttatgcatttwctaaagttattaacaaccatttgtacacagcaccacattttaattggactaggacttctatttcactccagtacctaggtgcagccagtgcttcattaaataacactgataatcagttcataagatcttacttcagtgagtgatcatctgtcatgacagacttgaaaacaggtttgtaatgcatgaatttatcagttgtcataagcaagcaaaggaattggctttcaatgtgtctgtagctatagtaatgaggagatttgttgagcctatacttaatcttctatattgtaatttaagaaaaccaacttaactatgttcaactaaattgtacatttcattaaaatttgaaaatcatagtaacaagacagggatttctgagttataatcaataagactaatttaatttaggggtagctgaggagaaagatgaaaatcaa

SEQ ID NO: 830471 - DNA, 606 bp, Homo sapiens
ctccagaactgtgagagaatacattttcttctttataaattacctagtcttaggtagtctgttatagcagcacaaaatggactatgccaccaacctagacctcctctccgagttctagacccatattgctaatgccatctgtacatcttcacctcagggaattacaatgaccctcatattcaacatgtctaatatagaatgaaacatcttatctcaccctttcctctcccagtctctcatttgcttcatctcctctatttcctctcaaaagtggtcactgccatttacccagggaacatggctggaaacctggaagccatcctggactccttcctcacccttccccaatatctaaccatcaccaaccaatggcgattctatagatcttaacctgttaagtctctcacgcggacgactgaaatcttttcttactggttttcaagactgaagttagttcctatacccatgcctaytattcaccctgtatacttcaggcaaagagacattctagagtgtaaatctgatgatagcatgcccttctgaaaaccttcatagctccccattctatactcaacggtaggaccaaactctcatcagggttttggc

SEQ ID NO: 830472 - DNA, 599 bp, Homo sapiens
caattgagactatagctctgcattattaaaatatacagactgtgtacaccattacacatcctttttccctttgctttttaatgctcatgaaaccatgattaargtgttgagtttatgaacacatgcacgaacaggcaagcacgtacacttaaaagatgaaacaaagaaaaaagttgattcatgtcattccatgagaaaggctgcccgcagcactccagctcaaacacactgtcccctcgagctctccatcccccttcccactccctcaccttccctcagattcggggaaatcaggttgggaggttagtgcatcattgacagagaatgccccccttccacgctctgttaagtctcccccagaagggggaaaggcagttcccttcagtagcacagttacggtcgattagtgttggttccacaagttaaggcacttccggctgctttggtggcagcgtggttcctcccctccttttttaaggcatgtgtcctctaagagtagtaaagctttggaaactgtgcagactgttaaagttgacagcttaatacaggatcaatgaaggcggcaggcaaaaggatcctcggagacacctccctcagac

SEQ ID NO: 830473 - DNA, 628 bp, Homo sapiens
tacaggaaggctgtttataaaatttcacagcaaatcgtgttaaaattttcagagtattctgcttaatgggttgatgtatttcctcatacatgtactggcagctcagagatttctttgtcaatcagaagtgggggcattgttaccaacgaaaagcatggctgcatcacaacaaatctgtctgtctgccagatgcaccatcattgtaaaccagaggaccttatttctcccttaaaaaataacaaaataacattcttaatcaaccagaatgtctctttccctcatgcacatcaccttactgaaaggttccctttgttcgcttaaaatctaatccaacctccataaaaacttctctatgttttatcttgcaaagtagaatatacttcctcagagacattgtgtggttgatggtttagaacattatttttaatgtccttatttacttaccatccttttcccatgcacaaattgaggatatcagcaaagattagctctttctactgtactctctcccattctatgctttctcatgttttattctggaaattargatagaatttattgttattacataaatcattactaaattctttgtattgaagaatagaaccattatgagtgatacaaatgg

SEQ ID NO: 830474 - DNA, 628 bp, Homo sapiens
tacaggaaggctgtttataaaatttcacagcaaatcgtgttaaaattttcagagtattctgcttaatgggttgatgtatttcctcatacatgtactggcagctcagagatttctttgtcaatcagaagtgggggcattgttaccaacgaaaagcatggctgcatcacaacaaatctgtctgtctgccagatgcaccatcattgtaaaccagaggaccttatttctcccttaaaaaataacaaaataacattcttaatcaaccagaatgtctctttccctcatgcacatcaccttactgaaaggttccctttgttcgcttaaaatctaatccaacctccataaaaacttctctatgttttatcttgcaaagtagaatatacttcctcagagacattgtgtggttgatggtttagaacattatttttaatgtccttatttacttaccatccttttcccatgcacaaattgaggatatcagcaaagattagctctttctactgtactctctcccattctatgctttctcatgttttattctggaaattaggatagaatttattgttattacataaatcattactaaattctttgtattgaagaatagaaycattatgagtgatacaaatgg

SEQ ID NO: 830475 - DNA, 547 bp, Homo sapiens
ttcccaaattcagagctccctgcagcccactcgcctggtctgtagtgggaaagcctttggcaggatcgtaagacggtggtgtgctagccgtggcttgctgtggaactatctggagcttggtagagtctgtatatctggcttctagggaggctctacttctggctgccatgggtaggttagttaacctctcttgacttcagtgacctcatgtgtaaagtgggggaaaggccatgccttctcccggaaagcttaggagaatttaatccgacgttaatgtgaagcctgtatagcccagtgccgggtgcagagaagtttagttcatggtgaccaaaggacaaatcacgaggaagtgcataaaaataagtctttgggctgctgatatgaatgcatgaatgaaaccactcatgtaaggggctgtgagtgatttggagtccaggattggacagccttaggtttcggtggggcccagaccatcaccagccgtgcccaccagctagggtaacttttttccctkgcgcaggatccccacctgcctgcagggttggac

SEQ ID NO: 830476 - DNA, 568 bp, Homo sapiens
aagatctgaaaccaacatgatcttactctcttactgttggcacaggaagaaaccgggcccctgccaagggcaacgtgtcagccttccagcaagtccccgaaggtcggaaccttcgagacgggtgaatttggatttcatcttaggaaaagctccgagtgtggcaccaggacgtggtgaatattttaagtaactttacatattaaggaacccccccccaaaaacaaacaaacaaacaacaacaataaaaggagattccctagtttcaaacctccaagggtgaagaggatggggcgtgaaaaacaaaatacaagagattcctcaaaatgccatgcgtcttctctactccctgggtcttggctatactctctgctccaggcatatctgctcgacacctgtcaatgtcttatttaatccctgttatgctgtggctactgtgacaacttccttgacctcctccagtgcaaattgttgacgctcttcttttcatactcacactgactggtggcatagtatacrgtgtttattatgactctttttgcctgatattatgatgattgatgagcacagg

SEQ ID NO: 830477 - DNA, 574 bp, Homo sapiens
caggatctgatggcttcactgctgaattctaccaaacatttaaagggaattaataacaatcctactcaaataattccaaaacagaggaggagagaatacttctacactcattctacaaggccagtattaccctgatagcacagtcagccaaatacacatcaaaaaataaaaactacaggtccatatctttgatgaacattgatacaaaaattctcaacaaagtgttagcaaacaaattcaacaatacattagaaagatcattcaccatgagcaagtaggatttatctctgagatgcaaggatggttcaacatatgtaaatcaataaatgtgatacattatagcaacagaatgaagtcatttgataaaattcaaaatttcttcatgataaaaatcctcaaaaagtggaatagaaggtacatacctcaacataataaaagtcatgtaaaatagatgcrcagctagtatcataatgaatggggaaaaactaaaagtcatttctctaagatctggaacatgacaaggatgcccactgttgccagtgttatgcaacattgtactggaactcctagctag

SEQ ID NO: 830478 - DNA, 624 bp, Homo sapiens
actgactatgttcccacagacaaggagttagtatcctctaacaatttaagtcttaacaagaacattatgtatactaacttggatcagagccaaatctagatactttttagycaaaaaagcataaattccacagttatttaacacccagcctctactgtagcctgagtcccctagcacactacttctgtggcaaagtacatattgatggcaaggctctgcctcaatgcccatattagagcgcttaaaatctcttcagtgtggcaactcttaaacttcacttcattaaggagaacttgacaaataaaagagctctaatgaatcattttatacagataagaaatgggaattaatattagctatttgtttattagcaactttatcacagcagtaaaaatagccattgtgattatgccaaaatccacaacatgtcagttgggtttttctggattctattattaacatgacatgaacaagataagatagcaggggagaggaagactacagaactctttaaagaaatttgaacaaaaaaggagtaagaaaaagtgggggaggaaaatttaacatagcagttgagagagaaaaacagttaatatgtttgacatagtaccctcttttctaaaa

SEQ ID NO: 830479 - DNA, 636 bp, Homo sapiens
aaaaagacatatctgcctccatgtatttcaaaaatacttttttcgatgccaacaatcactattaatttgaaatggaatgaaaaactgtgaaaagttatgagcaataatttcattcacaaaacggtagatagccaacattggatagccaaggacaactggacattgtttcaggttcataggtcattgccaaagatcctttcatcatctgggtaatttgactttctccctcttggaaaactgacactggttctctgttgtatgttctagagctacacaggggagtcagtttttgtatcattcattggtttgtctcttcactatattcagtgaaaatgtctttagccgaagttaatcaaaataagtgtcaagtcataaacttcagatagttttttacccaatattggaagaaaaacgactttggctctatttattttctacaaatgagttagcttgattcttagtgaattacatttattattagcaagtgttttaaggcaataaagtctgacttttcctaaactcatcagcacgtacayatccagacacctgctcccgtgcctttagttaactaggaaagttgtaactgctctaaaacaatgtagtctctgctcaaatcatagcatgtgtaattaaatg

SEQ ID NO: 830480 - DNA, 639 bp, Homo sapiens
aaatagatcaatggaacagagtagagaacccagaaatgaagctacatactaccaccaactgatattcaacaaagttaacaaaaatatgcactggggatagggtaycatattaaataaatggtgctgggaaaattggatatccctatgtagaaagatgaaacaggaaccataattcttattacatacaaaaattaaccaagatagattgaagacataaatataagacctcaaactacaaaattttagaggaaaaattcttctgggtattggcctaggcaaagaatttatgaccaactcctcaaaagtaaacataacaaaaaaacaataatatacaaatagcacttaattaaacttaaaagctactgcatagtaaaacaatccacagagcaaacagacaacctatagactggaaaaaatatttgttatctatgtatcaagcaaagggctaatatgcagaatcttcaaggaactcaaacagttcaatgagaaaaaaaaataacgccattaaaaagtggacaaaagacatgaacagacattttccaaaagaaggtatacaagtggccaacaaacacatgaaaaaatacttaacattactaatcatcagaaaaatacaaattaaaaccacaatgagataccatc

SEQ ID NO: 830481 - DNA, 583 bp, Homo sapiens
agatcagggtgttggtaggactatgttccctttgaagacatctattccaggatccttccctagcttctggtattgtgttgacttgtggcagcacaattccaagcttcaatggcattcttcctgtgtgtgtgtgtgtgtgtgtgtgtgtgtgtgtccaaattttctttttgtacaaggacactaataacattggattaggggcccatcctactctactatgactttatcttagtgacatctgcaataactttatttttaaatctgctcacattctgagatactagcggttaggtctttaatatgtgaattttggttgagggacacaattcaacctaaagcattcattccccttcttctcctttgaactagtaagattcttgtggaaactaaatgggaaattcatgtaaagtttttctctcacaatagctgttcaatctattgcaatgttcttgctattattactactattattatgaaaatgtatccagtctcctctaatatcctctaaatagtcattttttcctgttgccaactgcacttaagttctayggtcatttgtaatccctcctaatatgttgaagat

SEQ ID NO: 830482 - DNA, 602 bp, Homo sapiens
gtgattgacatttaatgagtttacaagaattatttccttaatattctaaaatggaagacaatattttttctactttttttgagatgstattaatgcatattgtttgttgaactctcttttaccactcctgaatttcttctgacctcaatgagtgactgataggggaaagcaagtctctagaacatccctagcttaactctcttaggatggaccattggaaaagtgggctctgttgtttcaaatgcattcatttccttccactgagatctgtatttcatgctggaggctcatttttcctggaatgccctgaagtacgtgaattttcaagaagcccctagaaatctttcaagaattttatttccttttaacttcccggtgcttcctgttttcaagcagttttcaagcaggaatctcttaagtgagaaaaatgaaatgtgtttgtttagaaaacattctccctatacaactttccttaagcaggatgagagaaatcctgacctgtgcactccacagggagcttcacagttcctgcttactgagcagatgatgttttatgagacaaaaataataattcttttttgccttcccttcttctttctctc

SEQ ID NO: 830483 - DNA, 518 bp, Homo sapiens
cacagagtggtaagctagacaaaaaagcaggarctaatgatatgctgtctacaagagacccacctcacaggtaatggcacctatagactaaaagtaagggataatggaaaatctaccaagcaaatggaaatcaggaaaaaaaagcagaaattacaatcctaatttcagacaaaacagattttaaaccaataaagataaaaaaaggacaaagaagatattacataatggcaattatgtaataattaccataattaacataattaacacagcaacaaggcttaacttttaaatatgtatgcacccaacacaggagcatctagattcataatgcaagttcttagacacctgcaaaaggtcttagactcccacacaataatagtgggagacttcaatattccactgaaagtattagacagatcatcaaggcaggaaatcaacaaagatattcaggacctgaactcaacattgagccaaatagatctgatagacctctatagaactctccacttgaaaacaaa

SEQ ID NO: 830484 - DNA, 622 bp, Homo sapiens
ttctttttgcactaggaaaaattcatatataattttcttattttaaatttgtattttccagtatggaaccccaatttgtctactgaggactatrtattttgtacgtatctgtttcctctgctaaattggatcttcttagggcaacaatgtatctttatttactttgtattctcagtgctttcttttcttttatctccctttcgctgttgttgcccaggctcttttttctccgtttcactcttgttgcccaggctggagtgcaatggctcaatcttggctcaccgcaacctccctctcctgggttcaagcaattctcctgcctcagtctcccaagtagccggggttacaggcatgcatcaccacacccggctaaatttttatttttagtggagacagggtttctccatgttggtcaggctggtctcaaactcccaacctcaggtgatccgcccgcctcagcctcccaaagtgctaggattacaggcatgagccactgcgcccagcctattctcagtgctttctacggctgctttgccatataagcaaaccagcaacaagcacagcttggtgatttactggattaaattttaaatgttctttttaattgccaaataatagttat

SEQ ID NO: 830485 - DNA, 587 bp, Homo sapiens
agcttggtgatttactggattaaattttaaatgttctttttaattgccaaataatagttatatatctctgtgtgtgtcrtgtgtatatacatacacacaagattctcattcttataagaatgaatgggccggctaaggaagaagaaaaatgaaaaataagcatagatgtttcagatggtaataaatgctattaaaatgatgaagagtagcaataggatgggtagtaagcagtttgaacaggaggacaattttggctctggcagttctcaaggagcacctctgagcagtggcatctgagctggggtcttatatcatttatgatgcctttggctgcaagtaacagaaaactctgactcaaaatgaccttaacaaaataggaaaaaaattagattgcttcaaccaataagaaatactctaggggcctctttcaggtttgattaattctatgattccatgatgttattaaaagtccagattctttacttcctgttgtcactgtgtcctccccctttcagcttgttcctcaggctgtagccattccagcagacatacatgatatgacactcaaatgcataaaggggaaaact

SEQ ID NO: 830486 - DNA, 612 bp, Homo sapiens
gttcaaatgttgactttaatagacattagaattttgtatagcygttgatgttgttttggattatttaaaagagggggtcaagaaaaagattagaatcttttttattcctacagaggaagatgttttctaagaggaagttcaagataggtttattccaagttaatgtgaatattaggacagattttagaataatagaagtttttaaggtgggagttattttgcaaaagtaatttgatagcatggccaaagtcaaaagtcaagatgaagaataaatcagtattcattaaataaaagatattaagagaaaaagtgattaggcgccgagttcaggatgaacagtaacctgactcatgttcttcacatttcaccataggatctgtcccagaagacattttctctcatcaattttaaccttcctggggaatttctgttcccttcctttcttcctcttcactttctgaactttactgtagtatatagagggctacaatgggggctcagtaattcagattttcacaataattatattaaatatgttctagccaatgagaacacattgacacagggaggggaacaacacacaatggggcctgtcggggaagggctggggtg

SEQ ID NO: 830487 - DNA, 568 bp, Homo sapiens
ttgaaataatatataaaacattagcaaggactcatagttttaagcaactaaaagccatttaaacacaaagaatactcaacactgtcttaccaaatgtagagtcatttcctggcatggtcttatactgttaattatcagagcaaaaatactgaataaaatatgattttaaaagcaagtccttgaggttgggagttcaagaccagcctgaccaacatggagaaatcccatctctactaaaaatacaaatttagccaggtgtggtggcacatgcctgtaatccaagctacccaggaggctgaggcaggataattgcttaaacccaggaggaagaggttgaggtgagctgagatcacaccattgcactccagcctgggcaacaagagtgaaactccgtcaaaaaaaaaaaaagcaagtcttattaacacaggagcaagaggtggttacagattytaggtacagagcctgggaggattctgggaaggtttgagagcaggggagacccatgatgctagtgagttggatctaaagcaacttctaaacatgcccctgctctttttcctcaggcagc

SEQ ID NO: 830488 - DNA, 647 bp, Homo sapiens
catggtctgctctagtaaacagggtaatctccatttcacatggagctcacattctataagaggtgtaaggatggtatatgaaaaaaagacaaaagataaatactctatgtgtcagtaagtgacgcaaagaaaaattaaacactgagaacagagatagtgagaagggtatctttttatttaaggcacttggggaaggcttctctgctcagcagagattagaaaaaacccaaaagaagtgggaatgtgagcctagcaaatatctgggggaagaattctaggcaatcacattaacaaaggtcctgaggtagaagtgtacttgggaattggagaaacattgaggatcagtgtagagcacagaggaggtaaggagaagagaaggaggggatgaggtcagagagctgatggggaacccttcaaagtagggcctttgaagacatggtgaggacttgggtgttgtgttttgagggcaaggagaagcctccagaggccactgggcaaaggagtggcagaaggccctggaagttgagcacaaagaytctaacatacagctggaattcaaaacctactcctgccatcactagcagctcaaacctatgagccacacccatctatagtggttttaggattttccattttagataacctgg

SEQ ID NO: 830489 - DNA, 570 bp, Homo sapiens
ggttttctatatataagatcatgtcatcttcaaacagaaacaatttcacttctttttttccaatttaaatgccttttctttmtattgtctaattgctatgatcaggacttctagtactatgttgaacagcaattgtgacagtgaacatccttgtcttgttcctgatcttagaggcaagccttcagctttttactgctgatgtaatataagctgtgggcttgttttatatgtcctttattatgttgaggtacatgtatcctacacctaattagttgatagtttatatcataaaaatctgctagattttgtcaaatgggttttctgcatctaatgaagtgatcacatgatttttataatctttattctgttagtacagtatatcaaatgtgttgatttccgtatttctatggtttgaatatttgatccctccaaaactcatattggaacttaatccccattgtggctgtattgagaggtggagcctttaataggtgattggggaatgatggttctgcccttataaatggattaattcattcatgaattaatggatcaaagagttaatagatt

SEQ ID NO: 830490 - DNA, 570 bp, Homo sapiens
ggttttctatatataagatcatgtcatcttcaaacagaaacaatttcacttctttttttccaatttaaatgccttttctttctattgtctaattgctatgatcaggacttctagtactatgttgaacagcaatkgtgacagtgaacatccttgtcttgttcctgatcttagaggcaagccttcagctttttactgctgatgtaatataagctgtgggcttgttttatatgtcctttattatgttgaggtacatgtatcctacacctaattagttgatagtttatatcataaaaatctgctagattttgtcaaatgggttttctgcatctaatgaagtgatcacatgatttttataatctttattctgttagtacagtatatcaaatgtgttgatttccgtatttctatggtttgaatatttgatccctccaaaactcatattggaacttaatccccattgtggctgtattgagaggtggagcctttaataggtgattggggaatgatggttctgcccttataaatggattaattcattcatgaattaatggatcaaagagttaatagatt

SEQ ID NO: 830491 - DNA, 637 bp, Homo sapiens
ccagcagttagagcatgcaaaataccactacagacaaactacagacaagttctagaaagtccagttgatactacatgagcaagccagtgaaaagaaataattgcctgtagcaacacaggatacaaaatatatttttagaacagggtcttaaaagtgttaggacattaaggattctaaggaaatctggtctgtatcagtgaaaataattttgaaaaccgaggaaaatgctaaagtccaatgtaaaggaaagggtggaaggggcaagtaattgacaggtttcctggtggccgcgcacctgcggagcacttactcacctcactcacctcactcagtgcttttccaggcatgttttatttcctttgcagtcctcggcaccctccgaatgacccctgataacagcaatggccagcgtttctctgatgctctgctaattccacacgtgacctcatctgagcctcacaatgaccctgtgaggtaaggattattgtctcccattttacagagaaggraactgagacccaagtggtactcaagtgtcccctggatacctaccagtaagtgataccttactggtaggtatcctaagctcactaccagtaagggacacagcagaagctccaccccacttggtgactct

SEQ ID NO: 830492 - DNA, 691 bp, Homo sapiens
cataagtcagtccatctcacacttagacttcagatggagctgyatcccccacccagggggatttcctctaaggccctcacttagagggaagtctggaagccacagagggaaaaacttattataaagtaccatgttcaggatgattcttacatttaggtacttttttacaatgtgcaggtggtatgtttctctacttgttcctactttgattttccttacttggctattttatcttcatgagtgttgagttttgtttgtttgtttgtttttgagacggagtttcgctgtcgttgcccagcaggagtgcaatggtacaatctcggttcactgcaacctcctcctcctgggttcaagtgattcttttgcctcagcctccagagtagctggaattacaggcacccgccaccacgcccggctaatattctgtatttttagtagagtcggggtttcatcatgttgcccaggctcaaactcctgacctcaggtgatccacccaccttagcctcccaaaatgtagggattacaggcgtaagccaccacgcttggcctcttcctgagtgttttaggcatccgtcccctaaagtcacttgcttttcttatactcctagtcctaagttccaatttttagggcagtttgtgacttctcttggcagctaatagtaggaaagtccctaaatggctttatcctgca

SEQ ID NO: 830493 - DNA, 539 bp, Homo sapiens
gtctctggagggtaaagtgattagtccaaggtcatactgactaattacaggaaccctccaaagatggcgttttgcctcctataccaggtgtctctgtgggagccatctaggtctttcttgcattcactccctcactgcatatgtagatattgccacctgcttacatcccatcggtgactctctgttgctctctaaattccatgccatgcccccgtgtgatcccacctccctcttatctgccgctttccatgtctttaatctgctctagccgcactgtctcctttctgtccctgaaatagtcaagcttattcctgcctcaggatctttgcacctgctgttcctgaagcctgggaagcacttttcctacatcattgcatggcaaggtccttctcaatcttttcatctctgctcaaatttcacctcctcatggaggccatttctgactaccttaacttacayagacccctcaatcacaccacagtacttctagcttatatttctcctagaacttataataaactgaaatcatcatatttagt

SEQ ID NO: 830494 - DNA, 594 bp, Homo sapiens
actcagagcttagacctaagaaaacccaaaaggccttgtattccagcccctccattcaccacataatgctgactcgccagagcattccaaacaaagctggccccttcacacgcccttcctttcctagaagtctttctccctctttgcacgtatctttagaaagctcttcctggaatctgtcatgcactgagagggggaggtgctttttcatgtctatgcctttgctttgtaagtctgctatgcccttccccatcttgtgcatcagggcaaactcttattacttcttcaaatcccagccccaggtcacttcctccatgaagccttccttgtgttccgcagactgagttgattccatttctcccttccccatcccacatcactaccaccacgggtactcctgagggtaataccctggctgactcatctctccatctctactgcctggttcagggcttggccaagagagaaggcatgaatgaatgaatgaatgaatgagaagggaaggaaggaagatctcagaccactttatacagcaatagyccctgtaccaccctctgctatctgacccaggtccctgatttttctaagctcttt

SEQ ID NO: 830495 - DNA, 603 bp, Homo sapiens
atgcaccaacatagtaattcaggcaagtattatcaatggctgttacaactattgggtgaaagtttattggggaagaaaatattcacacagtctttaggtcacttattaattataaaggggaacatagcctttagaggggatccatctggcggtaaccacgttagccaaatgatcaatcttagcatcactaagaaggggaaaagggatcattaaataacacgtgcctcataacatgatgcagtaaatatgccaatatcacctatgcttgccaaaatgttaaacttgaatcaaaccatgagggaatgttcagaaaaattcagaatgtgggacattctaaaatgaaattgacctgggcttttgataaaaatgaaatgtcatgaaaagtaggaaaggtgggaacatgctctagatcaatcgctcttcagtttcatcagaatcacctggagagcttctttcaacaaagattgctggatcgacccccggagaccccagtgatgtgacactgcyggtctggggcccacccttgagaaccatcaccctagattggaaaagacttaaaagccttaaccatcaaatgcaaagtataaactttgattaaatact

SEQ ID NO: 830496 - DNA, 624 bp, Homo sapiens
agtttttggttttctgtacacaaatctccctgtaataatttttttctttatacctattccttttatttcatttcttatcttatagaattggccatgacctctagtacaatattgaacataaatggtcttgaaagatacccttgtctcattttcaatctcagcttttaattttattatgtctaatgagtgctatagaactgttatcattatcctttatcaattagaaaaggcatcttttcttttgttatgagttttcaacatcaatgggtattgaattttgtcaaatattaaatattttgtgcctctgtagaggtgatcatttgcttttctcctttattatattaatgtgatgaattacattgatcattttttaaaatagactttattttaggaagaagtttcaggttcaaagcaaatttggacagaaaatagagtaacttcccagatactccctgccttgacacttggacagcctttcacacgatcagcatctcacaccaaagtggtacatttgttacaattgattaatctacattaacacattattatcacccaaagtccatggttgacatcagggttcactsttagtggtgtatattctatgggttttcatagatatgaaat

SEQ ID NO: 830497 - DNA, 624 bp, Homo sapiens
agtttttggttttctgtacacaaatctccctgtaataatttttttctttatacctattccttttatttcatttcttatcttatagaattggccatgacctctagtacaatattgaacataaatggtcttgaaagatacccttgtctcattttcaatctcagcttttaattttattatgtctaatgagtgctatagaactgttatcattatcctttatcaattagaaaaggcatcttttcttttgttatgagttttcaacatcaatgggtattgaattttgtcaaatattaaatattttgtgcctctgtagaggtgatcatttgcttttctcctttattatattaatgtgatgaattacattgatcattttttaaaatagactttattttaggaagaagtttcaggttcaaagcaaatttggacagaaaatagagtaacttcccagatactccctgccttgacacttggacagcctttcacacgatcagcatctcacaccaaagtggtacatttgttacaattgattaatctacattaacacattattatcacccaaagtccatggttgacatcagggttcactcttagtggtgtatawtctatgggttttcatagatatgaaat

SEQ ID NO: 830498 - DNA, 537 bp, Homo sapiens
tctcttggatgagagcactatcagagcctgatcagtggagctcctttctttaaggaatgacctcaactctgtttcacatcagacacagtttggaagaccccacaggccattgcactgttgtatcattcatgtgggaagcccagcttcacaggggccacagaaatctcctctatgtgacacttctggctacagtgcattattttgttttattctgattttttaaggaggtccctagtaggcatcttaggaaactttgaaaatatattaagaagattcggcatttgatgcacagatacaaataaggccattttcctcagcctgcaagcccagtctgagactttgcaacctttctctcttctgattgtgaattccaagtgtcaagacaaaatagcactaagaaatcagtaaaatgtgacggtttttctcaagygtctactaagagcctagccagatgcacatttcttattccttttggtaaatagattcagatttggtatgattcaatgaactaaaaaatatcccctgctcaaagcttgt

SEQ ID NO: 830499 - DNA, 619 bp, Homo sapiens
ataaatggaaagacatttaatgttcatggattagaagacaatattgttaagatggcaatactccctaaagtgagctaaagattcaattcaatccccatamaaatcacagcgggctcttttaaaaaaatacataagctgatcgtaaaattcatatgaatatgcaagggaaccagaataaccaaaatgttcttgaaaaattacaaagttgaaggactcacacttcctgatttcaaaacttagaacaaagctacaataatcaagacagtatcttattgaagtaaggatataaatatagatctatggaacacaattgcaagtccagaagtgaacacatacttttatggccaattgatatatgaaaatgatgccaaaacatatcaatggagaaaaatcattttttcaacaaatggtgctcaatagccacatgcaaaattatggtgctggaccccttccttatagcatacacaaaaattaactaaaaatggattatagacctaaatgtcagagctaaaaccatgaaactcttaggagaaacctaggagtagtctctatgcccttcagtttaggcaaagccttcttaaatatgacacaaaaagtacaaacaaaaaaagaaaaaaga

SEQ ID NO: 830500 - DNA, 619 bp, Homo sapiens
ataaatggaaagacatttaatgttcatggattagaagacaatattgttaagatggcaatactccctaaagtgagctaaagattcaattcaatccccataaaaatcacagcrggctcttttaaaaaaatacataagctgatcgtaaaattcatatgaatatgcaagggaaccagaataaccaaaatgttcttgaaaaattacaaagttgaaggactcacacttcctgatttcaaaacttagaacaaagctacaataatcaagacagtatcttattgaagtaaggatataaatatagatctatggaacacaattgcaagtccagaagtgaacacatacttttatggccaattgatatatgaaaatgatgccaaaacatatcaatggagaaaaatcattttttcaacaaatggtgctcaatagccacatgcaaaattatggtgctggaccccttccttatagcatacacaaaaattaactaaaaatggattatagacctaaatgtcagagctaaaaccatgaaactcttaggagaaacctaggagtagtctctatgcccttcagtttaggcaaagccttcttaaatatgacacaaaaagtacaaacaaaaaaagaaaaaaga

SEQ ID NO: 830501 - DNA, 614 bp, Homo sapiens
acaaaaagtacaaacaaaaaaagaaaaaagaaaaataacttcctcaaaattaaaaacgaataacttgatttttaaaatgggcaaaggaggctgagcacagtggctcacacctcatcccagcactttaagaggtcaaggtggatgaattacttgagctcaggagttcgagaccagcctgggcaacatagtgagaccccatctctacaaaaaattttaaaaatagctgagtgtggtaatacacgcctgtagcctcagctactcagaaggctgtggtaggaggatcacttgagcctgggaggtagaggctgcagtgagctatgattgtgccattgcaccctagcctgggtaacagagtgagaccctgtatcaaaaaaaagaaatgccaaaaacaaaaggacacacccataggatagctataataaaaagagtcagataatggtgtggacaaggatgtggagaaattggaacctttatacactcctggtggagatgtaaamtggtacagccaccttgaaaaacagttggcagttcctcaaaaagttaaacatagagatactatctgatcccagcaattctacttttagatatattctcaaggggaatgaaaatatatg

SEQ ID NO: 830502 - DNA, 660 bp, Homo sapiens
ataaatgatatcatttataatggaaaacaagaaaccaggcttccaaaattaaaagtaccaaaactctggactggaagaaagcacatatttaccctgtgtaaaaattctgttacatcaacaagacaaattttaacacagaaaaataccttcttaattttagaaacaaagtagggaggcagaaaggaaaaaactaactgcaactaacaaaaaaaaaaaagaagggagaaaagaaaccacttccatattcattaattagaatgtcttgttattttcatagacagtaaaaacttcttgaaattctttttaatcttaggccacagaagcatcaatggatcatatttggtctcgtcagtgtataaagcatttacaaacctaactaaatatagaattaatgggagttacgtgcttatattccttatacataggagaagaaagaaaaggacccctttatgccagctttgagtttggcttgattttttacgacttatttagaagccctagggaatgagaaagtctcttaatggaaatactgacacagtcttaaatatagtgacatgaacaagcrcttctgtgaagctgccccgggatgtgactgaccactgaagcaagtctgaaatgcattgagtatcagaaagtcaattatgatcaatttgctgataa

SEQ ID NO: 830503 - DNA, 598 bp, Homo sapiens
gctctgggtgactatgcatttcagtttgccctagaagagactctatttacacctgtggtctcagcataactattatcatcttccctccttcgcattcagtaaagattagtttggttgggtgcagtggctcacccctgtaatcccagcactttgggaggctgaggcaggaggattgattgagctcaggaatttgaggctgcagtgatctatgaccacaccactgcactccaacctgagtgacagaacaagacccatctcttaaaaaaacactgattggtttagacaactaataatctgtcaccccagttaatccatgccagggaatttaaacttaatcctgaagataggtccaaggagccagtgaaatgtttccagaaggaaagaaacatgatcaacatttgcattttaggaagattattttggccacagtagaagaaaataatgctggaggcaagagatgttttaggagattattgtagtcatccgaggtagagatgaaggtagtcaggattaaaatactgacagtgataatggatagattcaagayagatgataactactgagagagaggaatcacaaagacttggtgattttactt

SEQ ID NO: 830504 - DNA, 587 bp, Homo sapiens
gatacatgcataaaattctcaccgtcactctgaaaagcacattgaacaattttcaatamtgtagacgttttttaaaaggaagatttcatttgggctgaacagatatccaagttttaacatatgaattattgaatgtatttcaagggctttcagcgattctggtttcagtcctggaatgattaggcccgtctggaatgatgcacacaggctaataagcatatggcgttggcattttgaggcatagcttgttcaactatgcccacgttggagcttattgtcgggaagcaaggcacttactgtaatggtaatgcagatgttttatgcatagtttgagtaacataaaataagttaatatttttgattaaaatgagttttttataatttatatgtcttttatagaagcaactaaatgatatatttgggataattaaaaataagaagaggtttgggagagagtcattttcatccctgcttcggctcttaggatgagggttgatgaaaacaccggaaagaacatccattggatctgaaaagcaacaagctcttaaaactgctgcaccagcggcactttgacagtctttacttct

SEQ ID NO: 830505 - DNA, 581 bp, Homo sapiens
ccattacagcttaaatatttaaacactagaagtgattccattaaagtaggggaaaacacaagagagcttaccatctctgtcattaaaaattgttctggaaatatcagtcaataccacaaggaaaggaaaggaatacagtataaatattagaaaaggatcagtaaattttcattatttagaaataacatgatggtatacctcaaagtccaagtgaaatatttggaatattaatttttaaaaaagaatcctaattaagtgtctggctaacaaaagtaatattaaaaaaccaatagtttgtctgcaaacaaatgataattaagattacacaaaaatggaaaaattacactgacagatgcaagacaaaaataaacaccaatgaatgaaatttatgagaaataggaaacaaaactaaaactctgctgagatcaaatgaaaaaagaaaactgaataatagaactcaatattgcaaagtataaactgatctatatatttatgaactccacaaatgccaaagtkattttgggggcagtagggatttgataacgtaatgtatcatgtatatccttaaaagttaagatgta

SEQ ID NO: 830506 - DNA, 579 bp, Homo sapiens
ctgtgcttctgcctgggacataagagagaggtttgctcatggctggagtctgaaatcagaaagcacttgcaccaggacagggcaggatgctgctgtgagcctgcagcttccactttaagccagagaaaggctgtttggctgctgttactaccaccccggggcaactcaggctaggaaggcaggtgttgttggggagatatataacacaacattcccacagagcgttttcagggctagaatatacgtgtaccgggaacaaataaacgaggtatctggacaagactggcaggaagctaggtgctttgagtaggctgcaggaagagacaacagctggaccaagtttccaaggacagatgagaggtcgccagttggggaagaagggagaaggcagaaaaggtaccaaagttgcgaggagtaacttaagcaatgcctgaaagcccctggagagctggggaatccaagtgtcacagtcacagcttgataggtgggttcctgcagcagcagcatcactattcacctccttctcmtgctgaagaggggaactcaacccctcctaggcccaagtagggatgtgccctc

SEQ ID NO: 830507 - DNA, 445 bp, Homo sapiens
ggcaataggacatctaagtggaaatgtttagtagccaacggcatacagaatttagataccaaagatttggaagtcctcagtgcataggrggagtcgaggtaatatatctaagttaagagagcatacaaggttaacaaagtgaaggttcaagaaggaatctttagggtattcaaactcttaggggaaagtagagaaaagaggactcagaatggtgaagtgactagaaaagcaagaggaagataaaaaaaaagattcgtattttagaagccaaagcagacgagaatttttcaaaggaggaagcagtcactgacctcaatgctgtagaaaggtcaagtaagagaatataaaaatattcaataaattattttaattagaaagccattgacttaggaagaattttagtatagtctttagatgaagatgattaaattaaggaataaatagg

SEQ ID NO: 830508 - DNA, 445 bp, Homo sapiens
ggcaataggacatctaagtggaaatgtttagtagccaacggcatacagaatttagataccaaagatttggaagtcctcagtgcataggaggagtcgaggtaatatatctargttaagagagcatacaaggttaacaaagtgaaggttcaagaaggaatctttagggtattcaaactcttaggggaaagtagagaaaagaggactcagaatggtgaagtgactagaaaagcaagaggaagataaaaaaaaagattcgtattttagaagccaaagcagacgagaatttttcaaaggaggaagcagtcactgacctcaatgctgtagaaaggtcaagtaagagaatataaaaatattcaataaattattttaattagaaagccattgacttaggaagaattttagtatagtctttagatgaagatgattaaattaaggaataaatagg

SEQ ID NO: 830509 - DNA, 445 bp, Homo sapiens
ggcaataggacatctaagtggaaatgtttagtagccaacggcatacagaatttagataccaaagatttggaagtcctcagtgcataggaggagtcgaggtaatatatctaagttaagagagcatayaaggttaacaaagtgaaggttcaagaaggaatctttagggtattcaaactcttaggggaaagtagagaaaagaggactcagaatggtgaagtgactagaaaagcaagaggaagataaaaaaaaagattcgtattttagaagccaaagcagacgagaatttttcaaaggaggaagcagtcactgacctcaatgctgtagaaaggtcaagtaagagaatataaaaatattcaataaattattttaattagaaagccattgacttaggaagaattttagtatagtctttagatgaagatgattaaattaaggaataaatagg

SEQ ID NO: 830510 - DNA, 636 bp, Homo sapiens
tctcaaaagaagacatttatcagacacacagaccaatgaaatagatttgagaactcagtaataaattaatacatctatagggaactaatttttagcaaagttgccaagaacatacactggggaaaggaccctctcttcaataaatggtgctatgaaaactggatatctgtatacatagggataaaactagacccctttctattgctttatacaaaaatcagataaaaatggattgtagacataaatctaagacctcgaactatgaaactactaagagaaaacattgaggaaactctccagatatgggtcttggcaaaaaattcttgagtaataccccaaagcacaggcaacaaaagcaaaaatggacagatgggatgggatcacatcgagttaaaatgcttctgcatagaaaaagaaacaatgaaaaagtgaagagacgacccacagaatgggagaaaatatttgcaaacaacccatctgaagacagtttaatactcagaatatatgaggagccagaasaactcaatagagaaaaatctactaatttagttaaaaacgggcaaaagatttgagtaggtatttcttaaaagaagacaaacatatggcatacagatgtatgaaaagacgctcaatgtc

SEQ ID NO: 830511 - DNA, 485 bp, Homo sapiens
tagtttactctactcttaaccagaaagtgatggaggccagtgcaaataacattcacctgattctgtaaaactcataataagaaataatgaagcatctggcagatagggaaaggyccaagaagaaacattttgaacggaaagtgtatcagtccctttggcaaagacttactggttggcaaagactgttgttgcttcaggaaacccttgcctgtcattttcagagtaagaatatatatttttccatgcattcagtgttgtcttcagagtggaattagttcttaggaccaatagtaaagcatgttcttggttcctttttccctcagaagtagtttagagtagtggttctcaaactttgctgtttattagaatcaccaagtatcttagaccacttgtgctgctataacaaatacgtcagactgggtaatttataaagaacataaatttattttctcatatttctggaggctgagaagtcaaagatcaag

SEQ ID NO: 830512 - DNA, 644 bp, Homo sapiens; identical to SEQ ID NO: 829999

SEQ ID NO: 830513 - DNA, 622 bp, Homo sapiens
aaaattgataaattttatctaaacaaagattatattcatcggtgaaaagctgaaagcttttcttttaaggtcaggaacaaaataaagatgcctactctggcaccatctatccaacatagtaatrgaatgcctggccagagcaattaggcaagagaaaggaataaaagccatgcaaatcagaagggaagaagtaaaattatctctatttggtaatggcatatcttatatattaaaaactgttattttataaaaaagtaaaaactgacaaattcagtagtttcatgctacaaaattaccacacaaaaaatcagtagcatccctatatactaacaacaaactatccaagaaaacaaattaagaaaaaaaatcccatttacaattgcatcaaaataaagaaatataatacataaataaaattttaggaagtaaatttaaccaaagaattgggagatctgtgcactgaaaactgtaaatcattgatgaaaaattgaagaggacaccaataaatgaaaaactattccatgttcctagattggaagaattaatatagttaaaatgtccatactacccgaagtgatgtatatatttaattcaatttctatcaaaacttcatgttattttc

SEQ ID NO: 830514 - DNA, 543 bp, Homo sapiens
taatacagcagcagaaaaccacatgttctcacttataaatgggagctaaaaattgagtgcacatgacacgaagaaaggaacaatagaccccagagcctacttaaggatggaggktgggaagaggatgaggattgaaaaactacctgccgagtactgtgcttactacctgggtgatgaaataatctgtacaccaaactcccacaacaggcaatttacccatgtaacaaacctgcacatgtacccactgagcctaaaataaaagttggaaagaaaaaaaaatgaccttacaatggcctctaagtattcaactgaaaggaaaagttgcacagctctcaatttaaatcaaaagctagaaataaaataagcttagtgagtaaggcatgccaaaaagctgagacaggctgaaagctaagcctcttatactagacttgtgagtacaagttagccaagttgtgagtacaaaggaaacgttcttaaaggaaattaaaagtgctacttcggtgaacacaggaatgatgaagtgaaacagccttattgctgata

SEQ ID NO: 830515 - DNA, 635 bp, Homo sapiens
acctagataatactgatattacaaaggaaatgaacattagctagcctgtataatgtaaaggctaaaactgyagtgaacactgactctatatcatggtcaactttaaatattatgtaacaacagacactcacacatacatttccaagatccatctgatacttgaaaatgatgctgccagaaacgctctttccctttagtcattggccttcactcatagcctggcctatgcttgccttgaatgacaagtatgaagtgagggaaaaaggtatttctgccatacagagaaacttggggctggtaggagattaagggatgggaaccctgagctccaggcttggctcactcatgtactaaaggtgtgatcttgtgcaaatcatttaatctattgagtctcagtttcctccttcatttatttattcattcaaccaacatttattatacatagagactcaagtatggtgtctcccttatgcaagaaccatgcagtaggtgagctggaagtaagcaaagtggaaatgctgacatgttcagtgcatgttatggggcatgcagatccaggtgagagccatgagagtggagccttttctctctcactcagtgccatagtttcacccctgacgcagtgcccagtacat

SEQ ID NO: 830516 - DNA, 619 bp, Homo sapiens
gacttggatccacccttgattgcctcgcttggggctgccccattgcacaataacgagggccatcatctttgtagaataaatagaaacagagcaccctgaagttgtgtaaccaactgggttcccctggccaagtctagtggcatggccttgggcaagacattgaatgattctggacctcggtttccctatcttattcctagccaagtgtccttccttcagaacctcaagtttaggcaggggagagtagttgggaaatgatacctgagctttgccttatgctctgctagcatggagaagtggaaactgatttggagaaatagtttgaaggctgggaatgaaaacttgtttgcaacctagtcatgctgtttgattgattttccatgtggcataaagtcctggagatattctgaatgaaagtcaggcctttcttgactgtcccagtacacttgtgggaactgaggagagggctctggcagaaaactgactggcggcagaaataaaaccaccatagaamttaccttggtatctattcatccgctgtaacccacaggtccctgcctggttagactttacttcgctctgtccccctctactcatccctactttccttctcccagca

SEQ ID NO: 830517 - DNA, 445 bp, Homo sapiens
tacagtgtacagttcagtgagttttatgtattcacaaagttgtacaactattaccataatcataattataaaattttagaacattgtcatcaccccaaaagaaaccccataatcattactagtcacttctcattttcccccaatttctccagttgtaggaagccactaatttgcctccaatttttatagatttacctattctggacattttaaataagtagactcatacagtatggggcctttcgtgattggcttctttgacagcataatgttttcaaggttcctccatgttgtagaatcaatatttcattacttcttaytgctgaatagtatttaattgtatatatgaactacattttacttatccattcataattggtagacgttttagatagttcccaatttttagctattatgaataattatagcattatacatgatgctg

SEQ ID NO: 830518 - DNA, 572 bp, Homo sapiens
ctatacctaaaatagcatatctggtgaatacctccttaaaacatgaaggtaaataaacactttttctgacaaaagctgagggctttcaataacaccagacytgtactacaagaattgctaaaggaagtacttcaatcagaaagaaacagatcttaattagcagtaagaaattatccgaaggtacaaaactctgaagaaacatatatgacctgtcagacagagaattcaaaatagctgttttgaggaaactcatagaaattcaagataacacaggaaagaaattcagaattctatcagataaatttaacaaacagattataatagaaactggtaatagtaactacacacaaaaaacacagaacattataacactgtaactggtgtataaattactgttatcttaagtagaaagactaaatgatgaaccaatcaaaaatagcaactacaatttttgaagacatgggcagtacaataaaatacaaatagaaagaacaaaaactcaaaaaacagggagatgaagttaagatacaggggtttttattaggttttctttttgcttatgcaaacagcat

SEQ ID NO: 830519 - DNA, 613 bp, Homo sapiens
aagactttttattaccaattcaatctcattactcatatcagtctgttcaggttttctgtttcttcctggttccatcatagtaggttgtatgtgcccaggaatttatccgcttctaggttttccagtttgttagcatattgttgtttacagtggtatttaaagaacttttgtatttctgtggtatcagttgtaatgtctccttttttcatttctgattttgtttattcgggtctctctctcttgtttagtatagcaagtggtttattggttttgtttatcttttcaaaaaaccaacttttcattttattgaacttttgttcttttagtctttttgtttgtttgtttagttctgtgctaatttttattatttctttccttctattaattttggctttggtttgtccttgcttttctagctccttgaggtatattgttagattgcttattttaaaattttctacttttttgattcagtgtttttattgctataaattttsctcttcacactccttttgctatatctcacaggttttcctgtattgtttcaattttcatttgtttcaagaatttttaaaattatctccttaatttcttagatgacttaatagtcatt

SEQ ID NO: 830520 - DNA, 509 bp, Homo sapiens
ttgcttgcaccctgaaatctgtagtccacaagcaacagccacagcaagacaatccgagattgggctggcattgagaaacgcccaaaacatgtttacatcttgcatgtcttttagggctcttgttaacccaaggagaaagagcagtatgaacaccggttttagagaataaatctaagaccctgttagtgcccgaagcaggattagaaagtagattttcaccggattccattgtccccaattctcttgctccagaccctattctaaggcataaagttagggaaatagccacagaggctcaggcacattgccctgatttgaaatgtttccctcaaggggtcctttcagttgttctgaaaactcagcctgaaaattgtaaatrccccataaaggcaaagcttttacctggaacaatccattgcagaagaagcatattccctaaagccaaggttgttgcacaatttgagctgtctcacaagcaccagcaactagtcattcatttattcaagaaa

SEQ ID NO: 830521 - DNA, 633 bp, Homo sapiens
tgaactggaacttctgtaaatggaaatataatttaaattaaaatcaatgtatgaattaamcagcagactggacacaaagagataactagtgaagtataagataaatctaaagaaatcatataaaatatagtacagagaaatgagatttcaaaatataataagagaaaaagaaagagtttttgaaaaagtccatacacctaattggagctctggaaaaacacagtagaaagaatggaaaagagacaatattccaaggaaaaatggctgagagtttttcagaattgctgaaagatgataagccaaatcacaagcagataaatacaaataaaataattccttggcacattagagtggaagttcagaacaacaaggtcaaagagaggatctatcttaaaagtagccaaagataacaaatcaccacaaaggaataaaaattagaggtacagcagtgtttccaacagcattaatggaagccagaatatcattttcaacgtgtcaaagaaaaaaaaagatcaatcccaaatcccacgattagtaaaaagatcgtttaagaataagagtaaaataaaagacatttaagacaaacaaaactgagtatagatcctcacaaaagaaaatttcgaaggatatact

SEQ ID NO: 830522 - DNA, 574 bp, Homo sapiens
gcttttaggggccccgcagcctcccccatccccatttccacatctgcaagccagcaggtagctgacctggtgtctggactgtggtgatggtggtggtgatgatggtggtggtagtggtggtctcctcatcatctcctgaagctgtggaggaggtgatggtcccctggatcccgatccctgcgccctgggacacaacctctgcaacccacggccttcccatgtctccaggaccctcttgggttggtgtccaggctctgctggggggtgtagtgctggctatctcccctgggcctagggtgggcactgccatgctgggccctggaggtaggggagctgtgattcgaagcataggggactctgactccggactccagggtccctccttggactggggctgagtgggtaccgcacccatggctggagtggggctggtaaagacagggcggctgtcctggttggccaggcggggaagggsacttggggtgaagggtgcaggtgggtcaggctgaaaggacagtgctggcctcagctcctcatctcccttttccagcccctcgtgtaggaattcctcaag

SEQ ID NO: 830523 - DNA, 574 bp, Homo sapiens
gcttttaggggccccgcagcctcccccatccccatttccacatctgcaagccagcaggtagctgacctggtgtctggactgtggtgatggtggtggtgatgatggtggtggtagtggtggtctcctcatcatctcctgaagctgtggaggaggtgatggtcccctggatcccgatccctgcgccctgggacacaacctctgcaacccacggccttcccatgtctccaggaccctcttgggttggtgtccaggctctgctggggggtgtagtgctggctatctcccctgggcctagggtgggcactgccatgctgggccctggaggtaggggagctgtgattcgaagcataggggactctgactccggactccagggtccctccttggactggggctgagtgggtaccgcacccatggctggagtggggctggtaaagacagggcggctgtcctggttggccaggcggggaagggcacttggggtgaagggtgcaggtgggtcaggctgaaaggrcagtgctggcctcagctcctcatctcccttttccagcccctcgtgtaggaattcctcaag

SEQ ID NO: 830524 - DNA, 482 bp, Homo sapiens
ttctgctgcccaccacccattcctccatcctctgattatagcactccattttcccctctggggacccaccccagcacatgacttcgccctggccaataagaatatcctggccaataagaatatcctcaggctataggttcatggagggcatgtgacccaatcagtttcaaggatacataatgaaacttggggattattcaaagagtcacacatctctatccacacaactagaacctggggctgtgacattttgccattacttgtctgaggaccaaggctgcctagaagatggggtgagagacagaaaaggtcaggtcttggtcacactgttaatgtttccagataaggctgagcctgtagccggttctactgctggacttttcagatactggtgacaacacataycttctttttaagccagttgagctgggctttctgttactctcacctgaaagagctgtacctgagatgaaagcaaggtg

SEQ ID NO: 830525 - DNA, 566 bp, Homo sapiens
tgcctggaaaacaatgggaggcacaacaagcttttggagagtgatggggcatgatttaacctgtgccttaagaatgctgagcasgtcaggcatggtggcttattcctgtaatcccggcactttgggaggccgaggaaggcagattgcttgagctcaggagttcaagaccagcctgggcaacatggcaaaatcccatctctacaaaaaacacaaaaattagctgggtgtggtggtggcatgcctgtggtcccagctacttgggaggctgaagtgggaggatcacctgagcccagggaaggtcaaggctgcagtgagtcatgatcacaccactgcactccagcctgggtgacagagtgagagaccctgcctaaaaacaaaaaacaaaaaccaaaaaacattctgagctaacaggatgcaagaggaggagaaaggaggctggaaggtgaaagaacattagaaagtcaaggtagtcaggcatggtggctcatacctgtaatcccaaaactttggaaggcagaggcaggaggatcacttcagaccaggagttcaagaccagcctgggaaac

SEQ ID NO: 830526 - DNA, 612 bp, Homo sapiens
tgttttcaactgttaaaacttttaaatgttttagatattaatctgacaatatacaggagggcaaagaggttttcaaaattatttcagaaaatgtggtccaaatgtttgtaaaataggttaagatctttccatttccctaatttactagagattaaactcaggcccatagatattgaatctgtttttcagtatcagagaaaaacactcgacaagttttttttttattggctataattaaatatatttcacatcatatgcttatgcaactgcatttaaaatgattagaatatgttcaaattattttgttcatgtttttccccctccccaacacttcgtatattgaagccctaacccctaatgtgactatatctggagattgtgtttttaggaggtaattaagtgaggtcaaggagagaatggagtcctaagtccataggactatgccttgtagaaggggaagattgattctctcttctcttctcctctttttctttcttttcayggtgagaaggtgactgtctgcaagagccaggaagagagctctcctggaactcagtctttgactatacagcctccagatttgcgaaaagcaaattttggttgtttataagt

SEQ ID NO: 830527 - DNA, 613 bp, Homo sapiens
aaatataattgtcctatgagggtaggtctgcttttgggctctcgatwcttttcaaagattccattggtttatttttgccccagtgtcccaatgatagaaccatggccctaatatccctcttagtatcttaccttgttctttctttgtaatatcttagctatcctcggccttttgcatttcaatataaattatgaatcagcttgtcaattcctactctccgaaaatgttggagttttcactggagtttcatagatcaatttaaaaagaacataaacttctagtctttcaatctataaacaaaaaatattctccatttatttagcttcctttaaattttcttcaataaagttttatattttctgtgtagagttactgtacatttttgtttataccaggctattgatatgcacactaaggaaagttagtttgagatatggtatcaagcccctctcagctgagagttcaatgatagtatcataatgtgaatgataacattcatggaccagtctgtcctggaagtgtttctgatgaagtctaaccttttccttattttattttattttattttattttgagatggagtttcgcccttgtcgcccagtttggagtgcaa

SEQ ID NO: 830528 - DNA, 638 bp, Homo sapiens
ttcagtaaattcagaatcatattctcaagtgtggaatattctgcctcatgagactggagaagtatcccaagcattgtccttccttcttcgtgttggaggtgtgggtggcataatttttcctttaccttatagatgactttctggaatgcctcagactattctaatcctaaaaacttcaccaatgagacataccttatgtcttcatacagtttttaatgccctctctctggactgtgtgtgtcttaacagtcattcaacacacttgacatatcttgttcatccagtatcattacaatgatgttatcaatatgcctagtgtcccatgtcactttggactggaattatgacaaataataggaaaagtagtatagcccagtggtaagaccataaatatatgctattgtctaccccaggtaaagacaaactatttctgaaaaatgtatccactagcttagtatcctgtccatctgatgcagcataaatctgctggagcaaaatactccatcaggtaacacagctgtaactggggttaccagaatayagagtttgcagttgaacatagcatctttcatcatctttttacctcatcctttaggtctttaagtatgtggcactaacatatgtcattctacataaaa

SEQ ID NO: 830529 - DNA, 620 bp, Homo sapiens
ctttatacacatttgaaaatgtagtagtcaagccaaatgtgaagtctttcatgctggtaaataactcagagaggttatagatccagagaaagtacaaggagaaaaatacatacatgtatatttttcattatcttctaagagtatgaaaataattgaaactacctaactatggaagacaatcaacaatgctattgacacagtagcaacttgttttaataattagcagcattgagcccaaaaacattgttggaatcattgctaaaatcaccacaaaaattttggaatcatgtactaagaatcacaaatgagccatattcttttgctattattttgggtttgactaagaatgttggagacaaatgaactgtatttgacctatgaggaggtgtttttgatatattgtgtctttactattggagaaataattttttaatttgagcctaaatctaagaataaatatcaagaaaaatatgaatttgacaataaaaggattaaaaaatattgcaaaatgaaatcataaggttaaaaaggacatcagtgagaaaagtaaggctgttcataacctccayacaagctgtgctaaatctactccctattctagtatatatgccaatattgtg

SEQ ID NO: 830530 - DNA, 632 bp, Homo sapiens
cttaaggctacctgatttcctctactgtttcagcacacagatctctttctctccttatagttactatgttaagtaatctctattttccttaagtatatatacatactccttcatccttactctgagcaggaagatttgtctcctacttcacagagaaattagaaaatgtggtaaaagtggtgaaggcaagagggaaaatgaacaggatagttgctcagctttctttgcccactctggaaagccagattcttatttataatctccttttatttctacccatctaatcagtggaagaaattctccccacctattcgctgacaacaggagtatggattagtgctatttagcaatgcgttctttggcccagccattatatttttggaaataatccaagaaatatttgaagaaaaaaagatcaaaatataagtatagctgttctgttggattttttaatagaaaaaaattgaaagctttctacatgttcataaataaggaattggcaattagataggcagaataagttctagtgttctgtactactataggatgactagagttaacaacaktatgtcacacagtttcagatagctaaaggaggatatgaaatgttcccaacacaaagaaaagataaa

SEQ ID NO: 830531 - DNA, 630 bp, Homo sapiens
atagaacaggagaatataaaggatccaagagttagaaatacatgtagacgtcacaggaactgataaatcatagggaaaagagaggacagatattttctctagctctccctatggtctcatattcacttattcctccttctctctataatgctttctatgctttttcctctgtagaccagtctcttctgctcatagtcatcatggtcaccacaaaatagtgccctcaatccttggtcttcaggattttacctcagctttatacatttaattatctcagtatttcagggagaggaatttcattgacccaacttaggctgggtgtctacttgatgctatggtggccaagatggtaggagaatcattggtacaggtatagacacccaaccacatgaacaaggaaaggagagcacatagacctgttctttgaacagcatgtatcatagtcaagcatttagagcaccaggcactaggggcagagtaaacaaggagaaaagaaagaaacaagagcccaggtaagttttctrtggggttctgactttaaactgacaccactaggcccactatggtcttaggactgttaaagctcctttggtatgactaagtccatgatagcatcatctcctgttttct

SEQ ID NO: 830532 - DNA, 636 bp, Homo sapiens
aaaaaaaatggattaacacaagtggttttcaaactgcatcccctgaatgactctgttggtttgaaaaaattttctctattactaaaaaagtttgaaaattactggcttaaatcatcaatggtcaagagagggcgttaataggaacaggctaagaagtctttcatttactcctcaaaattgctaagctttatccacccattaagccaagccccaaaaaaggctcacacctggactatggcactctgactcactgtagaattgtctttagaagataaatttaacattcagggctatatttaaatccattccctcagctttcattcagggacaataaaataatcaccagtgtaaaagtaccagaggggtgaaagccaacaggaaaaagactttcaagatagttatggtcaaaagcatcaaatgctacacagagacaagcatcacaagatgcaaaaatgtcatggtaaagattataagagaataatagtgtctactattgaaaagagtgtgagaacacaggcattttcacacaccattggaaaaaatagraattgaaacaatcttcttggagggcaatctgacaaaacctaacacaaatataaatgcatattatccttataccacttctactcataaaaa

SEQ ID NO: 830533 - DNA, 585 bp, Homo sapiens
cagtttgacaccaaccttggcggtgtctacactgccaacatcagtgctatgagagtgccgggattgcccttccccaaatccaggcagtgcagtgtgaggagagacttgttctgcctagaggaaggcgaaggaagaggactttgtctttcaacttgggtacaagctcagtcacagtaaaacaaagcaccgggcagatctcttaagcctcgaattccaggcttttgctcccagaagttgttttgagacccaacttgggccagaagataatctgctgcattggtgagatggaaacagtcacagcaggatttacaacctgctgactaaaacagctttaggcctgtaataaacatcagtgacagccaggcagcagcagactgaggccttgggtgagcccgagtactgtgctggtgaaagactgtgggcttcaaatgcaacccagcatggtgccagctgtggtggccatggtagtgcccacattaccmctcccccaactccaggtggcacagtgtagtgagaaacttgttctgtttgggggaaagtgagggaaggaagtaagaaaatttacttgggaacccaagtaaagga

SEQ ID NO: 830534 - DNA, 590 bp, Homo sapiens
gagtcccaaagctgaagaacctggagtccagtgtttgagggcaggaagcatccagcacaggagaaagatgtaagctggaaggctaagccagtctagccttttcacgttttttttctgcctgctttrtattttggctgtgctggcagctgattggatggtgtccacccagattaagtgcctttcccagcccactgactcaaatgttaatctcctttgtcagcacccttacagacacactcatgatcaatactttgcattcttcaatccagtcaattgacactcagtattaaccatcacgtgccttgaagaaacaaaatgtaacactgtagtaagttattaataatgagttgttgacatttgaaaacagaagagagtgtttactttgtggacactgaatgtacagataagaattagcagcagcctgaatgaacaatggtgtctaaatggagaataagggcaaaacaaaatcaaatcaaacaaagcaaaagaagaaaacaaacatgcaacagtaacagaaacaaaacttgttttcctgaccataattagcctctaagagtaataatgctaatagaagatgactatccaatttt

SEQ ID NO: 830535 - DNA, 473 bp, Homo sapiens
gcaatctttatgcagatattaatgataaataaataaggttttaaaatctgggatatcatacagagcaggtgattgggaaacttagttgagaattacacacacacacacacatatatacacacaaacacacacaaacacaagtacacatggtggtaaatgtaatctggctgttaagaatgttcactgataatcagctaatagccagaagaactttgcattgtgcagtgtcctgctaaaggcaaataacacacatttagatatatttttatcactacaaacaccacataatgtccatgatggcagaaatgtttgtctttgtgtgtgtgtgtgtgtgtgtgtgtgtgtgtgtgtgtgtgwgagagagagagagagagagagagagagacaggatctaactctgttacccagactggagtacagtggcatgattatagcttattgcagccttggcttgcagagctcaagtgatcctc

SEQ ID NO: 830536 - DNA, 595 bp, Homo sapiens
ctttatgataaaatataaagtaaaatcacattaggctacgttctacacactaacttgtgtttgttcttctagaatttcrgtgactttaaagataaagataaaggaactcctccaaataaagacaaagagataagacaaccaaacacaacgtgtgatcctagatcgtaggatctggagctcaacaaaatagctgtaaaggacgttacagagatatatatgtcaaaaatttaatgtctacatatcagacattaatattttattgctctaaaatgggccttattttaataattaattttacaatgattatacaatattttttctttaggaaatcacactgaacttattgaagttcttaagcatgtctgcagcttattttcaaatggctttgcaaataataacaaatatcaaaaatacacacaaaataaaaagaaaaatgcatggaaaaataggacaactgttaatatttgacaaatcttatctttcctttgtgtttaaaattatttcaaaataaaaagtttaaaaagtaaaaaatatataaatatataaaattgaacatattgatcaatcaaaaactttaggaaatgattgtggtgat

SEQ ID NO: 830537 - DNA, 563 bp, Homo sapiens
ctatctttttctttagggttctactgaatatttatttattcattcagtcagtcaacaaatactcaattagcacctgtcagtatcaggcactctgctaggtaccagtgatagaaaggggaacagggacaggttctgctcttgaacagccaaagcaggtgcttacgtaagtctacctgagcattttggcagcttagaacataagattctcaagattcatcatagaatcagcttttgctatgttgcattctgtaacccttcttgaaaatcagcaatattaaaggctctgacccgttttacagtaaagaaatctgttttatcttctgtattccagtttcttaaatttatttgactaggtaatatttttcagccacataaccctattaacatccattgaacacactttgaaaaatactaaaagctttgtaaattccctgtataaaatcaataactcttttataamagaaaaacagacatatctagcattgctttcacttcacagacacatgctgattacagtatttgtaaactgacaaacactgattgcttgataatgggctctacta

SEQ ID NO: 830538 - DNA, 613 bp, Homo sapiens
aattctagcccatgaaaccttaaaatatggaaagatcattggctttctgatgaagcagcctcacaaacatggtctcaggcagttaagggcagaggcaagcactgtaccaataacatacaaggtttaagaggttttgttttgttttgacttaaagtatttcaatatccctgtggctattaaatgatctattccaatcatcattcatataagcagtaagagctgttgaagaaaaaaaaggcatgggaaaatatttggggagtaacaagctaaatcaacaacaaaatggataaaacacaagaatagatcagtcagaataagtctgaaaggattaagggctcacagagaaaaagcatttgaaatgttacttcaatctttttaaagtcagtataaacagggtaggatgttctcttgggttttaaaggccaaaattttctaaggaattgatgaagtaatgtttgccaaaaaagcaattatgcaagcagctagactgaaaagtagaattttttttatataattaacctgagtcaaaagraaggtatagtctcacacatttttcatgatgatgtatcagcaatgtgcgatatagttgtactttgatgagtttaaaatactg

SEQ ID NO: 830539 - DNA, 591 bp, Homo sapiens
tgcatgttcctgacatatgataagcaccctatgaatgaccaacctcatccctgacattcacctcctcattcagtagaacacatactcacagactcatataaacaggatcctaagagtttgtacttagaagtagaatataataagtacaaatctacacatcttaaattaacaaaagctagtgatttattgtaagctgaataagagatcggttgtgtagtgcttagaataggtgcttatccaatccatttcaatgtaccttgctttgaatgtgtacaatatgccaaacaccatgagaagatgacactttttcagtaatattaaaaaatgcttcacctctcaatgaagcaggagtaggctaaatgcgttctgtttcacctatacctgctaaattaattcatcatgaaggactataaacacttgaagtaattaaataaatgaccttctaatctctattagcgattacttggtggcagggccatggccagcacttcatctacaaagatttatgatgttacctttcaatttttctttaatttaaactcaytgtgactcattgtgtcattgagactaggtgttcctgctgacatttca

SEQ ID NO: 830540 - DNA, 672 bp, Homo sapiens
ccatttggcctttcccatcataataactctcaccctacaagtcagggagccagtgtgggggtttggctacctgctacgtatgtctatggcaattatgcattctggcactgggaaatgaccacagggtgggtccctggatttccttccaaggaaggaagtcagacctgtaagtcagacctgagctaaaactccattaattacctgatctccataagcctctacttcaactggaggaccacaatgacattttgggtcccttggtatcaatgtcagctcagagccagtgtccagtagtccccaaaatgtctgatcatttccctttcttcaatgcagttaccctggtaatagactgggggtctccttggggaaggatgggagaaatattaacagcataaatagtcactagcatagtggggtccttttcaaggggacccagcctccccttcattcaagggtttctgggcctataaattttgtggtggagtgactgttgttcccaccgttagatctgacatacagagaagagcaattacaggactcttcagagatgcagttgccgccatcacaaatccatttcgcaaagcgttggtcaagggtgtatcttctggacccycccagctgggatgggtaggtccaaagtgaccaatccactccagcatccaatctccctaa

SEQ ID NO: 830541 - DNA, 618 bp, Homo sapiens
tcttcaataaatggtgcggggaaaattggatatccataagcagaaaaatgaaactggactcttatctctcaccataaataaaaataaactcaagatggattaaagacttaaacataagacctgaaacrataaaactactagaagaaaacatacgagaagcatttcaagacatcgatctagacaaagatttttatagctaagacctcaaaagcaaagataacaaacataaacatagacaaatagtactatattaaactaaaaagcttcttcacagcaaaggaagcattcaacagaatgtagagacaacttgttgaatgggagaaaatatttgcagactattcatttgacaaggtactaatatctggaatacacaaggaactcaactgaacagtaaaaaagcaaataaccccatttaaaagtgggcaaaggacatgaatagacatttctctaaagaagacatacaaatggccaacaggtatatgcacaaatggtcaacatcactaatcatcagggaactgtaaatcaaaaccacaaatactatcttactccagttagaatgactattactgaaaagacaaaaaataatagatgctggagaggatgcagagaagaggaaac

SEQ ID NO: 830542 - DNA, 637 bp, Homo sapiens
cccaaaaaaatacccttttaaaaatgtaaataagcattttaaaactaatcttttaaattattttttctagaattatattttggggattttgatctttcagcatgtctatgttcaggattatggtgtttgggactgtgtctttctggattacgattggctcttgccaaatatttacttttagctatcagaactctgtcactgctatcttcctccctagacagagaacagcttgaaggtcagagtgcgtttcagtctcctttggatcctaccatggcgtggtatctagctccgtgatcagccagttgaaagttcttaaaaattactgtttattgaatatgtaattgatttttaagtgctatgtgttaaagcatctatagaagaaattttattcctgtgattataagttatgaaaaaccatgcaaaacagcaagatacaatttcaaatatgatcctttgagagaaaatttgaaagaactatgaaacacaatctgggaagtttagtggacatacgagtgctgcagctgcagctctttcaggccacatcttctatstctatagatgcacctgcttggtcaccaggcactatgttgggtatagaatactagcattcaggtggttccaagtggccaaataggaa

SEQ ID NO: 830543 - DNA, 578 bp, Homo sapiens
acaaaagatcgctttatgcccatttgattattttttgttttatgtctccattttttagactaataaarcaattataaagtggttttgttcagatgattggttgtctttcattcttccatcttcaactcaggattctgaacattttcttctaaacatgcctaggatatattttaggtttttttgtttgtttgtttttgttttttaccacccagttttctgaagtccatgacataggacatttaacattttaagaaaccatgcattttctaacaataagccccccaaagaggcactcgtaggtaactgaactcttttgcttttattgcctttaatactttttctcttttcctcattaaatcaataaatggcataaatatcaagggttaatttttaagtgatattgtataaaagacaaaagattttgagaaaatgaatttaaaaccagtatatatgggtattaataaactttataaaatctctggatggatatcttatttcagtttatattttagagctcagaatccaaaccacccctatataataaactgaagaactgagcagaagtaggtagtaatctc

SEQ ID NO: 830544 - DNA, 589 bp, Homo sapiens
tgtggaatcaacctaaatgcccatcaatgacagattggataaagtaaatgtggtacatatacaccatggragactatacagccataaaaacgaatgagataatgtattttgagggaacatggatggagctggaggctattatccttagcagaataatgcaggaacagaaatccaaataccatatgttctcacatataagtgggagcaaagtaatgagaactcatgaacacaaagaaggaaacaactgacactgaggtctacttcagggtatagggtgagaggaaggaaaggagcagaaatgataactattggataccaaactaaatacctgggtgatgaaataatctgttcagtgaacccaagtgacatgagtttacctatgtaacaaagcttcacatgtccccgagcctaaaagttaaaaagaacaacaaaaagctttcagtgaccaagtatatatgagaaacataacatgtcctggacccattgtagagtaacaatgtacatttcattatgaagacctatgctaaagaaatcagggtagccaattaaacctatggactaattttaaatataaaatttaaaagagatg

SEQ ID NO: 830545 - DNA, 530 bp, Homo sapiens
ttctggagaaatcaggacgcaaagcaattttcattctcaaagaattcatggtctcataagggaaaaaccaaaacaaaatttgaatgacagagtctatgtactaggtctacctagtacctatgtatatctagtaygtagagtctcatatgtatacctagtacagagtctctcacaggtatacctagtacatatgtatacctagtacacagagtctttcattgggtctttgagcccctataatttagtgtgtgtgtgcaaatttggcattcgtgtgattgagttatgtctagctactctatgagactgtaagatcctggcggactgggaccaggtctgtctttgctcaccagtgcctcgccagtgctgaatgggtattgctgactgagccaactaatgttagtgtgatgagcctgacgttaactttccaaccaagttcaaactctttatttggggaccttaatagcttccacaaactacttcctcagcaatatcccactactccctcctcattctgtgacgtagcccatttc

SEQ ID NO: 830546 - DNA, 612 bp, Homo sapiens
gcaaagggatgttgccagagaggactcaggtggagttaggagtttgattctagtagtccaggggagagttaataaataggaggagcttgcactaatgaagatggagaaaaacagagagattcaagggatatttaagaggcaacagtgacaggacctggagatggatcagttgtcggggaagagagatcgtgtgagagcaagaatgactctgcagtttctgctcatgcagctgaatgtgtgttgaagcgccatttcctgaacactggaagagaaacagcttgtagaatatgagggcctcatctacagggcttttacaacttttttgtttttttattcctgaaagtatcaagttgcaaatgttttaaaaagattaacttgctaattgcttcatttttttttcttttttcttcttctacacaaacattgacttttccacacaatatcctttgtgttaggagatatacgtgctgtagcttttgccaycagggagtgcatctttgaagatttgattgtcaaaaactaatttaaagtctcctaagagaacattttctcctgaactgtctgtatcccccaaaaagtaacaaaaaacatcacatgagctggcattattgc

SEQ ID NO: 830547 - DNA, 593 bp, Homo sapiens
tcagaattgtcttggctatccaggctcttttttggttccatatgaaatttaaaatagttttttctaattctgtgaagaatgtcaacagtagtttgatgggaatagcattgaatctataaattactttgggcactatggccattttcatggtattgattcttcccatccatgaggatggaatgtttttccatttgtttgtgtcctctcttatttccttgagcagtggtttgtagttggagaggtccttcacatctcttgttagctgtattcctaggtattttaatctctttgtagcaattgtgaatgggagttcattcatgatttggctctctgttagcctgttgttggtgtaaacgaatgcttgtgatttttgcacgttgatttttgtaccctgagactttgctgaagtttcttatcagttcaagaagttttggggctgagatgatgcagttttctaaacgtgaaatcatgtcacctgcaaacagagacaatctgacttcctctcttcctattgaataccctttatttctttctcttgcctgattgccmtggccagaacttccaatacaatgttgaataagagtggtgagaga

SEQ ID NO: 830548 - DNA, 654 bp, Homo sapiens
ttgggttagaacatgttcctttagctcatcgtaattttttattacccatcttttgaagcctactgtcarttcatccgtctgatcctccattcagttctgcgcccttgatggagagacattgcaatcatttggaggagaagaggcaagcactctggccttttggattttcagcatttttcattgattctcatcttcgtgagtttgtctagttttggtctttgaggctgctgacccttggatggggcttttgtgggggccttgttgttgttgatgctgttgttgtcactttctgcttgtttttctttcaaaagtcaggtccctcttctgtagggatgctgcaatttggtgggggttcatttcaggccttattcatctgatatgctcctgtgcctggagatgtcactcaaggaggctggagagcagcaaagatggttgcctactccttctgggagctctgccctcgaggggcactgacctgatgccaatgggggttccccttccccgtgtggctctcagggtggccgccacaccacactgctcttccttctctccgtgggtcacgacagccttctagtcaattttgatgagagaacctggataccttggttgccggtgaaggattctcatgcttattatagttttcttctatgggag

SEQ ID NO: 830549 - DNA, 612 bp, Homo sapiens
ccagatctacaagtatctacaggataatttcrctggataccaccaaatatcatctgagactggaatccttcttagagactatattaattttctgcttcttataatgcaacgttcctgcaactatataggcccctggcattctcactctggtagcttcccagccccagttctagcatttgagtggagaaaggaaaccatggaaacgaaaaaccaaatgcaaaaaattttactcagttgcccaagactaacttgtctaaagcatctcttggaaaaatgttgatgatttataattatttttagatatttcaaccaggaaaagtttggcgtaaaaagaattccacagaggaaaaagctcttttctttttcattatctcagtaagtgtgaatgtgttaaagtcagcgtcgctgcagacggatctctacgtaggaattgaagaggactgtggagactcctttttactctcctcacacatatagttagtccaaaaagacctcgctcagtgtctgactacagtgcctgaaatcctcatcattagaacttctcccatttgcgataaacattgctgtttccatgtcatgtttttttttagaactccagtattctcgggagtg

SEQ ID NO: 830550 - DNA, 612 bp, Homo sapiens
ccagatctacaagtatctacaggataatttcgctggataccaccaaatatcatctgagactggaatccttcttagagastatattaattttctgcttcttataatgcaacgttcctgcaactatataggcccctggcattctcactctggtagcttcccagccccagttctagcatttgagtggagaaaggaaaccatggaaacgaaaaaccaaatgcaaaaaattttactcagttgcccaagactaacttgtctaaagcatctcttggaaaaatgttgatgatttataattatttttagatatttcaaccaggaaaagtttggcgtaaaaagaattccacagaggaaaaagctcttttctttttcattatctcagtaagtgtgaatgtgttaaagtcagcgtcgctgcagacggatctctacgtaggaattgaagaggactgtggagactcctttttactctcctcacacatatagttagtccaaaaagacctcgctcagtgtctgactacagtgcctgaaatcctcatcattagaacttctcccatttgcgataaacattgctgtttccatgtcatgtttttttttagaactccagtattctcgggagtg

SEQ ID NO: 830551 - DNA, 568 bp, Homo sapiens
cgaaaaaccaaatgcaaaaaattttactcagttgcccaagactaacttgtctaaagcatctcttggaaaaatgttgatgatttataattatttttagatatttcaaccaggaaaagtttgkcgtaaaaagaattccacagaggaaaaagctcttttctttttcattatctcagtaagtgtgaatgtgttaaagtcagcgtcgctgcagacggatctctacgtaggaattgaagaggactgtggagactcctttttactctcctcacacatatagttagtccaaaaagacctcgctcagtgtctgactacagtgcctgaaatcctcatcattagaacttctcccatttgcgataaacattgctgtttccatgtcatgtttttttttagaactccagtattctcgggagtgaaaaaaatggtaaacacagatatgttttacatattgctttctttccagacaagaagaaacctgggcagcctgacaacttagaggaattggtgaagaggaggaaaaaaatgtcagacacaccaaattaacatttgttgttgttgttgttgagacaggttc

SEQ ID NO: 830552 - DNA, 470 bp, Homo sapiens
ttaagtcacctgagagttacaattaagctctattaaaatgctkgtgaaaacttcctagctttcatttctcctctgaacatagactgactgaagaacatcaagtccccctaagaattactatcttaaacacaaaagttcaaaacacaggaggtcagatctaacacatatataagtcagaagattatgtctaaagccatgagggattaaatatggggattaaatacgtgggtccatgtttggtggtaatggtggaggggagttgatttcaggacttaactttggcaaggagttgtccttgataaagaaccagctctcttatgctgactgcctagaaaacattacgccatacccaacactttagcgttcatcaggttcacttaaaaaaattattgcattctagctgggctccctggttctgcatttggaaattatcacatcttcattatccaaataaacacctgccactactc

SEQ ID NO: 830553 - DNA, 587 bp, Homo sapiens
aataaggtcaatggaaaataaaacaacccaatttaagaaggactactaatggtccagatgcttcagaaatgaaagttgaagtcaccctactaggyaaagaaccacgacaaactgaggtgcttactaagggcagaaaatatatacagtgagtagtggaagacaatagttataaataaaagctatgactacatgaccatttgcagaaacaactattataagtatttttccttatttaattatgatgtttatgagtatctgtatataaatgtatatatttgtatatgtacgtgtgtgtgtatatctttgttttcttctctctcttccctatttcttcccttccctcttctcttttatatcctgtaacttagatactatgatgtaaagttacagatacctaaatactatgatgtatagttaatatatcttaactgaagaaagaatttgacctgggggcataaggcagagtgagagactaaggcaagttttcgatcaggaatgaaagtttattaaagttttagagcagaaacaaaaggaagtaaagtgtacttggaagagcaggagtcttgagtgatccaagtgggctgtct

SEQ ID NO: 830554 - DNA, 554 bp, Homo sapiens
ggaaaatcacaatttagatgttagttgttacaaacatcactrtttctttaaccatagcttgtagttttataattctagctcagaaattacattgatgcgtccacagtgaagtggctgtcacactctaactttctctgcagctttcagtcgtatatgaaaattctaacttttggtcacaatcaactagctgccttaaataatagaagtttggtaattttggtatctaagtttttttctctcacaatgaaatactgaattattaaaatctcagtgtttggatgatttctcttctacttatgtaggctttattatttgaaatgttaatgctacagactaatagaactctagggagctattcaaactaatttaattttaaaacaaaactatgttgtcagtgaaattgtcattaaagccacattgccacgggaagtggaaacataaataaagatcccaaatgttgaatcttgatgtattatttcactgacaacttgtttcaaacatttttttctcctttccaaaaagaaaactctgaaaacctattgccacattatata

SEQ ID NO: 830555 - DNA, 589 bp, Homo sapiens
tatgtacaccaccactgctgcttaaatctcaacagctagactwatttgttcatgagtggaaaatattttgctgcatttcatgggaataactaatctattggtataaatacatctagctacatatgtactttaaagaaaaatttgtcataaatgatctaacatctagaagacacttttggaagcctaatgcagttggaagacctgttttggatgcccacatatattttcttcctctccaagaactcaaagaataagccatgaggcaacttattcacctctagaatttgagaattcatgtcctcttggcaggcttaactttgtccttctgagcagaggcattgtaataacatcttttatgatggaatcacgtaacactatgtgacataccattcatcaaataataaaatagaaaccacatttgtggtataatcttaactgtgcatatagagctttgtattagtctacggtatgtcctgaagctaaatttgattactattcctctagcaagatgtttaaactaagtcgaattatgtagagttgtacttatggcttaaatggcactctcctgtgtaatgcaaatagaatagcc

SEQ ID NO: 830556 - DNA, 583 bp, Homo sapiens
ctgtctttttatgtcaacccatgtccagttggctcagccagctgtctttctgtaacctttgtgggcgtgacagtgtgtgtggttcaaaggcaggcagctgccaacaagcccgtgtctgaaacccacttcagccctagtcagataatcttagcaattcatttatcctcacgtggtttcattcctcacctacaaagaagtgatgagaataatgaaggctgtttccaaggtgctgtgagacttgacggaggtcatatatgtaaaagatgcagctcagtgcctgacaccatgacagacagagcccattaatattacctgtgtcaattattgcagttttatttcacattattatgtcacttcaacatatctctttccctgctagattgtgtattttctaagggagagaatgagccttattggcttttacaataaggtactttctttccatccacatggcatggggcaagtatacagttggcgtgagggttaccagatayggtgcagggtgcttagctcaatttttcaggttagtaacaaaatttcttagtatatgtccaaaatattaaatgtgacatacttttactta

SEQ ID NO: 830557 - DNA, 489 bp, Homo sapiens
tgataggtgccctaggtagagaaatttaccagtggggatttcagaataaagcagacaggtgtccaagatgagtgaggagctccaagagactgagcaggtcacagatgttgacaactggcaggactctatgttcgtagaggagatttgagctagatcaaaaaggatccaaatgtcatgctacaatagagctttgaatccaacaaaaacatttacccagtttcttttgagtggataatgtgctctctggaggcgaggggcagcctccaaatcaatttagcagagaagaattgacgcacagagtttcatcatcacagcagggcaggcagcagcaagaaggttggactagaaaggagttttacacatttcttgtarcagccaaaagtaaaacttcctttttcaatgtcttaaaactacattatttgtatcttttttcttggtttataaaacattataaacattttgtaagaacagagagtaaggccaggcgca

SEQ ID NO: 830558 - DNA, 616 bp, Homo sapiens
gttgctatgggcctacaagaagacactgtttttgagcagctggggtctgtgtcccgggagttattccggtggctgtcctcagtgggatttccttgtgcattttcatcaagtgrtgggaagtggctgtgttatttacccaggctttgtttctgggcacttccagcatataggaacatacataaacacacacacaagtacacactctgttctaatcctttatgttcagaaaatgtaagggaactaaaaataatttttttaatggaaaactaaaagtaaaatcctctaagcaatgccttggaaaataaaaggtgctggggaggccagcacataaacactcaggccatggagcccgtgcagtgaccaaaccaaaaataggttatatgttcattacattaatcagtttctgtctaatagtgctggctatttattgaatggacactataagctaggttctattctaagcacttctcgtgtcctaactcattcaatccttaaccatactctgtacaaaaagagactgttagcaatgccattatacaaatgaggaaactgaggcagagggagttaagtaatttgtttaagagcatgcaacacataaaagtttatgttggcaatt

SEQ ID NO: 830559 - DNA, 553 bp, Homo sapiens
attttcaaaggatttgtttttctgtgtttagaaatatgtggaatgaaacttatagtaatcatccttagaaatagagaagctgtttgttttgttataagatagaatcactagtgtcctatttctgcagaatcttctccacttagctcctgaactaggcagtcttactcataccgtggcaggtcatttgtgtccactgcatggccagcatcgaatacatctcagatgagccttttgcagggacctttctctcaaccagcaggcatacaagcccacccgtcccttgggacaggggtccccaacccctgggccatggattggtagtggtggattggtagcagtacatggcctgctagcaactgggcctcacggcaggaggtgagcggcaggaggtgagcatcaggagagcgaagcttccatctgtatttacagccactccccatcattcgcattaccacctgagcactgcctcctgcagattatccscagtattagattctcataggagtgcaaatccaactgtgaactgtgcatgcaagggatctgggttgcacac

SEQ ID NO: 830560 - DNA, 601 bp, Homo sapiens
cttattcaaagtaatatgagattattttgaagcatttgtggaggaagtcttcctaagtayaataagaaagcttaaagctactgaacaaataatgaccaatttaatatttaaacattcaaacttctataaatcaaacatcacagaaacttagtcaaagaataatctacagagaaagtatgtgtaacatatgtgacgaagttttagtatcactaaaatatgtaagttcttaaaatttgttttaaagacacaaaccataattagaaaaatattgagaagatatgaaaagttgattgatgaaaaaaagaagtcaaaagtcaataagtgggaaaagcaagttatacaatagattcaaggccattatttgcccataaattgataaatggaaaaaatgattgacagcatctaatgggagcataagaaattcacatacattgtagataggagtgtaaatatcctcatattctcacttctctctttctccagcttagattgatacagcttcagatgccctaagatttcattataatgcacctgcaaaaggcctaatccaaacccctgtgaaattcaaatctctgccttctctatggctgcccctgagcag

SEQ ID NO: 830561 - DNA, 586 bp, Homo sapiens
gacattaaaaaaccttacaaaaaaattaaaataaattagctgggcatgatgggttgcgcctgtagtcccagctacctgtagtcccagctacggaaggcagaggacaaggaggtgaggcaggaggatcgctttagcctgcactccagcctgggtgacagagccacaccctatctctaaaactaaaaaattaaaacacacaaaatcatcttgtgtggtcgtctcttagaaatgggtaaattcctttttgagatgaagatttaatatttcccaaatttgacttattatcttagtaaacaaaacagggactaaaaggggcaggagttaatacacagaaatacaggtacagtgcctctgccctgaaagcacttaacccagctggagaaagaagacaaatacatgtaaattttcacaacaaaagatctgagtgacagttagatatagtgatcatctgcctcaaagaaagaaacagmtcattgctgaaagggtggctgaatcatgtggactctgaaagactacagaacttcagaggagatcaaatgactgcagtgaccacccctgtgcaggcaacaacttctacatttctctc

SEQ ID NO: 830562 - DNA, 578 bp, Homo sapiens
atgcatatatttttaccatcagtaggtacaactacaaattttctaaacaaattgagcaaatgtatttatttccaccagcattatatggaatttccagtggtgcctcattcttatcaacatttagctgtgyggacattttaaaatgtgtctcttctggtgagtatgtaaatgtatctcattatggttttaatttgcatcatcttgatgataagtgatgttgaacacattttatgtttatttgatatttgattgtttgaaaagtgtctttttgagtatattgtctgtttcattaaattgtctcacttgccttttttaaaaatgtgagaattattatttatgctgtatatcaatcctttgttaaatatctgtttggcaaatattcttcctcccactctatgattctgacatctttgctttatcagaaacccatcaggagctttttgataccacactttttaagagccttgacaggtggctagtaattgatatggtaaactaatattggaaaagttttaatggtaggtagtgaagtttggtctgtcatacttcccagatagccatttctttataggaccttt

SEQ ID NO: 830563 - DNA, 633 bp, Homo sapiens
ttagtgattctgctatttataatggccctaagcacagtattaaagtgttgtcgttatgtacaagaaggctatgatgagtcttrtgtacttttttaccttctaaaattaaaaaaataataatttaaaagaatcatttacagttgaaatgcaaaaatacaatctctagaaatactgtcatgaagtgtaaagggtttcgctttaaaaccttttttaaaacttatgaaatataactcatttgagagagcgtattatagatatattgccacttaataaatgatgagtaatgcatctgtgtaatactgccttgttctagaaatagagatttgtcaggcctcaagaggacttcaagatctacttccagtcaaatcttctctggccctgctaaactaaaccttgtcttaattctcatagtcataatttttggtagacatcactaatgtcttataaagtaacaaagttagtgttttgtaagtaacaaaattattccagcaacatatgaaagaaaatgtcgactcagcaattcattactgaggctgatacctaataaataactgaggcaaacattggtttttgtttgaggacaaagttatttcacttcttattttattttatttatttttattttattttatt

SEQ ID NO: 830564 - DNA, 506 bp, Homo sapiens
gcagaactgttcttgaccctcttagggaatgtaatatcttgagttaggaggaaaaagttcaggaaagcctgggctttgttcctctttyccctggaagcagaatgtccatcaaagctttgcccagcatgtgacatgactcctgtcacatgatgtatataacttggtatggactgcctttcagagttcttcagttgtggtgtgcaaagtggagcatgggcagtcaggacttcttctctcctggaaggctttcttgagtcttgggggaccagttctcactggattctagggtgtttttccctttcccctttctgtctatccatgaataataaatccacttcatgtaacttgtgtatgagtattttctatttcactaagctcacacaatttggtgaccagtgcatggtagacctcctacaaactttgaacatttttttctaaaaattaaaaagatacttttgactatttgaaatcaatgaaaagtaaaaagacattgttttctttttcat

SEQ ID NO: 830565 - DNA, 605 bp, Homo sapiens
ctgagaatacagtgctatgattgggttcaccctagcttgattacagggaaattttacattgaaagaggcaggtgaagaggattagaggctattgcccacctagcactctgcctgtagagcagatatgtttctttgagagaaatgggctgctgtccttgcctccagctctggagctgcaacatagagcttccaccctggggagaggtaggccatgaaaacatatggcactttagctctccctaaggggactcactttactgggacaaatatgtaaaaaagagtgctgccagttttagtcaaacaatacaattttaaataatggatattttggcaataagaaattaagaggaggctgatagcttcttgagaacaacagctaaatttcaaaccagctaataatttatcagagagaataagggaaagagtcagaaataagaagagccctgctggggtcagagcaagcctcaaagactggcctccatgacaatctmtccaaaggggtctacattttattgtttgaaatgtggatcagtttataccttagtgtattgttaagaatagtagagaaataagattgcacttagtagatgctaagagctggatat

SEQ ID NO: 830566 - DNA, 621 bp, Homo sapiens
aaacaattgcaacaatagcaaaaattgacatatgggatctaattaaactaaggagcttctgcacagcaaaagaaactattatcagagtsaacagacaacctacagaatgggagaaaatttttgtaatctatccatctgacaaaggtctaatatccaaaaactacaaggaacttaaacaaatttataataaaaaacaatcccattaaaaagtgggcagaggacatgaacaaacacttctcaaaagaagacattcatgtgaccaacaaacatatgaaaaaaagctcaacatcaccggccattagagaaatgaagatcaaaaccacaatgaggtaccatctcatgccagtcagaatgaagattattaaaaagtcaagaaacaacagatactggtgaggctgtggagaaataggaacacttttacactgttggtgggaatgtaagttagtgcaaccattgtggaagacagtgtggtgattcctcaaagacctagaaccattaatagatttgacccagtaatcccattactgggtatatacccaaaggaatataaatcattctattataaagatacatgcaccagtatgtttactgcagcactattcacaatagcaaagacataga

SEQ ID NO: 830567 - DNA, 551 bp, Homo sapiens
tgaaaagcaaggagtggactcaatttgatctgcaggctgtgcagatggatccccgttttacaatggttcaacttatgatttcttttctactttgtaatggtgcaaaagcaatacacacttactagaaaccagactttgaatttttaattttgctctttctggcctagcaatatgccatatgaggttcttttgtgatgcctggcagcagcagtaagttgcagcttgcagtcagccacacgaccatgagggtaaacagccaatactgtactctgtggtatagtcttacctgagttattcaactcctaaatataaaacaggcttacattaactgattttacccaactgtaagctaatgtaaatgtgctgagcatgtttaaggtagggttggcttagctgtgacatttggtaggttaggtgtattagatgcattttcaacttacaatgyttacaatgggtttattgggaggtaactccattgttagtcaaggagcatctgtagcgttccatctctgctttatttgaattactctgtttaatgtttgtaataaccc

SEQ ID NO: 830568 - DNA, 642 bp, Homo sapiens
atcaacatacttcattgtatcaacacattaaaggagaaaatccttattacaaatcaattgayactgaatattcatttgatacattttagcaggtatgtctaattaaaattccatgtacaataggaatgaaaaaacttaatacaattacctatttatcaaatataacagcaaaaatgctcaatgttaaaacacttagatacctgtactaatacaattatctatctatgaaacataatagcaaatagcaaatgtgctaaatgttaaaacacttagataatttcaattaaaatccaaaacaacatggggtgcttgttcctgcaattatttggtgttgtctcaaaaagaatatataaagctatcacattttgctaatgaaataattatatgtcttgtttagctcagaagctctaatttttaataacatatatgaatatgtgtgtatgtattcatatatacacatatatgtatgtgtgtgtatgtgtgtatgcatgtgtattcagcagctttcacttattcttgcaaaaagcacctacatataaaaatgagagaagatatcttattcatgatagcagcacaatttcaatcaccgtaataggaagaaaaactagaaaatacctaggaataaggtaaggaagaaggcag

SEQ ID NO: 830569 - DNA, 672 bp, Homo sapiens
tgtttccatttaagacattattttgctcctcgtttgccttctgccatgactgtgaggcctcctcagcaatgtgaaactgagtcaattaagcctctttcatttataaagtacccagtcttgggtatgcatttattagcagtgtgagaacagactaatacaggaggaatggaagaaaattacttcaacatattatagaccatgtttgaaaacagctaccatcatattcaacattgaagaactgaaagctcttcttctaagagcagtaacaagataagaatgcccattcttgttgtttctattcaacatactactgtaagtcctagctgaagcaattaagccaaaaaaataaaaaataaataaaagagagaaaacagaaaaaagaaaataaatgaaaggcatcataaaggaaaattaaattatttttgtttgcaaatgacatgattgtaaacacagaaaacattaaacacttttacagaaaaacctattagaattaataaataaatgcagcaaagttgcatgacactaaatcaatatacaaaaaaatttctatrtactagcaataaaaagaattataaaggaaattaagaaaacaatcccatttatgatagcatcaaaatgaataaaatacttaggatttaactaaggagacaaaagattagttcagtaaaaact

SEQ ID NO: 830570 - DNA, 390 bp, Homo sapiens
aagatgaataaaatataggttctgctctttagagatttacatctggctacttkttcacaattaagctgagccactgagagctcaaaacactcaactgtaaagcaaatctactagcaattatttcagagtcccagggcccccttcaagatccaaggttagctccaaaggcaccggctggacttttggcaagtgccaccttgccatcttgccatcttaggtgtacataatgatccttctttgaaataatcaaacttgagcaaaataatcctcatgagattactttggggtgaaagaagacaaatgaggtaaactgacacaagattaaatgaattatatgcagttgttcacagtcacacaagttaacagaaaaatctcaggaaccaccactat

SEQ ID NO: 830571 - DNA, 579 bp, Homo sapiens
ttggctggatatgaaattctgggttgaaaattcttttctttaagaatgttgaatattggccccccactctattctggcttctagagtgtctgccgagagattctctgttagtctgatgggcttctctttgtgagtaacccgacctttctctctggctgcccttaacatttcttcctccatttcaaccttgatgaatgtgacaattatgtgtcttggagttgctcttctcgaggagtatcttggtggcattctctgtatttcctgaatttgaatgttggcctgcctcgctagattggggcagttctcctggataatatcctgaagagtgttttccaacatggttccattctccctgtaactttcaggtacaccaatcagacgtagattttgtcttttcaagatataataagcactgtgaaaaacaacttgaccatcaaactggggagatatatatagctttattattaccaacacacttaaatatctaacaattttgcattggtgtttgttacttatgctttgaatagttccmcaaatttaaaaaaaaaaaaaaaaagaaagaaagaaaaagaagtccaa

SEQ ID NO: 830572 - DNA, 637 bp, Homo sapiens
cgttggccaggctggtcgcaaactcctgacctcaagtcatccgcccacttcagcttcccgaagtgctgggattacaggtgtgaaccactgtgcccgcctctacttcacttttaaaacatttgcaatccagttataataactaatttaatatctttctctgctaattccatctgtgtacgttctcagtcagtttaaattgattgattattcttcttatactgggccataatttcctgcttctttgtagggtaatatttgattggatgacagaaatcacaaattttaccttgtttgggtacaaggtacactttttgtatccctgtaaattttcctgagtctgggatgaagttaaattacttggaaatagtttgatcctttcaggtctagcttttatgacttgttaggcagatctgcagcagtgttcagtctattccaatactgaggcaaaagcttcctgattaatctaccctggattttgggtttctccagtctggctgatgggaggaggtattgttcctggacatgcctgagtaccagctactsttctctctaactcttctgagtggttacatccctggccttacacgcgtgctgcttagcactttgctgaatactgaaggagcgtctgcacatctcc

SEQ ID NO: 830573 - DNA, 562 bp, Homo sapiens
aaacttaacaatcagattgttactggaattgccattagtgaagggcccatttccagcagtggatttggcccctgctccaggattctgacttgttagaaaggaattcagtatggaatggtatgatgtgcagccataatgttataaaacttgcctaatccatccgttgattctttctgtgccttaacattattaattccttaaaagcaaaggctttgttctcctgttaggcagattttaatttgataagcactaatgagtttgttagtgatcttttatacttaacatagtcctgaatcatttatttgtatgtcttatcctaatttatatagacactggtcatttacatatctttagaattgctaatgcaatattgctactttagaaaagtcaataatgcaataattagaaaataagatctaccacaacctgcagtgaatttttatttctctrgcttgaatttacaatatgttttccatcaaagcttctcaatttgttaaagtgatgttggaacatttcagctatacggccctaatccattgtggtgagaactttttcaagagtc

SEQ ID NO: 830574 - DNA, 509 bp, Homo sapiens
atctatgcagaaatagaaaattgttcctctcgtctgattgttccaaaggctgctattttccaaacgcagacatatttggctagtggaaaaacaaagaccattcgacacatggtcgccaatgtgcgaggaaaccacatcgcttctgggagcacagacacatggaatgggaaaacgctaaaaatcccacctgttactccatccatcctggattgctgcattatcagagtggactattccttagctgtaagcaaagctcttttttaaaaaaaaatgtgtatgatggacaataactgatgtcatgttactgtgggtatgtagagttgcctataaaaatgtcattttatttcagcattaacaccaattggggactgtatgaagattggccyttgtttttaataaaacctattccccacaggggatttaatagaatgccataaaagaattgaggtgcattaaggggtgtttgttatattgaagacatagccttaattttctataattattatata

SEQ ID NO: 830575 - DNA, 559 bp, Homo sapiens
tccggcctgggcgacagtacaagactctgtctcaaaaaaacaaaaacaaaaacaaaaaaaaaaacaaatagaacatggcagagaggcatttccattttccacttgctctcttaaattgcttgctttgtgggagttagcatcatgctgatatttaagcagcctgtagagagaggccctcagggagaataactgaggcctccagccaactaccaacttgccagtcacatgaacaaatcaccttgaaagtgaatcctacctcagattattacagcctggccaacatcttctctgaaacctcataagaggccccaagtcagaacctctcagctaaaattgcaatggatttctgatcttcaaaaactgtgtgagataagaaatgttttttattagtttaagttactacattttttgcagtaatcggatgtgcaaaatgaatgatgggtacaatggctaygataacctcagctggaataactcatcactgctctacatggactctagtcttccatcatgctagtccagatctgttctcagggctttacaaatgttttggtcaggg

SEQ ID NO: 830576 - DNA, 480 bp, Homo sapiens
ctagaactgcatgcaaatgacagtgcactaaaatgaagaaaacctgtccttaagaatcacaatttcaaaaaatggcgcaggcatgtattacacaaaatctgtaaatgaatccactcaatcatgaagctcctcatatagacatgattaaaactcatgcagttcttacaaaaatggaaaataacttcatggagtgcaaaacaaatcaaattcatattgttttgtcaagatcccaatgtaaaaagtcttgtaatttagaatgcattggagatgttcagacacgacaaaaaaaaaatcagcgagtaattgttaagtgcaacagacttacttggtgtgactccaggacactaagtgcgatcatattccagaattgcagaagaaaaacaacttcccctgctcttttcacacattcttttayatgaaatgcgggagacaaaagttggctaatcatcaagaaacgatgatgcttcttaatgcgatttc

SEQ ID NO: 830577 - DNA, 632 bp, Homo sapiens
tacattttctccggaataccttccaactccaggcagctcatacctttcagtggcttctgggcacaggcacgtgctccatatttggggcagggactgtgtcttatatgatattttaatctcatatgataktttaatctcacttgaagtatcttgcaaagctgggaaactggtaggaactaattaaatgcttttacagagaaggaaatataattttatatgatttctattaaatacaagtagacaaaaataatgcctctgtgtaaaaccctactctccagcattttaatgtgtcattccttttctgcctgttatggcaatgtctgcccaaggacttttgcctgagatgtaatcatatgcaattatcattgtgtttttgtttaatccaaatacagataattcagtattaatattcttccaggaagactttttcttttgtatttttttctcttagagggagaaagcctcttacatgctgtgtagagtgggtggattctcactttgctgaatgtcagtttctcccttaaagtagggaaaatggtaatactcctttcatagagctgttgtgaggatgaagtaagctagaaaatagctcattttgattcaatggatatgacatcaaggcacaggcaaga

SEQ ID NO: 830578 - DNA, 625 bp, Homo sapiens
tagaaaacaagagaattctgacacatgttacaacatgcatgaaccttgaggacattakgctaagtgaaataagctggtcacacacacaaaaaaaaccctaaatactgcatgattccacttacatgaggtaactagagtagtatattcatagagacagaaagtagaatgatggttgccaggggttgaggggaggggggaattgagagggatggtttaatggacacagtgtcagttttactagatgaaagatctggagatggatggtagtcatggttgcacaacatgtgaatgtacttaatgccactgagctgtaccttgaaaaatggttaagataaattttaccttatgcgtactttaccacaatgaaaaaaagtctttaaaaggaaaaaccaacaaccattacaactgtgccctgagagaaaaattcagcttctaaatacttagatacttgtaccctcaaaaatactatgcatttacattttatgcaaatttctaatgtgcaaatttgagatagacacaattaaaatattcataaatatcacattataccaaaaaatggaaacacgaatcttttcctaaacttttttacttgaccaagaagcatataattgtagggctctaaagc

SEQ ID NO: 830579 - DNA, 621 bp, Homo sapiens
tctctgaggaggtaataaaacaacttatttcccagtcatcatctgaaggctgaagaagtgctttgggttgacctctggtaaagtygttttatggcaggaggtttctgtgtggaagacaaagctttacagctgatggatgtctttccaccgccggtgaatcaccacagtgaacctcagtgtcgctgacgaggaggctggcccccttagagctttgctccactctgtccctgtcgggctgtttactcagtgttgagcctctggatttgggcttcaataccaccacgcgatgcagaggacaccgagaagtcaatcagacctgtccacacccgagcagccttcagagccacctcctgtgattcgggggcatcctggggtgggacggtccatgtctctgcagctcctgtgacctcaccaggctgtaaacatttgacttgcattctttctgggctaaattgtttacctacagagaagtccaaggttcgggtcccaaacccaggtgagtgtaagaacaccctgaggaggcttactgagtatggcctgtctctccaggaggaaggaggacccaggacttcacccccggctcctgatcacgagaccagtgtcgtaaatccagctctgaga

SEQ ID NO: 830580 - DNA, 612 bp, Homo sapiens
taaccaccaccccgtgttaaggaaayagccgtcggctccagggctcaagggcatggccatcttcaaaggagacacatgttgtatgagtcactctccggtggttttcagtctgcctgggttactactggcaggaaggcttaggtcacattaataactagaagtcccttttgagatataagaattggcagcaacgatcactctataaaataaaccactgagcatgttatgttttccaagtggtagtaccagtgttttaaaaatatcagaactaaaaacaaaattgtgcatgatttacacacagcttagcttctgcccagaccaattgtctactgctcccaatgtaaaaagggaggtttctggcacaggaagaaatgtcaggatcacctggccagatcccccagctcttcaggtgaggaaaccaggatccagaggaagacccccccaagaccacagcacctgcttcccaagagagctggatccctcctgctctccctaacagcagcatgggacagtatgccggcggattctaccatgggtggaagcctgagctgtaatactcagggcattgggcagagcacccagacaggcactgtctctgtggtgggccactcc

SEQ ID NO: 830581 - DNA, 660 bp, Homo sapiens
gcctcctaaagtactggaattacaggcatgagccaccacgcctagccctcacatttttctagtatttaatacaaacaaatatccttaggttaagatgcaaaatgaaacagacatttggtttggggagaggctttgccctctgaggctccagcccccagaacactgtgtcccctcccggcaaggccgggtgcccctgcgtgctagtgggtgcttccccacgtggcctggagtccaccggggcctcaaaggctgtgccttgagtaactcgttcctcaggatgatgattctcacaggcggcagtgagtgcccagtggaagggcatgggtgtcaccgcctacgaggggcggggcagggctagggtggatgtgggatgacacacggcccgtctaaggcgactgctgtccagagggacccggtctctcctggcaattgcagagcatctgtgggctcctcctcaggccgggaccagcacatgccaaccacaggggcatcccaatgccagcctcctgttctctccggaaggatgaggcagaaggtggggccactgaccatttcattcagccctcggagggagcccgtcccttcagtgagctccaccgcatagcagatttagcaaaaagtctcactctgrgctgggggtcgggagccgggcccccagga

SEQ ID NO: 830582 - DNA, 592 bp, Homo sapiens
gcatgcagggcttaaaatttagatgacgggttggtaggtgcagcaaaccaccatggcacacatatacttatgtaacaaacctacacattctgcacttgtatcccggaacttaaagtaaaatgtaaaaaaaaaaaaaaaaaaaaaaaaaattcctagagttcttcaagttgtaacaaaaagatgttaaagccaggtgccgtggctcatgcctgtaatcccatcacttagggaagccaaggtgggaggatcatttgacctcaggagtgtaagaccagcctgtgtaacatagcgacatcacatctctaaaataaagaaatagataacatgaaacatttttaagaagttaatagttaaaaaagccactagtaaaagtaaatagtcaaatctggaataatctaatactgtaatggcactgtgtaaatcattttaaattctattataaaagcttaaaacacagaaatattgaaaataactatatctattctaatttggcaatgaatacacaatctagaaagatgtgaagtgtgayatgaataacataaaatgtgggcagagtgaagtaaaagtgtagagtttttgtatgcaatttcag

SEQ ID NO: 830583 - DNA, 589 bp, Homo sapiens
gaaagtcttttgggaaagcaatgaggcaaggctaagcaatgaccataagtttagatttcctcattgttttgaatagacaggaaatcatttgtccagaaggaggtattatgtagggaaacttttacctttctgtatataaaaacatataactaatacacacacactcatacacaaatatcaatggaggtatacattgtgtttactttttctatgtttatgtacaatagtaatatctttatagttatactaacgttattaaaataagtaattatattaactaagtttaggaccagtttctagtaagtaagaaagaaaaaaaatcatctccaaattctatgaatagatataatgaatttcaagaatgcctgatgaattaacttaggattcaggaaacaaaaaaagttgctattgaatagaaaaatggaaaagtaacagcaacaaaattctggtagcagatgccaataatttcccaagacaaaatgatgtagtaacttcagaagtatataaatgaagactggataccagcaagacatactggatgattttstatccagatagtgctttttttacttattaggttgggttattg

SEQ ID NO: 830584 - DNA, 553 bp, Homo sapiens
actttagcagtgagaatttttacacaaccaagtcatttttcatactactttctrtatctgtaaatagtctctgctttatacttattgtttttctgcttctgattttgtggtctccttttacttttcatttaaaatgactttactcatagaatccttcctacagcttcctaatcatgctgcaccattttttctggatttcctgagtaatcactagaatcttacctgctttgccacaaactattattataagaatgtctttgactctacaaattataacttaccaaataacagaaactgcatctcaaaaacacacaatgatgcccaatatatactaagtgcttcaaagcctgttaaaaaaataaatgaccaatgatatcactttattttctaaatcatttcaaaactctcaagtagatgatatttgattccagggattttcaaaacttgttaccttaatatcaacctagcctgtaatattacactctgcttcaacattttgggatgaaaaatctctctgatattattctctgaatgcagagcaaaaaatcccgta

SEQ ID NO: 830585 - DNA, 553 bp, Homo sapiens
gggaaccccctttaaatatcacaaggaaaccatggagttattgcatgcagtgcaaaaacccaaggaggtggcagtcttacactgctgaatgcatcaraaggggaaggagaggggagaacagcagcataagtggctggcagaggcagagaaagacaaagagaaggaaagagagagaaagaggaagagacaaagagaaaaagaaggagccagagagaaagtcagagagagagaaaaagagagacagagaaggaaagagagaaaaagagagtgatagaagtagtaaggaaaaaacagtgtaccctattcctttaaaagccagggtaaatttctgtctacccagccaaggcatattcttcttatgtggaacttcaacctatatctgcctccccaccaacaggacaggcacctgcaccttagtcttcctaagtcccaacattaacattgccccaggaaatcagaccctatcagtgtccctcaaagttcaagtgcataagtgcagggccatacaactaatacccctacttatagggttaggaatggccactgctacagg

SEQ ID NO: 830586 - DNA, 602 bp, Homo sapiens
caaaacccatatactttctaatgaaaagtatatttataaattggggtttttcataatatattatcttgaccttaaatatatgtatcatggtgctcaataacaatttctcctacttttgcatttcagaatatagttgtttctaagcttttaaactattggagatcatgagaataacctcataaaatcctacttaacatttaccaaagaatttggtcataaaccacttttaaaatggcctccattgtccactgtagcttgtttaagtgacttggatacaatgccaagagtttctgaagctttcttcttattcatcattgatatggtttagctttgtgtccccaccttaatctcatctcaaactgtaaatcccaacatgtcgaggccaggaggtgattggatcatgggggctatttccccatgttgttcttgtgatgatgagttctcatgagacctgatggttttataagggactcttcccacttcgctttgctcttctctttcctgccaccttgtgaagaaagtgcctgcttccccttccaccwtgattgtaagtttcctgaagcctccccaaccatgcagaactgtgagtcaattacacctct

SEQ ID NO: 830587 - DNA, 623 bp, Homo sapiens
tggcaatagacactaaaatcctgcccaaagtcacagtcgtgggtagtgtgaagtaggggtgtgttggggctcagaaatcaatgcctcaaaatgaaggccttggaagcacccttagaagcaaaaccgtttcyctgcccttccgccctatcagtgccatacttgccctaggctagtcatagaaactagaatccctctgcccccaaggcaggtcatagaaaccagaatcttttctccccaaagctagtcataaaactgaaaaatactactttaattttccctccacttttctgcataaaaacaggctataaagaaattatctgacccaccttgtttgactatgagtcgtataaccgccccccccattccagacagggtcctgccccatacccagaaggaaggaatggtgctcaggaggccaagaagaatccagacagacaggctttgctgggcgtccccattcagtctattagcattggatcatactcttttcatccagtcatatttctacatggctgtccatactgtggtgtacctaagcataaaaatggacaatttctcttttatctttgagtcttcattctgaaggcgcccatatatacatgttaaatagatgtgtatgcctt

SEQ ID NO: 830588 - DNA, 578 bp, Homo sapiens
acattaaaggtgatactgatgagggttctgaaagaaaagaggaagacagtagtgcaagctattattgttttagagaacatatatatcgttaccataatgttagtagaaatatgaacactaaaggtgctytggtagggtctcagctgaaaatgaggaacatgttatcagagactgaaagaaaaactgttcatgctatgaagtggcaaatacttggctgaattgtgttctagtgatctgtggaaggtagagcttaaaaataataaacttagatatttagctgaaaagatttctaagctaagtgttgaaggtgcagcttgggttttccttactgcttaagataaaatgagaaaggagagaaataaagagaagaagaaattattaacagaaaaaaaccagaacttaaagatttagagaattatcagtttatacatactgcaaaaaaatgagaaagtatgttctggaagggacaacaaagatatggctgaacaagtactccataaagagattgcccatggatttaatcagctatgtctccagtggccagcacaggaaaatagagctattcatatgtgatcatg

SEQ ID NO: 830589 - DNA, 634 bp, Homo sapiens
cattgctattgtgtttttgaaatgcagctagtttaacctatatgtattggggccaacaggcatatgaaaaaatactcaacatcgctaatcattacagaaatgcaaatcaaaaccacagtgagataccatctcacaccagtcagaatagctattattaaaaagtcaaaacattaacagatgccagcaaggctgtaaaaagaggggaacacttatacactggtgattggggtgtaaattagttcagcaattgtgaaaaacggtgtagcgattcctcaaagaacttagaattaccattcgacccagcaatctcattattaggtatatacccacaggaatataaatcattctaccataaagacgtatacatgagtatgttcaccacagaactattcacaattgcaaagacaaggaatcaacctgaatgttcatcaacagtagactggatcaacaaaatgtggtgcatatacaccatggaatactatgcagccattaaaaaaagaatgagctcatgtctttgcaacagcaacaaggaggccattatctaactaagcaaactaatkcaggaacagaaaaccaaataccacatgttctcacttataaatgggagctaaatgataagaacacatagacagaa

SEQ ID NO: 830590 - DNA, 604 bp, Homo sapiens
cttgggtgacaaaataatctgtgcaccaaacttctgtgaagtgcattttacctatataatgaaactgcacatatgactctgaatctaaaataaaacamaagctaaaaaataataaataataaatacataaaaataaactatgtataaaatccaaggaggtaaatttttttaacaataaaagctccagcagagtgacagccaaggaatcctgacccacagatggttatggagatattaataaaacacgacatccataggagcaaaacaaaaaatgttttgttttgctttacattttaacatgttactactagaagtatttgaaagtacctatgtggctcacattatatttctattgtacaatagagcattatagaacaaagcatttagattaggtataggcaattgaaagctagatgtagaagccagtgggccttttatattttatacaaagaagtcagcatctgttctagtgaggggctaaagaaagctgaggcacaattctgaaactaggatgactcctagaaacacagaaaaagtgatgttggtgccagtaacagcttattatcttctcatggtgatagaattctgcccagcaacaagcccc

SEQ ID NO: 830591 - DNA, 457 bp, Homo sapiens
aagagtacagcagaagtgatagcatgttacatataagatgggcttataaaaggcactgttgcttstaatttgattgctatctctctttcttctatcacttgctgtggaggaagccagttgctatgtcatgaactgctctatgaagaagcctgtttgtcaaggatctgaagcctcctgccaatagctgcatgaacgagtttggaagatccagttctacccttcagatgactgtagcttgacgtcaacctcatgagagaccctgagacagaaccacaaagcgaagtccctcctggatccctgatgctacacaactatgtaataaatgtttgctgttttaactacttagtttggagtcatttgttacttggcaatagatacataatacacttgggtttgaataccatcattgccctttacatacgacttcatctcttggagcctgttttgttttctcaaa

SEQ ID NO: 830592 - DNA, 624 bp, Homo sapiens
ctcaagttttcaggttagacaatgtgatggttactactgtcaacttgattggattgaaggatgcaaagtattgttccggcgtgtgtccgtgagggcgttaccraaggagattaacatttgaagtcagtggactgggagaggcagacccaccgcaatctgggtgggcaccatccaagtagctgccagtagctagaataaagcgggcagaagaaagtggaatgaacagactctctgagtcttccagcctccatctttctcccgtgctggatgcttcctgcccttgaacatcagactccaacttcttcagcttttggactcttggacttcaaccagtgatttgccagggctatcaggccttcggccacagactgaaggctgcactgttggcttccctacttctgagattttgggactcagactggcttccttgctcctcagcttgcagatggcctattgtgggacctcaccttgtgattgtgtgagtcagtactccttaataaacctccccttcataaacatacatctgtcctattagttttgtccctctaggcaaccctgactaatacagacaaggtcaaaaattaagccagcactgaaggggcataacatggaactccagaatca

SEQ ID NO: 830593 - DNA, 549 bp, Homo sapiens
ctttttttaaatttaaactatgtttactttaaatttaaatagtttcatctttcacaaagcatagtcagaagtcactttttaaaaaatttcactttctttaatggcaaaataattacaccttatctgcaggtttattcgtagtttggctctgtcttcataaagctgattcagttgacagttgccaaggtgatggcctttttacaagacactttgtttacggagaagagttaaaggataagcacttttcacttgagactttctagaaaaatgatacttgcatttgccatacatgccaccccaggtcaaattttaaagacacgagaacgaatagatgttgtgagacttaattaaattaaggacacatgtgctctgtaaacaaaagctttagtttcctagccggtgtctatttttcaaccctgtactttttgactgtgtaagctgtgaaacacasagctcattgttgcctctaagatatgaagaaatatactttttattacatgactcaaggagcacacatatgtagtcaaaataatcacatatagagaaaat

SEQ ID NO: 830594 - DNA, 531 bp, Homo sapiens
aaaagaaacctcactccataatgattccataatttaaagtttttgtattgttccattaacaattttaaaaaggcaaaatctcttaaacagtcacaaagtaaggatgcaattttacccacaaatcctcataatgatctgaacttctgagcaaacaataccaactaaatataaaagcaacatactaaactgtctcttaaaacattttcttacctgaaacacaccattatttaaatcagcctatttacactgaatactcagaagtctttccttcaagagtgaatgtctcttccaagttgcttgtactatccaatatcctaaggcttccaagagttattaatattgtatccattaaatataagtcagcatcaactgtaagactgcattgtttaaaaaaaaaaaaaaaaaagaaatgcggcaagctgcaattctaggtcgctattgatgtttyaaagactttccaatttcagagatattaaaatgtggagaaaaacataatgatgatatttattgacgttcttaaacttggtagca

SEQ ID NO: 830595 - DNA, 592 bp, Homo sapiens
aaattatctttcctttgctcatgacagacattgtcgatttatcacagcatctttttttttttttttttaaatctttcaacccagaggcagcttcacatgtcttctttctttattgttttaggccaatttaaattagtcagagctgactagccaggtaactgtttgctatccaggtctatagagatctcctctacatgaggggccggaggtctgggtggaggggcttagcagaggctttgatgaattctgctgctgtttctaaaccttcgtctttccaggggaaaacaaaacaaaacaaaacaaaacaaaacaaaacaaaacaaaacagcatggaatggtggcacaagtgaagagtttagcattatccttagtagaagcgaagtcacttgtccatttgggaactttgggtaaattacctaatttatcttggatttaatttgcttgtttgcaaagtagggaaaagaataccctacaagaccataagaaacattaaaaagtaaatggcacgctatttgaaacaaygcaagtgccagatacacattcttcctttgaccatcatttaaaaaattcattcctaatagttcttatatat

SEQ ID NO: 830596 - DNA, 617 bp, Homo sapiens
tctaaatgaatcccagagttgttctgagaaacgcaaaatgtgccgtctgtcactttcctccataaacatccaaagaaccttaatggccctacagaatctaactccaacccacccatcaagycataattaaatcattcattcattcattcattcattcaacacaaaaggcaatgaaattgatgttgagaaaaaaatgtaaataatatagaaatattctctgccttcatggcacttcaagtttaatgtaggagaaagacatggcccagatggtcacaacgacattctcacacaaatgatcgagtcctggctttctcatgcacacatcctctcaacgtcagccacactactcttcccatacaattccctaccttcccttttcaagcccggttaatttcctgtggcctttgcacattgttggtgccttggtgctttatctgtctggaatattcaagtttctttcctgacaaaatcctactgttttattctacgtaattattacccaagcagacattttctctaccaaagctgatcgttttttatattttttatgttatattcttctagagccatctttttttttttttttgagccggagttttgctcttgtcgccaggttg

SEQ ID NO: 830597 - DNA, 667 bp, Homo sapiens
actcttggcttctgtgtacccacagactcaacaccagatgggaacttccaaggcttggggcttgcaccctctgaagccacagcccaagctgtaccttggccccttttagtcatggctggagtgtctgggatgcagggcaacaagtctgtagacacagcagagggaccctgggcccagctcacgaaaccattttttttcttcctaggtttctgggcctgtgatgggagaggctgcagcaaaggtctctgacatgccctggagacattttctccattgtcttagtgattcgcatttggctccttgttacttatgcagttatctgcagccagcttgaatttctcctcagaaaacagaattttcttttctattgcattgtcagctaaaaatttcctgaacttttattctctgtttcccttttaaaactgaatgcctttaacagcacccaagtcacatcttgaatgctttgctgcttagaaatttccctaaatcatctctcttaagttcaaagttccacaaatctctaggtcaggggcacaacrctgccagtctctttgctaaaacataacaagagtcacctttgctccagtttccagtaagttcctcatctccatctgagaccacctcagcctggatttcattgtccatatcattatcatcctttcggtca

SEQ ID NO: 830598 - DNA, 564 bp, Homo sapiens
tgatgtgacttttagaaccatgttgctggttatgcatgagcatttttcaacattgattttgtactctaagattttattattgttattgttattattattattttatttattacagtgccatttaagagsctttcttgaaagatactgtttggcatgcaaaagctttgatgctcttcttagaaatgtcctctgctccaatgataagcagacataatttaaaaacattttaaaacatgggaaagaggagtttcccaaatatcatcatatagtttggttgaaagtgtaacaaaatacagagatgctcaacagaaatataattcacagccagatggtgatgatttgtcagaatatctattgctttgtattaatcacaacaccggcaccttttgtacgttcagtgaatatttgagagtaatatagtgccaaatctgtatagtatctgtttttctttcttttttttccaccccctggtaataagattatttccactaagttttttccccacttattttagttgttataaaattggaagtagctatttttcaacatctgttgaaacagatt

SEQ ID NO: 830599 - DNA, 627 bp, Homo sapiens
ataatatcaacatgatttatctctatttacattgactttgatcacctggctcagcagtgttgtcagatttctccattgtaaagttaattgtttttcttcaccctttttttcatagtgcactctttggaaggaaatgctatgtacatcccacatttatggagtgaggagttatgttcctcctccttgagggtggagtagctacgtaaattatttgaattcctccacatgggaaatttgtctttaatttccaattgatttatttaatcactatatcaataaggacttgtggatatttaatttatactttgggttaaggttgaatccttctttgttgcaacaattgttctatctttagccactgggagttccttcagttggccccgttcctttgacataccccataaatgtgttttgtttgggttctggttttagttttggtttttagcatctccttattatctggcactgcaagatgctcccaggtcatcttgtgcatttttactccaatcttagaatcastcatttctccaagaatctctggtttcctttattgaagaactgtactagaaaccaagatctggacactaggtgtgctcatttttacagcatcaagtctctcaatctatg

SEQ ID NO: 830600 - DNA, 622 bp, Homo sapiens
tatatgtacatatatatcacagaagcaaaacgtcccaagaaaaaatgcaagcygtaaaatacttcataaattgtgttaacatttgaaacattttaaaaagaagtcaaaccatatattgcacaatgatatataacattattttataagctattatagaaaagcaaaagaatagaaaacataaaattcagtatattctcaatcccaaaatgtcaggaaaattgaataagggatgagagggggttcaaggttatttgtagcattaagtttttaattttagatgttaattaacgtgttccccttttttttgtcctggatgttaaagttcataacttaaaaatatattatcattttctgtcttgaatgtgtcagtagtataaaataaatgcataattttatttttaaataaatacaaatcaagttttaaatttcagtgtgtatgatatctttaaagatctttatgcatatttcaaaagataaagacaaatatctaaaagcctacagtgcatagcaaaaaatgataaataccacagaaaggggcaaatatttgcctataaaatcttaggaaaggagaagtttatatcagccaaaatatttttttgaaagtggcatggacatcacagtt

SEQ ID NO: 830601 - DNA, 622 bp, Homo sapiens
tatatgtacatatatatcacagaagcaaaacgtcccaagaaaaaatgcaagctgtaaaatacttcataaattgtgttaacatttgaaacattttaaaaagaagtcaaaccatatattgcacaatgatatataacattattttataagctattatagaaaagcaaaagaatagaaaacataaaattcagtatattctcaatcccaaaatgtcaggaaaattgaataagggatgagagggggttcaaggttatttgtagcattaagtttttaattttagatgttaattaacgtgttccccttttttttgtcctggatgttaaagttcataacttaaaaatatattatcattttctgtcttgaatgtgtcagtagtataaaataaatgcataattttatttttaaataaatacaaatcaagttttaaatttcagtgtgtatgatatctttaaagatctttatgcatatttcaaaagataaagacaaatatctaaaagcctacagtgcatagcaaaaaatgataaataccacaraaaggggcaaatatttgcctataaaatcttaggaaaggagaagtttatatcagccaaaatatttttttgaaagtggcatggacatcacagtt

SEQ ID NO: 830602 - DNA, 659 bp, Homo sapiens
aatgtctatttttttccaggatcccatccagtatatcatattatatttatcagtcacttttcctgaggcacttctttgctgttayggtttttctgactttccttactttcgatgaccttgacaattttcgggagtattagtcagggatattgcagaaaatccctcaattagaatttggctgatgttgttctcccatttaaactgagttaacgggtttttgaaaacaacacaggtaaagtgccatttcatcacaatactacaaaagtacacaccatcaacacaatgtaacagagttgatattgaccttgattcctggttgagatagtgtttatcaggttcctctactggaaagttactctttttccctgtctccatactgtaacctttggtagtcatgtatgcagctcagacttgacaagtgggaaattttatttcacctccttaagggtaaagtctctaaataaattgtttagaattctgcactggagaattttcccatttccctactcacactcatttaattttatttttattcaatatttgtttttataagcaatgactcataaatatttattttgtactttgggttataattcaatactactttattttcttgctcaatttgttccagctttggcttttgggaattgcttcagttg

SEQ ID NO: 830603 - DNA, 527 bp, Homo sapiens
tacttccgtaatagggaaagttgaccttagaaaaaagccctgctctaatcctacctaaagatgaataaaaacaagtctgaaatggaccaaackatttcctaacagttctaagtaacttagccatgtcccaaaacaaatctcaaggatatttttaggaaaacaataatatccagcactcaaaaaggtaaaattcacaatgtgactatcaaatggaaaattaacaggcacacaaagaagtagaaaagtatgtacaataaaaggaataaaagttgatcaatttaaagataatcagaaataacacaaataatagaattagtagataagaatataaaaacatttatcataactctattccatattttcaagaagttaaagagaaaattttcaaaaggaaaacctagcaaactctatcagaatcaattgtttcaaaactctatatattaacaaaagacttgcagaaacctggggatgacttactcaatgaaagtggctaaatattagtaagaatagtgagttttgtggtgttt

SEQ ID NO: 830604 - DNA, 601 bp, Homo sapiens
gggtctgccggtaagtttagcggggggtgcggcgggggcgccaagaaggggactcgggtcgggggacccgacggcaacttcgccctgtgcggcctttgtgctgagactgggacgccgggccggggcggaatgggtgctcaggaacctcgaggctgggggcgcgtggggtctcccgtattgccactcgcggacctggttgtcctctccggatttgtgcctacgggagaaggcgtccctgccctctcctctctcgcggcttcttcttgacacctctctctacactcgttaaaaattcctaacagtcatcctcatttgcattcgctgtcctttgccaagtgagggccaggcaaacgcgcagctgaggggaatctgcagcccccgcctcccgggcaggaaccacagccttctttgctgtctctcgtccctcctcgggtcggtcccacacgcgcggccaggccacccttacgctttcaggacaggtcaggttgagtagggaaaagctcagagcagagkttctgcaagtgtagattctggtcttggccccgccattaactagctgtgtaacttcacgggtgtagaagttgtcatccaccattgaagt

SEQ ID NO: 830605 - DNA, 559 bp, Homo sapiens
tacgttccaagaaccaatttgtaacttatcctttggcagtgatagaacagaacacttttacaattttttaatttcaaatactgtcattttcaaaatactactgtcatggtctttcagatttcatctgtttttatcagaacctggaagagggagggaagatacataagatgataatgtatgtatctaggactatatcacaggctacttctacacatgattttaagtaaatctccacttaatttataattaaaatgatttcacaataactgtaagctcaaaatatctgagacagctctcaagtcagtttagaaagtttattttcccagggttaaggtgtgcccatgacacagcctcaggaggtcctcaccacatgtgcccaaggtggttggggcacagcttggttttacacattttagagagacatgagacatcaatcagtatgtgtaaggtgtacattggtcttgaaaggcaggacaacttgaagaggggcgggggcttcaagcatagscaggtaagagagaaagggttgcatttttttgagtttctgattagcctttca

SEQ ID NO: 830606 - DNA, 640 bp, Homo sapiens
cttttagaaaatgtgactcttttaatgtaaaaattaaaaaaaatcactagagaggttccaagatggctgaataggaacagctccagtctacagctcccagygtgagcgacacagaagacaggtgatttctgcatttccaactgaggtactgggttcatctcactgaggcttgtcagacagtggatgcaggagagtgggtgcagcccacggaccatgagctgaagcaagtgaagcatcgcttcacccagaaagcgcaaggggttggggaattccctttcctagccaggggaagctgtgacagatggcacctggaaaatcaggtcattcccaacctaatactgagcttttccattggtcttagcaaatggcacaccaggagattatatcccgcacatggctcagagggtcccatgcccacagagccttgatcactgctggcacagcagtctgagatcaaactgcaaggcagcagcaaggctgggggaggggcactggccattgctgaggcttgagtcagtatacaaagcagccaggaagctcgaactgggtggagtccaccacagctaaaggaggcctgcctgcctctgtagactccacatctgggggcaagggataactgagctaaaggcagcagaaactt

SEQ ID NO: 830607 - DNA, 640 bp, Homo sapiens
cttttagaaaatgtgactcttttaatgtaaaaattaaaaaaaatcactagagaggttccaagatggctgaataggaacagctccagtctacagctcccagcgtgagcgacacagaagacaggygatttctgcatttccaactgaggtactgggttcatctcactgaggcttgtcagacagtggatgcaggagagtgggtgcagcccacggaccatgagctgaagcaagtgaagcatcgcttcacccagaaagcgcaaggggttggggaattccctttcctagccaggggaagctgtgacagatggcacctggaaaatcaggtcattcccaacctaatactgagcttttccattggtcttagcaaatggcacaccaggagattatatcccgcacatggctcagagggtcccatgcccacagagccttgatcactgctggcacagcagtctgagatcaaactgcaaggcagcagcaaggctgggggaggggcactggccattgctgaggcttgagtcagtatacaaagcagccaggaagctcgaactgggtggagtccaccacagctaaaggaggcctgcctgcctctgtagactccacatctgggggcaagggataactgagctaaaggcagcagaaactt

SEQ ID NO: 830608 - DNA, 605 bp, Homo sapiens
aaggaaaccaaatggaaatcaaaagaaacttgaatgtcatatttacgtaatgaaaattaacataatagactcctgcattaagcagttttctaaattccatgtattctgctatttcccattctattctaccttattgctttctgactttcaaaatcctgagcttcccttctcattaattccagatcttcaaaaaggaaaatctgaggtggaagagattcttttcaatgccactggcctgtggacattctgttatttccacatagggtcaaacctggtataatgtattgtaaaaggaaataaaatagatttggaagacattcacttgctatttcacttaatgtctttgaagtattaacaattgtctataaaggacccagatactatactccagaaaatcaaaagaaatgattatttgcaacaaaatttaaattttaagatatatagacatattacataggattcaattctgatatctgtccctagaccaaaattagtttatggcacttatctggttaacagacaatascaattaaaaagataggaaaaaaaaaagagagaaagtagactggcttcaaggaggttacaggctactgagtcaggctgac

SEQ ID NO: 830609 - DNA, 590 bp, Homo sapiens
ctgcctcagcctcccaaagtgctgggattacaggtgtgagycaccatgcccggctgggataatatatatttttaaaagagaaaaaattgaataaactggccagtagacttttcgtagatgatgattctggagggagaggaaggcatatttctcatggaaccttgaacttatgccagatatcatgctctgcacatcacagtcatgatcagtcggctcaaggtaggagccatgtgttgaattacctaatagatatgaagtcgtgttaggtgcagaaaaaaacaaataaatataaattaataagacaaactccacatgagacatcagggaaaacacagtcttcaaaatacttctatggacaggtaataatatatccttatagaaaataaatgatatccctgaggccacatttaataaatgaaaagtccaagaaaaccagacctgtccatgtccacaaacctgtatttggcaactcaattaccaacacccaaagaaatacataagtaggatgaatctgttctagtttactcaatagaaatcttctggcgggaaaaaacaaacaaaactatatttctttatttctgattaaatac

SEQ ID NO: 830610 - DNA, 646 bp, Homo sapiens
tattggtgtggggtctaaaataaatgaaatgtaaacagatgattatatgtgctagatcctgatgctcaattgctgagcccttccaatggaatagatacacacacaaaaatgtttcatgcttacactttttaggttttatggaaaaagtaaattatacagtcacagctcccttaagatatctttgagatcaaccaatcccactctctttatattttacagaggcaaatactaaaagtcttgactatatgatagatgtttgtcctgaagtcaactaacttacacatctctgccttctctgctattagatcctgttgtctgcctctcaattcagatttgtttctactattccaaactgcctctggaattctaaggcatcttgtccgtaccatatagcaaatcatgaatcttcaaccagcaattcacacatacctactgagtttctgccgaagatgtaacttcaataagcacttgggagatggatagtaaacaaacttgtgattctttccctcaagaagcaaacaggccctgtaatttgatttatctatttctctatayattttttctgtattattgctatagactctgggccatctagtgtatgcatgtcattttttggcagagtaattataaaataccaaaaagttta

SEQ ID NO: 830611 - DNA, 483 bp, Homo sapiens
accaacgtccatcaaaggaaagtacctgtgaatttccttaaatracttgctggagggcattttgtggtaactataatactatagccactttttttcatcaattagtattgttaaagagaagcttgactatagagttcctaacagcagcaaaaaataaattccctccaattaagtagtctaataagctatttaggattttaccacttaacattctttccttcccatttaattttggctttcacttggatgtcatcttgttgaaaatccatcacagaaaactatgtggaaaaaaaaagataatgttgctaagtgcccctgatgttcaaaaacaagtagaagcacaatattttttttaaatcatcccaggatttttcctaataattcagcttcttcctactataaattaatatatgaaaatatatgaaaatggtcaatatgcaaattcaagtatcacactagctacttgccttcagtaagtgctat

SEQ ID NO: 830612 - DNA, 622 bp, Homo sapiens
cactgccacctccacctcccaagttcaagcacttctctgccttagcctctcaagtagctgggattacaggtgcccaccaccatgcccggctaatttttgtatttttagtagagatggagtttcaccatcttggccaggctggtcttgaactcctgacttcatgatccacctgcctcagcctcccaaagtgctggaattacaggcatgagccacggtgccaggccttcaaactcttttaaatcagtattttctagctttaatgcatctgagcattcacatgtggttcttttaataggcagggctttaataccacatcaatgttgacaataagaaattataaatatttaagctcaaaattaaaataaagacaaaaaattatcctgtgcactacaaaacacaatatagagaggaatttattcccaacattcaaaaacattgatcctctgactttatgcctaccagtttgatgttacagatgaaaaatttctaaagakgtatatgatgctttatcagttgttcagatttctaacattcgtatattacagctctttttagtcagaaaggggatatttaacatgcctttatttacatcttcctttttatgcttcttttttgttttgag

SEQ ID NO: 830613 - DNA, 521 bp, Homo sapiens
gatcgatggctgaataccatgtgcttgaggccatttctatctgctctggcaaatgtgccatgtgttgaattgtcagtagcctactattaactttcagaattcatctgacttttataaggtacaaattgatgaattcaatggcaatatgatagaaaccactattcttgtattttttaggtctttaggtggcactattgtctgccatttttctattttttggttttgttttgtttttccatagctatcttggcaagagagggaggctcagtttcagaggcttcccttggccttcctcattacagtagctcttattccacagcttctggaatctatatggggataaaactagtaagaatgtctattccaattatgcattcaaggactgggacattatcactgtgccgctccttgracccactggacacactgtgaaccagacctagggcagaacactttttactacttggctgacatgtgcttcgtgttcactaggaggggacgataacgaagcttttgatccc

SEQ ID NO: 830614 - DNA, 521 bp, Homo sapiens
gatcgatggctgaataccatgtgcttgaggccatttctatctgctctggcaaatgtgccatgtgttgaattgtcagtagcctactattaactttcagaattcatctgacttttataaggtacaaattgatgaattcaatggcaatatgatagaaaccactattcttgtattttttaggtctttaggtggcactattgtctgccatttttctattttttggttttgttttgtttttccatagctatcttggcaagagagggaggctcagtttcagaggcttcccttggccttcctcattacagtagctcttattccacagcttctggaatctatatggggataaaactagtaagaatgtctattccaattatgcattcaaggactgggacattatcactgtgccgctccttggacccactggacacactgtgaaccagacctagggcagaacactttttactacttggctgacatgtgcttygtgttcactaggaggggacgataacgaagcttttgatccc

SEQ ID NO: 830615 - DNA, 565 bp, Homo sapiens
aaactaattgtctaagttggcagagcagtcagaacacacacatttattgattaaattcattgtcttatatagatgtggttcatggtgcccaaaacaattacaatagtaacatcaaaggtcactggttacagattatcatatcaaatataattataattaaaaagtttgaaatattgtgagatttacctagatatggcacagagatacaaatgaacacatgctattaaaaagtggtgccaataaagttgcttgatgcagggttgatataaaccttcaatttgtgaaaaacacattatctgtgaggccaagtgaagcaaagcacaatcaattgaagtatgtctatattccactgcctttgtagagtgtatatagttgtattatataacatatataatatatatacaaatatatataatatatatatatttgggtatatgtaatatatattatatatatttgtatatatattacacgtatatattgtatatgtatatattatacatacatatagtgtgtgtgtrtatatatatatatatatatatatatatatatatatatatgttat

SEQ ID NO: 830616 - DNA, 514 bp, Homo sapiens
gtcttttttagagtgttcttttttctttctttgttactttaaaaacagttgttcaatgaatccatgagtgtgctttcttaaaattttgtagacccaaaaagtctcagygctgtgtatagtattctatcttgcactgtatattttggatttggaacttggtatgcccattgcattattgtattagtttttcagtgaacaaatttctttttaaaatattcaccaaatcagtgttctttctagtttggatttatttttatcaattctgttcagaaattgtccaattcctgaatgtgaaaatttttttctttaatgacttatagaaaatttccagttattacctctagatattgcctcaatattaccttaaatgcacccaaattatctaatataataatattttttgtccatcttgctctatattgataactttatttctctgtgatatatatttattgtattaattttaatcatccatatctcataggtttttaaattcaattactttatttttatt

SEQ ID NO: 830617 - DNA, 514 bp, Homo sapiens
gtcttttttagagtgttcttttttctttctttgttactttaaaaacagttgttcaatgaatccatgagtgtgctttcttaaaattttgtagacccaaaaagtctcagtrctgtgtatagtattctatcttgcactgtatattttggatttggaacttggtatgcccattgcattattgtattagtttttcagtgaacaaatttctttttaaaatattcaccaaatcagtgttctttctagtttggatttatttttatcaattctgttcagaaattgtccaattcctgaatgtgaaaatttttttctttaatgacttatagaaaatttccagttattacctctagatattgcctcaatattaccttaaatgcacccaaattatctaatataataatattttttgtccatcttgctctatattgataactttatttctctgtgatatatatttattgtattaattttaatcatccatatctcataggtttttaaattcaattactttatttttatt

SEQ ID NO: 830618 - DNA, 514 bp, Homo sapiens
gtcttttttagagtgttcttttttctttctttgttactttaaaaacagttgttcaatgaatccatgagtgtgctttcttaaaattttgtagacccaaaaagtctcagtgctgtgtatagtattctatcttgcactgtatattttggatttggaacttggtatgcccattgcattattgtattagtttttcagtgaacaaatttctttttaaaatattcaccaaatcagtgttctttctagtttggatttatttttatcaattctgttcagaaattgtccaattcctgaatgtgaaaatttttttctttaatgacttatagaaaatttccagttattacctctagatattgcctcaatattaccttaaatgcacccaaattatctaatataataatattttttgtccatcttgctctatattgataactttatttctctgtgatatatatttattrtattaattttaatcatccatatctcataggtttttaaattcaattactttatttttatt

SEQ ID NO: 830619 - DNA, 540 bp, Homo sapiens
tgaagattttcaaatgataattttttaacatacaatgtcaacccttttccttttattggttggcactctgtgggaaaataatagtgtttccttcttttattcattcgttaattcatggatttatctcacgtggacccatggattcctctttctttcagtgggccatgatctgttcctttacttattttattgattcagttttgctaattttgctagtaggaactattcaagtttctcagctcttttaacatgtctttcttagcatttgagcactcccttattttccttgttttttttatctcagattatgaatggtcattgcaaatctatcaaaatatactggatttctgtatattatatcctgtgatctagataaacacacaattttactaacttttttgcaaatatcttytttattttctgcacagaataatatctgtgaagaaagacatctttctttctaaactgtatgtattcttacttctctcattgcattgctaagacgtgtagtataagcttcaaaataatttatcagaccaa

SEQ ID NO: 830620 - DNA, 540 bp, Homo sapiens
tgaagattttcaaatgataattttttaacatacaatgtcaacccttttccttttattggttggcactctgtgggaaaataatagtgtttccttcttttattcattcgttaattcatggatttatctcacgtggacccatggattcctctttctttcagtgggccatgatctgttcctttacttattttattgattcagttttgctaattttgctagtaggaactattcaagtttctcagctcttttaacatgtctttcttagcatttgagcactcccttattttccttgttttttttatctcagattatgaatggtcattgcaaatctatcaaaatatactggatttctgtatattatatcctgtgatctagataaacacacaattttactaacttttttgcaaatatcttttttattttctgcacagaataatatctgtgaagaaagacatctttctttctaaactgtatgtattcttacytctctcattgcattgctaagacgtgtagtataagcttcaaaataatttatcagaccaa

SEQ ID NO: 830621 - DNA, 618 bp, Homo sapiens
tatcagcatccattgggttaaggcttttaaacatatattttaatatgaaaaggttctttcttttccttttccctactcttcagtactaaatatagagacctttgtcagacacattttcataagttatgatcaactctcatgttgcaaatgcaggataagagaaactgttctcttttggtctgatgttagatacctgccaatgaagagtcccctacgtttcctctgctgtgaataacatataagaaggtgtcaaaagcagtgaaaattttctaatggagtcttccagacaatcacaatggtgattatttacatcgcaaaaaaaatgtgtgctgtttcttgagatcgaataagcagaatagatttatttttgcaattacctacaatttgataaacacagataaatattgcttagaaaacacattaatattcttaatcttcattcttctataaatacatctaataatgccttgtattgcatactcttctgaaataaaatgtctgtctcttaattaggatgtgtataatggcagctctgaagacattatcstgacatagaacattacagaaggatttgaaatataatgtagactgtatatatttcataaacaatgcatattc

SEQ ID NO: 830622 - DNA, 613 bp, Homo sapiens
tgaattattccacctgtaagaaaactaaaaaatgaaaatctaacatctaattgagaggtgacagcgtgctggcagccctcactagctctcggggcctcctcagcctaggcacccactctggccacgcttgaggagcccttcagcctgccgctgcactgtgggagcccctttctgggctggccgaggccggagccagctccctcagcttgcggggaggtgtggagggagaggtgcgggtgggaaccagggctgcatgtggcgcttgagggctggcgcgagttccaggtgggcgtgggcttggtgggccccgcacctggagcagccggctggcgccagtggtcccaggcagtgaggggcttagcaccagggtcagcagctgcggagggtgcaccgggtcctccggcagtgccggcccgctggcactgcactggaattctcaccaggcgtcagctgcctccccatggtgcagggctcaggacctgcagcctgccatgcctcagcctccccctccaccactgtgggctccttcatggccagagcctccccagtgagtgctgccccctgctccgcggtgccctgtcccattgacygcccaagggctgaggagtgcagg

SEQ ID NO: 830623 - DNA, 585 bp, Homo sapiens
agttcgagaccagcctcaccaacgtggagaaactctgtccctactaaaaatagaaaattagccaggcatggtggcacatgcctgtaatcccagctactcaggaggctgaggcaggagaatcacctgaaccaaggaggtggaggttgcagtgagccaagatggcaccattgcactccagcctgggcaataagagcaaaactccatctccaaaaaaaaaagaaaaaaaaaaggcaacatacaagtgaccaaagtttattaaaaaatgcttaccatcactaatcaccagggacaagcaaattaaagttgcaaaacaaggtatcacttcacacctgttagaatggctcctagcaaaaagatgaaagttaacaagtgttggtgaggatgtgaagaaaagggaaccctgatacactgttggtgagaatgcaattgtaaaattgttatggtgaacattgtgcaggtttctcaaaaaactaaaaatacaattagccagtaatctagcagtaccacttctggatatttatcyaaaagaattaaaatcagtatgtcaaagagatacctgcactcccatgttcattgtggcattat

SEQ ID NO: 830624 - DNA, 644 bp, Homo sapiens
atatatatatatacattttttgatgttttcttagttttattctaatgtagcttttttggctttgaaattataaatacattacttttggtaatatttttgtttcagatttacatttaaatatttggaagttacagtgataaaatattttaattttagatagctacttagttggtgcatctatatttatcttagtcccaatgatttattatacaatgtaccatcattatgctacctatatgctttctatctacttttgcaaattttaggtacctttaatctctcttaactcacacgtaaaccagtgctacactcttatttgtagttttagtttacctttgaatacctgataaggcaattttgatttcattacttccctttctagaatttttttaatagacagggtgtctctctatcacctaagctggagtgcagtggcataatcatagctaactgcaacctggaacttctgggctcaaggggtcttcctacttcagtatcctgagtagttaggattacaggtgtgygccaccatgctcagctgatttttaaaaaaattttattagagactgggttatgttgcctatgctggtgtcaaactcctattctccagtaatcctcctgcccctgcctcccaaagtgctgag

SEQ ID NO: 830625 - DNA, 497 bp, Homo sapiens
ctaaaaatatttttaagactactaattttcattgtattaatatagtcttatgattgaggagtataaaagtataattaatagaaggcttcctatgttagaaatatatgatattgaaataaaattrtgtacagtaagtgacaaaatgaatgatgtatattttctgaaacctaaggaagagcttgttcatttctttttttttttttttttgagaaaaagtttcactcttgttgcccagctggagtgcagtggcgtgatctcagctcactgcaaactctgcctcccaggttcaagtgattgtcctgcctcagtctcccaaatagctggaattacaggtgcccgccaccatgtctggctaattttttatgtttttagtagagacagggtttcaccatgttggccaggctggtttcgaaatcctgacctaaggtgatgatgggcatcaaatcacaatagtatttcaattcctttgattattttaaaagattgacgtcaccact

SEQ ID NO: 830626 - DNA, 581 bp, Homo sapiens
ttttaactgctttgctctcttctttaaggagctattatatagaaaatggattttttacagcttacgtaraatttctgaaagtaatggatttggctccaacttaaaagttcacaaaatcattttttagattccataatatttggaaactgaaattttatttcttccattttcatattctaatgctgtctgtgacagacagaataattggtcacctataaagtgaattactgctgagtcaaacttgtcttcaattaaggtactcaatattaatgataatgattaggattatataacatatagttgagaagaggaaactttgatgatcattcattgtggaaatgtataatttatctttatatacagctatctttcttatgactgtaatttcatgtttaattatacttcagaaaattagataccaaattgaagtattgcataagcatcatgaatattgaacagttcttttgacctcagcttgtatttactttctttcaatgtcttttgttctcattcaaagtaatatttaaggaatcataaaatattagaaccaaaagtgtccttaatgcatagataaattttct

SEQ ID NO: 830627 - DNA, 646 bp, Homo sapiens
agctgattacatcctaagggtgtgttgtaggcaaaccaataccttcccacccctcaaakatgtcctcattctcattccaggaatcttggaatacattagcttacatggcaaagggaaattaagattgcagatggaattaaatttgcttatcaccaacgttgagattattcaggtggacccaatgtaatcacaagagtcctcatacgtggaagagaaagacagagggttcagagtgatgtaatataagaagactcaagtggccattgctggctttgaacatggaggaaggggcctataagccaaagaatacaagcagcctctagaagctagaaaagttgagaatatctggattttccttggcatctccagaaaagaattcagtcctgctaacactttgatcttattctaacaggacacattttgaacttctgacctccagaattgtgagataaaacaattttgttgtttctggtaatttgttacagcatcaataggaaactaatggaggcagtgagtagtgtggctacatatacggaatatgatactcggcttggcttttgaaatctaataaacctaaatacaggtattttttcctctactaatttactaaatgtatgacattgggtaacaaacttaatcctgttca

SEQ ID NO: 830628 - DNA, 567 bp, Homo sapiens
tataaactttctgctctgttacccaggaagcgtgatgtcaaatgcaggaggtggagaaggagtaagtgtggtcagctgtggtcaggggaccaaagctgaggagcccatgatccactaaaggatcaaagtgctaaggtggcacaagaggagacctgtttcctaaatgctgacttctcttccttccttatgatccatcttaatgttgggccatgacatggttcaagaatcaatggggctttaggttactggaatcaaaaatagaagacagaggattcagaggcagctcgaagcctaagcccaaaaccaactacatctgcacttaataagacaaaatatattgaggcaaaatctcaaatattccaaacctccagaatcaagttaaagtcaaatttaaatggggcaaagtgttacatctttaaccaaacgtggctaggcataacgtattccacatctccagggrcatacgacttgcccaatccctgattataaaatggcatataagttcgaagtctctagatcagcccactcagttgtctagcagtgaagtttctatgaagcaaaaaagga

SEQ ID NO: 830629 - DNA, 589 bp, Homo sapiens
aaaatcattagagttcaattggccaaactaacatgagagaggatgtcrcatttctgaaactgcattgccacccatcactgaaggtggactgaaggcacaagccttttgcgctgggcttgcttattccatagtgtgctgcggttttcgaactgcaaaacttttactggtacagggagcccaggctgtgctggcaaatgtgaaaacagaactgcagtgcaggacgtgattggaaagcaatcatccacatctcccataagatgcttatattttcactttcatcaaaatttaaaccaatttttaatcttgtaaagaattcagaggctttccagattgtgtcacaatagtctagctggggaaactctgtaatcacagacctgtaaggaccttcaagatttaacaatccattctgctcaaatttaaccttgtgggaatcctagaaacatccactgcagggcatggatctaccaccagagggaaacagagagccatcgtggtaaagaagtggtggcaatagcgacagcctcctccctgttggcaaagagctacttgggccaagctgcacggccattctcccccatggatcctaaaa

SEQ ID NO: 830630 - DNA, 553 bp, Homo sapiens
ctgatcccttttctggccaccccttccttagcctgagcacagatccccccactgctggtgtcaacctggattctggaggactagggaaagtaggagtcttctgggggccacgatggctcagaaccatttgcgtggtttctttcctcaactgtcccattttttgccccaactgcaagtcttctttccaacagaaagaaagaaacataatagccttgagctaccagacttttatattccaggttctactttacaatggcatataaagtactttggctgttgggtctcaaatttctaaatggaaaaattataaaaaatgaaaaacatgatcacagaactggaaacaaactaacagaagtctattgtcagacactggggcatttttgcctgtcggcgggacttcctggagaaaatgaccctggcctccttcattctgttccctgaacggatgtaagcagggccagcaggctgaacraagtagcacacatagaagaaatgcagtcagggaggcgagcagcaggttggttaaggatccgtccttccaacgaagagtcat

SEQ ID NO: 830631 - DNA, 590 bp, Homo sapiens
gataaacatacatgtgcatgtgtttttatagtagcttgacttataatcctttggatatatactcagtaatgggattgctgggttgaatggtatttctagttctagatctttgaggaatcgccacactgtcttccacaatggtggaactaatttacactcccaccaacagtgtaaaagcattcctatttctccacatcctctccagcatgtgttgtttcctgactttttaatgatcgccattttaattggcatgagatggtatctcattgtggttttgatttgcatttctctgatgaccagtgatgatgagcattttttcatgtgtctgttggctgtataaatgtcttcttttgagaagtgtctgttcatatcctttacccactttttgatggggttgtttgttttattcttgtaaatttctttgagttctttgtagatactggatattagccccttgtcagatgggtagattgcaaaaaatttcttccattctgtaagttgcctgttyacttttatttaattagctgaggtatgtctatcccttttcgttaaatacttaaaactgttaatatatacatttaaataagtgg

SEQ ID NO: 830632 - DNA, 590 bp, Homo sapiens
gataaacatacatgtgcatgtgtttttatagtagcttgacttataatcctttggatatatactcagtaatgggattgctgggttgaatggtatttctagttctagatctttgaggaatcgccacactgtcttccacaatggtggaactaatttacactcccaccaacagtgtaaaagcattcctatttctccacatcctctccagcatgtgttgtttcctgactttttaatgatcgccattttaattggcatgagatggtatctcattgtggttttgatttgcatttctctgatgaccagtgatgatgagcattttttcatgtgtctgttggctgtataaatgtcttcttttgagaagtgtctgttcatatcctttacccactttttgatggggttgtttgttttattcttgtaaatttctttgagttctttgtagatactggatattagccccttgtcagatgggtagattgcaaaaaatttcttccattctgtaagttgcctgttcacttttatttaattagctgaggtatgtctatccyttttcgttaaatacttaaaactgttaatatatacatttaaataagtgg

SEQ ID NO: 830633 - DNA, 606 bp, Homo sapiens
tagtactattcaggttttctattttatcttgagtgagtttggtagtttgtattttttaaaaaaataatttatttcaygtacgttttgaattactaggcatatattttccttatacgctccatttagtcttttgaaagtctatagaattcaaaattattttctccttttttattcttggtattagtaatttgaattttctctttttttgttagtctattttgagattaatcaattatattgattcttttcagagaaatagcttttggtttaatccactttattgttttttggtcttataatttcattgacttctgtttgcctttattattttctttgttctactttaattgtgtttaatttgctcttcttatttacagattcttgagatgaaagcttacataatttgagacctttcttatctgatgtgaagatttaatatcgtaaatttctaagcattgctttagctgcattcaaaaaatttgttacatgtttttatattcattcagtttaaaatgttttaaacttctctgtatttcttctttgacccataaattatttatgtattctaaaaagtggttaataagccttattttatgttccatttct

SEQ ID NO: 830634 - DNA, 589 bp, Homo sapiens
attagagaaaaaaaaagattaacttaatttactttttggtgcagaacacttaccccacatatgagagtttatatcttttaaaagagaagttttttattttaatgagatttttagttcttaaatcataaaatggaattactgacccaaagaggctaaattaccaattggacataaaagggaacacacacacacacactcacacacaaacaaacatacatacactccatacaaatatatgtttatttacaaataggagatcatctaaatgtgtaatgtatctggccaggccagagaaagataaatgtgtctatttgaaaaagttaccaaagttgatttttcccttcgtaatgttattttattattatttaaacagctttattaagataaggtggatatacagtaaattgcacatatttgatgtatacaagttgatgagtttggacatatgcatatgcctatgaaaccatcaccataatcaagggaatgaacttatttattcctttatcacctccaagccttttcttcctctgcaattttaaaggaygtgttttaaaccctatacagataaaaatagcacatcagaaagaaa

SEQ ID NO: 830635 - DNA, 472 bp, Homo sapiens
gctgtgggcattccttggcccagtggccagatttctggcacgtgtagcaagctcctgggggaggaggttctggaggaatgcctggcygctgcggttcaggcatttggaagttcttgtgtgctggagatgtggctggggtttgtctcacagtggaggcaaggaattgcaacttttttctgttattgtacaccttgaaggtgaggttaattaagtcctggtgtggggtttgagggcctgactccaatttttggagttttatttaatgtcgggagcagattgggtaataaaatgtatattgagaataagacggccttttgaccttttagggtctagggctgtaaagtgtctcagggttgctgccaaacaagtcatgaactgggctggatttttatatttgatgaaaaagagcctaaatgcttctgatttgggataaagaaaaaggagcattaaccttgactatgcctttggctcc

SEQ ID NO: 830636 - DNA, 619 bp, Homo sapiens
cctgcatctctgacagcttcagccctcccaggctccctttacttcctggtttttggagctcattatcctatctcctgtcagttttctgttcatgtagcctgacccccacccaccatgatataggcaraaaggactttctgatatctgcttttgtctctacagggaggtgattcatttcactgtgggcaggaccattcttcctggactggtgagcagaaaaatcaaaattgcgattcccataggtggtggtgttggaagcttcatttaaggtccctgaacagaacagaaagttaccgaaaaaacaagactagctctatcagagaccatggcatcagaatgacctggttgcagaaacgaccaaagtcatagtaagcaccaggaccagagaacagaaaaggatttatcttatcattgtaaagaatctttaatatttgtatatccttacaacataaggatagatgttatcctttatgctaatatacataaataaatttatgcatttaaatacaaattatgtttttcttgatgttttgacatatatttatatattttatataaaatatttcaagtatttaatatcactacttagaaatgtgtcctaactaattaaaaagaaatc

SEQ ID NO: 830637 - DNA, 568 bp, Homo sapiens
ctctaaacaacaaattttcaatgtagatgaaaccacttgatattggaagargatggttcctagaagtttcatagctagagaaaagtccatgcctggcttctaagtttcaaaggatttgctgcctttctcaaagaacaggctgatgctctctgaagccctgcttcaaaggatagggctactgtagttggtgactaagttgaagccaatggtcatttgccatttcaaaatttctagggcctgaagaattacgctgtatttactctgtatgtgccctaaatagaacaacaaagtctgggtgagaacacatctgtttacagcatggtttactgaatattttaagcccactgttgagaactgctgctcaaaagatttctttcaaaatatttctgctccttgacaatgaacttggttatccaagaattctgatggggaagtacaaggagatctgttccattctgtagtccatggatccaagagtaattttaacttttaaaatcttattattttagaaatacatttcaaaaggctacagctgccatagacattgatctgatggatctgggcaaag

SEQ ID NO: 830638 - DNA, 636 bp, Homo sapiens
aaatgctatgattcagatatttttattatacaatgtagcgaaatgaatttttaaaaccctacattcatattccaaatctgttaccaaattctaaaaaaaaaaaaagagattcagacagtaaaccttcccagtatcacatagtttgcaattgcctgggttggatagcctgggtcaactcaagtttttatttacagttgagtgtgttgttttttccatggtccagtaagtgtgttgtctctgagaggcagggagatagatttaattgaacatagtcagctctgcccagattccctctgaagctacttacctgttctgtgcacataggcatcagttttggtgtgctttgcttctactgagttgcatctgcagcttccttcagaatgctgcctgcagaccactccagcctcctgggttgtaagcacagaaagctcaaagcgtccgggagtttcctcctcacccacctaccacacacacagtccactgccaagggctgactttgtgggagtataaagctcagctctgttgcctccgggctggataaactttgatgtgtaatttrtgccacagagcaccctgcaggattaggctgggctggtactttgccagaaattgcacccttcccagtctttcctcccc

SEQ ID NO: 830639 - DNA, 608 bp, Homo sapiens
cttcttcttcttctttttttttttttttttaccgtcaggtgaaattgggtgaggatgcccccaattccagtgtggtgcatgtctccagtrcagaaggaggtgacaacagtggcaatggtacccaggagaagatagctgagggagccacatgccaccttcttgactttgccagccctgagcgcccactagtggtcaactttggctcagccacttgacctcctttcacgagccagctgccagccttccgcaaactggtggaagagttctcctcagtggctgacttcctgctggtctacattgatgaggctcatccatcagatggctgggcgataccgggggactcctctttgtcttttgaggtgaagaagcaccagaaccaggaagatcgatgtgcagcagcccagcagcttctggagcgtttctccttgccgccccagtgccgagttgtggctgaccgcatggacaataacgccaacatagcttacggggtagcctttgaacgtgtgtgcattgtgcagagacagaaaattgcttatctgggaggaaagggccccttctcctacaaccttcaagaagtccggcattggctggagaagaatttcagcaag

SEQ ID NO: 830640 - DNA, 556 bp, Homo sapiens
atgcataagcttcttaaatgccaccatgctgtcattatccatcatatcaccrtcaaataagtgtttactctgaaagaaggaacagcacaccagggatgacttgaagcaggttgtaggaaaaaatgaaccaaaccaccagccaaacttctctttaaacatgttacacaacagtattcgaatagcatttattcaattattatgggtctaccatgtttgtttataaatatcataaaagattcagaaagaatgatgatgagagattcataattaagacagtttggtggagatttggagaatgaactgtgtaggtacagaattcatgtcagctgctctgttgcaatgctgtgcttatcttatggcctggagccatagttctgactcttgaccaaacctgaataaaaggtactaactggtgatttatatagccttgtactaacatccgagcaggtgaaggacaacctgtttataagaagtgttcagtctgatagtttgtacctagtttctattatattcttttggttattgctgttgaacctggtcatgtcacctgttttgg

SEQ ID NO: 830641 - DNA, 667 bp, Homo sapiens
  misc_feature 1, 2, 3, 4, 5, 6, 7, 8, 9, 10, 11, 12, 13, 14, 15, 16, 17,18, 19, 20, 21, 22: n = A,T,C or G
nnnnnnnnnnnnnnnnnnnnnncctttctcttcagtttaactaaatctcgttcttgwccttactttctatccatcaagtaaatgcttatcaacattctccatcatagttctctgttcatttcctacataaggcatgcaaattgcacctgaaaaatatatccaggtcctaatccctgaaacctgtgaatgttgccttctttagtaaaaaaggaatttgcaaatatgattaaggatcttgagatggggaaatgagtctggattattcagatgggccctaaatacaatcacatatgtccctataacagaaaggctgagggcaatttcaccaaagaagaagagggggcaatgtgaccagagagacaggaattggaatgatgcagccacaaaccaaggaatgccagcagccatcagaggctgaaagaggcaagctctctcctcaagcctcctgtgtgtgcagccttgctgacatcttgattccatcccactgatactgatcttaaatgtttggtcttcagaactgtgagagagtacatttctgttgttcaagccaccaagtttgtggtcatttatcatggcagtcacaagaaacggatccagtcttcataattgatgattattttatctacttatttgtttacttatgttttccctttttggtttgtaaaca

SEQ ID NO: 830642 - DNA, 613 bp, Homo sapiens
gttcattaacttagtgatctgaaacttaaaagcagccaatatcaaatattaagtgggaacccttatttctaattcctgatgattcctttctgtgcaagaatccaaaktagtataacacctaacctctgcttcttgactcactggccccagaagcacagccttacctgaagaataaacctggccaggataacccaactccacacttccatagagtgtgctactaccctatccccctcagttgctcctctagggcaggatcttaccctcttgcccatgtccagtgttggaagagacctagagcttaagcctgccatattctgggaatctgagctctcagggtaggtgtattagttcattctcatgctgctaataaagacatacccaagactgggtaatttataaaggaaagagatttaattgacttatagttccacatggctggggatgcctcacaatcatggcagaaggtgaatgaggagcaaagtcatgtcttacatggtggcaggccagaagcttgtgtaggggaactcccctttataaaaccatcagatcttgtgagacttactgactatcatgagaacagtatggggaagatctacccaccatgattcaa

SEQ ID NO: 830643 - DNA, 552 bp, Homo sapiens
cctttggtcacatatggccccatatggcattttagacaatgcaccatcactactctctagtgcaatctgatctaatccatggcctgcgagccgcatgcagcccaggatggctttgaatgaagcccaacacaaattcgtaaactttcttgaaagatttttttttttggcaatttttttttggctcattgctatcgttagtgttagtatattttatgtgtggcccaagacaattctttttattccaacatggcccacggaagccaaaagattggacacccctgctctaatgcctggaaacattggttcatgtacctcccctttgatccaatcagctatagtcattatatacagggtcacacaataaaagaaggaagaagggctctgtgcagaggcagaggtacaaaagtcacctaagtggttaaatctaccctttgagagccattctggtcctatgagtggtgccgaggatgtggaaaaaagcatggttaaagaggagcatgargacggtggtcttcttcatttaagaaccacaccaataaagcagaaaaccag

SEQ ID NO: 830644 - DNA, 642 bp, Homo sapiens
catattaactaatattatcctgtatccacacgtaaggtttctggagcagagcggattactgttatttacttacagccaaaaacaatcccatggatcccctgtacccaaattcttatcccttaatgatacaacgagaggtggctgaacaaactctacatgtaagtaatatgtattataagtgaggaacccccactcccccaatttaatctaggtgttgatgtagaagggagaggcagctgtacttcttccttcttccaagagtttctctggaaacacgatgggaagattcctgggtttttactttaaccctttggaatatgaataaacttctggggaaaggtaagtccagtgtcaccactttaccaccctgggatgtctccacaatccaggtctcatcccccggtgttagtcccttttcattgctataaaggagtacccagggctgggcaatttataaagaagagaggtttatctgggctcacggttctgcaggctgtataagcagcatggccctggcatctgcttctggcgaggccttgggaaacacaatcatggcaggaggtgaaggggaagccagcgtgtyacatagcaagacagggagcaagagagagcgaggtgggaggtgtcaggcttttgcataaa

SEQ ID NO: 830645 - DNA, 593 bp, Homo sapiens
actttgtcattactgacaaagtgcttctctgtggatttacaacagttcataatttactccttaggcaaasatcagattttcattgcttcctttattcaaactcccttcgaagaggtctaaaacaaaaagcatataataaaaatcaaagacctcagaagtatgaccagtgggtggtcttctcaaggatggacctcaaccctaggtattcctgggcacagaaaacagattgatgttctaaggacaaaactgagatataggcagtttttcctttcattttgcacttaataatttccgaataaacccacatagctaatacctaggcttattatcttttttccttttgaagataatgtaaaattcctgttagataacagtctttctttagcaccatgtaaaatgcttcacagcttaatgctgtggtagatagaaaagatgaaaacaagatgcctgtcctcagcaggcttttagttcactttggcaaagaaaaccaacatgctgtctggtgtccattagaagcataagttccaaaaaatgaaagatccttttgcactggaataatgagaaaacacttcacatccagaacttgaacaggc

SEQ ID NO: 830646 - DNA, 635 bp, Homo sapiens
gagattagtgacttaccagatctggactcagtttggagggtgctcagacctcaggaagaaataagcaggaactccaggcttgaagactttgggtctcttctgtgggtctttagaagcttttattgacctttctaatcacaactcccacccacacccctccacgtatccactgctagcttccaatcaacaagtgatatctgattgcatttctgaagctccacccagttaatcctgattggggttttggctctccccagattaatggattgaatcagatatccattcatatcagatatccatattaagttcatgaatcaagaaattgacagtgttagggatagggtgggaatcaagaatgcattcattcaagaccgggcaaggtggctcactcctgtaatcccagcactttgggaagacaagttgggtgggtcacctgagttcagacattcaagacgagccaggccaacaaggtgaaaccccgtctctacaaaaatacaagaattagrcagggacgatggcacatgcctgtaatccagctactcaggaggctgaggtgggagaatcgcttgaacccaagaggcaatggttgcagtgaaccaagattgcaccattgcactccactctgggtgacagag

SEQ ID NO: 830647 - DNA, 490 bp, Homo sapiens
tttagggattctgtgaactggatccattcctataaatgatagggaaaagactcagcctgaaatgkgttttttatttctctttcttttgagacagagtctcgctctgtcacccaggctggagtgcagtggcacgatctctgctcactgcaacttccatctcctgggttcaagcggttctcctgcctcagcctcccaagtagctggaattacaggcgcccaccaccatgcccagctaatttttgcatttttagtagacagggttttgccatgttggccaggctggtctcaaactcctgacctccagtgatctgcccgtctcagcttcccaaagttctgggattacaggtgtgagttactgcgccaggcctaaaatggaattgacctcagtggcaaagctcttcatcacgcagcatcctaagtgttgactatcagacaatcagaatgaccctgggcttgggcaaaatggtctccatccatcactttgaagtca

SEQ ID NO: 830648 - DNA, 645 bp, Homo sapiens
ttggttagggctgtctcaacatcctttgtagctgtgctacatatgcagaatctgattttcaatgactcgttctttcggcctggtgtaaaccacttttccattgctggaaccatcagtaaacacmgtcagagcattttctaaaggtttatgtctggtaattctaggtaaaattcaagtagtcaattttaaaaactggaagatttttgtttttgggtaatggttatcaataattcccacaaaatcagcaagagcaatctgccatgcagcagaattgataaagccttgtctaaactcttccttgttaaaggaacaatgattttatctgggtcacttccacacaattttattatttgtaatcttgcctgaccaattaatgtagccatttgatccaagtacaatgtaaaagtcttaatcgtactgtcaggaaggaaagatcactccacaagatctgtattttgaacaataatgcctgttgagaatgtgcagtagcaaaaatcaaaagttggagtggggcgaagtgatctattctatttacttgtgctgaccgaattttttcttcaattaattcaatttctttagttgcctctggagttaatgttcttttactattcaattctggatccccactcaagatagagaacaaat

SEQ ID NO: 830649 - DNA, 590 bp, Homo sapiens
cggcagtgccgtcatcacatggatgaacttcatctgttttttatagatttccccccatgtaatacaggacacagtctttaaacaaagagtcaccggagttcctgatggccactggtctgagtctgtccctttggmactaagggccctcataactgcacttacctaccacaggcgtccctgtaagcaccactagagggcgagcatcttcaccaaacctgatggacccaagaagtctgacctgaatgtctccctgctaggcaggggtcctcagaggaatcttctatccagtccagatggagggaactggaagagtctcctcaaacccaggaccaacaaagagattccctccaagatcccaattagggagccaggacagggactgagagggaacagggaagggaaggcaccatgggtcccaaaacctggaactgatggagaaggtcccttccagaaactgtttggagagaaccagctgggaagaattaaagtctctgagatcttccacctaagagctggacatctgaattcaggaagacttacccgaggccttcccatggcgcaatcgagaagagctcacgggactcttgcca

SEQ ID NO: 830650 - DNA, 540 bp, Homo sapiens
tgatgggatcctgggacaagagggagtcctggccctyccgagttggcaggacagtagctccaaaggcacaactgaagctgcccaggtcgcagttccaaccaaggtcccccagtgctcttgagggctcaggaggtctccccttctcctgcagcatgggggtgtctgctcccactgtgtggtccctcctggcacctgctgtaattttggagtggagttggggtcaagcatgtatgctgtggcagcccagatgagcgtgtgcatgctcaggttcgtgctgatgcaccgtctgcctgctgtcttgaacactctgggctttgggccctgatgagcatgggagggaggctgaggacagatcagtgctggcctttggatgctccttgatgcaagtgacctgggcgccatgggtggtggtgggaggcagacagactcctggatgggaagacgagggtacctggtgaggctctaccttgtgaccaaggggggcctgaagcccgtgggctggtccaccagtgctatggaccagagtgggaatatgtggtg

SEQ ID NO: 830651 - DNA, 438 bp, Homo sapiens
cctccctgcttgttgtccctctctctgacttttcttcacyctgttttccccttggatcctgcccacttccacattgttttgttttgttttttttttgagaccaagtctccctgtgtcgcccaggctagagtgcagtggtgtgatgtcacctcactgcaacctctgcttcccgggttcaaatgattctcctgcctcaacctcacaagtagctgggattacaggaacccaccaccatgcccagctaatttttgtatttgtagtagagttggggtttaccatgttggacaggctggcctccaactcttgacctcagcctcccaatgtgctgggattacattgtgagccaccgtgcccggcccagttctcacttttcatggtgcctttcagtgccattagaggagaggttcctgttacctccatggaccttgcgtggtgagc

SEQ ID NO: 830652 - DNA, 630 bp, Homo sapiens
gcctgaaggaagcctcatttgcatggatccatgtaagttctgagattccttcccacacgtggccacctgcaggtgccccataaattcatcttcccaagaagagccaatggggataggcgaggaccccaaacctgctcccaaccccacatccacaggacagagagggatcacctgaagcacaggccagggggtgagtcctgaccccactgtctcctcctaatcccagagggcagtggagtggccacaggcaccccaccaactcctcctgtaccccaagcccaagatgaacaaacttcccgactcactggcctatcccaacttaaaaaaaagcaggacaactctcccaggtggagaagacaccagctgcctctgcggtgctgagcccaggaggaagatgatcactgttcaaactgccttggcaagttgtttcaaagaaataaaacccttggcttctcagtgctttgagtcacattgcacttagtaaatgttcgttttactaatgtttttcacttccctgtatatttatattcagcaktgagagacctcttcatattccaacaaaaagtgattaaaggatttgggacacctgtgattatccccatgggttattatgatcgctctgcaccgcgc

SEQ ID NO: 830653 - DNA, 581 bp, Homo sapiens
aaaaagtgggtaattgtgagtatgtggaagtgatgtctataggaaccttcatctyagagttacagtgctctagaatagcatggtagcacttttacagtttttgagatggagtttccctattgttgcccaggctgcagtgccatggtgtgatttggctcactgaaatttctgcctcctagttacatgcgattctcctgcttcagcctcctgagtagcttggattacaggcactcaccaccatgcccagctaatttttgtatttttagtagacacagggttttgccatgttggccatgctggcctcaaactcctgacctcaggagatctgcccacctcagactcccaaagtgctgggattacaggagtgagccaccgcgcccagctacagttagcatttctatacataccttccaaatgctgtggaataccatcacaccacttttacagttccagtgaattattttgttttttttctgcgatgtactctgagtgtgtcacccagactggagtgcagggccctgagctgggctccctggaaactctgcctctgggcttcaagtgattctccttcctctgcctcc

SEQ ID NO: 830654 - DNA, 438 bp, Homo sapiens
agcagggtcaggcagagaagtagcccaagtgtggcccagagtcttctgatggtgttggcgaggaagatcagggagactttggccattgtccagatcctcagagaaaggagtgctcaccatacagggtccactgtgggaacagaaacctgcctttactcagtggaaggtaaagggaatagaagtggggaatcaaaagtcagaatcaaaagggaatcaaaagggaacagggattgagaaaagacaaagagaacagggagcactgaggacaggagcagctgatttatgggatgagaatgaaagcaaaggtcagggatgagtccttctaaattctgagyctctcccttactttacccacaggaggtggaaacttcaagtgctggatttgcgggatgttgatgagaatttctgggccagatggcctggagcctgggccctgtc

SEQ ID NO: 830655 - DNA, 597 bp, Homo sapiens
ctcttgtccataattccatgattagttcacctttgggctgagatgtcccagcacaggtcatctgctagtagtgtgrgcaagtttctaattcagtgagacccccaaattgcggtgttgtgatgatcattctcctagtgaactagatatggtgaagtaatagcatctatgctctatcattctagggtgatctgaccaagatttcttggtatacgatttagagaatattgctactctaatccacactgttcaaagaaagaactcatctcctcatacatccagtgtgcctctctttgatttcttatagggaacacccagacagcatgtaggttagttagttattttccttgtcgtacaggagatcagaaatgacagtggctcaacttgccagagaaacaagtatcctggaccacaaaaacatcgttaacctagaccttatagcctgttggtgttagtaccttcagcaggaggacgtactagacaatggaagaggttgtgaatatgcccagtacaaacctcgagggcagttcacattttgtgatagaagtgtctaattccttacccaatttcaattcctttttcttccttacccacgaacct

SEQ ID NO: 830656 - DNA, 620 bp, Homo sapiens
agatggaaaagattaaatcacaccttgaagaaaatgattgcaaaaatctgtcaagaaaccagtttaaccttgaataaggtgttatgcccttccctgatgtgwatctgggtagtggcccaaagtaagctccaactgagctgctttaaaacaatgtatggaaaaccattcctggccttgctaaaggaaaagtgcctggtataacaaaaacagatagcaattaaacagtatttaaagatcttaaatggagttctaacctttgtttataaacttgcttctaacagcctactgattccaacagacgtgcccctccatcactttaaagtgggtgaccaggtccttctcaagttgtggacagagtgcaggccaggggaccacctcatccccccaataaactgctccctaaggagtactaccgactccccacttgtcagccatgctagccagaatagaattttggatccatcaccctcgaataaaacttgtccctacaaacttgaacaggaaaagaaaagccttggctacgggagcgtcttgggttgctgtttcaagccaggtctactgacagaaaagcaaaatgaattgggtctttatagtttgggtcatgaatgccttgatttctt

SEQ ID NO: 830657 - DNA, 620 bp, Homo sapiens
agatggaaaagattaaatcacaccttgaagaaaatgattgcaaaaatctgtcaagaaaccagtttaaccttgaataaggtgttatgcccttccctgatgtgtatctgggtagtggcccaaagtaagctccaactgagctgctttaaaacaatgtatggaaaaccattcctggccttgctaaaggaaaagtgcctggtataacaaaaacagatagcaattaaacagtatttaaagatcttaaatggagttctaacctttgtttataaacttgcttctaacagcctactgattccaacagacgtgcccctccatcactttaaagtgggtgaccaggtccttctcaagttgtggacagagtgcaggccaggggaccacctcatccccccaataaactgctccctaaggagtactaccgactccccacttgtcagccatgctagccagaatagaattttggatccatcaccctcgaataaaacttgtccctacaaacttgaacaggaaaagaaaagccttggctacgggagcgtcttgggttgctgtttcaagccaggtctactgacagaraagcaaaatgaattgggtctttatagtttgggtcatgaatgccttgatttctt

SEQ ID NO: 830658 - DNA, 626 bp, Homo sapiens
caagcatcagcttaatgaatagaactaaaattctaagactgttgcaaatttaaaattcccctctgtgggcacataaactatgacaatatccttgttgttgactggaccatckgtgccatgtacaaatgcccacaaaaagggctcattctctggtgggactatgtaaaattgagctcctagtcaactctatatttctgacactgcttgtatttctatttctgatctggactagaatctggaagttggtagaaagggaatcttcaatcccctttacagggaatcttgacctcctgagggatgcctcacaaactgttgttgacttgcgtttagctttctggatcagttgtagattgcaatgatgaactgatagcttcagtctattttctgtatctttctcctggtacacacacatcagtaaggaaatttgactactaaatacaaccgtcgccagaaaagtgtgattgtttatagaatgctcactaggtaaatggttataataaaaggtagggaaagttatgtaaactaattttattttttttttaacttcaggattttatcctaaccagttcctaaacatgatgcatctttctgattaagttgtaccgaaatatttttttctaagaaaa

SEQ ID NO: 830659 - DNA, 552 bp, Homo sapiens
ttattgttccattgtgctcatagtaatatgagggtgcgtgaaagaaaagtggagttytcattgaatatctatgacttctgactgtttatcatctgtttcctcttcaatagtaatgaaatcccattttttcctccatttggaaaactactctttgctcattgtactgtctttactatcccttcttgaaaaaaaaaaaaaaaagcaggtgatccacttggccagtcagcctctcctttttgggaatttgaatcttgagaagaatgataagaataacaaaatggttggaactaatttatcccaataatagtaaacctgaaaggccttgtctgtctactatcctggtctggaagactaatggggtctttcaggtttggctatatttcttttctttattagagtcatgccccatccttcaagtaaccttgcccctttcttgttttagttaaataagaattgttttctgttgcttgctaaaaaaaaaaaaaaaaaaaaaaaggcataaataacataggcacaaaattgcctaaccaactggtgattttcatacagtaa

SEQ ID NO: 830660 - DNA, 552 bp, Homo sapiens
ttattgttccattgtgctcatagtaatatgagggtgcgtgaaagaaaagtggagttctcattgaatatctatgacttctgactgtttatcatctgtttcctcttcaawagtaatgaaatcccattttttcctccatttggaaaactactctttgctcattgtactgtctttactatcccttcttgaaaaaaaaaaaaaaaagcaggtgatccacttggccagtcagcctctcctttttgggaatttgaatcttgagaagaatgataagaataacaaaatggttggaactaatttatcccaataatagtaaacctgaaaggccttgtctgtctactatcctggtctggaagactaatggggtctttcaggtttggctatatttcttttctttattagagtcatgccccatccttcaagtaaccttgcccctttcttgttttagttaaataagaattgttttctgttgcttgctaaaaaaaaaaaaaaaaaaaaaaaggcataaataacataggcacaaaattgcctaaccaactggtgattttcatacagtaa

SEQ ID NO: 830661 - DNA, 552 bp, Homo sapiens
ttattgttccattgtgctcatagtaatatgagggtgcgtgaaagaaaagtggagttctcattgaatatctatgacttctgactgtttatcatctgtttcctcttcaatagtaawgaaatcccattttttcctccatttggaaaactactctttgctcattgtactgtctttactatcccttcttgaaaaaaaaaaaaaaaagcaggtgatccacttggccagtcagcctctcctttttgggaatttgaatcttgagaagaatgataagaataacaaaatggttggaactaatttatcccaataatagtaaacctgaaaggccttgtctgtctactatcctggtctggaagactaatggggtctttcaggtttggctatatttcttttctttattagagtcatgccccatccttcaagtaaccttgcccctttcttgttttagttaaataagaattgttttctgttgcttgctaaaaaaaaaaaaaaaaaaaaaaaggcataaataacataggcacaaaattgcctaaccaactggtgattttcatacagtaa

SEQ ID NO: 830662 - DNA, 552 bp, Homo sapiens
ttattgttccattgtgctcatagtaatatgagggtgcgtgaaagaaaagtggagttctcattgaatatctatgacttctgactgtttatcatctgtttcctcttcaatagtaatgaaatcccattttttcctccatttggaaaactactctttgctcattgtactgtctttactatcccttcttgaaaaaaaaaaaaaaaagcaggtgatccacttggccagtcagcctctcctttttgggaatttgaatcttgagaagaatgataagaataacaaaatggttggaactaatttatcccaataatagtaaacctgaaaggccttgtctgtctactatcctggtctggaagactaatggggtctttcaggtttggctatatttcttttctttattagagtcatgccccatccttcaagtaaccttgcccctttyttgttttagttaaataagaattgttttctgttgcttgctaaaaaaaaaaaaaaaaaaaaaaaggcataaataacataggcacaaaattgcctaaccaactggtgattttcatacagtaa

SEQ ID NO: 830663 - DNA, 245 bp, Homo sapiens
aaatgctggaaataggccccaatttctcctggccagtaaagtttctcctgagaagttctctgttagcctgatggggttccctyggtacagatatgaattttttctctacctgcctttaaggtttttttcttcagtgtggaccttggaaagtctggtaactatatactttggtgatgttcattttatatagtatctcactgttgctctctggatttcttgtatctgtatgtctatctctgtagcaa

SEQ ID NO: 830664 - DNA, 492 bp, Homo sapiens
atttcagtactatgttgaataggagtggtgagaatcagcaaccttgtcttgtttcagttctcaagaagattgctcccagtttttgccctttcagtataatgttggctgttagtttgtcatagttgtctcttattattttgagatgtgtttctttgatgcttcatttcttgagggcttttatcacgaagctatgttgtattttatcaaaagctatttctttgtctattaagttgatcatatggtttttaattgtttaagtactaattacatttatttagttgcgtatgttgaaacaaccttgcatcccaagagaaaagtctacttgatcatggtgaattacttttttgatgtgctgttgaattaggtttgctagtatttttttgaggatttttgtgtccatgttcattargaatattatcctgtaatttcctttttttttgttgtgtcttgccaagttttggtatcagggtggtactggctttgtagaatgag

SEQ ID NO: 830665 - DNA, 619 bp, Homo sapiens
aatgataaattaagaagattaaaaacctcttgaaacaaatgaaaataaaatcacaatatatcaaaacctatgtaatatagcaaaagcagtactaagagggaagtttatagctataagtaactgcatcaaaaattaggaaacttcaagtaaacaacctaataaagcactttaaggaactagaaaagcaagaacaagccaaaccccaaattagcatatgaaaaaacatcagagcagaaataaataaaatttaaatgaagaaaacaatgcacaagatcaatgaaataaaagttggtttagaaaagacaaaattttaaaaaagatctttagtcagactaagaaaaaaaaagagaagacccaagtaaattaaatcagaaatgaaaaagaagacattgtagctgatactgcagggatttaacggatcattagaggttattatgagcaactatatgccaatcaactggaaaacctagaggaaatggataaatttctagacagatatgacctacaaagattgaaccatgaagaaatccaaaaccttgaayagaccaataacaagtaaaaattgaagccaacaagtattgaatagaccaatagcaacaaataagatcgaagccatagt

SEQ ID NO: 830666 - DNA, 591 bp, Homo sapiens
cactaaaatggtctattttgaatagatgggctaataagaatatattctctagacttrgtgcaccattatgaaccacaaaagacatcttgggtttctgaaaactaattcctgctgtaaatagttcttttaattgtggtttataatatgagtaatgaaaaaaactatttcacgtgaaccataaccactacgtaagatttcagaatgggtcaagcttaggtaactaactttgcaaagtgatgaattccatcctcctaggttttcttgtctggaatgccctccatcatcctactcttcatccttccatagctcagggtcttctgaaagtttctgtgaggtttttctcgatgctaatgtttgcccacctattctggaactttcatagcaatttatcacatacaagaagcctggaacgtagctagggttctgtaaatacttttcttaagtaaacataaataaatgtgcttttgggatacagggagaaagtcatattttgcagagtgctttatgtggtcttgcttaataactattgatgcctatcatgtgcttcataaacggttcaccgaaaagaacccaatatcacttttgtggttt

SEQ ID NO: 830667 - DNA, 652 bp, Homo sapiens
cccgaaataaaaaatttcagatagatttaaatgagagaagctaaccatttaatgaaagagagatatgaaaaagggcctaaatttaactttaatactgctgataaacaaataagtgttatatttcataaataatatcagattttacaaatactctaatttattctaacgtgatcatcatgcaaagtgatattttatttatgtaggtaactgttaatcagcatcagttcaaacaatacaataatttggtttcttcagactatagtcacacattcagtactttctcattttaagttaaactatcactaatcacgagggaacaaagatgtgtccaaattttgaaggaacatgggtgtcccaaacctcagataatgaattttagctttctctgaagaaaagcctttcctgtatgtagtctggcaatattccaagatttctttttaaaagtaactccatatgtgtactgaaaataagctagtgatgttttaaatcaactggaaagagaggctgttcttttcaatatttttttccygagcaaaactttgaagtgcagcatttggggattatgaaggtttgggttacctgctgcatgaaggcatggaaaattatttgaaaaagtactctttttaaaaaatgtgctttaaacttatgaaat

SEQ ID NO: 830668 - DNA, 621 bp, Homo sapiens
cacagggcaagctcctcctgcagctctgctggtggaattcttggcacctttcatcctgtctggaggtgggtrtgaagaccaccttcctcaactcagtaaaaccccagactcttagtcctatggggtcagggaggttgggggggacccccagggaaagctcaagtcagagttgcaggaacccagcccgactggatacagtgtccctttctcccagaatctacctgggtgacagaggtgagccgtccacccattgccacgtgccttcctgatttaggtctgaaagtcccatccaggagaagcggttactcctggaagtctgcagctgtaggaagttctggagggtagaggaggagtcaggagggagctctgcttcccattttccaggttccacctccccgtctcttggcagaaagttctgctttcaagttaacctgcagttttctgatataccaggtcctgagcctcctcatgtctgagcccctctcacatctgtatccccatggcatgtgtgtcctgacatgcaggcacgcatgcacagctggcctctcctcacgtgctcctgtgaatgctgcatgtttatctattttgcatgtccacatgaatttactcctgactgggttt

SEQ ID NO: 830669 - DNA, 626 bp, Homo sapiens
ttgcctacctgtagagctcttgtggccatgtatctgctggaattgaaagtctcttggaaaaagtctgatgccactggttgttggatcttcttctgaattgacagacatcagctcagagcctgggccatcccttccccttacccaggatcccagagttccaacccagccttacccaggaggcccagctgctgcacccttggttccttggagtcactcatgttttcccgctgtccccagatgttcaggactcctggggaccacagcttttattttccaccctctgatcctcactttctaaatctactgtctctcaggaagacaaacaggaagctgggtaagatcacatcaccagaaaggctagtgaaaggagtcagagcctgagatcggcctgaccttgcaggaatttcagggaggtgttgggggatggtctggggttgacagggagaaggactcctccactcatgacatggttgagcgatgggatgcttttaataaaattcaattcattctaatggaaagcgactttgttatgcctccctaygtagggcaggggtgggcaggcagtaccgcctagttcctggaaccaccatgccctctgacctccaggatctgctcttttggtctgc

SEQ ID NO: 830670 - DNA, 551 bp, Homo sapiens
gcatcacagggagacggttaggcctctggataactgcaggcargcctgactgatgtcagaccctccacaagaggtggtggagtagagtcttctctaaactcccctggggaaagggagactccctttcccggtctgctcagtagcaggtgctttttccttggcactgacgctaccagtagaccacagtctgcttggcaacggggcatcttcccagatgctggcattactgctagaccaaggagccctctggtagccctgtctgggcataacagaaggctcatgctcttgtcttctggtcacttctcaccatgtcccttcagctcctatctctgtatggcctggtttttcctaggttatgattgtagagtgaagattattataatattggaataaagagtaattactacaaactaatgattagtgatacttatatacatatctatgatctgtatctagtataactcttgatattttatatattttattacactgaaacagctcgtgccctcggtctcttgccttggcacctgggtggcttgctgcccacaccc

SEQ ID NO: 830671 - DNA, 638 bp, Homo sapiens
ttttaagaatagaaaggatacctgaaatcagagaatttgagaactggtgatttaaagctataaaattcccaaacaacagctttagctgcatctcgtaagcttaggttatatctatatatttgcattccttattkaaaaatattctctaatcttcatctttgactcaggctgtttatgcatgtgttgtttaatttccaaataattggaacattttcagatattgatttctatattaatttttatggtcagagaacctactctgcatgattttggtctttgaaattttagaaatgtgctttgtgattccgcatatggtctattttggtaaatgttccatgtctacttgaaaataatcattattttgtagttatttgctacagtgttctacatatgatggttcaagtcatgttaatctactgattgttttcgtctgcttgttttataagttgctgaaaggtgtattaaaatatttaaaaatatttggaattgtttctagttttagttttataagagtatgctttatacatcgtgaggctgtgttactaagtgcttaaagatttaggattgttatgtctcttttaaattgactttttacaattgtttaaatgttctttattctagtaataatgttttctgta

SEQ ID NO: 830672 - DNA, 503 bp, Homo sapiens
ttggttcttatgaaggtatttttttttttacatagatcgttgttaaatttggtgttcctgtggggagaatgattgttgaagtcttctgtatagccatcctcctctgcctcccaggcctaggagtgaaattctgggtcatacggaaactctacgtttcatgttttgaagaattcccaaactgttttccaaagtggctgcaccattttacaaacctaccaaaagtatatgagatttccaattttttgcaaccttgccaatacttgttattataggtactttttattatagccaatccagtaccttattgtgattctgacttgtgtttccctgattgctaatgaagttgagcatcttttcatgtgtttattggtaatttgtctaccttagagaaatgtctattcaggtcctttgcctattttaaaattgaattcttctttcaatgattgggytataagtattatttatatattagatacaagtcccagggttcatttttttaatca

SEQ ID NO: 830673 - DNA, 648 bp, Homo sapiens
tcttgtcatatccttttgttaaagtagcccttttattcttatataatgacctttttgtcttttcttatwgtgtttgtctcgaaatctattttgtctcatgtaggtagagctacacctgcttcctttttgtttccagtggcatggaaacaaaaaacaatcatctctttattttcagtttatgtttgtctttttaggtggaatgtgtttcttgtagggaacagatcattgggtcttatttttttttttaatccattcagccactctatgtcttttgattgaagagtttagtctatttacattcaatgttgttattgataagtaaggacttacccctaccattttgttatttgttttctggttgttttgtggtcttctcttccttctttctttcctttctgtcttcatggtagtgaaggtgattatctctggtggtacgttcgaatatcctgctttctaattgtacatgtatcctttgtaggttttttgatttgaggttaccacgaggcttgccaataatattgtataactatatttatttatttatttactgagacagagtctcgtgctatcagccaggctggagtgcagtggcatgatcttggctcactggaataactcattattttaaactgatgacaattttacact

SEQ ID NO: 830674 - DNA, 554 bp, Homo sapiens
cagctctctcaccatggctcagccacgtgttaggtattgagatccagtcttgaccagaggcctcaggtggacagtctgtaaggagctccaggccaacaccctgagctcagcatggacaccagccatcccctcccttgtgcctgagctgctttctgacttgcttcctactcttggccatttgcctggaccccagatcctccaaggctagcactcctcactcttttcagagcctctgcctctgtgctgaattgtcaacccttgggctagggggccctgtgaccagccagcaaccttcaaagtgctcacacctgcacttcagcatcatctgggcctggattgggggccaccagcctgaaagatatgccggtgctgcatatttggctgcctgcttcctacatgactacctggtgtctgctgccagctgttttgtcccatgggttgggtgacctctcagtcctgcagttggcctggagagtgggcatgtccactaaattaacagctgacagtagttggaggcgtcacctctgaytgactgcatgttgacaggggatgct

SEQ ID NO: 830675 - DNA, 602 bp, Homo sapiens
ggttccttcctaaggccaagccagtcctttctgcaaattataatttggccaaaccctttgtgcaaagggctataaggcattttttccccagagtctgagtgtcaaagcattcccagtgattcaggatacactccagaggagtagactgaagatggttgatagcccatctgaaagagagagaaaaagacatcccttagatcctttatctctttcacctcttctcaggggtatgtaagggagaggaaaaaagggtgtccctgtttttttcttccatctttttatccctgagttctggagacctaggtgggtgctgcccatgggtaccagtgtgaccctcccccaagaagcagggagtctagagggtaggaattatttgcactcacctcacactgcctatcctccctgctgttggcaacctttgagttccctagacctcatctatgccatggatacaagcacggcctccttccttgaagtggaggctgaattgaaaggaattagtcctgcccatctacactktgccccttgacttccattgttatctgcctttggatccctcagatctagttttcctttatagggcttcaacctgaagcttggaa

SEQ ID NO: 830676 - DNA, 503 bp, Homo sapiens
ttttcccaagtcctcaggacaaaaactttagtgttatctttaactcacctcttaatctcatgcttcacaacactttgtgagtaaatcctgttggttctgtcttaaaaatgttttcaaaataagttttttcatcacttccacagaaaactatcttgtctaagactttctcttgctttatctgaattgtaattgtaaaatctccctaagttgtatttctaatctgtctttgccccacttcaagacagttctcaagagactgatcctttttatacatattagatcctgtcatttccatgcacaaaacactccatttaaacatgagctagtgatatcctagctcacttaaatgctaaagtttttacaatgacatcctaggtcctcaaggattgctgattyagctcaagattaattgttctccttgctgttcctcaaacacaatatcatactcaagaatgttcttggcccagggcctttgcattaactgtattttctaccagaaatag

SEQ ID NO: 830677 - DNA, 558 bp, Homo sapiens
gttattcattgaagttgtcagttgtaatggtaaaggcctagaaacaaccaaggtggctctctcaaagttgaaataaactgtgatactyatacaacatagagcactggccgggcgcagtggctcacgcctgtaatcccggcactttgggaggccgaggcaggcggctcacgaggtcaggagattgagaccatcctggctaacaaggtgaaaccccgtctctactaaaaaatataaaaaaattagccgggcgtgggggtgggcgcctgtagtcccagctactcgggaggctgaggcaggagaatggcgtgaacccgggaggcggagcttgcagtgagccgaggtcgcgccactgcactccagcctgggcaacagagttagactccatcccaaaaaaaaaaaaaacaaaaaaaacaaaaaaaacaaaatagagcactaagcctattttgaaacaagatagaaatgtatatagtaataatgttccgtgttccacaaacattgctaagcgaaagcaaggtgcagaaaagcatatgtagtatgtcaccattatgaggaaaataa

SEQ ID NO: 830678 - DNA, 580 bp, Homo sapiens
aaaaaaattctaccatgtaaaagcttttcaattacacaaagaatttgtacttaaaaacttgtgatattaccaatttcttttgtgatcaattttcccttggtcatagcaaagatgaagatagaaaagacaagtttattcaggaggtggaaagggtggtatggagcagatataaatgtgaagcactggattttgtattcaaaactcatttgtacaagcaaaggataggcataccaattcatgtaaaagtaacttacatggattaataattacagttatcattagttgagtttccaatatgtccaaataattggacaattactgtgggtatattttctttaatccttaaataaattctacaaagtagaatatcagaaacagaaattgatttgccacagtgcatgtatggaaatgctaggatttgaacctaggtgtgtctttctcctgttgtgtccttgctattactccatattktccaattattattatttgacagtggagtataatggaccatgataagacctggttcttaatccagagctgcaaattattagctacttgaacttggataaaatttaataaa

SEQ ID NO: 830679 - DNA, 631 bp, Homo sapiens
acgactttaagattgtataacactgaaaagatttttttaaataatagaaattacaatgattatttgatttgtattccattatgtaataataatttggggttcaatcaagtactttcttataaagttttctactctaggttaatctcaaaattggggaaaaaacttatcttattaaaagtgcatgaataatgttcatttcagaacaaagtacttagtgataacagtcctaaagaaagggatatataatcaaacctagttaaccattcttccaaataagtttgagataacaatccaaataaattatgtgtttttttatattttcataaatgtttcaaaatcatgctatttattaatttgctacccatttgaaccatggtttatttgtatagattcttattctcttcatttatttcccaaggagttttattgccacattttagcttatgctttcactattacactaagattattaacgtcttaatcatatttatcacctgtaatccacttttttcttgaagagmtgctttcaagaatcttccaacttcctgcttaaatctatagatattattaattctgcttactgtacagctatatcttgatttttttttgcattcctggattaacttcactg

SEQ ID NO: 830680 - DNA, 529 bp, Homo sapiens
gctcactttttaattttctattcaacaataaaaatacagtttggtaatattttgcatacaaaattttaagggtcaaaattgtaaaatccacctcaggtttccaggggagaagctctagaatagagggtttaktgattttgcatagaggttgcctgtaaaatcctgttaagtagagaatcaactaaaatatctttgtgataggtattatgtatttctgaaactctttaatctatgtaataaacatgtccatcagattggaattgatatcctaggtaatagatactttttctgtaagaattctattttgttttggagattttgtgctatattggtactaacatgtcaaaggaaatatagaaccctcttgagaactaatgaaatcaattgaatatgacaggaaattatctatttcctggatgactgctgaccctccaagaaaatctagtctttaaatcaatattaaatactaaaataaataagattctgtgaagtattggagcagtacagttaaatatattgttgatctctc

SEQ ID NO: 830681 - DNA, 650 bp, Homo sapiens
cagactttttttatttttaatgaccttgacagttttgaggagtactggtcaggtattttgtagaatgtccaagagttggaatttatctcatgcttttctcatgattagactgaragtatgtgtttttgggaggaaaaccatggagttacagggtcattttcattacattacatcatattattaacataacattgctattaatgttaactctgttcacctggctgaggaaatatttgtaagatttttccactgtaagttaccatatttcaccatcctttgccacactctactctttggaaagagattgctatttgcagcccctgcttaaggagtggtgctgggaaaacttgctaaccataggaagagagataaaactggatctctaacttaccatgtacagaaatcaactcaagatggactaaggatttaaatatataaaaattctagaagaaaacctaggaaatactcttctggttattggcctaggcaaagattttatgactaaattctcaaaaacaatagcaacaaaaacaaaaattgacaatgggaacctcattaaactaaatatactaatcgttatttagaaaatgatgatgactttcttttcttctccagaattttgtacaagtcctatattttaaaaatgaata

SEQ ID NO: 830682 - DNA, 571 bp, Homo sapiens
gaatctataaattaccttgggcagtatggccgttttcacaatattgattcttcacartgcttgtgatttttgcatgttgattttgtatcctgagactttgctgaagttgttatcagcttaaggagattttgggctgagatgttggggttttctaaatatacaatcatgtcatctgcaaacagggacaatttgacttcctcttttcctgatagaataccctttagttctgtctcctgcctgattgccctggccagaacttccaacactatgttgaataggagtggtgagagagggcatccccgttttgtgccagtttttgaagggaatgcttccagtttttgcccattcagtttgatactggctgtgggtttgtcataaatagctcttattattttgagatatgttccatcaatacctagtttattcagagtttttagcatgaagggctgttgaattttgtcaaaggccttttctgcatctattgagataatcatgtggtttttgtctttggttctgtttatatgctgggttatgtttattgatttgaatatattgaacccttatgggctat

SEQ ID NO: 830683 - DNA, 554 bp, Homo sapiens
aattcagacatacaagatacttcagttcagtggtttcttgaattacacctaaaatccaaaggaacgtgtttctgaaagtggctgccaattttttttttaagaggacaatcagcaccatctagtggacacaagtatctcctcttctagaattcggacccctgaggagatggagggcaggctttggaacctaggttggaatcccggtgccagttagttccccaacgaccttgggacaattacttaccctttaggtgctctgcttctcaactctaaatccaggtaatactagtgccgactcatagaatgttatgaatgaagtgaaatgatgcttggaaggcaagtctgaaacactttgtaaatgcagtttttcaataacactaagcatagattcacaggacatgggaactatccagtggtaaacactattatctgctctccagtaggaatggctattatacacaaaatccagtgtgtagaatctacgatatgaggcttaatgagatccctctcctaccatattgttacattcggytgaagtttatggtgaggaaagg

SEQ ID NO: 830684 - DNA, 570 bp, Homo sapiens
gtccagcttggtccccatattggcaggcttgggcctcagctgggtaacaggaagaatccagcccatgaatatggtaggtgggaggactttggattgtggcaaataagtaattagttgcacatgtttctttgttagtataaaaaattaaaaagcatatgtatgttggataattatagttagaattaactattcagtttttcatatttagctttgctttgttttcaggcaaattgtttgatgaatgtattcgcattcctattcattgatccataaagtatatgtagacattttaaaagtatgaaccacggtctacttattttggttttcttcaatgaagaatgaaagaagcttctttgaattgggcaaacatcagttaaaatagaaatcagacacctgatacacgtgaaaaggcaagtttatttctaaaaaaagcattttataatactttatgtaactttgaaattaagaacattctgtaacaataataaacttaaattcaaaacaaggtagmagcagagattaagaatgagatggtaaaatgggggatttggttctgagaggataattccc

SEQ ID NO: 830685 - DNA, 626 bp, Homo sapiens
tataagggctggtcacctggcgttttgagtcctctcacaggtcatagacctctggagagagaaactgaaacacttaagagggtraaaatgactcaatggtaacacactgtggagtcttgagtgcaagcagcacacatcaccacacaaaaacgctaggccacagctcagttattttaagaaaaaaaatgagaaaataataatctaagaatgaggagaaaacaaggagaatgatcccctttcaagcactccataggttttatggcacctccacttgccagagtttatgtgaaatggaagtaatatggtatttgtgcatatatatgttaatgaaaaagagcactaaggtcaacctgcaaactatagagttcctaagttctcttttttccctattttcctttctgccagctttaaatctgctgttatttttctattaagatacaaagcactgtttggactcagcaagctgtttgtttgcaagcaggtgaatttgtgtttgcctcatggcttaagttctgaagtaaaagctataagattttgtgtgtgtgtgtgtttgtgtgtgtgcatatttaaaaggcctttataatttatgtaattttatgttgaattggcaattaaatccattttaa

SEQ ID NO: 830686 - DNA, 557 bp, Homo sapiens
tcctggttcctggaaaagtacatatagaatagtataaatacaataaatgtttgaattatcgtataacttgagtctaaattttaagttagtatcctgtattaagaactgggttgatcaaatggttctttctttgcacatatcaaggctttcgactattcccaaccaggtcttcccaaatttgggcatattcctgcctctgcctaccctgttctaatttggcactctaaagatagttcataaaaagcaagccaaagatagaaaagagagctaaggctacaggaggaatttactctttaacatttgggggaaggaaaatgaggcttgtctacagcagggactggctgtcttccagaaatggtttcccaaggtgttccctacctctctttttcttggatatctttttgcattatagatagccttgggaagggtgtcacctttatcctatcagttccacctaatcaactgtagtcatctgagagccagaattattattgatagaggggcctgggaaaggagaaraggaccaggagagaggaaggtatacttattgcagagga

SEQ ID NO: 830687 - DNA, 631 bp, Homo sapiens
acctagaagaaaatccaaactggcgtggtctccaaggttctgggtagcccagcccctgactaccattggcttcccaccctggggctccccgccctgggcctcagcacatgctattctctctttctagggcactactcttccgcatgctctttacttgaccggctccatcccattcaagtttgcagagaggtccttcggactgtcttacctaacatatccatcacaagtctctacggcatcactgtgttggatttcttcacagcacccatcactgtctgatgtaatcttaacgactgtttgcgcccttgttcattgtttgtctcctgactggctcacacaactcctgagaacagggaccttgtctgtgttgtctgcatgatccagaaggttcttggatcccctgtagcgcccccctccccagccctgggccatgcctgcaggttgcaagtgtgaacacgttgtggggcagatgacctaggccctctcgctgaccgaggctcactgtgtgtcaggcayggtgctaaactcttagccagcatcactctattttattccagttccagcacttcccagctgtgcgactttgtataagctatacctgtttcctcatctgcaaggttgctgagtattc

SEQ ID NO: 830688 - DNA, 554 bp, Homo sapiens
gtgcccaagccacttaccctggattctttatccccctctctaaattgtctctttccccctttccctcctatctctatttctcctatctgttctctccctgttctctctgtctcctccctgatctctcttacttatctcccttctcctgtttcttctctcttctcattgaatggtgggacacatggagttcaaattttgggtcacctgtgtgggtccttggaaaaatcaggacacttctctcagctaagtctcctttcctagaaaccacgactcagagaggacaaaccagatggtacatttaccctgcccagcctgcaaagaacaggcgctcttttcctcatgcccatccagttccttccttttctccctccctccttgttcatattctttcccttgcccttctttagacagcatagacaaatgctgaatcacacgsttaatttttaaattctaattctcacctacaaaagcaacacctccaagctcaatcacactgaaaacacagatctctggaatccagcagggatttgctgccttggttctttcctagctcc

SEQ ID NO: 830689 - DNA, 576 bp, Homo sapiens
tatgcttttttactggctacttcttttcttcagacactgtgcttttgctgggtatatgaaggtaayggaagattatttatcccataggaataactcatgtttttttaaaaagagaaaactgtaaatagtaactgattttgtgcaaaggccactcatcatcattcataaagtagctacacttctcataacagcccttgatttctaatattcctacaaaattggacagtccagtttttccaggaagaggtcttgctgtcctctgtttatcatattcccatctaccttttggagtttgccgatgtgtttctcaacctggttaatccatcttggctgatcttcatctgcaaaattttactcctttaacaatgcctttttttgaattttatttactttggaaatcctttgtgatctctcatatttgaactcattctcaataactcatagtttagcaatcagttattttttaattagatgggcatttagtatatgagaacgtgtaccatcttgcattagccagagatttttaattttatcattcattgccttaatggagcctcataacttgggttttcagaa

SEQ ID NO: 830690 - DNA, 637 bp, Homo sapiens
atgtaagagaattgggaccgttctgttattrgagacccatactacatggaagcagtatagtattatttaaacttagatttaattatttaaaactttatattgcaatctatgggaatctctaaaaaattaaaaaagatgtataattcttacactaagaaaagacacaaattgatgcttgtaaaatgtcccatgaaaacgagaaaagacagaaatggtggtgggggaggccaaaaaaaaaatctaacaagtagcaaacagttacagcaatgtagatattcatccaaaaacatcattagtcattttaaatgtgaatgatctaaatacattgattaaaagacacaaatctgcagagggagtaaacaaacaatactgctgtaagtgttacacaatcaccccactttaaatataaaggtgcagtattttttctaaaactaaacaaatagagaaaggtataacatgttaataataatcaaaagaaagctgcagtatctatattagtttcgtgagaatacaaagcaagaatcagaaccctaaaatctgatagtactaaatgcatatacatcagagttatataataagttaatggacggtaaatgaagtgtgccaggcttctcactattggaatcataaggataac

SEQ ID NO: 830691 - DNA, 540 bp, Homo sapiens
gtttggaggactatgctcaggccattggagcacactctgcctgctgttrcagagctcggagcacctgggaattactgaagtgtaacttacaaccccagagctctcgtgaaagattacattgaagatacctttaataaggctttgcttgaaatcagatctttgcttggtttccttcctttttctgtcttgcttcccccacttacttaaacagagttcctttgatatttagaatatcacttacacaggaatattcatcataagatcagcttctgtgcaactggacctaagaaaatcgcttatgttccgttcttatttcctcctctccttcgttctttttgattgagggtttttttttgttttgttttgccttatttgggttggtttgttttcaaaatgattttttctcattccttggtttggaaagaatatactccacttctcattttttagtggtaacccaaaataccaaactgaatgcctagtcttacaaaatctaaaattaaaacatatctttgtccatttcttatatgataaaaggaa

SEQ ID NO: 830692 - DNA, 641 bp, Homo sapiens
cctggtgtgtgatgttaccctccctgtgtccaagtcttctcatttttcaactcccacttatgaatgagaacatgggtgtttggttttctgttcctktgttagtgtgctgagaatgatggcttccagcttcatccatgtccctgcaaaggacattatctcattcttttttagggctgcatagtattccatggtgtatatgtgccacattttcttgatccggtctatcattgatgggcatttcagttggttccaagtctttgctattgtgaacagtgctgcagtaaacatatgtgtgcatgtgtctttacagtagaatgacttattctacgtgggtatatacccagtaatgggattgctgggtcaaatggtatttctggttttagattattgaggaatcaccacactgtcttccacaatggttgaactaatttacactgccgccaatagtgtaaaagcatccatatttctccacatgccctccagcatctgctgtttcctgactttttaatgacagccattctaactggcgtgagatggtatttcattgtggttttgatttgcatttatctaatgaccagtgatgacgagctttttttcatatgtttgttggtctcataaatgtcttcttttgagaagtgcct

SEQ ID NO: 830693 - DNA, 641 bp, Homo sapiens
cctggtgtgtgatgttaccctccctgtgtccaagtcttctcatttttcaactcccacttatgaatgagaacatgggtgtttggttttctgttcctttgttagtgtgctgagaatgatggcttccagcttcatccatgtccctgcaaaggacattatctcattcttttttagggctgcatagtattccatggtgtatatgtgccacattttcttgatccggtctatcattgatgggcatttcagttggttccaagtctttgctattgtgaacagtgctgcagtaaacatatgtgtgcatgtgtctttacagtagaatgacttattctacgtgggtatatacccagtaatgggattgctgggtcaaatggtatttctggttttagattattgaggaatcaccacactgtcttccacaatggttgaactaatttacactgccgccaatagtgtaaaagcatccatatttctccacatgccctccagcatctgctgtttcctgactttttaatgacagccattctaactggygtgagatggtatttcattgtggttttgatttgcatttatctaatgaccagtgatgacgagctttttttcatatgtttgttggtctcataaatgtcttcttttgagaagtgcct

SEQ ID NO: 830694 - DNA, 617 bp, Homo sapiens
cttgccaaataattgttaacatacgggttctttgcctcaggctctgtttttttgtagaactcagagaacagtgtctgttttccatgagttttgttgacttcattcagatgcaaagaaatagcatatgagttgtctctgctgttagagtgcacaaatattcttcttttcttcccttttcccccagacactgtctctacatatttcttcccactccactgtctgggacctatgcctttgctcaaaagacagaatttcggtataccagttgattcaatgagcaactgctagaataaagaaaaagaaaaggaaggaaaataatgtttactatatcaacttttttccctactacaaatatgtgcaaacaagtagagactcataaagaaaaaatatgattaaaatattctttttttgtttttttaaatgagcactgattacattacttaagtaacaaatcactgattttgccacattgttttgctatgttacgagaaaggaaatgatagggaaaggaaataagtcatagattcttaattatgaagaaaattacaatgaaatgaaaasagcacatgagattatacacaaaataaaaaaagggagattgggaggtgggagaaaca

SEQ ID NO: 830695 - DNA, 569 bp, Homo sapiens
ttttacatggcaacatagatcttgagaagacaaatccaatgttcaagcacttattcagcctctacttgtatcatgcttgctaatgtcccayaggacaaggcaaatcagatggccaggcccatggtcaatgtgggagagggtataatactggaaggtgttattaattgtggaccaccattaattgagtctaccacagctgacttgatcaggtttttgtgaagatgaagtaaggtaacacatgtaaattgactgccacatggtagattctcaataaatattagctattattattaagacatagcttcaaaatcaattcccaggacctgtagatattagtcttattttactaatatacgtataggagaagaaaatgaacatgctttcttgtttctttattgttttctcccgcagaagtagagctacggttctttttcctttgcactcaattgtactgcctaatagatgttctatgattatataaaatttggtgaataagtaatctactgctcttgttttcgaaaaataaaaattcccttttaatgttctcattaaaatggctttgaaaccaa

SEQ ID NO: 830696 - DNA, 569 bp, Homo sapiens
ttttacatggcaacatagatcttgagaagacaaatccaatgttcaagcacttattcagcctctacttgtatcatgcttgctaatgtcccataggacaaggcaaatcagatggccaggcccatggtcaatgtgggagagggtataatactggaaggtgttattaattgtggaccaccattaattgagtctaccacagctgacttgatcaggtttttgtgaagatgaagtaaggtaacacatgtaaattgactgccacatggtagattctcaataaatattagctattattattaagacatagcttcaaaatcaattcccaggacctgtagatattagtcttattttactaatatacgtataggagaagaaaatgaacatgctttcttgtttctttattgttttctcccgcagaagtagagctacggttctttttcctttgcactcaattgtactgcctaatagatgttctatgattatataaaatttggtgaataagtaatctactgctcttgttttcgaaaartaaaaattcccttttaatgttctcattaaaatggctttgaaaccaa

SEQ ID NO: 830697 - DNA, 610 bp, Homo sapiens
taataataagtgtaaaatatctagmaattaatgtaataagaaatctgcaggacttatatgaagaaaaaattaaaacctaacaagggacatactaaaggcctgaattaatgcaaaaatatctcatgtttctgaataggaaaatttagtaatattattcccatattaatatggaatttcaataaaaatatcaagcaggaatttgttttaggatctgaaaaaattattttaaattttatttggaaatatcagataagaatagctttttaatctgctgttataatttgtgtttttgttgcacacgtgtatgtgcatgtgtgtgtatgtctgtgtgtgtgttctgtgtctgtgatgcaatatttgccgcataaaagttttaacagttatacacagtagattttgatttttattaatataagcactctgtttcaggtaatgacttttcctaagaattacatctggtttcataaggtgttttgtttgttttactttgtgtttgctcaattatgtatgattttccttttctttctataatttgtcttgatttgtttttgctgtatcacttgaaagcagcatatatagtaagatttactttttgaacccaatgtaagag

SEQ ID NO: 830698 - DNA, 618 bp, Homo sapiens
catttttgagcagaggaattatatgaagagatttatttaaagttcaatcaggcagcaatgtgcagtattgcactaaaccttcaagaacaggaaagcctgaatcccaacattaaaacttaccagccaagaaaacaccttgaactccctagatagctctttgtccatgtggatagatgatccctacatgtggtgggaggctttcacagttaatctcttgaaatgatttccaacttggtgtgtctaaaactatactctactcaaaacaaatgttgaggtaagatactaacataaagcaataattaaatatttttccagattttctttttttttttctttccatttggcgtttctccccattccagcagtcaggctttctgtgttcaaggatttagaaaatgaatgtgacgtctcacacggagagagagtctctcccttgatttttgtgcattagaggttcaggcacttgggaaaatacaaagggtatacagcttagacaacaaactgacaaaaatatcataaaaacaacttggyctgccctagctttcaccctcaagggtatgccattgaaagggaaggcagagactaaaggacagccacagaggtgtttttatgtgtgtc

SEQ ID NO: 830699 - DNA, 621 bp, Homo sapiens
attgatatgtgcacttcgcagaattttaaacaaatcttgaatcaggcatttcaatcttctcatgacacagttcaagcccatcccaaagctgtmcttccaggcctgcacgcagaggtcgagacctgacttctcttatcatttccaaaatcctggcctcaggctcagaatcctgttatcagaaatgatttcttcggaccaagaaaagaaggtgcagtcataagcacatcacaatgacattatagtgttgaaagtgacatgaaagataagttagttcaacctcctatctgaactaaaaacctttctatattgttacttccaagtagccaagcaatttctgtgctgctggatcaccggagctctcagttgaacaagtagcccattcaatctcttaataggggccatttttttttctaacatgtaagtatgacataaaaatccactccacagattgtaatgtttggagaaatcactttccaaggatgttataacaacaagaacattagtatttatttattgctttcaaagtgcctggctaaatgcttcatattttacatacatccttgaataactgtcaaaaatgccatgaacagaagtggatccaggtttgtgtcatctgaagca

SEQ ID NO: 830700 - DNA, 548 bp, Homo sapiens
aatttctaaatctattttgtgctgctataacaaaatactgaagactaggtaatttataaagaacaaatccttatttcttgcagttctggaggatggaagtctgtgatcaagrggccaacatccagtgagagccttcttgctgcatcatcacatggcagaagacagaagggtaagagagagcaagagacagcaggagggaagagggctgaatatatccttttattagacacccactcccataataactaacccagtcttgagatatgacattaatccattaagaggacctaatcacctcttacatgtcccagctgtcaacactgttgcattgggaattaagtttcccacattaactctgggagatacatttaaaccatagtactgactgatgtgtcaattatctttgtacacttcactgaaggtggcatggtgctttgcctacagtagaccctcaatatgttttagttctactgaaactgaggtggagcttacattgcagtgaaggaggaagtggaaaatggatttttagggagccagttctattggtt

SEQ ID NO: 830701 - DNA, 548 bp, Homo sapiens
aatttctaaatctattttgtgctgctataacaaaatactgaagactaggtaatttataaagaacaaatccttatttcttgcagttctggaggatggaagtctgtgatcaagaggccaacatccagtgagrgccttcttgctgcatcatcacatggcagaagacagaagggtaagagagagcaagagacagcaggagggaagagggctgaatatatccttttattagacacccactcccataataactaacccagtcttgagatatgacattaatccattaagaggacctaatcacctcttacatgtcccagctgtcaacactgttgcattgggaattaagtttcccacattaactctgggagatacatttaaaccatagtactgactgatgtgtcaattatctttgtacacttcactgaaggtggcatggtgctttgcctacagtagaccctcaatatgttttagttctactgaaactgaggtggagcttacattgcagtgaaggaggaagtggaaaatggatttttagggagccagttctattggtt

SEQ ID NO: 830702 - DNA, 613 bp, Homo sapiens
aagaaaagaaggcaaccaaatggaggtgagaagtagaatkattgtaccaagaaaacaaaaatttgaacctgactttcctagcatttctgacacagctgattctctttgtgccacatcaccctattgcttgtgttttctgttttcttactactccaagatcttgataatataataaaataaaatccacttgtccaacataaaatatagcttatgttggcggaaaaaaattctgggtcatcataaaacctcaccaaatctctgtaacagatattgcaggcggctggcaggcaggacagaaagaccctgaagtgcaactaagtttaggtcaataggaagtatttgtcgtttgaactcacgatttacaataaagaggaaatatgctggctataagcagcagaagcatgtaataacccagtcccaatacattcaaagttgtttttattgaactccagccatctataatttgctctccagggcattctcagaaagtgattttatgatatatatatttcaaaaagctgactgttttcaatagtttagatttaatttttttctcagtctattagatgcgttaagtcatggtattttaagatataatagagagatgctttca

SEQ ID NO: 830703 - DNA, 516 bp, Homo sapiens
gggatacatgtgtagaatgtgcaggtttgttacataggtataaacgtgccatggtggtttgctgcacccatcaacccataatctacattaggtatttctcctaatgctacccctcccctagccccccaccccctgacaggccccagtgtgtgatgttcccttccctgtttctatatgttctctttgttcaattcccacttataagtgagaacatgtggtgtttgattttctgtttctgtgttagtttgctgagaataatggtttccagcttcatccatgtccctgcaaaggacaggaactcatccttttttatggctgcatagtattccatggtgtatatgtgccacattttctttatccagcctataattgttgggcatttgggttggttccaagtctttgctattgtgcacagtgttgcaataaacatacctgagcatgtgtctttatagtagaatgatttataatcctttgggtatatgmccagtaatggcattgctgggtcaaatcgtattt

SEQ ID NO: 830704 - DNA, 631 bp, Homo sapiens
cacattttattgatcccttatttaaaactcccccaccagccaatgccttcatctgcaaaccaactacagtaacaggcttggattcagcaaaataggaaatttacaaatgtacactgactttgaaaacatatacatggcaaattgagaattcagcccaccagaagtaaactataaatgcaaacattcccaacagcaactttcaaataaataggctgcaaattggaaacatgaacacagcaaacttatggacctcagattgcaaatcacagcagcaattccctgaaaataaggcagtcctcttttcttttgtatagcatgttacgtatcttttattttcagaatcctggagaactgaataatgtttatagaaccttgggggagacagttttcatagatctggaatttaaaaaaaaaaaaagctatatttgtgacgtttttgtgaataggtttacatttagttacctacctcctctaggcagttctccttatactcttctgtrccccttgaggtcattcacatgagtgtggaagagaaaataaaaattagaaagaaaaaaaagctgaccgggcgtggtggctcactcctctaatcccagcactttgggaggccaaggcaggcagatcacctgag

SEQ ID NO: 830705 - DNA, 590 bp, Homo sapiens
aactggcctattctgtggctgtggcagatggaggctttgaccagaaaagcctcaagctttggaaycagactctgaaactttgggtatattccctaaccttgctgagtattagcttttatgtttttaaagtaggaaatgataccaacagtatacctacctggcagacttgacatgaagattaaataaaatagtgtattaagtatcctcagtatatattagttattattatttttattagtgttctaaattgtctaactagaccacagaagaacatggaagaaactataccatggtcacaggcttctgcctcatccaacattctcactatttcaatcttccaaataaaaaggacaactttactgaaactgcaaaatgtttcattgtgtcattcccaactttcatcttttccggtttgtttccaaatgattttataattcaaattttctctttacttgttgcattcttttcttattttgttatgtaatgtctataatatcatctatgttctgcaattatgtctccattcctttgcacttctcattgtctcagtaagacttttctttctttgtttggctttcctttaagataat

SEQ ID NO: 830706 - DNA, 587 bp, Homo sapiens
tctagcaaggccaaggaagttttccttgattattccaactatgttttccaagcttttagaattgtcttcttcctcaggtacaccgattattcttagatttggtggtttaacataatcyctggcctcttggaggctttgttcatattttcttattattttttctttgtctttgttggattgggttaattcaaagaccttgtcttcgaactctgaatttctttcttctacttgttcaattctattgctgagactttccagagaatttcacatttctaaaagtgtgtccaaagtttcctgaattttttattgttttttctttaagctatctatttccttgcatatttctcccttctcttcttgtatcattttttggatttccttgcattgggcttcacttttctctggcccctccctgattagcttagtaactaatctcctgaattctttttcaggtaaatcagggatttcttcttggtttggatccattgctagtgaactagtgtgatttttggggggtgttgatgagccttgttttgtcatattaccagggttggtttcctggttccttctcatttgcgtaggttctg

SEQ ID NO: 830707 - DNA, 572 bp, Homo sapiens
tttaaaaaaataaaataaatgaaagtactaggttaagagaatctgtttgctaggactgtggaagtatttgtttataagcagcatgttatcacatcttatttacatgagttcttgggagaataaaacttccacatgaattaacttacggatagctgaacttagcgctttaaatggccaaaattttattttcactatttttgatgataggctttctcaagtgtatgattctctacctcttgaaacagactgtaaagaatataattttacctgtgcttgatggctcagggtcatctttaagattattattactttgagctctaacgcaatggtgtccttggaggcttcagagatgtaatgaaggttttggtccctatatgaagaggccctagagagcagcactttcactccatcttctttccccccaaaccccttcagatttactgctccagctctgctgtgggcttgagagaattgctaatccagttaagtctttaatagttaacagaattgtgtcttgtataaggtaaatgtgcctcrtgtaaagatctgggcattctgctgcctgtgctgca

SEQ ID NO: 830708 - DNA, 612 bp, Homo sapiens
tgtgtagggaaccaaattttggatgccaagcaaagtactaataataaaatccacatcagaagatccaatagtcagttttaatactaacttgccattaaaatggcttaaatataaaagctgtattttagacaagcaaaatgtgtctgaagtctcaatatatacagtgtaatgttgtgagacaaatggctctgactctgacacagcaactgcagtacgtcttttcaattcagctcagatttcttgaagggcagtgcagtgattctcagagcaaatcaataaaattcaacagcattttaaggcctgttctcgaaaaagaaattaagtgttctgtgtaaattcagatcatttcccaataaagtttccaaaatgaaattatcaaatcaggatgtcttgagtaccacaaagagagatattactattttatacttcagttttgcaaaatataatcctttatcattttgtatgcaatcttagaaataaggatcatacataccgaagtcttacatacagaatatgcataccctgaataagcaaaataagaaatactctttagtggcagctaacaaatggaataaactccaaaatgrgattgtaaacagatttaagtgtaat

SEQ ID NO: 830709 - DNA, 606 bp, Homo sapiens
gagctaatggaaaccccagcaggagagtgaggaagagagacggggaagctgtggaaagctgcactgccgagaatattaccacccgggcgcccaaccttagccctgctggggagccctgagaccrtgtagaacacactgcagtctccccacctggggaggggcaaggggactggggcctctgcccgctgacccctgtgtgaccagggcagtcattgaatggctctgagcttcagcatccccgtctcaaggcaagaataacaggccccgtctgcagaccacaggaccaggaaggtgacgagagaggccactgagaagaggcagaacagggaaaggagagagggagctagaggcagtgggcggagcaggggcagccagcggcttctgcatcaccggggctgctctcacacctctgctttggttctgcccttcttccctggctctggctggcccagccactgctgccacgttcccaccctgatataagtcaccccctggctgggctcccctgccaggtgaacccgcctgaggtcagaagggaggccacaggagctggggcgggaccactcacacaccttggaaatgccggccaggctagggctgcaaaac

SEQ ID NO: 830710 - DNA, 607 bp, Homo sapiens
ttgagctagatacagagtgctgattggtgtgtttacaatccattagctagacataaagattctccaagtccccaccagactcaggagcccagctggcttcacccagtggatcccacactgggccgcaagtggagctgcctgccagtcccgcgccatgcgcctgcactcctcagcccttgggtggtcgatgggactgggtgccctggagcaggtggcggcgctcattggggaggctcgggcagggcaggagcccacggcgggggcggggaggctcagacatagcaggctgcaggtccggagccctgccccgcagggaggcagctaaggccgggcgagaaattgagcacagcagctgctggcccaggtgctaagcctctcactgcccgtgccggcggggcggcggggccggggggctggcgggcagctccgagtgcggggccgcccgtgcccacacccacccggaacttgccctggcccgcaagcrccacgcgcagccccggttccgcctgcgcatccccctccatacctcccccgccacacctcccgcaagctgagggagctggcttcagccttggccagcccagaaaggggctcccacagtgcagcg

SEQ ID NO: 830711 - DNA, 548 bp, Homo sapiens
gaaagaaccacaggacaggatgctcagcccattatctttcaggaaatgcaagttgcagccataataagacatcatcatgcctcaatcagaatgtctgacaaccctaagtgtaggtgagaatgtgaaccagcggaaactcatgcactggtgagtctctgaattggagcaatcactttggaagacaattcggcattatcttgtaaagctgaattttcaccatgccaagatctaacaattctgcatctaagtctatacccagaaaaacttacacaggtacatcaggtgacatgtccaagaatgtccaccacggcaacgttcaaaaccatttcaaaaacaggaaaaaatatccgcagacaggaaaaactgatacataattatggcacattcacacaatggaatattatatagcagtgaaaatgaatgaaataaagctacatgcmagaacatggatggatgagtctttgaaacagtgagtttgaagaaagcaagttaggagaccacatagagtagatgccattttctcaaagcttgaaaccagaacaaaacaa

SEQ ID NO: 830712 - DNA, 604 bp, Homo sapiens
taccaaacattaaaggaaggaatattaccaatattacacagacctttctagaaagtggaaaaggagggaggacttacctaactcattttggaagccagcattatgctgatactaaaaccagaaaaaaaagacattacagaaaaatatctctcatgaatatggatgcaaaaacatttaacaaagtattaccaaattgaatccaaaattcacaacaagggtaatatatctgaccaagtggggtttatctcagtaatgcaaggtttaccattataatttcaatacgtaacattccttattaacagaatagaaaaggaaatatatagacaaaagatttcttagcttcttcattaaagaaaagatggatcaagtggaacctatcaaaatgtaaaatatctgtttttagaaagatgctgttaagggagtgaaaagacaggccacaaactaggagaaaagattaaaaataatatatatgaaaaataacttttattcagaatatatttttttaaaagaaaaacctctcaaatctcagtaataartaactaaacaatcctctacaacaatgggcaaacgatttgaatagacatttcaccaaagaagacagaga

SEQ ID NO: 830713 - DNA, 604 bp, Homo sapiens
taccaaacattaaaggaaggaatattaccaatattacacagacctttctagaaagtggaaaaggagggaggacttacctaactcattttggaagccagcattatgctgatactaaaaccagaaaaaaaagacattacagaaaaatatctctcatgaatatggatgcaaaaacatttaacaaagtattaccaaattgaatccaaaattcacaacaagggtaatatatctgaccaagtggggtttatctcagtaatgcaaggtttaccattataatttcaatacgtaacattccttattaacagaatagaaaaggaaatatatagacaaaagatttcttagcttcttcattaaagaaaagatggatcaagtggaacctatcaaaatgtaaaatatctgtttttagaaagatgctgttaagggagtgaaaagacaggccacaaactaggagaaaagattaaaaataatatatatgaaaaataacttttattcagaatatatttttttaaaagaaaaacctctcaaatctcagtaataagtaactaaacaatcctctacaacaatgggcaaamgatttgaatagacatttcaccaaagaagacagaga

SEQ ID NO: 830714 - DNA, 653 bp, Homo sapiens
attctaccccacattaaaagaaaaaaattgcacatattccacacaatcttttccaaaattttccaccttactttctgaggccagccttactctaataccaaaaccagacaaggataatagaataaaactacaagccaatattgctcatgaacatagatacaaaaatcttcaacaaaatattagcaaattgagtatatatatatatgtgtgtatatatatatgtgtgtgtgtatatatatatatataccatgaccaagtggagtttattctaggagtgcaaaggcaaatttaaatatcagtcaatgtattaggttggtgcaaattttgccattaaaagtaatggcaaaaaaggcgattacttttgcaccaatctaacagttcaccacatgtaagaaaaactaaaaactctacagaagaaagaccaaaaattcaatcaattaatgcagaaaaaagcatttgacaaattcaattcaattcatgatccaaaaatctcagaaaactaaaaataggaggaaactttctcaatgtratactactaacatcatatttaattgtgaagggctgaatgctttcctcctcataatgagaacaaggcaagggtacaactcttaccactcctatgcaacactgtactggaagtcatagtcagtgca

SEQ ID NO: 830715 - DNA, 625 bp, Homo sapiens
tttagctgaaggtcagtctccaagatcttgtcaatctctgtagtaatagatacattgtgttgccttgtctttttccattaaaaatgcatgtctgtgttaatagatgcttttctataaggatttataatggctaaataggactctgttgcctatatccatgtcatgtattacatctatctatctagacacaccatatttttattttactaatcctctattgtatttaggttgtgttggtttttttaaaatattttaggcaaccgttgcacttaatagccttatagttgttgtcgttttatctacaattattttctgagtataaattcttaaaaatagaattgtacatttttaagacttttagtacatattgacaaactgcctttccaaatattgtaccaattttctttctgagagtcttcatactgactttcataaatgtgatgccaaagcttgtaagcctatgtaattcttatttttaattagactatcaggaaactaacaatgcacaaactaaccattcgttttgtagctgcctgaacacacagtaaaactctgtgacaatttatccacaaagaattctaagtttgaagactgytgtcaagaaaaaacagccatggacgttttt

SEQ ID NO: 830716 - DNA, 620 bp, Homo sapiens
gtgtatgcataatgatggcataaaaatatttcacaaatagtttgaagcagcaggttgaaatatcaattagcaatatcagatggyagaagttacataggactgaaactttacatttttctaaatgtgtattgcttttataagtgcatagacagcagtggggtaagacataatgaaggaatttacacaaaccaattttcacagaaaagccttttgaagtatccacttgatgctttatacagagtcaattgcattatgcttgcacaaagacagttccatatgcatttgaagtagatatgtttacatataatatatttaaatgtatattacatgcaaagctttaattcagtattgactagtcacaatagcaagtattaatagcttgtatctcaatgaaagtattttataatccaaagcctgttgatttagagtcagtctgagctaaatctcttctttttaattaagatgcagaaaccaggtgctctgcctttatgatagatatttcacattttaaaatgtaggccaggcacagtggctcatccatctaatcccagcactttggcaggccgagtcaggcgaatcacttgaggtcagaagttccagaccaccctagccaacatggt

SEQ ID NO: 830717 - DNA, 502 bp, Homo sapiens
tttatatcagaaataacccaatttcagccagatgcagtggctcacacctacactcccaatactttgggaggccaagctgagaggaccatttgaggccaggagttaaagaccagcccaggctaatgaggccctttctctattaaaaaaaaaaaaaaattttttttaagtagccagatgtggtggcatatgcttgtatacccagctacttagggggctgaggtgggaggatggcttgagccatccatccaattgaggttgaagctgcagtgagccatgactttgccaccgttcacatcagtgcactgcagcctgggtgacaggctgagaccctgcctcaaagaaaaaaaaaaagaaaagaaaaaagaaataacctaatttgtatcacactgccacagtattctgctttattcacaacctcttattctctagtcccccagaagaatagccctcagacaagtaaaayagcaggaaggatccaaatctcttagtggaaatgggctac

SEQ ID NO: 830718 - DNA, 586 bp, Homo sapiens
gcgtcagaatcacttggaacacacaggttgtgtacccacccatagaatttctgattcattaggtctggggtgggacctgagaatctgcatttctaacagttcccaggtgatgctaaggctgctgctctggggtctatgctttgggaaccactcctgctgactttactggaaagactaagtatgtagtaaaaaaaaaaaaacctgagtgaccattaaaagaataggaactatgtatagcttaaaaccacaaaggaaaataaatggactatatatgtgtgaaccccaaatatctgagacaggtctcaataaatttagaaagtttattttgccaaggttaaggacacgtatctgtgacagcctcaggacatcctgatgacatgtgcccaaggtggtcggggcacagcttggttttatacattttcagggagacttgagacatcaatcaatatgtataaagatgtatattgttttggtccagaaaggtgggacaactcraagcggggagggggcttccaggtcataggtaaataataagcaacaaatggttgcatttttttgagtttctgattagcctctccaaagtaag

SEQ ID NO: 830719 - DNA, 571 bp, Homo sapiens
aatgtgcagttttattacagaggtaatgtgccatggtggtttgctgcacctatcaacccrtcatctagagagattcttaatctgaggtccatgggtgaatgtcagaaagcatgtgaagatcctgatgctatttcaacatgctgccagcatatgattatttttccctggggagaggatctatactttcattatactattaaagcatctcatcaactatgaagggttagacacctttggtttacagaggtaaatctcccagtgaacttttcagctagaaggttgtagctgttagtacaaacctaaggcatttttttttttaaagtcatccttttatactaacagtctaaaaaaggtacaggattgaatacgtagcttttgagaattcatgagagaatataagggaagcaatcaatgaaatgcctcttaatctaacctgtggataagaataaggaagtgattgtttttgtttgtttgtttgtttgtttttctagtagctgtcacaggatcaaaatgaaaagaggccagatacagtggctcacacctgtaatcccagcattttgggaggccaaga

SEQ ID NO: 830720 - DNA, 622 bp, Homo sapiens
agcccagtgcaaacagtgggctctgcctgggacgaggccagagagggcagccctggccctgcaggtgaggctctgccctcctcctcacccacccccaccgaagtgagtcactagcaagcatagccctcccagcgctgtctcagtggctgcctggtgaggccccatggcctctcctgtgggctctttctctgggcagcaacagcccaggggcccaaaccctaggtgacagggtctgatcctgctttcccacccaagaaaataacaaatgctggttcccagtcatgcactgggggccctctggggtgcagagtccccagctcccctgaagacaagagccacacctggcccctcgcctcaaccacagagtcagaatgtggagcaggaggttttattgtaaagaggccgattgtacagagcaaagattgttctgacacggggggctgggtggtgggacccagaggccagagctgggtgaaggatgaggggtggcatcgccccatccaggcagtgggcagggcagggaggactaaacggctgcctcccagttcccttccctgcccctcattactgggtaagagggagccaggctatttccayggatccaggagaatatagcaggaga

SEQ ID NO: 830721 - DNA, 539 bp, Homo sapiens
tagtggaacaccgccataacctgatcaggtttccattcccaatggcagctaatgccttgctggctgaccccttctggaaagctctatcagtgtcactacttgctgaagctctggctatctacaaaaatgtgggcgcaatggagtaacctggcctggcttcccttggtgctccaacttgttagcatccttgctcattcatctgggccacagtgattccaacatgcagagaaggatgatctttctctcaatgtgactcactcagagatgtcccagagcaaaactgtctgagccccaaaggcttcaactccctagcaggtgacgtcttctgattcacccacacccttctctataagaagcacccatgtcaactgcgtggtggcacttagatggtgctgggatcatcacttcctctagtggcctcaggcctgctcttcagtctcagactcctctctgcgatttccctttactgaaaatctggccttggttagggatccwttagtctatcagctgcatttctctacctttcaagctcaaacaaa

SEQ ID NO: 830722 - DNA, 565 bp, Homo sapiens
actcagcctgatttccttgtcttctctggctgacactacwctgtcccatggatatttttcctctccttaggtttctccagcttgctctttcttttttgcctctaaagacaaaactacacaagttccttctatgttaaggatataattacccccactaaaaggaaataaggaaaaagggagattttttagaaagcaggaggaaggtacatagttcacaaaaagtggccaccaagatgaactatgtgctacaaaatatttctgcccccagcttaagtcctgggtgtcaagtattctaaacctattgaatctttctgactgtgttcttagaagtgatcaaggccaggtcatgaagtaaaaataacatggtaatgaatccatccctaatgtctctgaggctttccaatcaagtttactctgtccactacgtttttggtgtttaatttcctcagtatttctcaatgtctgttgtgagtatacagtttgatattgtgaggacatagtttaaaattaaaactctaaattaacaagccatttgggatccagaaaagatctggaaattctatac

SEQ ID NO: 830723 - DNA, 565 bp, Homo sapiens
actcagcctgatttccttgtcttctctggctgacactactctgtcccatggatatttttcctctccttaggtttctycagcttgctctttcttttttgcctctaaagacaaaactacacaagttccttctatgttaaggatataattacccccactaaaaggaaataaggaaaaagggagattttttagaaagcaggaggaaggtacatagttcacaaaaagtggccaccaagatgaactatgtgctacaaaatatttctgcccccagcttaagtcctgggtgtcaagtattctaaacctattgaatctttctgactgtgttcttagaagtgatcaaggccaggtcatgaagtaaaaataacatggtaatgaatccatccctaatgtctctgaggctttccaatcaagtttactctgtccactacgtttttggtgtttaatttcctcagtatttctcaatgtctgttgtgagtatacagtttgatattgtgaggacatagtttaaaattaaaactctaaattaacaagccatttgggatccagaaaagatctggaaattctatac

SEQ ID NO: 830724 - DNA, 612 bp, Homo sapiens
ctctatttcaagctttaacttctctaggcatttccaaatgccgctagggaagtgtcaygtgtatagcatgctgtcaactccaattctcagtttccagcaaaatttcatcatcctcctttaaaaacctaagcaaatccaatcatcttctgtgttgcccatttctaatgataatactatgtctcagacactaagatttggacactcagaatgtcttttctctactgctgttcattccattcatttcactccagtgtgtggagtggcacatttcttcttttttcacgtttgagaaggttatgaaaatggtcttcctaattttactccccattgttagtatttatatattttatttaattttatatacttctactaaattatttataaagctcagcaatgatcatgcaaacttcctgcatataaaccttcagtaagtttagcctttacttgccaaataaagctcaagggtccccatgattactccaagtccacctttctgggtttatctccattacttttcttttcttcactttgatcttttcctttttatgcttgatgcatttatctacattatgcttttgtctttgtctaaaatatcctcaacttcaagttgga

SEQ ID NO: 830725 - DNA, 628 bp, Homo sapiens
gttacctgcttacaaatttgtttcatttaacatttttatatggatacctgttatttaaaatggcattcataatacaatgttagcatttattctcctctatatcttacatctttctcttttcttttcttctatrtatttattccctccttgtgtcaaaaacaaattgcaaaattcaagatatcaatatgaatctttaccatttaatttctatatgaacataaaatgccatatggctataatttgtgcaacagaatgaactattttggcttttgacccttaaaaaactcaccaatgaatatttaatataaagtgaatatgagaagaaaattacccaggactttggcatttgaagcaacttatttatgctctcaactaataaattggaagaattcaggtgagcaacagcttcatttagtcatgttgagtaaaataataaattgatattcttaaaaggaacttaagcagttaccccaggtgtccacattcttgaaatatatcattttcttaaaagttacaagaaaaccattgatggttcctagcaagctcctaactctgttgcataaagaaattcttattcccaagggccctttgatttctacagttaaaagatattcagtaatacaaccac

SEQ ID NO: 830726 - DNA, 543 bp, Homo sapiens
agagagaggaaatgagggctgaatttcattattttatcaggaactcattcccacaataactaacctgctccgtaaataatggcattaatttatttataatggaggagccctatgacctaataacttctyaaggcctcacctcccaatactgttacataggcaattaaattttggcatgaaattttttttgtgcggggcgggtggcattcaaaccacagccccagcccatggaattattattcaagcaagccatttctgtcttcccagcaagaacgcagggtacctcacccttttgatactataaagcctgcaacccggcgcggtggctcacgcctgtaatcccagcattttgggaggccgaggcgggcggatcatctgaggtcaggagtttgagaccagcctggccaacgtggtgaaatcccgtctctactaaaaaatacaaaaattagctggacttggtggcaggcgccttaattccagctacttggaaggcagaaaaaaaaatactacaaagtctgctttccatagccctaggctgttcac

SEQ ID NO: 830727 - DNA, 643 bp, Homo sapiens
aaaatcaaaatcggaggcttggatcctagctctagatctgccacaagtgaactggatgacctgcatactttgtttttatgacacmaaaatcagagcattgactagatgattcttgaggttccttccaatgctcatatataattttacaagctaataaatttctatttatttccatccctactttatgttctctttcctccactgctattatataatctccataaaccccctaccctgagttattggcagctttcacagggcaacttcttaattgaaaaagaactctatttcaagtcccaaagcttagacatatgttcctctggcttgacctacccattcagaaatgctcctcattgtcccttcatgtagatcttaagccaattgtaccctcttcctttgtggcacattcctggaccatttgataagcaacccctttattggagtttctttctcccacggttagcactgtgaacactacagtacatgcagcttgtgaggtttgcacagaaaataggaagctgatccctgatttagcccccaactagttagataacctcatagggtaagcaaacggggagttaatggaacattccacagttctttgtctactacctctcagcctgactttgggatctggaacaga

SEQ ID NO: 830728 - DNA, 634 bp, Homo sapiens
catgagttcaattgttttaatttttagctcccacaaataataagaacatgcaaagtttgtcataatgacctccagtgccatccatgttgttgcaaatgacaggatctcattctttttatggctgaatagtactccattgtgtttatgtaccacatatcttttatccattcatctgttgatggataattaggttgattacaaatcttggatattgtgaacagtgctgcatgaaagtgcagatatctctttgatatactgatttcctttcttttgggtatatacctggcagtgggattgctacatcctatggtagttctatttttagttttttgaagaacctccaagctattctccatagtggttgtactaaattacattccaccaatagtgtatgagggttcccttctctccacatcattgccagcatttgttattgcctgtgttttcgatataagccattttacctgggatgagatgatatctaattgtagttttgatttgcatttccctgatgatcaataaygttgagcacctttcaatacatctgtttgccttttgtatgtcctcttttgagaaatatctattcagatattttgccactttaaaatcagattattagatgttttcgtatggg

SEQ ID NO: 830729 - DNA, 634 bp, Homo sapiens
catgagttcaattgttttaatttttagctcccacaaataataagaacatgcaaagtttgtcataatgacctccagtgccatccatgttgttgcaaatgacaggatctcattctttttatggctgaatagtactccattgtgtttatgtaccacatatcttttatccattcatctgttgatggataattaggttgattacaaatcttggatattgtgaacagtgctgcatgaaagtgcagatatctctttgatatactgatttcctttcttttgggtatatacctggcagtgggattgctacatcctatggtagttctatttttagttttttgaagaacctccaagctattctccatagtggttgtactaaattacattccaccaatagtgtatgagggttcccttctctccacatcattgccagcatttgttattgcctgtgttttcgatataagccattttacctgggatgagatgatatctaattgtagttttgatttgcatttccctgatgatcaataacgttgagcacctttcaatacatctgtttgccwtttgtatgtcctcttttgagaaatatctattcagatattttgccactttaaaatcagattattagatgttttcgtatggg

SEQ ID NO: 830730 - DNA, 565 bp, Homo sapiens
tctttcagtttttccaaatataaaattatatcatcagcaaacaaggataatttgacttatttctttccagtttggatgcccttaatttttgttctcttgtctgattgctctagctaagacttccagtactatgttgaaagtggacattcttgtcatgctccagatcttagaggaagggcttccagttgttccccattcagtatgatagtttttgctgaatttttttaaaaagccaagctaaataggttacatattgtatgagaatctgctgtaattcttatctttgtttctctgtatgtatttttttcttcttattgtcctggagattttatatttatctgatttttttcagttgcagtactagctatcttttttctcctatttagtgttccttgagctaagtggatctttggatttttgtctttcattaattttggaaaattgttggccatcatcttttcaaatgtatctttgacccttgaactcttttctctcttctcctataactccaatgatrtgtactctagacaattagttattgtcctatcattcttgaatgccctat

SEQ ID NO: 830731 - DNA, 549 bp, Homo sapiens
attatataattatataaatataatcctcaagttaaaggaaacactcaaattgttagtgttagtgaactaaagaccagtctccatagatattggtgatagatattagtgtaaactgtctactttgttctgaaaaagaatatcttcattatgttaaccaaaactatcaaggatcctagaatttttctctaacagcatcaaaatagtggcctaattcatgataatgtgtaaggaaccatgacgtggtaaaaagaatgtagatttttgactcagaattgtttgaattcaattttggtttctactaacaatctattcttgggcaagtaacttagtgtattagaacctaatactttttatctgtgaaatgagaataatatttaccatttaggtttattctgaggcttatagatagtatctgtgaagcagcaagtmcaatatatctagaaattattccatcgataatgatcattattctattatattttcattgttggaagtcaactcactctcctaacatcttgtcaaggacctgtgctttcatatcctggaact

SEQ ID NO: 830732 - DNA, 631 bp, Homo sapiens; identical to SEQ ID NO: 818164

SEQ ID NO: 830733 - DNA, 585 bp, Homo sapiens
caacactggagcacccagattcataaaacaaattctaagacacttatgaagagacttaggtaaccaatagtaggagacttcaacactccayggacagctggacagatcatcaaggcagaatgctaacaaagatatttgggatctaaacttgacacttgaccaaatgaaccttataggcatccacagaacactccacccaacaaaaaacagactatacattcttctcaggtgcatgtggcacattctttaaaactgaccacacacttggccatgaggcaattctcaacaaattcaaaaaaactgaaattataccaaccacattctcagaccacaaggcaataaaaatataaataaataccaagaagagatcttaaaaccatacaattacatggaaattaatctgttcctgactgacttttgggtaaacaatgaaattaatgtagaagtcaagaaattctttgaaactaatgaaaacaaagatacaacatacaataagctctggaacatagctaaaacaatgttaagagaatttatagtgctaaatgtccatatcaaatagctagaaggatctcaaattaacaacct

SEQ ID NO: 830734 - DNA, 621 bp, Homo sapiens
aaatgcaagcgagggttctgaagtaacacagagacactaactgccagaagcagttagggaagtatacttagggaagaatgaacaaataaatagaagrgactgtgagaattagaaccttacagcttaaaggagacgcttttcagaacttggattttgacctcagaagagttggtgttgtctgatgcagatatctcgcgagatagaagaagcaactgctgaccatggcttaatttgagttggtgcctcaggagctcagaggaggaattaggcagagctggagctcagaataaagagcaggcactggttagcggatgctgcctcttgggaagggccatatgaaacttgttctgggaatataagaaaaactggacacagaggaaaaagccccaataatatgaaagaacaattactaggaacctgttgacagggacagaaagcaaaagatagaaagcaaaagaggaagcaacaagcccctcttatatccttcaaccatgtagtcttcctctagcatctcctttttttttattttttatttttttgagatgaagttttgctcttgttgcccaggctagagtgcagtggtgtgaccttggctcactgcaacctctgccccttgggttc

SEQ ID NO: 830735 - DNA, 616 bp, Homo sapiens
tgaaatctttctaaaatgtatttagagcatatttgtcttatgctgaataatccccactgttttcccattgtacttgaaataaaattcaatttatttgctatggcatataaggtcctacataatgtgactcycttttatactttgatctcatctcaacttcttttactaattttattagttatctattgctgtgcaacaagctactttaaaatattgcaacttaaaagaatgcacatttttttatctgcaatttctgcaaagtagaaatctgggcatagcttagctgggtcttctgctttgaggtctctcacaaggctgtaaacatgtcaggcaatacaaaagtgttacctgaagactcagatggagaaaaatccacttccgagctcaccgacgtggtcgttaagaggattcagtttcataagcgctgttgcactgagagcttccattccttgctggctgttggcaagaagctaccctcagtttcttgccacataggcctctccaacacgccccttgtttcatcaaggctaatgagacaagggagagagagagaatccacaagcaagacaaagtcagcatcttttgtgacttaagtagaaaagggacatcctctcaa

SEQ ID NO: 830736 - DNA, 616 bp, Homo sapiens
tgaaatctttctaaaatgtatttagagcatatttgtcttatgctgaataatccccactgttttcccattgtacttgaaataaaattcaatttatttgctatggcatataaggtcctacataatgtgactctcttwtatactttgatctcatctcaacttcttttactaattttattagttatctattgctgtgcaacaagctactttaaaatattgcaacttaaaagaatgcacatttttttatctgcaatttctgcaaagtagaaatctgggcatagcttagctgggtcttctgctttgaggtctctcacaaggctgtaaacatgtcaggcaatacaaaagtgttacctgaagactcagatggagaaaaatccacttccgagctcaccgacgtggtcgttaagaggattcagtttcataagcgctgttgcactgagagcttccattccttgctggctgttggcaagaagctaccctcagtttcttgccacataggcctctccaacacgccccttgtttcatcaaggctaatgagacaagggagagagagagaatccacaagcaagacaaagtcagcatcttttgtgacttaagtagaaaagggacatcctctcaa

SEQ ID NO: 830737 - DNA, 587 bp, Homo sapiens
cctaatggtacactgctaacaaaaaaaggtgtgatggttaatactgagtgccaacttgattggattgaaggatacaaagtattaataccagtgtgtctgggagggtgttgccraagagattaacatttgagtcagtgggctggggaaggcagatccacccttaatatggtggtcacaatctaatcagcttccagtaaatataaagccggcagaaaaacatgaaaagcagatgatgggcctagcctccccagcctatatctttctcccaagctggatgcttcctgcccttgaatatcagactccaagttcatcagtttttggtcttggactggctctccttgcccctcagcttgcagacggcctattgtgggatcttgtgattgtacaagttaatacttaataaactcccccatatatatgtatacatgtatatagaagatatgtccctctgagagaaccctgaccaatgcaataggcaatgttcctcaccttcagactttagggaggacacacgcctgaaatagccaagagaattttttgaatggggaaatgactggagattgcacaattgctaataaagctggacc

SEQ ID NO: 830738 - DNA, 628 bp, Homo sapiens
tgaccctttaggttactctggatgtctgcactctgtcatctgcaacacctggctttcaagattgctctggtyattgttctaccaatcacttgcaaggaagaagagcatgataaagttcccccacagggttgtatggggcagatctgaaagcttcatttatcatgtttggtgcacattccattgtttagaactatcacatgtatacatgtacctgcaaggaaggatgtctcggaatatctagttttgtgctcagtaagaagcagagcatatgttgtagtaggtatctgcacactgacacaggtgagatagagagggtaagttatttttaaaacttttcaggatggaaaatttcaaaaatacacaaaaatacagagaacagtataatgaatgcccacttattcatcaccaagcttcaaataatgtcaataatttgtcattcttgtttaaattatcccttgtttttctctgtattttcaagcaaatcctaggcattacttcgcccgtaaacactttagtgtgtactgttaatacacaaggattaaaaaataaccaaaatacattttatcacctaacaaagttaatagcagtaaatcccaaatattttctaacacttagtccatgttcaatt

SEQ ID NO: 830739 - DNA, 626 bp, Homo sapiens
gaattttttgtctttattttccccttccctccctagtatgtagtggtttcatgcagacagctttgtgaagaagccccattggcatctattttggtggaatgagtgggaacataattctcagtgtgtcagtaatccattgctgcatacagaccatttcaaactttagtgctttaaaatagcaatcattttgttttactcaggagtgtgtttgaaatttggtcagatgggatggcagttatcattaacaccaatatttaagatatgaccatgggaatgagtagctgtaatcattggagaagcgaggattaaggaatctcagaatgcaaactatttgaatatttcattctatgggaaaattaaaataaccaacaactataacacaggagcagtatcttcaggagagtggcagtgagtcaggggctagaatctgcaaggaatgggtgggggagtagcctaagcatctaaaataaaataaaatgaataaaacccccagaatcccactttcctaaccatamctcatttcctccttctccctcatggtaaaacatctccaaatgtctgtttacattttcttatttttcctctattcactgaaatagatctcatctagatcataaccagcagcc

SEQ ID NO: 830740 - DNA, 569 bp, Homo sapiens
tagtatcaatcctactgaaaccattccaaaaaattgaggaggggggctcctctataactcattctctaaaggcagcatcaccctgagaccaaaactggcaaagacacaatgagaaaagaaaacttcagaccaatgtccctgatgaacatagacacaccaattctcaacaaaatactaacaaaccaaatccagcagcacaccaaaaagataattcacgatgatgaagtaggctttattcctggaatgcaagattgattcaacaaatgcaagtcaataaatgtgattcatcacaaaaacataattaaaaggaaaaaaactaatctcaatatttacataaaaagcttttgataacgtccaatgtcccttcatgataaaaagccccaacacaatagacacctaaggagcatacctcaaaataattagagccatctatgacaaacccacagccaacattgtactaaacaggcaaaatctagaaccattccccatgaaaactagaacaagacaaagatggccacgctcaccactcctattcamcttagtagtggaagtcctagctgaaacaatca

SEQ ID NO: 830741 - DNA, 539 bp, Homo sapiens
cctttctggctgacatcagaggggtgcatggcaacaaaatgtcatcccaatctctcatgggatgttttcttttccaactttcttytcaatggcttctgacattaaaataggtttttactgaatataaagtacttatgttcctcaataaaacccaaattgttgggttttaaaaacttaatgttggattaagatctcctaataagcaaggttaaacaaacaagggggttggaaataaaattagggagtgccaatttaccagctgctgtgcgttagcaacaatggccctgttagcgctcccccaggttcttcattaagctcggaaaatccttactccctgattgctcagatcccacagatgagcctagaagaaagtattaaatgtctaagaaaagacacaacatattcaagtctaaaaagatgtttctatttcactttgaggctcaagtaaacccatcccccgccccttgttctcttcccatcatcttcctttgccattggagcctacaattcgtccagaatcctttcctcctccctctttt

SEQ ID NO: 830742 - DNA, 588 bp, Homo sapiens
tcctatacatacatagctatgatacagtgtcatttataagtgaggcacagtaagagattttatttttagaattaataataaaatagaacatgtataacaatgtactgcaatgcaagttatgtgactgtggtttctctctctctcactgtcacaaaatatcttcctgtactgtactcacctttcttcttgtgatgatctgagatgatacaatgcctatatgagatgaagtctggggaatgacacaggcatcgtgttgtgttagcttactactgaccttctgacaataggttagaagcaggatcatctgcttgggtgatcctgaatcatcggcatgatgatgtccatggttggctgtcagaagatgatgttgctgactaatgggagggtggtgtacacagcctgagatgctggacacaggactgattcatgtcccagaacaggacggagcaggatggagcasgacggtgtgagatttcataatgctactcagaacagtgtgcaatttaaaacctatgaattgtttatctctggaattttctatttaatacttttggatctcagttgaccacaggtaattgagactgcaga

SEQ ID NO: 830743 - DNA, 633 bp, Homo sapiens
caaatctcaacttgcccttagctcaaacaatctacgccagcaggattagaattagtgttacagrcttagatgaataaagacatctcctggaactgaggaggtgctcttctaccaggacaggtctgtccacggggaatagccaaaattaaatcaggtcttggtggcaagggaggaggacgaaaaaagctgttgggtaggcgaccagaagtgtcttcgataatgttacctaagactgctgtgaagattaaatgagatatgtgtaaaacaccatgcctggtttctggcagatcataaatttcaaataaatgttaatcgttatcttttctgttctgattttcatcccatcttgcacttgctattcctccaattggctcatagccttaacccatattctctctgcttagcatgctcttttcctattgcaatgctaccaatacccaaaagctcatctcaattgtcaaatctacaataatgttttccttgatttctcaatcctccagggtatttgtttcttatttatggctttaatcatgctttgtcttgtgtttgtgtactttctgagatttctctagagtttgagctccttgaggattacacaggtctcattgattcctcatttctttgaataacctc

SEQ ID NO: 830744 - DNA, 556 bp, Homo sapiens
cagatagctctcctgaagcactgtgctaccaccactccccatcagcmgtggatggtcctacatccctcatcttcatttatacttggcactttccagctttctaattaccaccagtataaaatgggtgatgcgacaactcatttgttttaattcattttttaaaattactaatatatgtgagcaaaacttcaaatacggatattttgggttttcttttccagaaattgcctgttcatgtcctttgcccaattctattcctgggtatatgttccaaatagattctcaaatgtgaacataaagagtagtgcctaagagtagtcattgctgttatttgtagtggcagggagctggagacagcatacaaatccttcactcagagaattaagtggtaaaggtggcgaattcatatcctgagatactgtgcagcagttctaagagatgaactagatatatgagtagtgcacagatgattcttaaaaatatagagatgtatgctaaaagaaacaatactattcatatgtaagttacacttctgtgcatgtaaaacacttgtgtg

SEQ ID NO: 830745 - DNA, 525 bp, Homo sapiens
atcagggacccccaaaatgaaccatcaacagaactggaatcaaaatgcagttgaaaaccaattttgttgaaaatcaatttttacatgttggcttgaatgtcctctaggatgggagggttttcaggctgtaattttcatccctttgaaatacagtgaatttaaagtgaattaaaatgcacagggttatctgggggataaagtcacagtgataataataacttttatttaagatatgttttataacatttagattatttttgccatacatttcatcctcccagcaaccctgggaaataagtgatcactgtcttcctttcaaagacaagcaaatgaagactgagagaggtaataagattctcctaaaatcccagagagaagtatcacaataaggatctgaacacaggtgttcttacttatttctaatagctccagtttcctcatctttgaaaactgaagttatggtgatagatgcctcacaaataaagacatactataatsaagcactttaaaatgacctcttcagtg

SEQ ID NO: 830746 - DNA, 554 bp, Homo sapiens
tgatgagtgagagtgtcatgataaaatgagacaatattgtwaggctacctgacacacagtagtacctgacactcagaatgtgttctccccttttgcattctttctgtcctaaagatgccccaaggtggcagaatcagtacatttcaaatgtacagctaccacaaaggagagattctagattgttccaacaggaacgaattcactccccacagagagtcttgagataggctgtatgatggagtaaaaaacagacttggctccgagtcagactctaactctagtcctcttttgtaacttaccatagttttgtccttgaacatattattcagtttctgcatttgctgaggactttctatgtgccaacactgtactgaatgcttaacatggcttattttatttaatcttgcagtgatccatatagactagaaattactatcctcactatacagaaaatggaactgaagagcagaggaatctgttaacttgcagaaggtcacatcggcaataaagggtaaagctcccatttgaacccagttctgccagaccctggagac

SEQ ID NO: 830747 - DNA, 554 bp, Homo sapiens
tgatgagtgagagtgtcatgataaaatgagacaatattgtaaggctacctgacacacagtagtacctgacactcagaatgtgttytccccttttgcattctttctgtcctaaagatgccccaaggtggcagaatcagtacatttcaaatgtacagctaccacaaaggagagattctagattgttccaacaggaacgaattcactccccacagagagtcttgagataggctgtatgatggagtaaaaaacagacttggctccgagtcagactctaactctagtcctcttttgtaacttaccatagttttgtccttgaacatattattcagtttctgcatttgctgaggactttctatgtgccaacactgtactgaatgcttaacatggcttattttatttaatcttgcagtgatccatatagactagaaattactatcctcactatacagaaaatggaactgaagagcagaggaatctgttaacttgcagaaggtcacatcggcaataaagggtaaagctcccatttgaacccagttctgccagaccctggagac

SEQ ID NO: 830748 - DNA, 554 bp, Homo sapiens
tgatgagtgagagtgtcatgataaaatgagacaatattgtaaggctacctgacacacagtagtacctgacactcagaatgtgttckccccttttgcattctttctgtcctaaagatgccccaaggtggcagaatcagtacatttcaaatgtacagctaccacaaaggagagattctagattgttccaacaggaacgaattcactccccacagagagtcttgagataggctgtatgatggagtaaaaaacagacttggctccgagtcagactctaactctagtcctcttttgtaacttaccatagttttgtccttgaacatattattcagtttctgcatttgctgaggactttctatgtgccaacactgtactgaatgcttaacatggcttattttatttaatcttgcagtgatccatatagactagaaattactatcctcactatacagaaaatggaactgaagagcagaggaatctgttaacttgcagaaggtcacatcggcaataaagggtaaagctcccatttgaacccagttctgccagaccctggagac

SEQ ID NO: 830749 - DNA, 595 bp, Homo sapiens
cttccaatgcaataaatcctggcccacttggaaaagtgatatttcacactcatgttcatggaaccattattgacgtcagggcaacatggtgttttgtctttaaaatatatcttaaaaatttttgtttgctttgacttcaagggagataaatcatttcaacatgttttatcatttaattttcctctcattgtggcagatctcaaatcttcaatactgtgtgtgctaatgtataaaacttttgcatttgatgatgctctcagaattcaactacagaaacaaaagacttgatggtactagattcaaggatagacaaacggggccaggtacagtggctcatgcctgtaatcccagcactttgggaggccgaagagggtggatcacctgaggtcaggaattcgagaccagactgtccaacatggtgaaaccctgtctctacttacaaacacaaaaattagccaggcgtggtggcaggtacctataatcccagctactcaggaggctgaggtaggaaaatcgcttaaactgggargaggaggttgcactccagcccgggtgacaagagtgaaactacgtctcaaacaaaacaaaacgaaaa

SEQ ID NO: 830750 - DNA, 635 bp, Homo sapiens
ggataataatagtacatatctcatagtgtattagtctgctctcacccttctataaaggtactacatgagattgggtaatttataaaggaaagaggtttaattgactcccagttccacatggctggggaggcttcaggaaacttacaatcatggccaaatgttaagcaggtaccttcttcacaagggagcaggagagagaagagaaagctaagggggaagagcccctgtaaaacctttagatctcacaagaagtcactcactatcatgagaagagcatgggggaaactccccctcacgatccaatcacctcccttcctccacacatggggattacagatccctcccttgacatgtgagaattacaatttgagatgagatttgagtggggacagagagccaaaccatataagtgtcttagtgaaattaaatgctaaaatctacataaaacatcaatcctgtaaattacatggtatttcttccattatgcgaaaagaaaatttgagaaaaagttatataagttattcataacaatatagctagtaagtggtattgctgagaataaaatccatgttaattaactccaaatccagtacacttaattwccataatatattgcccatctcaggcaaactaaa

SEQ ID NO: 830751 - DNA, 568 bp, Homo sapiens
ttctctatcttctctttcacacaacacacctatataaacacaaatgtaggtatgcaaaatcttatatatttkgtaactacttttatattttacttaaaaatatgagtgttgttatagccttaagtgttcagagtaagctctttgaagaacaagaagtgtgtgtgcgtgtatgtgtgtgtgtagatatgtgcgtgagagaatgtgtaaacaaatacataaaaacatccagctgagtgaatagtatataatagactctaaataattattcattgaactaatttattaacaacaatgaaagagacatgggagaaagaaagaacatgagataagctggaacacatgcaaggtaaagagatgaagagaagacagcccaccatttggaaagcatttatgacttttaaagtttttatgtactctgtagttgatgctcacaatagccttctattttcttttattttatttttaatagagacagggtattactgtgttgccgaggctggtcttgagcttctgggtttaagtaattctcctgccttagcatcccaaactgctgggattacaggcataa

SEQ ID NO: 830752 - DNA, 618 bp, Homo sapiens
attaccaatcaactgcagcacttcagcactccctctgccatggcagacattaccaatcaactgcagcacttcagcactccctctgccatggaggacattgaacccaccccttcaggcagcccctatcacygctgtggggggttggcacataagactaaacttatttgctactcctgatatagagataatattttggatgggaagttagaggaaaaggagggcagatggtctggtggtcagcaaagccttggagtctggctgggaaaggcatttcaggccgggcagtggcatacccagcattagctaacattcattgagacttagaatggttcagcccatgtggtaagtccattacatgaattaactgattaaactctgtcaacagacaactgaaagaggcaagtgctattattattcccttttttctttgaggcacagagaagtcaagtagtgtgtccagggtcacacaggtagggagtggttggtgtgaacccctgtgatctgaccatagagcttgtgcccttcatcccccacagctcactgcctctaacagacaaggaggggcccagtcaggccagagctaagggttaatttagggaagaggagattcatttaggg

SEQ ID NO: 830753 - DNA, 618 bp, Homo sapiens
attaccaatcaactgcagcacttcagcactccctctgccatggcagacattaccaatcaactgcagcacttcagcactccctctgccatggaggacattgaacccaccccttcaggcagcccctatcactgctgtggggggttggcacataagactaaacttatttgctactcctgatatagagataatattttggatgggaagttagaggaaaaggagggcagatggtctggtggtcagcaaagccttggagtctggctgggaaaggcatttcaggccgggcagtggcatacccagcattagctaacattcattgagacttagaatggttcagcccatgtggtaagtccattacatgaattaactgattaaactctgtcaacagacaactgaaagaggcaagtgctattattattcccttttttctttgaggcacagagaagtcaagtagtgtgtccagggtcacacaggtagggagtggttggtgtgaacccctgtgatctgaccrtagagcttgtgcccttcatcccccacagctcactgcctctaacagacaaggaggggcccagtcaggccagagctaagggttaatttagggaagaggagattcatttaggg

SEQ ID NO: 830754 - DNA, 633 bp, Homo sapiens
tgttatatatttgatatttataatcccaattttaatatgagcattaaaattggaagtgtaagggagaacagacatgagcatgaggatgttatctaaaacatattcaaatataatttaacataacttcaagctctctatacgttttctttgagtcttagaatattcaaaatttaaaattacctgaaatacaatattgtattttagtgattttatggccaatgaaacacaataactttctcttaatgaatatataggacaatatgacaagaaatgctacttgctaatcttttcccactccacttactcattaacaatttttagcagtgctgtatttctgagcatccctccaaattaggtgtggtcatatgacctagtcctggccaatgacatgtaagtgtaggtgctgtgtgaggcctctgggaaggcctacatcttttcagtagtaactattgaaatagtgatatatccagtagggttctttgtttaaagagataccataaacatgcctcccaaatggcacaaagtaaatcgataaytgaaccaatcaatgacaatttagaatacatattttaaatgtttttcagaaagccctaatgtgatgtccgtatttattcctatatgaaatccatattt

SEQ ID NO: 830755 - DNA, 530 bp, Homo sapiens
caaaccccttatctttgctatggctacattgtaaaccctgtattgcactctacaagcagtatttaatattaactattgatttactctaacattgactctctatcaggtaagggacacatatcaaagagggaaaatataccccaagacttaaaaacctactttttggaaaaaggaaaatattttctcacaggtagtttgctcatacgggcaatttgtaaagactttaaagaacaatgtgctttaaataagtatgaataataattatttgaaacgtagtcacctcagccttgttcataataggagacaatagttttaatgtctaacgatgactatagggtactggttaaataaattacatccataatgtggaatattctgcaccttaaaatgacttccctttcttcatattcaattctctcaaatgttcataccrttcatttttttctaaatcctttctcatagaccttttaaataaaggactgttaaaaagtcttctgagactttttaaagccacttcccagttacctttc

SEQ ID NO: 830756 - DNA, 624 bp, Homo sapiens
ccctcccagtgttttcctatttctcttggagtaaaattcaaagtcttagttcaatatgtcatcaaatatacctcccaacctggaatattctcccaccagatatttgcatggcttccttcaggcatctgcctaaacatatctgatatgattaggcctactggccctgcacaaatctcatcttgaattatcatccccctaatccccatgatccccacgtgtcaagggagagaccaggtggagataattggatcatgggggcggtttcccccatgctgttctcatgatagggactgagttctcatgaggtctgacggttttgtaagtgtttggtagttcttcctgcattcattctccttcctgccgccttgtgaagaaggtgccttgcttccccttttccttccccaatgattgtaagtttcctgaggcctctgcagccatgctgagctgtgagtcaattaaacctctttcctttataaattacctagtctcaggcagttctttatagcagtgtgaaaatggactaatacaatatttgtgtcagagagkttaccactgatcaccctatataaaatgacggatcctcctactcactgatagcatttgccattcccttccttatttttt

SEQ ID NO: 830757 - DNA, 624 bp, Homo sapiens
ccctcccagtgttttcctatttctcttggagtaaaattcaaagtcttagttcaatatgtcatcaaatatacctcccaacctggaatattctcccaccagatatttgcatggcttccttcaggcatctgcctaaacatatctgatatgattaggcctactggccctgcacaaatctcatcttgaattatcatccccctaatccccatgatccccacgtgtcaagggagagaccaggtggagataattggatcatgggggcggtttcccccatgctgttctcatgatagggactgagttctcatgaggtctgacggttttgtaagtgtttggtagttcttcctgcattcattctccttcctgccgccttgtgaagaaggtgccttgcttccccttttccttccccaatgattgtaagtttcctgaggcctctgcagccatgctgagctgtgagtcaattaaacctctttcctttataaattacctagtctcaggcagttctttatagcagtgtgaaaatggactaatacaatatttgtgtcagagagtttaccactgatcaccctmtataaaatgacggatcctcctactcactgatagcatttgccattcccttccttatttttt

SEQ ID NO: 830758 - DNA, 607 bp, Homo sapiens
atcataacgatctaatatcagaatgaacttagctaaatatactcaggttggcctttggcacacatatataggaatgaaatagaaagagtgttgctagcagtgaattctgagaactggagggaatctsagaggtacttaaggaaagcaggtattattagctagtggcggagctgagggggctctgcattccagatgatatttatgatattttcttatgttttgttttccttcccaaaaatgtgtgtctctgagttacagcaccatgatttgtcaaatataaattatgtttcaagtaattatccataaatgttaattactaatgcaacctgtacatttttaaaaaaattttatatttttataaaggatttctcaaattttttgttaattataatgtacttgtaatcttgtaaaaaatttagcaatagttcgaatgatgacattattttctttatagtaaatataccatgagttttcaggagaaaggaccattctaatgtatgcaatttccttgaactgttgatgtaagaattcatgtgaaaataggggcttattgcacttagcagataaaaaagtgtataatagctaagatattgaataacaaggtttg

SEQ ID NO: 830759 - DNA, 610 bp, Homo sapiens
acatcacacctcacagtagcctcaacctctcaggctcaggtgatcctcccactttagcttcccaggtagctgggactacaggcatgtgccaccaggcctggctaactttttgcattttttctagagatcagatttcgccatttgccctagctggtctcaaactactaggcccaagcaattcaccctcctcagcctctcaaagtgctgggattacaagtgtgagccaccatgcctggccaaaacttgataatttctttgattgttcaacagtattctattataaggatgtaccacaatttgtttatccattcacctattgaaagacatcttggctgcttccagtttgaggcaattatgaataaagctactataaacactcaagtgcagtttttgtgcagacataaattttcaactcattttggtaaatatctaaggagtagcatagctggaacatatgttaaaactctatttttagctttgaaagaaacttgtaaagtttcctaaggggctgttccattttgcattcttatsagcaatgagtaaacattcctattgctctgcatcttcatcagaatttggtgtagtcagtttggaggattttagccattgt

SEQ ID NO: 830760 - DNA, 616 bp, Homo sapiens
atgacaggataatttgtaggttaaaaacaaaggaatttaagagacaatagaaatgtggcacaaagttcataatgaaaacaggaaggtcttattatatgtgagatatttatacctttaagaacagtttttcatgacaaaagaatcatttcctatgatattaaaacttgaaattcagtttattaaggctcttctttaaagttttatgttcaacagacaaatatattctactttgcattttagcagtttatttaattttaattaaattttttttttttttgagatggagtctcactctgttgccaggctggagtgcagtggcatgatcttggctcattgcagcctcagtcttccaggttcaagcaattctcctgcctcagcctaccgagtagctgggactacaggtgcacaccgccacacccggctaatttttttttttttttgtattttagtagagacgggttttcaccatgttgcgcaggctggtctcaagctcctgagctcagrcaatccaccagcctcggcctcccaaagtgctaggattacaggcttgagccaccgtgcccagccaattttaatttttgagacagggtcttgttctgtttcccagactggagtg

SEQ ID NO: 830761 - DNA, 600 bp, Homo sapiens
cataactgattgcctcctttggaaagactaatcagaaactcaaaagaatgcaaccatttttgtmtctcacccacctgtgacctggaagccccctccctgctccaagttgcttagggaaaaaaaataaaaattaaaaaaaaaattaaaattcagattattacatctgtgtatctctttgtatgcactttcaaagtacttatgacattgagttacagggctttgactcttgggtccacaaagggacaccaagtcctgctaaattttaaacactgacagcaattaaagccccatcttcaggcccagtacaagatgtcaatcaaaataaactgcattcctgaaacatagagccagaaattaaagctattcaactcctcaaggcccagggactatcatggaaaaggtgggtgtgtgagaatgtaagagtcaatcctgagttcagtttctctataaattaatcattaatgtcaaaggcacactgatgcaagaccagcatatgggcccgtgtcagattaacaaggttttcttgaagcattagctgactcttaaataaagtttataaaaggtttatgaaagttatatctcatggtcaagattaaaatt

SEQ ID NO: 830762 - DNA, 624 bp, Homo sapiens
tttggaaaattcagtctcctctcaaagaatgaaagtctttgtctctctttttgaaatttttgagttatcacttttgtcaaatgaatgacttattttacaatgacctgtgatatcaagcattttaatcctttgatatttcataaactgtccaaaatcaaactataaattatgtcttctgatctaattaatcctttaagatattaggtcccctaaagtccaataatgacataatttgccttatttgatataaaaattgtacaggaaacactgtcaaatatgaatggttttttgttgttgttgtttttgagacagagcctggcctgctgtccaggctggagtgcagtggtgtgatctcggctcactgcagcctctgcctcctgggttcaagtgattctcctgcttcagcctcctgagtagctgggactacaggcgcccaccaccacgcctggctaatttttgtatttttagtagagacgggtttcaccacattggccaggttggtctcaatctcctgacctcatgatccacctgcctcagcctcccaaagtgctgggattacaggcttgagccacygggcatggcctgtgtttgatttctttaggctgtatttgtataaatgtgtta

SEQ ID NO: 830763 - DNA, 639 bp, Homo sapiens
gcctatgagagatcttatttcttggaattaattgttcccttctgtctccctcccttcttctctttctctctctctctctctctstgtgtgtgtgtgtgtgtgtgtgtgtgtgtgtgtgtgtaagcatgcacagaggaaaaaccacatgaggacacagtgagaaggcagccacctgcaaggcaaggagagaggctcagaagataactaacctgccagcatctttttctttgactttcagcatccacgactgtgataaaataaatttctgttgtttacctaatctgtggtgttttgttatggcaaccccagcaaactgatataaggctgttatgaagattaaaagttaatatatataaagtgcctggcaatatgcatttcttattgttattgcttccctcaaaattcagtttttgtatatctttaattcttagagctcacttccttcttctatataattagatttactagtttactgtttttcttttctggtagtttgtaagcctccaaaagaatgaggtaccacattggcctgttcaaatataaaagtgattggaacatattaaggactaaataaatatttattaaattaatgaaggccttatgaccaatgtaggtgctctgccaaattatttttgctaa

SEQ ID NO: 830764 - DNA, 545 bp, Homo sapiens
attagtgataatatatgtaaaactcctaatatgtaagtattaaataaataatagctattatcaaaattataaaaaataattttaaaatgagaaaacatttaaaaataagacaaaattatggaataatcgttggcttaaaataatagcactcaagactacaattcttcatataaaacataatctagaatctgaaagaatcttttctactcattatactgtaaatgaaaagagtcaaactctgtaaaatattggatgagatttattttgagccaaatgtgagtgaccggtggcccaggacacagccccaggagatcctgagaacatgtgcccaaggtagttgggctacagcttggttttatacattttagagagacatctaaaatgtacattggtttggtccagaaaggcaggacaattggaagatggtgtgggggacttccaggtcataggtggattcaaagattttytgattggcaatgggttggttgaaagagttattatctgaaggcctggaatgaatagaaataaatgcctgggttaagata

SEQ ID NO: 830765 - DNA, 619 bp, Homo sapiens
tcaatttagaaagttcattttgccaaggttaaggacacgctcaygacacagccccaggaggtcctgatgacatgtgcccaagatggtcagggtacagctgggttttatacattttatggagacatgagacatcaatcaacgtgcataagatgtacattggttcagaccagaaagaccagaaaactcaaagcggaggtggggcttccatgtcataggtggataagagacaaaaggttgtattcttttgggtcttcgataagcctttcactgaataccaaatttacgtgtgagagtgagtgtagaatagtcacttatgccttagtttggttcagtgaatctgtaattttatgtaaacaatagggcagaggaagcatcaggtctgcatttgtctcaggtgagcagaggaatgactttaagttctgtcctttgtcccgcacctgtaaagataagctatcaatttacattgccagggtgaaattgaacagaactgttttagggcaaaaatcttgaggcccacaggaatttcctttttggaacattataaggtagatatgtagctttttttttttttatctttgtagctgtcttatttagaaaaaaaatgggaggcaggtttgcc

SEQ ID NO: 830766 - DNA, 619 bp, Homo sapiens
tcaatttagaaagttcattttgccaaggttaaggacacgctcatgacacagccccaggaggtcctgatgacatgtgcccaagatggtcagggtacagctgggttttatacattttatggagacatgagacatcaatcaacgtgcataagatgtacattggttcagaccagaaagaccagaaaactcaaagcggaggtggggcttccatgtcataggtggataagagacaaaaggttgtattcttttgggtcttcgataagcctttcactgaataccaaatttacgtgtgagagtgagtgtagaatagtcacttatgccttagtttggttcagtgaatctgtaattttatgtaaacaatagggcagaggaagcatcaggtctgcatttgtctcaggtgagcagaggaatgactttaagttctgtcctttgtcccgcacctgtaaagataagctatcaatttacattgccagggtgaaattgaacagaactgttttagggsaaaaatcttgaggcccacaggaatttcctttttggaacattataaggtagatatgtagctttttttttttttatctttgtagctgtcttatttagaaaaaaaatgggaggcaggtttgcc

SEQ ID NO: 830767 - DNA, 571 bp, Homo sapiens
ttgttgaaaagatgcattatttgtgtagctgaattaaaatgcagaatttcagatataaagcaaacgcaacaaaaatcctattggacactaaggatgtaacaaaagagatcataaaataatacactagtcacaattctataccacagttgtctaaaagaaatcgatttggatttacctgggaatattttcttgagatggggtctcgctatgttgtccaggctggtcattaactccttgcagtcttttcatctcggcctaccaaagtgatgaggattacaggcatgagccaccatgactagccacctgaaaaattatgattcctttgatggcaattatacaaaagtgggtctaatggtaacattttaaaaatacttttaaactctcaaaacttatttatcccagtcctttgatgaaattaacaacaataacaaaaagtaatatgggtaaaatatctagtacaatgtctaaaaatatgcttaaaatgttttttgttatttattawgcctggtataattccaagaaaaactaatgtttatatacctgtgtcacttgactaagctatataattctt

SEQ ID NO: 830768 - DNA, 611 bp, Homo sapiens
acatcaaatgaaaaatcttctgcagagcaaagagcacaatcaacacaaatgaaaagacaacccatggaatgggaagaaaatgtgcaaaccatatacckgataagaaattgatatccaaaatgtatgaagaactcacacaactcaatagcaaaacacatataacctgattgaaaaatgggcaaaggacaagaatagacattttttattgcaaatggtcaatgagtatataaagtcactcaatattaccagtcctcagagaaatgcaaattaaaaccacaatgagatatcacctcacacttgttaggatggctattctcaaaaagacatgagattataagtgttggtgagggtatgtagaaaagggaacctttgtacactgtttgtgggaatgtaaattggtatagccattatggaaaacagtacagaggatcctcaaaaaaataaaatagaactactacatgatccagcaatttcacttctgggtatatatccaaaggaaaagaaatcagtatcttaaagaggtattggcatccccatttcattgcaggattattcatgatagccaagacacagaaacaaactaattgtccatcaatagatgaatgaataaa

SEQ ID NO: 830769 - DNA, 611 bp, Homo sapiens
acatcaaatgaaaaatcttctgcagagcaaagagcacaatcaacacaaatgaaaagacaacccatggaatgggaagaaaatgtgcaaaccatataccggataagaaattgatrtccaaaatgtatgaagaactcacacaactcaatagcaaaacacatataacctgattgaaaaatgggcaaaggacaagaatagacattttttattgcaaatggtcaatgagtatataaagtcactcaatattaccagtcctcagagaaatgcaaattaaaaccacaatgagatatcacctcacacttgttaggatggctattctcaaaaagacatgagattataagtgttggtgagggtatgtagaaaagggaacctttgtacactgtttgtgggaatgtaaattggtatagccattatggaaaacagtacagaggatcctcaaaaaaataaaatagaactactacatgatccagcaatttcacttctgggtatatatccaaaggaaaagaaatcagtatcttaaagaggtattggcatccccatttcattgcaggattattcatgatagccaagacacagaaacaaactaattgtccatcaatagatgaatgaataaa

SEQ ID NO: 830770 - DNA, 524 bp, Homo sapiens
tcatgggagatgtagttttctggcatcatttagcagcaggaatgagatctgttgggcctcaaatctgggacaaggactcctgggtcctggagtaggtttggggctagtgtaacacccaagttctggggaatcagtgggctggacatctggacacctggatcacaggagaactggggactgcagacttaggcatcctggtctgagaaaaaaggggctggagggtgggagtttgggttctcaggaaaaggagctgaaacctggaattcttccatctgggtccttatgaactttttaatatttatttatttatttatcttattttgttttttttctgagatggagtctcgctctgtcaccaggcccaagtgcagtggcacaatctcggctccctgcaacctccgtctcctgggttcaagcgattctcctgccttagcctcccgagtwgctgggactacagacaagcgccaccacacccgtttgtttgtttgattgcttgtttgtttgttttgagacagagtttcact

SEQ ID NO: 830771 - DNA, 551 bp, Homo sapiens
gggacccaggcgttccgaccccttactcaccggctgggrgctgcgcgtcaccccgggggcaggagcgccggttcggtctgccagaagcgatcacaggtccggacggttagggaggccagcgcgttcatctcaccctcaggcgtcgggctccgagtaactcagagtatctccggctgcctcaagtgccgtggcgacaagcgggcgcggggtcgtgcagcgtcttgcataagatcaacaactgggatgggaaccgataagagcagcgaacacaatggccactaggcttttatagcctaccgcgcccggcgtgctgacgtcacgaagagaggcggggtttcgagaccgcaacccgaagggtgggaagtggaagtaagacaggacttctcgcggagattccagcttttgcaacgtcacggcggagtttccgagcgtgaccacgcccctccaacaaacgaactgtcaatcaaatgcgtggccctgcttcaacagcgagccagttctctctcagctcagggtcaatgccttcccaccccaatttatttatttattta

SEQ ID NO: 830772 - DNA, 636 bp, Homo sapiens
aaggacaaatatctcctcggcaccgtgttgcccaggagttagagaccagcccggggcaacatggtgaaaccccatctctacaaaaatacaaaaattagctgggtgtggtggcatacacctgtagtcctagctattcatacttggaaggctgaggtgggaggattgcttgagcccaggaggtcaaggctgcggttgattgccccactgtcttcattctgggtgacagagcaagactctgtatcaaaaaagaaagaaagaaagagagacataatatatgtggagtaactggaacctttatacacttctggtgggaatgtaaaatggtacagctgctttggaaaacatcttggcaggttctcaaaaggttaaggaaagacccaggaattccactcctagatatatgcccaagagaaatggaaacatatgttacacaaagacctgtacataaatgttcataggagcattattcataatagtccagagtggaaacaatttaaatgtccatcaactgatgaatggataaataaaatacatggtrtgcccatacaatgaaatattattcaacaataataaggaatggggtactaggctgagtgtggtttctcatgcctgtaatcccagcactttgggagcccg

SEQ ID NO: 830773 - DNA, 529 bp, Homo sapiens
gcatttaaatttagatttctaatttaaaaaattagaaacgaatatcctcagcacagaaataagtaaaatcsccattgtcaagaatatacttttggtgatcatttcttttttaaaaactggcctgtcgagtcaaagggatcatttctataggtcattactagagaagtttctctgaatgtgtaaagaactaaaaaataagaatcaacttaaaaaatgtaaaaacccattgtctagccatacaatggaacaccatgtagtagttataaggcatgaagtacatctatacacggtaatatggacctccgtattaccaagacatacgtctctccacgacacacttttaagtaaaacaggcaatttgcagaataattcaatatgttatttctatgaaaaatatacatgcacagtatgaccatgtgtcttccaaagagataatctatttttacgttaaagagtacaaaaggaggtggattgtcaaaggagacctcacctttctctgtaacactttactctttcacaggtaatacat

SEQ ID NO: 830774 - DNA, 585 bp, Homo sapiens
atctattcctccgaagacatacattccaaatagagcctgattaaccaaatcaacagaatcacatagctacattatactctattgctctcaccatgkttataacctcccttacatagctctggtatatgttagaaggctctatgaacacaggtacttcatcttttacaaggatattattgactttattttatggcactgtattttatgaggagctttgtaagacatttctttctgatttaaaaatcatacatggctgtgcttttcctgaacagtttaagttttaatagatgtcatgtattgttagcgtcttgaaagcttcaagtcctacttatagcagacttaaaggtctctatgtatgcatttcctcatgttccctttattcttttctctaggcttattttaccttttactttctcacttacttttgtgatcattcttgcatgattttatgcattcttgggagtcctcttaactttaaaaaattgaacaatgtagaacatgaataagtaaataaaatgaaactgaaaatagtacattgatttatataaaactattatctgtctaagatagtcattacttttagga

SEQ ID NO: 830775 - DNA, 642 bp, Homo sapiens
agatacttttcacttaaagattttagtcactttcagcattaagtggtctaactggcagtcttcctccaatgaaaaaatgttatcagaggtggtttgtaaataggtatgtggttgtgagttaaaaatcagaggaaaaataaagttaatttagatcaagaactgaagcccttcttttatccctcaaatctctactgttagcccttctagaggtttagaaatataaattctcaataaggtagtatgacttaagtattctgaattagtaatatggcagattgatttgttaaaaataatcattttcttgaataagccttgtttcatttgatggtcttagaaaaagcatcataaacatcctttagcatttacaatttgctgtaaaggagagtatggtccttattttattgaaagacgtacaaccatcccacacgagattcacttctcactactggggcctcttagtgggagaggggttgaggagagggtgtgatagggaaagattctcaggtacagaaatacacaaatacagattctaaggctaactagacagcacaggtcagaatggggtctccatstaacttcactgctctgctcttcagttcccctcatccagagaatgaggatgatacgcgtacttcagagaat

SEQ ID NO: 830776 - DNA, 601 bp, Homo sapiens
ttttccaatggaccacaaagttatcagtatctgatagcaagcaatggttcttttatcatttctaaaacaactcgggaggatgcaggaaaatatcgctgtgcagctaggaataaagttggctatattgagaaattagtcatattagaaattggccagaagccagttattcttacctatgcaccagggacagtaaaaggcatcagtggagaatctctatcactgcattgtgtgtctgatggaatccctaagccaaatatcaaatggactatgccaagtggttatgtagtagacaggcctcaaattaatgggaaatacatattgcatgacaatggcaccttagtcattaaagaagcaacagcttatgacagaggaaactatatctgtaaggctcaaaatagtgttggtcatacactgattactgttccagtaatgattgtagcctaccctccccgaattacaaatcgtccacccaggagtattgtcaccaggacaggggcagcctttcagctccactgtgtggccttgggagttcccaagccagaaatcacrtgggagatgcctgaccactcccttctctcaacggcaagtaaagagaggacac

SEQ ID NO: 830777 - DNA, 559 bp, Homo sapiens
agctccccgcaagattttccgcttgcgaagagcgcacatgcgcagagcgtcgtggctctttggtttagactgttggttctactagtagcggggtttggcttggggccttyaagatgttttgagtggcgtcgggaggctgccctatcagcgggctgatagatactacagagctggaagctcagaaaggaaccctatccaacggtcctagatgggaaacgtctcctgtcgaggacaccaggcttgctgcatcacctgcaatcccgccgaccgcgtgacagttttaacctgtactggaaatgctcccaagatctgacattaatctcgcctgtataacctggaatggtatcggacattccccgctctagatctatatgcctgattaacgaaatactgaattatcttggccccctcctcgtgctatatgcgaaaataaatttcagtaaaaaaagatttcaacggaagaatacaactgagaggattaaataaattttaggagaatattatataatccggggacagaagggactttcttaaccaagatttcaaaaccccaacatca

SEQ ID NO: 830778 - DNA, 554 bp, Homo sapiens
ttttcatcagtggccattcatcattttgcttttaggaasctggaagaaattgtcttctttgagtttcaaatgttctggtaaatcacatcatttcttagcttcctcaatatcaccgtgaattgctgaaacaagtgactctaaagaatccgagaagtttttttctgattagtaatttcctttatgaggtagtcaacgatagtcacattgaggattttcccacagaagtcctagttcactgcagcctcaaactcctgtgcccatgagatcctactacctcagcctcccaaagagtagctaggactaatggcgaaccaccacacctggcttttttttttttttgtacgaacaggatcttgctaggttgcccatgctggtctcaaactcctggcttcaagtgatcctcctcccttggcctttcaaagtgctgggatgacaggtatgagccactgtgcccagccagaagtcctctttaaaggcatgcatggtaggagtttttgtggattttttgggtatttttgcagtatggattccaccctatgttcaccaccatctta

SEQ ID NO: 830779 - DNA, 614 bp, Homo sapiens
tgggatgagccctgctctgtaccacatgttgtgtgcagccctgagaacaccctatcaacgagagctcatgggctgctttggggcacagaagacaccttgtaaacaacaaatcagtagacactttgggaaagaataagcactatggagaaaataagctgggtgatttgacacagagtacccggagggtgttttatttttatttatttatttaattattttgagatggagtctcactctgttgcccaggctggagtgcagcggcacagtcttggcttactgcaacctccgcctcctgggttcaagcaattctcctgcctcagcctcccaagtagctgagattacaggcgttcgccaccacacctggccaattcttactattttcagtagagatggggtttcaccatgttggtcaggcaggtctcgaactcctgacctcaaatgatcctcctgcctctgcctcccaaagtgcctggattacaggtgtgagccaccgcacctggccaaaggagagcattttagattgtgtggccagaggaggtcctggtgggaaagtgttacctcatctgaaatctgtacwacaagctgggccagggggcagagggaataaggagtac

SEQ ID NO: 830780 - DNA, 605 bp, Homo sapiens
ctattaaagtcccattgtaactgagtacccccatttttctaagaggaagagagtgaattattttttaaattaatttcttctctctttccttgttctcycctgttttccacttcccacttagctctttagaaatgcaattataacctttactttcccttcaccagacactggctacatggcaagcttacctaactatgggcttacttagaagctccagaactgaaactctctctgcccaggagattgcctcagctgatggcagtcaatttacatcctcaaggatgcccatgacagtactccatcccacctggagagtatctcagattatggccactttaaaacctagcactacctgtggtgatgccagctggaccacctggtagataaggcactgaagtgagtcatataggccccgcatctgcttgcttcctcccctgcatgccattcatgccaagttcccctttaaaagctgctgcattctgcccccaaaatgaagtggtacccttaaaggcaggagcctgtactgcttcccctaagctaagctttggaataaagtaatttataccagacgccactcttgttaatggagttaacaagtggtgagt

SEQ ID NO: 830781 - DNA, 626 bp, Homo sapiens
tgccagtaaaaatgcatttttwaaagggattttccattaagccagacttgctaacaagattcataccaggctggactgggtagcttatgcctgatatcccaacactttgggaggccaagacaggtggactacttgagctcaggagttcgagaccagcctggggaatgtggtgaaaccctgtctctataaaaactaccaccctgggtgtggtggcgcatgcctgtagtcccagctactcgaggggctgagctgagaggatcacttgagcctgggagtttgaggctacagtgagctgtgatcatgccacagcactccagcctgggaaacagagcatgaccctgtctcagcaacaacaaccacaaaaaaaaaaaaaagattcataccaggtgcttctgtctgtagtaggaccataaagggaaataaccttcaaaagaagtccgagtagaccctaagccaattaaagtatctgatctgaaatgttcatttttcccagctcagtactatttaacagattacattttgtattatgtctacataatatgacccaggaaagaaatactgaaaaaggcaaacttgttgtaaacttgtactttaaggaaaatgattagactcttgcaccagccttt

SEQ ID NO: 830782 - DNA, 601 bp, Homo sapiens
ttttagagacaaggtcttactttgttgaccagactggtctcaaactccttgcctgctggtcttgaactcctggcctcatgtgaccctgccttgacctcccaaagtgctggagttacaggcatgagccactgtgcccaacctagaagagaggttttataatgttctcgtgacaaagaaataataaatgtttaagatgataggtatgctaattaccctgttttgattattacacaatgaatacatgtacagaaacatgttatacctcataaatatatacaattatcatatgtcagtcttaaatatttttaaagttaaatattgaaaaaaatttaatgtaataggctctctggattattcaataaatgcctttgaaacagccgatcaactatttgtaataattcataataaaaatggaatttgatttctagaaccatatgtccaaatattctaaaataaactccatatgggctgaatatccaaatgcaaaatgaaacagaaatgctaaagaatgtataagtgattrtacatattcagcagaaaacataaagaaaaatattgacagattttttttttaattcaggacattaaaaacatcctaaac

SEQ ID NO: 830783 - DNA, 518 bp, Homo sapiens
taaaatatcttagtttctcaatagtattggagctcctgacgtttctcacgttacratgatataatgaaaataattctgaagtggtcatattggctaaatgtgacaatgcagtttatgacagtgattctcccattggcttgaacatttgttggttatgtaactttgggaaactcagatcttaacttgctcataaacataaaaacttgtgtttatacattgatttgaaagtacactctgtaatgaattaatactttcacatatattgaatcacttgattagctcaacatacaaatgagtgcatattattatccccattttacatggaagaagttaaagcagtccccacttaaattagaatcaaacactcacttttttttgtcttttagcactagcagttttactggagtctattgtggtctcttttagcttcagttgagacttaggtaaaataacaaggcttcggatttgaaatcttgtgtttttctacttctctaggctgcctcccttgtaaaggaagg

SEQ ID NO: 830784 - DNA, 587 bp, Homo sapiens
attgatatacaatagatgccataactaggttcatcaatagttttacttatagttgattgaagaactaaaatatacactttccaaacaaaaacattacaccttgcaatttgcattctagtttgcagttgtaaattttaaatgcaaataacatttcaagttatcctatacaatgacaaaatcaaagaaactcgaattctatttagctctataatcaatgtgctatcattacttttattccaacacctaaatgtaggaatgtgtaataccaatggtattggagacacagaaatgcaaccaaaataattccaaactgttatggatttactcttaaaaggagtcatatagctgaattctcatgggactagagcaaacgtaaagctggaagttctctgaataaacttctaaatagaatgtaatgtttactatgtttatgcaataaaacattcaaaattgaaacacaatacatargagtaatactcaataggaagtgtagcaatgttttgaaacttaaaccaacaaaatacttttttagggatggatattttattactgacattttttaattgctggaaattgatgataataaa

SEQ ID NO: 830785 - DNA, 576 bp, Homo sapiens
catttattggtttacttgatggtattccataaatcccataggctttcttcaccctttttcattatttttttcttttcttctctgactggataattttaaatgatctctctttgartttgcagattcttccgcttaactgtgtgctgttgaaaccctcttttgcatttttcattccactcattgtattctttagctccagaactgctctttggttctttttaatgattttcatctctttgttcaacttctcatttttttcatatattattttcctgattccactaagttaccaatctgttattttgtagcttgctgagcttgtttaaaacaattatttttaattctttgtcaggaaatttgtagatcttcatttcttagggattcattagtggatttttttgtattcctttagtgttatcatgttttcttgatttttccagttctttgtagccttgctttgatgtgtgtgtatttgaacaaggagttacctcttccagaccttacagataggcttcagttgggaaagatcttcaccacagatgggtacaagggtgctggtcagatggggtgcagcag

SEQ ID NO: 830786 - DNA, 596 bp, Homo sapiens
atgcatgggctaaaagaagccataacccaaaccaaaagaaataagtatgattaagcaattacacaaaatagaaggtgtcamggacacaaatcaatttgaggaaatttaagaatttctctcacaacactatatttctgggaagaaaatggctttcttcctaagtcctagtaaaaaggtcaaccgttgctgtgttgctcaccttgtgctattccagttgaagaagattaatttcaatgacatgaccatttattggtgctttgcatatgtgaagtagaaatattttcttaaatattttctctaagtatgcaaagcacctttaggagagtgtgtggctataatttaacagtgacagtgtgtgctttgcacactgaccaggattaagttcatttttattaactgggttgcttgctattaaataaaccttaaattaaaccacttttgttatcaatgaaataaaccatcatcttaaaatatgattatttaccttaaaaaaaataattttattttgtgttcatgctaaggcagtctgtatgcatttggggaggaaaagattctttctggattaaaaggagccataagataatggaaaaggtctt

SEQ ID NO: 830787 - DNA, 618 bp, Homo sapiens
atgaacaatggaagttagtgtctgccagtcttcaacatttctcacctgggagtgccctaattaactaaccaattagtacagctctgtgatttgggatttctgctcagccaatgaactgcctctttaagggacatgattcaggactcagacataagtaatttaaaagtctgctcttcaggctatcttgttaaaaggtcaagtactagatttttcccacctcagaaactatgaaaaaaaatgttaaaataagaaattaatttccattgtttaatatttgcaaaactattgtcccctttgactatatagctgcctgtggctgttttcctctcggggagtgtgaggatgtcagtcctgctctatgtgaatctagctgaggaaagcatgtagaatgtagtactctggtctctaggtctcaacccaaatcagtggggatttttcttgaaataatataggtgtaatgatgagagagaaaggttatacattgacatacggccactatgtaggcaagactaatcagcctgtatggcatattacatataaaattagaacactttgtcgctggggttgactatagagagatggagacaggaamtcctgcagagattctgcagccacagg

SEQ ID NO: 830788 - DNA, 608 bp, Homo sapiens
gataggcatttgttttcagttgaaacaaacctctgtttcctcctcatttcccatcatgtgtgtctctctactattctttaaggaatgatagatgtacaccatcttttcttgagyttcatcctttggggaaaaaataaatgcattaggccatcaacaacacaacactgaaggtgtcagtactaggaaggttttccaataggtcaacaccaaaaaaaatttcaaaagccttggtgctcaagtgaaatttattgaatactgtaaagaatccttttggcaaaaagtgacgggtgtgtgcatccacacaatgtctatacttcattagtcaccacaggttactatttgtatgtggcaattaatgggcattctaagttgttaaaacagctggagtgctacctggaagagcatcttcaggatttaatgaaaaagcagtgatttatgtatcaacttatcaatgaaatcctcagtttttttaatcatacctgcactatcttttttgaataaaaaaatctgacatttctaggtataaactgacaatttataatcatgaagtcattaactcctgagaaataccagctgtgtgatcgataaaaaactccatttcaattaca

SEQ ID NO: 830789 - DNA, 634 bp, Homo sapiens
tggcccgtggatatggcattagtacctctctctaatctctttagaacactttcttgcttgattccaacaacagtcctttgaggtaggaattattatccccattttctagttggaataataaggctctgagagaagaataaggctccatctggaaaatggggataatgattcctacctgtgacaataaaagcacatcaagtgtcagaaccaggatttggacccaaatctactatgctttaaaatctgtgttcttaagcaaccacactctactttccatcagcctaagatcagcacttagagagtaccacctatttcaggcactgagctgaatatagcctagtggatctaaatgctgaggctctgatgttctgacctgacacttatttaacccttacttaagtgttaaataaatggtagccaataaaatattaacctaattggtcttctctcaccctcttcacatgcacacatgcacacatgcacacacaccattctcatcccaccactcatgagttctgttggttcaaatcctggctctgccatttgtaagcagtgcagcttrgtgagtcacttcatttcttggcaccttaggtttctcactggtgaagcagtgatcacattgcttacatctcat

SEQ ID NO: 830790 - DNA, 549 bp, Homo sapiens
tcccaatctgtaatattcatactttcaagtttcttcttattattattggtttcagaaaccatctcaatcctttgagtcaccagtgtgactttctccaaagtttcaraaatgaaccacttgagaaatacttccaagaaataagaaagtcaaacaatgtttaaaatcagtatagctgcaatttgctctgtcaagtttaagaagaaatcatgacaggtttattagtctttctgcaactttcaacaaaagaacagagagaaaaaaaataacataataaaaatatattacacatattctagaccattgcacattaaaaaaatccctatgatgttgctttacttgatcttgatacattttgttcactccctaatattttacacacgtctcatatttttcataaatcttctctaagatatataggagggaaaggcataatatttattctaaactcttctcatctcatgctcagatgagtggttacctaattttttttgcaaaacatcccacatccagcatcccacatccaataaattgagaaaaatttatttaaca

SEQ ID NO: 830791 - DNA, 571 bp, Homo sapiens
tgcagcacaggcagcagaatgcccagatctttacaygaggcacatttaccttatacaagacacaattctgttaactattaaagacttaactggattagcaattctctcaagcccacagcagagctggagcagtaaatctgaaggggtttggggggaaagaagatggagtgaaagtgctgctctctagggcctcttcatatagggaccaaaaccttcattacatctctgaagcctccaaggacaccattgcgttagagctcaaagtaataataatcttaaagatgaccctgagccatcaagcacaggtaaaattatattctttacagtctgtttcaagaggtagagaatcatacacttgagaaagcctatcatcaaaaatagtgaaaataaaattttggccatttaaagcgctaagttcagctatccgtaagttaattcatgtggaagttttattctcccaagaactcatgtaaataagatgtgataacatgctgcttataaacaaatacttccacagtcctagcaaacagattctcttaacctagtactttcatttattttatttttttaa

SEQ ID NO: 830792 - DNA, 560 bp, Homo sapiens
agtaactgtcccagctaaggggagattgagcatattgtagtcagcaacaccaattcccttatcccagagctggtgccaggaatttgcaacccactaaacgatcaccrctcttttctcctcacttgggattatggagtcctgggacattgcaaggaaattggtctgtgctcccccatctcccatgcctacaaagtaagttgggtagaaagcaagcaaagccttgaggcatggatgggctcacattgaccttgaaagcagtcagtcgtcaagagttggtagggtaaatgtgaggcagtctgccaatgtattcctagttcaatctgactggtaagagattgaggcaaagtgagttgaatttttcaggtttacaaatgaaactagcaaaaaagtaattcagcaatagatccaaagcttctttctgattcattttgtaagattaaaactattttattgactaaagagacttagagataatctaactcagctttctgttacatgggaagaaactgagggctggatagatgaacagatgtatttgaggagtccaaaggcctggagag

SEQ ID NO: 830793 - DNA, 556 bp, Homo sapiens
tttgtcagccaaagcctatttctttctaacaatgctagactggtcattcttcattcaaactatattcttcaagcttctattatgtggcaggcatgcaatacagtgcctcggatagtgcagtgaatgaggtggaagtggtcgcttccttacagatcttccggtcctaattcaaggaactgaaatatggttcagttctgataactgagcactctgataatgtaaacacatggttttaaaagaactcacagaagaggctaacccagaagtgagggtcagaaaaaaccatgaaagaagacagtaaaatctggaatcagaaaaataagtaaacattagcataatataatagagaagaaaatagggagaggcactatttccaggagagaaaactgcacagacttgttaactgtgagtgctgagacaagttatattacctctggcatggaataatcactatagaatgctcataaaaagaattagcactttgtatggttttctgggtcaaaaccaacaggctaatccycttcttacttattaagttctaatcattgtattaatt

SEQ ID NO: 830794 - DNA, 384 bp, Homo sapiens
agaaaggacttgccttctaaaaaataagacttgagctgtggacttytgagttaatgctgaaatgagttaagactttaggggactgttgggaggtatagttggttttgaaatgtgagtacgtgagatttggcaggtgccggggggaaatgatatggtttggctccgtgtccccacccaagtctcattttgattgtactcccataatccccctcatgttgtgggagggacccagtgggacataattgaattacaggtgtagttttccccatactgttctcatggtagtgaataagtctcacaagttctgatggtttgataaggggtttctgctttcgcttctctctcattctctcttggcaccaccatgtaagaagtgccttttgc

SEQ ID NO: 830795 - DNA, 419 bp, Homo sapiens
atatattttttaattatgatgaaaaaatttcaaaacctagtaaacaaaatggcatataaatttaaatgtatgcaaactggmcaagatgcaagtatgttaagaaattacagataacctccatattgtacaaattgttacagaagtcttttcagatatgtctaaaactaaatgtgttcaatgaattttcaaacaaattctcaacatgtgattggtacaccattttatttgagattttagagagagaaaacggaaaacaaatataataaatattttcaaatggaaaattaaacttgaaggtcttattttattataattaaaaagttaaaaatacttcaccaacctatgtaagttatatgattacattataccaaaaacgacctcatgacttacagccagccttaaaatttacgaatgttata

SEQ ID NO: 830796 - DNA, 556 bp, Homo sapiens
aggtgaggagaaagcgaagcaactgagaatgaaaagactgctatggctttgacaagatgagcaaatggcttctaacagcccacaaactacagacacacacacacacacacacacacacacacacacacacacamaaagcatctgcttgatgagagagttctaaaagcccaactaaatctctatctgatggtaaaagtgagcctagatatttggtaggaaaaggagaaagcactaaagaaaaaaaatgtaaaagaaaacattttgtgagttacatgatgaaaccaagatcatttatatattgtccaagttatcatgaaccaattaagcacaaaacaaacaacatgtgacacaatcccaaataagactgccatccccaagcagtgctttcagaattttagtacgaattccctaaaataatgtttagttcacaaaagacggtcaggagataggaagccccaatccccacataataatcaaagtgacaaagactgcaaaaaggatacagagaaaaaggcgcaaaggataaatccatagtagatgcgtttctttggggatg

SEQ ID NO: 830797 - DNA, 617 bp, Homo sapiens
ggtggatccaaggttctagcctattcaatctgattccaaagtctgcacccttaaccagatgacatgytgcctcatagtttttctttctgtgcccccatctccttattgaagctatactttggatagattttcaaaaaattatgaatgatcatcagaatttactttagccaggcaggccgggcatggtggctcatgtctgttatctcagcactttgggaggccaaggcgggaggatcacttaaggtcaggagttcgagaccagcctggccaatttggtgaaaccccatctctacacaaaaattagctgggcgtggtggcacaagcctgtaatcccggctactcaggaagctgaggcaggagaaatgcttgaacctgggaggcggacattgcagtgagcctagatcatgtcactgcactccagcctgggtcacagagtaagattctgtctcaaaaaaaagaatttactttagccaggcaaactggtgttggcccatgatcaaaaataagtcatcatctaaaaaagaaaattttttaaaaaatgaattataacattattctttctttttattgatttttttccttttattgattttcacctatgccatgaacattgcttt

SEQ ID NO: 830798 - DNA, 510 bp, Homo sapiens
taatggcaagacttttttctaggaagggcttcagataaaagttcaaaggaaatgaaaatcctaaagcatcagttgccaagataaaagcctcaacatcaggtaaggcatacacagcatctgagaggtaccaataaataggctctaataagccagaaccgtatcaggggagtctatggggaaagggatttatctcctttttttgttcaaaaagacaattaatcacacacctgtctactatttgctccaaaaacgcaagaggccgggacaaccccactcctatcttagtttttccttctcctgtgacccaaaagcacccttacttaagtggcagaaattaaaagaatcacgttttctccaagcatggctaatgtactttcttgcaaatgtaaaccatgtgggcagaagtgcacattaycttctaagcatttccaggtacagatgctccttagcatgggattaggtcctgtcctgataaatccatcataagttgaaaatattattaagtcaaaa

SEQ ID NO: 830799 - DNA, 649 bp, Homo sapiens
ctcccatagaagaaaactataataagcatgagaatccttcaccggcaaccaaggtatccaggttctctcatcaaaattgactagaaggctgtcgtgacccacggagagaaggaagagcagtgtggtgtggcggccaccctgagagccacacggggaaggggaacccccattggcatcaggtcagtgcccctcgagggcagagctcccagaaggagtaggcaaccatctttgctgctctccagcctccttgagtgacatctccaggcacaggagcaaatcagacgaataaggcctgaaatgaacccccaccaaattgcagcatccctacagaagagggacctgacttttgaaagaaaaacaagcagaaagtgacaacaacagcatcaacaacaacaaggcccccacaaaagccccatccaagggtcagcagcctcaaagaccaaaactagacaaactcacgaagatgagaatcaatgaaaaatgctgaaaatccaaaaggccagagtgcttgcctcttctcctccaaatgattgcaatgtctctccatcaagggcgcagaactgaatggaggatcagacggatgaaytgacagtaggcttcaaaagatgggtaataaaaaattacgatgagctaaaggaacatgttctaa

SEQ ID NO: 830800 - DNA, 644 bp, Homo sapiens
gttttggggcagaacaaaagagccaaaaaagacttccctctgcggcaccgatacyacaaacatgagatagtggcaggagtgctgagagagatctgcttccccttgagggacaggtgctttggacctgttgaagtctaagggaagagaaggagaactgagtaaaaagcccgagcactctgggctttagactgattatcagcagcaggtatctgggcagaagcaggggaactgaaagagccctctgtggggtccaacgtagaagagtctgccgaaatctgatagcaggacaggaaaacctccagacactcagatatgtaggaggtctgatcatacattcgaattacttgaagcctgtgctaaactgaatctaacaatgctcagatcatctcaactacaaatctgattgactcagtccctaaagtaatgacatgcactttcccagacatcaattaatatttactttagtaatcactgttcttctatacacaatgtttggaattgagcaaaaagttatcagacacatgagcaaacaaagaaatatgacccactgtcaagaaagaaaaaataaatcaacagagctagactttaagatggtctagatgtttaaatcatctcatagggttttagcataactatgttaagta

SEQ ID NO: 830801 - DNA, 644 bp, Homo sapiens
gttttggggcagaacaaaagagccaaaaaagacttccctctgcggcaccgatactacaaacatgagatagtggcaggagtgctgagagagatctgcttccccktgagggacaggtgctttggacctgttgaagtctaagggaagagaaggagaactgagtaaaaagcccgagcactctgggctttagactgattatcagcagcaggtatctgggcagaagcaggggaactgaaagagccctctgtggggtccaacgtagaagagtctgccgaaatctgatagcaggacaggaaaacctccagacactcagatatgtaggaggtctgatcatacattcgaattacttgaagcctgtgctaaactgaatctaacaatgctcagatcatctcaactacaaatctgattgactcagtccctaaagtaatgacatgcactttcccagacatcaattaatatttactttagtaatcactgttcttctatacacaatgtttggaattgagcaaaaagttatcagacacatgagcaaacaaagaaatatgacccactgtcaagaaagaaaaaataaatcaacagagctagactttaagatggtctagatgtttaaatcatctcatagggttttagcataactatgttaagta

SEQ ID NO: 830802 - DNA, 629 bp, Homo sapiens
atttccaatagagtgatgaccagttgatttgctgggaaatataaaagcaacttctagcttttataagaagctggccaataagcacatgctcaacaagcccaattttgatattttggggcaaggtgagaccataattatgaggacttttaaaactggcttacctacttctttagaaatgcaaggtgacatttacacaaaagcatgagacttgaggtgagacaattctatctgcatactgttaccactcacttgagtgtgtggcctctcataaggtactaaatctctctgtgctccatttacttatttgtaaaattgggagtctaatacttacataatggggttaaaatgcaaagtaaaaaccatctatgaattgtgaatttgcaatattaaatgtagttcattcatttaaaaagatatttgattttttagtgagtatttagtgagaacatactcagtctggaataagacagaagagactcagaccttggtatctgggttctgttctatagaatacayagaattatgtataatgggtttcatgggtttgttttattcccaacgtatacaaaatattttataaataacattcaagtttttaatttgtgattaattaaccaacaaccagagcc

SEQ ID NO: 830803 - DNA, 484 bp, Homo sapiens
gattgagttcaagtttgctccaggaagcccaagcgcagcaagggcaggaacaagagtaggagcccccaaagcagccggtggaacagcgccagtctgagtaagtgggttaggagtaggcaggagcccaacaccaagcagaagacctgccattgcattagctggtgccaacagagacaagccttagccttatcaggaataactccttctgcatatggtacgttatcaaagctctgtcaaggaatacagtgtttgtcagacatggtgcgacaactgctgagtctggatcatggaatttaacgagattgcgattggcaaaggtgaattatccggcgggaagaggtgtggttcgtcgatcttgcctaggaaaccgaagagagtccgcatctgctcagagctagcgcccggggagatyagtcacctattacctcgatgccgccgcctccaccgccgccaccacctccgctactgggcccgccgctagggc

SEQ ID NO: 830804 - DNA, 598 bp, Homo sapiens
tcaaattctcatttttttttaattagaaagagaagataggatttcaccttgcaagacartagagatgatgtcatctgtatttactctgttccctttcttagctttagatcacttgatgtgctcaatttatggtaggtggcagagactgggaatttaggatatttttcccccttttagttggaagagttgaggaggagagaactggccatagctcattggacatttatagactgagaacaggctggaggaaaaagagaaagctttgatacccaggaatatttattgaagagaattactttgtaaaaagatcactgaaacatgactgtttattatgtgcaaggcactgcatgcagtaacgcaatgaacattctctgaaagaagaaaccatctttgtaattcaaactctactgcagtcaagtttaatgaagtgactcttatttaagtccctattacatgatccatgtaggaaatttctgttaggatttggtactagcattaactgtgtcttctttgagaagcatcacctgtcttttccttttatagaataatactagataacatccttagacatctcccatgtgccaggcactatgcccaa

SEQ ID NO: 830805 - DNA, 581 bp, Homo sapiens
gttaacaaacttattatccaaagccagggaaattaagatgaggaatatccaagactattatacaataaaacgggatacgtgacgaaatctagatgtgagaccaggaatattgctatgtgcrtgcaaagattcaggagaagcattacagagatttgctgactaaatgatttgctgactaaagattcaggagaagcattgccaagatttgctgactaaatggtaatgagggatctcatatacataaggtgatatggtagcctttgttctcctgagcaaacaccatgccaacatgtaatcagctaaaaaaaatctgttcagacagttctacagaatctcatgatttttccattttcagtgaaactgtttttaaagtacatttaattccagtttaaagtcatcagtttaactttaatacatgctgatgttgggcagacaagattttaggagaacataatagaactccaggcacttgtctgacttaattctgccattttcacaaatttggaaaatctccatccttacagtgatggagaggcaggcaggatgccaaggaggcttgtcataccttaggtccttccagt

SEQ ID NO: 830806 - DNA, 606 bp, Homo sapiens
gagatctcagctcactgcaagctccgccttccagtttcatgccattcttttgccccagcctccccaataactgggactacaggcgcccgccaccatgcccggctaatttttttgtatttttagtagagtcggggtttcaccctgttatccaggatggtctcgatttcctgacctcgtgatccgcctgcctcggcttcccaaagtgctgggattacaggtgtacgccaccgcgcccagcctatctctttaatttttatgcctccttatgatacggaaaggacgtgctgggaagggaagagcgtggtccctttaaatgatgggggagctgaagggaagtgctgggtacaggagggtgtggtccctggctaggcccgcctctcccccccagcccaacacagacctaagtgaggacagacatttttgtattcctgccccaagtgttgcatttcccaagatcaccctggcctgccatgcccccatcctgtgcctataaaaacctcgagaccccagcgggaacacacaggcagcaggacgttgagaggggcaaatcagcagaggaacacacaagtggctggacgttaacrgggatgcagtgacaggcaccag

SEQ ID NO: 830807 - DNA, 494 bp, Homo sapiens
cacaaaccatctcttttgtgctaaaaacattcctaagtattattctgtattagtgtattgtttcctaggcacctggtataattccttcaatgggagattatttgggctcctactatgtgccaggctgtgactgagtttacagagcaatatgtagcccagtacatatctctgggtagcaatctactgggcagaaagacctgagcaatttttatgataggatggctgagccagtaataggggtgaatgcaaatgctcttggatcacaggagactgagtaattaactgcttggaggatgagactgtaaaacttttagagaggaaactattgagcaaggtctcaatgatccaacaaaacacagatggaaatctctctctctccaacttatttttcaggtggaaacattcttaawgttcaacttacttccagaattatgaaaaatggcttggggtatgtgtgtgttggggggatgtagggaggatatcaggagagtatc

SEQ ID NO: 830808 - DNA, 635 bp, Homo sapiens
gcattgcgtgacatacctatcatttatttgtggtgagaacatttaaaatctactcttttagcaattttcaagtaaataatagttattaactgtagtcaccatgttgtacaatcaatctcttgaacttattcctcctgtacaactgaattttgaatcctttgaccgatctctcccctttcctacttcccctttccctcagcccttgataaccaccattctactctctgcttcagtgagtgtgactttttaaaattccacatgtatgtgagataatgcagtattcatctttctgtgcctgttgtatttcacttgttaaacacaatttacaggaagccattggtttggaccgagctcctgcactaggcccaacagactaaacctaaatggagttattcatgctaaagttccacaccaccaagctgaaattaagttgtttagctgattctcccagaaatcaggagagatagtagtcaaatccccaaacaggctagttttacctgcagaagggagtcccctctgctttaacttttayaaggaaagtaactttgaaacacccaatctactttttgttctctgtttctgctctctgtgtctctgtttccttttctggggataaagctaacctcctttgttca

SEQ ID NO: 830809 - DNA, 583 bp, Homo sapiens
gttaacaaacttattatccaaagccagggaaattaagatgaggaatatccaagactattatacaataaaacgggatacgtgacgaaatctagatgtgagaccaggaatattgctatgtgcrtgcaaagattcaggagaagcattacagagatttgctgactaaatgatttgctgactaaagattcaggagaagcattgccaagatttgctgactaaatggtaatgagggatctcatatacataaggtgttatggtagcctttgttctcctgagcaaacaccatgccaacatgtaatcagctaaaaaaaatctgttcagacagttctacagaatctcatgatttttccattttcagtgaaactgtttttaaagtacatttaattccagtttaaagtcatcagtttaactttaatacatgctgatgttgggcagacaagattttaggagaacataatagaactccaggcacttgtctgacttaattctgccattttcacaaatttggaaaatctccatccttacagtgatggagaggcaggcaggatgccaaggaggcttgtcataccttaggtccttccagtta

SEQ ID NO: 830810 - DNA, 574 bp, Homo sapiens
gaaatgtttttcattctcaaaaaaaaaaaaawaataataatttactggtaaattataaagaaggatttagctattgactctggcaaaccttaaacattttcatgcaaaaaagaatacataggtatgcttgcactgtattttttttttttttttttttttgagacggagcctcgctctgtcgcccaggccggactgcggactgcagtggcgcaatctcggctcactgcaagctccgcttcccgggttcacgccattctcctgcctcagcctccccagtagctgggactacaggcgcccgccaccgcgcccggctaattttttgtatttttagtagagacggggtttcaccttgttagccaggatggtctcgatctcctgacctcatgatccacctgcctcggcctcccaaagtgctgggattacaggcgtgagccaccgcgcccggcctgtatttttttttttttaactgtactatggcaaactgatttgtcatgaaaaacttcctgcttttccatgactttgaggataacgtcctttagctatctgatgttaaaagaagaggctggttactgca

SEQ ID NO: 830811 - DNA, 639 bp, Homo sapiens
ccaggcccagctaatttttgtggagatggggttttgccatgtttcccaggctggtcttgaagttctgagctcaaagcaatccrcccgccttggcttcccaaagtgctgggattataggcgagagctactgtgcctagcctgcattcttttttttttttttttttgagagggagtctcgctctgtcacacaggctggagtgcaatggcaccattttggctcacttcaacctctgcctcccgagttcaagcaattttcctgcctcagccttctgagtagctgggattacaggtgcccaccaccacactcagctaatttttgtatttttaatagagacggggtttcaccatgttggtcaggctggtctctaactcctgacctaagatgattcacctgcctcggcctcccaaagtgctgggattacaggcatgagcctggccttcaagttcttaaaataaatacataaataaataaagaatacatataattcacttctggtttgaatataagaatccaagaaaccattttaagagtggtgttaacagtctacatattgtgtaaggaatcagaggaaagactaaatagtacacgtaggatgtttaaggattcacttgaaatgagttaaatgctttgcttcttac

SEQ ID NO: 830812 - DNA, 513 bp, Homo sapiens
gcaactatctgtggcaacagattgagttcaagtttgctccaggaagcccaagcgcagcaagggcaggaacaagagtaggagcccccaaagcagccggtggaacagcgccagtctgagtaagtgggttaggagtaggcaggagcccaacaccaagcagaagacctgccattgcattagctggtgccaacagagacaagccttagccttatcaggaataactccttctgcatatggtacgttatcaaagctctgtcaaggaatacagtgtttgtcagacatggtgcgacaactgctgagtctggatcatggaatttaacgagattgcgattggcaaaggtgaattatccggcgggaagaggtgtggttcgtcgatcttgcctaggaaaccgaagagagtccgcatctgctcagagctagcgcccggggagatyagtcacctattacctcgatgccgccgcctccaccgccgccaccacctccgctactgggcccgccgctagggcccggatccgc

SEQ ID NO: 830813 - DNA, 553 bp, Homo sapiens
tctataggctccccgacggggtgatcacacgtgggtccccggagactgggcaaacactccagaagcttgtctttattgattttacattcagcacaatagatgcacctggcagccttgcctaggtggagcyctgagtctgctctgagacccacttgtggctcccacaggggacccagggtgggcttattcagatggctgtgggtctcgactgggctgcatcttggagtacatgagggacagcggttaaagcttgggccagacccacacagccccagggagcttctccaaaagtcacagggactgtcaggggaactctgatggttctggaagttggtaagacgcaggctgcgcttggatcctcattgctggggggtttctcccgcggtcagtggagtggaagcaccaggcttggtgtgatcctgcaggctggggccacagtgacagcccggttgtgcatggagggggaccgccctcccctgcggccctgctggccacactgccctctgctccaggagtctctggcccctttgctctgctgttttttcctgctctg

SEQ ID NO: 830814 - DNA, 553 bp, Homo sapiens
tctataggctccccgacggggtgatcacacgtgggtccccggagactgggcaaacactccagaagcttgtctttattgattttacattcagcacaatagatgcacctggcagccttgcctaggtggagctctgagtctgctctgagacccacttgtggctcccacaggggacccagggtgggcttattcagatggctgtgggtctcgactgggctgcatcttggagtacatgagggacagcggttaaagcttgggccagacccacacagccccagggagcttctccaaaagtcacagggactgtcaggggaactctgatggttctggaagttggtaagacgcaggctgcgcttggatcctcattgctggggggtttctcccgcggtcagtggagtggaagcaccaggcttggtgtgatmctgcaggctggggccacagtgacagcccggttgtgcatggagggggaccgccctcccctgcggccctgctggccacactgccctctgctccaggagtctctggcccctttgctctgctgttttttcctgctctg

SEQ ID NO: 830815 - DNA, 601 bp, Homo sapiens
gatggttccttgcagctaatttgagccaattaattagattatagactaaatttgaaacatcatcctatgctgagaaaattctttttatgagatgatgatttaaaaatgactaccagtagctctcagatcattgatgctggaattaattatcaagggcaaaggacagtgatggattccatttctgagctgtaacaatgtcctgaatgtcattagtgtatttatcttaaggctgatgaaaaccttgtggaagcccatgtttgcaggccctgcctcgccgggtgccccttttgcatccgtccaggcactcacagacctggcggcctttgcagggtctctcaccactgcacttgccatcccaggccctggccccagcctgccctctgcaatgggggctcccaggagggggtcctaagcctctggcccagtggtgctgaggccccaggggacaggctggcaggaagcagacgggcatactgcttgtctcagggcaacagtgccagaaagggattccagatgtcacatccccctgctccagcgccctgccctccctgtggatccmctagcaccatcatgggtttcctcactcagaagcgggatgaca

SEQ ID NO: 830816 - DNA, 585 bp, Homo sapiens
tctctgttctcctttcggttgtccttggtcactccacttggtcacatggagagaattggcagctttcggaggcagtccctgagtgctctgtgatggctgaggctcccccagctrcagagctttaggggaagttcagtttatctggtggaagaaggtgaatggccctgacagcctctccccagagctcagccctgggggagtgagccgtgttcagtgggtgaggctcccccatgcagcctgacaagagctgcaagtgttctgctgatcaggaaccccgaggccggggagaagtgatctgcccaggaccccacagcagactgtgtggcagagtgtggttcccgcactgggcttctggcagcctttgctccagtcagcatgggccatgcagctgcaaatggttgtagatgccacttgtaggactgctggatgttggtatcttggcatcattcccatttgttaggagccttggagccatgttttccttgggaattgattatatgtgtccccaaactaaattaactcattgatatttgagatcttgggatcttgagtatgtgtcttatgtctcaccccaactttgttcta

SEQ ID NO: 830817 - DNA, 527 bp, Homo sapiens
ttgaaaacttcattgcatctgcaaatgtgctgtatcaatgaatatattaaattatttccaaaaatacatccatataaagaatatactatttaagcacatttattgaatatataagagaatatattaatgaagactgtacatatatatattagaataaataacataagcttgtaaacaaagaattgaccattcattgaattggccgtttggcaattgtcttgctttctttaaaggaaatatttccccataatcttattatatacattgaatctggagacatgtttctcaagccattaagcctcaatttttagtaagttgtagaaaaggttatatttgacaaaaaaaatcacaaatccccaccatgaagctatggcatataaatgatagttctgtgacctaggcatgattctaagtactttatacacattagctcacttaattctcataataactctcctaggtttgacattattgttgttattactattattattgttaytactgctgttcacagatgaacgtactga

SEQ ID NO: 830818 - DNA, 517 bp, Homo sapiens
ttcattggagaagcttccattaaatctaggaaataagacaaggacacacttgactatattgtggtgtcagtaagtgtcattccccacacaaatatactgctgtaggyaccggagaaggaagagagaatgtctaattgaaaacattgagaaaggcttgatattggccttgataaatagagtatatttttatgagatttacaagtcagtgaagcagtataagggaataggtgagttccgagaatataagaggcatttggataactatgataaggttgatgagatgacagcttaagatattaggcatatagcagaggttaagattggtaagataatttgggtcattgttgtggagggccctgcttaccaaatatagaatagattaggcattgtagaaagctgaatttttgatagcattagagttgtgctttgaaaagatacatatgataacaggatacattggaacaaggagagaccagaggcaaagagagaggtaggtagagtcttgagagttaatgca

SEQ ID NO: 830819 - DNA, 595 bp, Homo sapiens
aatgctactactagtgcctttaaactgctactatagacaagaatggttctaaacatggtatgttacatttgtcattgaatacaattcttcaaatccatagattttcaaattttaatcttgagaatcctgaagtccaagaagaagatagaatattgttaatacctggtgaagctggaattagatcagtctatttaaagtcaatcttttcactatagcacactaactgtagatatcaggaaaatacatgcatatttgtaattgctcaatttacatgtaaaaatattactttagaaagtaatttctaagaagaaagaataaagaaggagattcaggaaaaaaaaccatgtatttgactatagttattgtctctccatttctatttccatgatcatggacattaaagataagcctgagggtcaagaaattatctaggttaatagtcgttaactttggggctgcaattaaaaacagtttgtccgaggcaggcccagtttgtctacattaaaataaaattatcyatgtgtatcaaattcacgtatttaattgaaaactattggtctaatttatcttaaatgcttaagctactgttttgtct

SEQ ID NO: 830820 - DNA, 634 bp, Homo sapiens
atagtttaagtcaatggcgattcaacagatttgcagagtaagtgatgttgagtgcaatttctttttcttaacatttaattttgaatatgagatctctgttccaagttatttactgaagctaattttgaataaacaaccttgttgatctatagataatccttctcaaatagtgtcatattgccactatttcccattaggcaacaagcacaaggttaaaacaaaaacaaaacaaaaagaaacaaaaaaaaacaggtaaagtagcttgaaaagacctatgactatgattattggtaacaagaaacttatatcaaaagatttgaaaatcacaaactcaaatcaaaacaaaacaaaaaataccaacaccaccaacaacaaaatttcttacctgaccaccctttccactcaaagtaaataaagtcaaatgacagtactaaaaaactatatgactatttgggtataaaaattaatcttacccttacctttcatggtagagaataggacacaaaaactctgctgatcccaggaacatattccccartgcccatttgggatgttgctacattagaattactgagggatactttcccagtaaaagaaaagttccaaagataaagtcccttcataaagtgggatc

SEQ ID NO: 830821 - DNA, 583 bp, Homo sapiens
tctgcaggagccactaaacactctggagtctaagaatatgaagaacaggaggatatttccttatagtgcccaaataaagccagccagagggtaacacccctatattcacctttgaacttctatctttctcaacagatctggcagttcagcagcctcttctccaaaatcaagagctgggagtttaatgaagtcacctccatgtctgagcacctgaagtcctgtcctttcaacattgtagagcacaaaactgacccgattcttttgactagcatgtgtcagccccgtgagcaggcccgagagagcttagtctccacctttagaatcagaccacgaggaagatacgtctcctaaaaattcagatgccactcgatgcacccttcttggatttcttctcggagttcctgaagtaggacagagtgtgtggttttgaggactcccttctgtaaactgcctatttgcttatcgggstgtattggaacacgcaatgtccttcgaaacctcaacacgaggcctaagaatttcctaagccatgtcttgtaccatagtgccacattgatgacttgtttccttttttcttttcttt

SEQ ID NO: 830822 - DNA, 583 bp, Homo sapiens
tctgcaggagccactaaacactctggagtctaagaatatgaagaacaggaggatatttccttatagtgcccaaataaagccagccagagggtaacacccctatattcacctttgaacttctatctttctcaacagatctggcagttcagcagcctcttctccaaaatcaagagctgggagtttaatgaagtcacctccatgtctgagcacctgaagtcctgtcctttcaacattgtagagcacaaaactgacccgattcttttgactagcatgtgtcagccccgtgagcaggcccgagagagcttagtctccacctttagaatcagaccacgaggaagatacgtctcctaaaaattcagatgccactcgatgcacccttcttggatttcttctcggagttcctgaagtaggacagagtgtgtggttttgaggactcccttctgtaaactgcctatttgcttatcggggtgtattggaacacgcaatgtccttygaaacctcaacacgaggcctaagaatttcctaagccatgtcttgtaccatagtgccacattgatgacttgtttccttttttcttttcttt

SEQ ID NO: 830823 - DNA, 534 bp, Homo sapiens
tcacagcttaacaacataattatttaacattggattaattatttaacttcttttctaaaatgaggataatgatatagttattacaaaaaagtaatagaaagactgtcaatataatacttatgtaataagagacatttctttctctcttaattgtatataaagttgactcttgaacaacatgggtttgaactttgagggtccacttatacttttttttccaatggaaattatcctgagtgtgcctgcctctcctcttccccctctacctcttccacctctgccacctctgaaacagcaaaaccagcctctccttttcctcctctgcttgctccacgtgaagacaagaatgaagactttcatgaggtttcactaccagttaatgaatagcaaatatattttctcttatgattttcttaattascttttcttttctctagcttaccgtattgtaagaatactgcatatgagacatttaatatacaacacatgttagtcaactgtttatgttagcagtaacatgaacagtagctgttt

SEQ ID NO: 830824 - DNA, 634 bp, Homo sapiens
caaaatagactatgatattgtaatmtttacacacttatatatagtaacttactccttcagtcatgttatttaaaaatgtattgcttattgttgaaataattgtgaaatattacatatctgtagtatcattatatagtttgattctactgtctgtagaaactatttcctagataaatttgtcacttgatattattagagagttaatatgtttcctagtctgtgttcggatttggtaaactcttttgtgtatttgagaaaattatgtattgtggagttgttaggtgtagcatttttatgcatcaataagatgttaattatgatcagatattttacaatgatgctgaattttgtctctgttatattagtcacctatctctcatcaggatagcagattaattagtctattgcctacaaatttcaattacaatattaaaatgatttttactggagaaaagaagtttttgctgggaaattaaaacttttgtctttgtttttcctcttgatccctcatattgcctatttccttaaagaattatttgtctgatatcagtgtaattttttctttttctttttttttggacggaatgcacagtgcaggttttttcatcctggtattttaatgttttttttttta

SEQ ID NO: 830825 - DNA, 466 bp, Homo sapiens
tggcatcttcaattctatgtgatactgaatatatgcattatggcaaatactactaaaaaaagtgttttgagagagactaacaggggacctgctttaactagttggtgtggaaagccctctggacaagatgatgtgtaagtttgaagaaagagaaggccccggttgagtgaaagaggtgacaagagcatggtagaaagagaaaatagattttgtgcatgactgtgtgggggactgttggtctgtctgaggaataaatggaaggccagtgttgctggaccatagcgagcaatagggcctttcaagaagcccaattcttttagcttcttgcaaacatttattctggaaagacctttttcagatcagctgtattgaatgcatttttttctgtgtgtgtgtatcagtcatgtatgatggagtaaaagccatcaytggtctgtcactgcttgggaaaatcagtccaaatttg

SEQ ID NO: 830826 - DNA, 518 bp, Homo sapiens
ggaataagttaggactacttctttccttgaggtagatataaccctggctccagttttcattaacttactaaaagaagctcatcatctgcagatgataacaatgccaaaatgyttaaaagagagagagagacaagcataagtaagagatgaagaaatagagatataacttcatgaaattttcctggaatttctggtttggggaactaataaatttctgttttcctgaagttaacttgagtttccaccacttgttcaaggaaggtcatgacaaataaaataatcattagtagtgctttaacacaccccagaatacctagtggaaacaaggggtgattaatcgtcaattattatatgtttacatgaaagtacatcattatagatatgaataaaattcaacactgctgttggaataagcagaaaatcttgttcagagtgcactttcaattcatagttgcttccacgttaagcctaagaacattactttaggaacaaggagatagtagtaagttcatatatgc

SEQ ID NO: 830827 - DNA, 531 bp, Homo sapiens
ctgtctttttcacagctgtcttcagtgtatgtaaactatactgcctggcctatagcagatgccagataatgaaggggtgaatgaatgaaggcatggactgctacataaaacctgctgctgttagcagatcagaaagctccataaaatatagcatttattgggcacttagtacacactataagtattattatgggattaaacatttttatctcatttcatattcacaacaacctaataagttaggttctaatattaacctcataattacagatgggtaaattgaggcccagtgacaaagctagatctgaatccaggtgatgtatagatggccaacttttgactgataaaccaaatgttcttctccccctctacacacacacacacacacacacacacacacacacacacacactgttttccagcttaattgtttattcatgatactcttgaytctatggctatggacaggcttagggtaaaaacaagggtccaaaaagaagtttgtttgaaggaaacttcacgtactattca

SEQ ID NO: 830828 - DNA, 604 bp, Homo sapiens
ttaggatccctcctcagactagcaggcctaacagaggctattcccgaagctagaatatggggagcctcagaaattatagactccaaaattggaggatatccytcctattcatatgtaaagtgaggacaaaaagcatcactcttccaaccctggagatcccttccctccctcaggatgtggcccttcactccattttgaggcatatcatgtttacaggacaagggtaaattcccaataccaacaggagaaaatgcttatgactctaactaacaggttttcgagactgcgtcggtaaaagccactaaatcccacctttctcggtcctctttgtggtctaagaggaaaggcaatgatgcaggtttttgagaatgtgtcagtaagggccactaaatctgaccttcctcggtcctctttgtggcctagaaggaaaacaagtgtttctgctgctgctttggtgagcacaactatccctaacagcagggtccagggaccattgtagggtcttgggtgggggaaaaaaacaggccaaaactgcaagaatttttttttctttctgttttagatgggaaacactcaggtatcaacaagctcacccctgaaatgc

SEQ ID NO: 830829 - DNA, 605 bp, Homo sapiens
ggtgcttcaaatatgcacatgtgtgaccctcaaccctgytacttttctcccagaggatgtggaaccaatagagcatgactgccaacaaattgtggcccagacttatgccacccgagaggatctcttagaagtccccttagctaatcctgaccttaacctatataccagtggaagtttatttgtggagaatgggatatgaagagcaggttatgccatagttagtgatgtaactacttgaaagtaggccacttcccgcagggaccagcacccagatagcagaactagtggcgcttacccaagccttagaaccgggaaaggaaaaaagaataaatgtgtatacaggtagcaagcatgcttatctaatcctacatgtccatgctgtgatatggaaagaaagggagttcctttacagaaaggggaacccccattaaataccacaaggatatcatggagttattgcacacagtgcaaaatcccaaggaggtggcaattttacagtgccaaagccatcaaaaagttgaaggagaaaaagcagaaggaaactgttggacagatgctgaggccaaaattgcttccgggggaacttcccattagaaatacctatg

SEQ ID NO: 830830 - DNA, 623 bp, Homo sapiens
gtaaaatattacagagcataattacttatacataaaatatcccacaatatggtaacaccttgtctttgtttacaattattatgaaatttttcatctatgaaaactgcattcacgttatgttgattttttwaaaattgatagggcaagtgtgtggtcaataagttctgatgttatagtcctttgggctgctttactcctaaagaaaacaagcagcctcatattttgtgtttgacaaaattttaattgatattctttaaatgaattaagttggggaagtaccataaactctagaccactctttgaaattcacaatgacacttgcctattaaaacatctgcaaagttctgcaataactcccatttaccaaatgcttattagacagtaccaggcactgcattagctgccttacatgtctgataatcacaacctacaaagtttacattagctttgctttgcaggagaggaaacagattggtgagttaatttcctacatattaacctgtgtgttaatacctacatattaacaagttagggagatctagaattataagtgtctaacatcaatgtccatgttctttctacaatgtgtttccatgcatgaaaactaaataattcataatttg

SEQ ID NO: 830831 - DNA, 550 bp, Homo sapiens
aggatgttgcaaacttcagtggttatgcagggattctcacagagcaagctttggtacctagttagtctagcatttgttagccaatgatgtcctttggtactcattaaagtcaccacagcacggggggcctttatgtttatgttttgcccaagagttagcttatccacttcttgtgctagcagggctgttgctgccaaggccctcaaacatgggggccaacccttagaaaccctgtctagttgtttagagaggtaggccaccggccttggccaggaccccacagtctgggtcaaaactccaaacgccaatttttctctctctgacacatacagcataaaaggttttgtcagatcaggtaaccccaggactgaggctgacatgagtttttcttttaactcatgaaaagctcgttgctgttgggaccctcatttgaaaggttacttgtctccccgctttgtgactccatacaggggcttagccartactgcaaagtttgggatccacaacctgcagaaccctacagctcctaagaattctttcacctgcattc

SEQ ID NO: 830832 - DNA, 629 bp, Homo sapiens
gctcccatcgcacaggctggagtgcagtggcataatcacggctcactgaagtcctgacttcctgagctcaggtgattctccagcctcaggctcccaagtagctgggaccaagaggcgtgcgctaccacgcctggctaatttttgtattttttgtggaaatgggttttcaccatgttgcccaggctggtcttgaactccagggctcaagagatctgctcaccttgacctcccaaggtgctgggatggcaggtgtgagccactgcacctggcctcttccttttttgaggacatcagtcccatcataggggctccacccacatgatgtcatctaaaccgagttacctcccaaaggctccatttccaaataccatcactgggattaggaattgggatttcaacatataagttttgggggaacataaacatttagttcatcgctgacaacattgcagagcagttgaattaatggcagcaatagctgtattctggaatttttcttatgtgagaaaaataaaccaatagttgtttaacccacacttattgtttctttcagccagtcttattctgactgttaamaatcatcattattatcaaaatcttcagcattattatcatgctagtcattatta

SEQ ID NO: 830833 - DNA, 470 bp, Homo sapiens
ctccacatgttcttggctccatgtacctataaaaaggggaaatattctgtattccagccttagccttccaacctagatccagattcacttcaacttggccaacagctactgagaaactgccaggcatggarctaggtactaaggagatgggggaagacaaaacacctccccaaagaaaaccgtgactgtctttctcagccctgggtacccatgctgccccgcaggcctcccttcaatctgtgcttgcacaattctagatgggcgttctccagcggggtctggtggtgtgcactctgctgctccatttgctgtccagttgtttgctaggtgtgttctggttttctgtaatggtgcagaattcagggcaggagttcataacttttttgctgctggggatccctttggcagaatgatgaaacctatggatcccttctcagagcaatgtttttaaatgcaaaatcctagtttta

SEQ ID NO: 830834 - DNA, 640 bp, Homo sapiens
ctctaagtggatattactatttttctcattctacagctgaggagagaccaagctagtaaaggctgctcaagatcactaagccagcagtggggaatattgtgaaataytgaaatattttattatttcatagagacagggtcttgttatactgcccaggctggtctcaaattcctggccataagcgattctcccacctcaacctctcaaagtgctgggattacaggcatgagccacctggccgaatccaggtcttttgacaccaagtgccctattcatccctttgccctcccctaatctctgggcagatttgagtgaggcgataggctgggggatatggcattgggatactggggttgcacctgaggagaagccaacagcaccagggtcagaatgggcaaaggacataagcacaggcaaggccattcctggtggggctgggccagggagctgaggggctcctagaagggccaggttccccgacttctctgagcttcagcgcctggaggtttctgggcagccacacgcttctcagcgctgacccttcctcttcctttatccttggaaaataacccctagggcacaaacccaaccgaagcaatgatactaagtgtcagggcattcctcgactctcccacccctg

SEQ ID NO: 830835 - DNA, 586 bp, Homo sapiens
gtgggtggccccctagttcactctccgcgctgcccttttacacattgtggtgggcatagttgctttgtctagccaggaccccttccccctcttctagtaatgcaaagctcccccacctccactcctgccacgccccacttcttttcaggaactgttcctcctaagatcacaggacctctgtccaggcacacagggttcacaatgggccagccttggccaatcacaagtccctttgtttcctccttgctgaggcatattgtacatacaataaaatgcaaaatgtgctttaatggggaatgtacaacctgatgagtttttttatttttatttttatttattttttttgagatggagtttcactcttgttgcccaggctgaagtgcaatggcacgatctcggctcactgcaacctccgctgcccaggttcaagcgattctcccgcctcagcctcctgagtagctgggactacaggcatgcgccaccacrccgggctaattttgtatttttagtagagacggggtttctccgtgttggtcaggcaactcccgacctcaggtgatccacccgcctcagcctcccaaagtgc

SEQ ID NO: 830836 - DNA, 634 bp, Homo sapiens
catgtggcctggtgagactttgttgcctgtccttaatgagactccctgctgtatccctacagcaaacttgcctttatttcagctagcttctgagggtttccttttctgtaactcagcaatatgtaatagataggcctgatcctcagcctttatggacaagaccgctgaagacggcgaagccacactgttggctagttctagaacccaatttgccttgttcttagttttgttctattacccagtctatgttgtttttttttttaaatttgagacggagtctcactctgtcatccaggctggagagcggtgacacaatctcagctcagtgcaacctccacctaccgggttcaagcgattttcctgcctcagcctcccaagtagctgggtctacagaagcgtaccacctcaccccactaattattgtatttttagtagaggcggggtttcactatattggccaggctggtgttgaactcctgacctcaagtaatctgcccacctcgcastctatgtattattgagcactgaaaaagttagatctcaaaatagtaagcaatattccagcattggttttgcttatcatgaaaactgtaagttaaaccaagtttgttcccacataaaaacacacctgata

SEQ ID NO: 830837 - DNA, 603 bp, Homo sapiens
tagggatgggcaaagacttcacgactaaaacaccaaaagcaatggcaacaaaagccagaattgacaaatgggatttgattaaactaaagagcttctgcacagcaaaagaaactatcatcagagtgaacaggcaacctacagaatgtgagaaaatttttgcaatctgtccatctgccaaaggtctaatatccagaatctacaaagaacttaaacaaatttataagaaaaaaaaaaaccacatcaaaaagtgggtgaaggatatgaacaggcacttttggaatgaagacatttatatggccaacaaacgtgaaaaaaagctcatcatcagtagtcattagagaagtgcaaatcaaaaccacaattaggtactatgtcacaccatttagaatggtgatcattaaacagtcaggaaacagatgctggagaggatgtggagaaataggaactgttttacactgttggtgggtgtgtaaattagttcaaccattgtggaagacagtgtggcgatttcctcaaggatctataaccgacataccatttgacccagtaatcccattacygggtatacacccaaaggattatgaatcattctactataaagac

SEQ ID NO: 830838 - DNA, 658 bp, Homo sapiens
ctgtatgtccatgcatacgcaaatttgtgtatcagcaaaagtagttcctattgcatagacctattgcatagttttactatggaccaagktcttatttgtaaaaaaaaaaaaaaaaaaaaaagcaaaacagaattaaaaggcatatctctgggcattcaattgagactaccaaaatgacaaaaagaaaggctagattctatagaaagggagatttgtttacaactaaagtatttcaaaagtttaccaaataaaaatagtaacttttaaggttaatatgggttaaagaattattgggacaagtagcctgagtgataagacataatttaatttgcaaatgtttctatcaaataatgatctcactccactacttccttctaaatcacaggaggaattaagaaacaatgtgagatctaattacaatgcccaatatttgtataacagtttatggtttacaaagttctttttcttttcttttttttttttttttttgagatggcgtctcactctatcgcccagggtggagttcagtggtgtgatctcggctcacttccacctctgtcgcccaggttcaagcaattcccctgcctcagcctcccgagtagctgggattacaggcacctggcactgcacccagctgatttttgtatctttagtagag

SEQ ID NO: 830839 - DNA, 613 bp, Homo sapiens
tttactgttcttttttttttttttttttctagcamccaccaaaataacaaacaaattcaaaaccaacctaagggtaggatatgtgcttcactcagggtgttctataaggggacaaagagagaagcctttccccctcctcctccactcctgcactctctacctggtcttgcctccataatatcttagtagctaaaacaggacccagcatgactttcccagcccattcagcaccatgactctccagaggccctgatatgcaaaatttcccaggcagcagaagtgctcgggattctggaaacagccagtcctggggatcccagtgtacagctggggatgtgggggaccagttagcatctggccaccactgagtgtagaaggggaggcactcctatgagtgtcccaccctgggctgctcacggggctgcggacaaagccaattcccaggttctaggacatccttccctaaaggagagacctcaggctagtgtgggaagatgtatagggaacacaaagaaggtgcaggctaatctcccattccagctcctctgcctactctgctccactgtctcaccacacctttctacgtgaagatagaactgattttaaagaacgg

SEQ ID NO: 830840 - DNA, 642 bp, Homo sapiens
ttatgctaaacatattcaatattttgttagagtgatggcttcctttagcagtgttggagactgcatacaagaagcatttaattataaatgccataatttgctcaattgatgcttgtcttttatgtgtaaaccatagataattttctctaaataaatgtaaccatgaaaataatatttaaaacaggaaaataaaaaaatgtatttgcttgatataaaacgaaaactgcatagtcaaaactaactgccttagtgacaaataagcagctcttaacttcaaattgcaaaggtatcatctgttcatttaggagccatttcccagataagaattagagaatgtatttttataaaaaatatccggattttgttttcaaggggaagctgattttaaagtaatactagaattgtgctgtgtgtatttgtaatgattttcagcaagccgttacacaatacaaccaatgacacctgattttatgcacaatgaattaataaggagtataaatttcattttgctttccatgttagattttattccaragacagaacttattgtctcaaatggcgttccctaataaaaagataacagaagtggagaatatttggaaatgtaaaccctcctttctttttatcatcagtgagtccatg

SEQ ID NO: 830841 - DNA, 642 bp, Homo sapiens
ttatgctaaacatattcaatattttgttagagtgatggcttcctttagcagtgttggagactgcatacaagaagcatttaattataaatgccataatttgctcaattgatgcttgtcttttatgtgtaaaccatagataattttctctaaataaatgtaaccatgaaaataatatttaaaacaggaaaataaaaaaatgtatttgcttgatataaaacgaaaactgcatagtcaaaactaactgccttagtgacaaataagcagctcttaacttcaaattgcaaaggtatcatctgttcatttaggagccatttcccagataagaattagagaatgtatttttataaaaaatatccggattttgttttcaaggggaagctgattttaaagtaatactagaattgtgctgtgtgtatttgtaatgattttcagcaagccgttacacaatacaaccaatgacacctgattttatgcacaatgaattaataaggagtataaatttcattttgctttccatgttagattttattccagagacagaactyattgtctcaaatggcgttccctaataaaaagataacagaagtggagaatatttggaaatgtaaaccctcctttctttttatcatcagtgagtccatg

SEQ ID NO: 830842 - DNA, 504 bp, Homo sapiens
catgatgcatgcacaagcatcaatagctgatttgatcaagtggaagaaaggataacagtgatggaagatcaaattaatgaaataaagcaagaagacaagattagagaaaaaagagtgaaaagaaatgaacaaagcctccaagaaatatggaactatgtgaaaagaccaaatatacatttgattggtgtaccagaaagtgacagggagaaaggaccaagttagaaaacactcttcaggatattatctaggagaacttcccgaatctagcaaggcaggccaacattcaaattcaggaaatacagagaacaccacaaagatactcctcaagaagagcaaccccaagacacataatcatcagattcaacaaggttgaaatgaaggaaaaaatgttaagggcagccagagagaaaggttgggttacccacaaagggaagcccattagactaacagtggatctcttggcagaaacattacargcaagaagagagtgggggccgatattca

SEQ ID NO: 830843 - DNA, 483 bp, Homo sapiens
gtaggtctctaagaacttgctttatgaatctgggtgctcctctattgagtgcatatatatttagaatagttagctctttttgttgcattgatccttttaccatyatgtaatgcccgtctttgtctctcttgatctttgttggtttaaagtctgttttatcagagactaggattgcaacccctgcttttttttttgctttccatttgcttggtaaatattcccccatccctttattttgagcctatgtgtgtctttgcacatgagatgggtctcctgaatacagcacaccaatgggtcttgactctttttccaatttgtcagtctgtatcttttaattgggtcatttagcccatttacatttaaggttaatattgttatgtgtgaatttgatcctgtcattatgatgctagctggttattttgcccattagttgatgtagtttcttcatagtgtcaatggtctttacaatttggtatgtttttg

SEQ ID NO: 830844 - DNA, 609 bp, Homo sapiens
tgtcataaagtagtgattgatttattttgctgaaattcgtagttcaggtcatctgtgctggatttgctatcacatatatggccaaggcataaattgtgctrtaaaattatccattcgttttttttcattatctatgtcatttttcattgtggactgtttaataatatattagcctcaatactttttcccatttataaaaccaagccttttcattcctaaaagcacacgcatattatttttgtgccttaatctttttttttttttttttggtgagttttgagctctgtgtgatccctgcatagttcatttgctccactcccctaaacgaggtctgtttttcctgtttcaccttctccctctctggaatggccttaggaaaaacactttccagtcctgttttaactcttttccatttcttaatctggattgctttatatttacttaatctgtctgcacatgtgatatcccaaatattataaagaaaatgatgtgtttttacttggcttttggcagttcctcaacatttgggttagactaattaatgatgtgatacacttctgtaataccaggaaaaaatttttataaagagagccattttgtttatatata

SEQ ID NO: 830845 - DNA, 621 bp, Homo sapiens
taccaaagggccagtgtttgctggggatgtaagttcttcagtgagattgatggagcagttggtggacatccttgatgcacagctgcaggaactgaaacctagtgaaaaagattcagctggacggagttataacaaggtagagagaactcttctgttattttgaattagacacttggtatggcagctctttcttgtcttatagcagttgagagccaaatctttggccccgggacatatacttagaagcaaaatttctaatttggttcatttttccaaggaagaattacagttgagaaaagagcaatgtgccctgccctcccaaaagagtgtaaatgatgttaattacctgagagagatcttagttggtggcaaactttatctatctgattgtggtcaatactgtaagtttataatgcattatctgcacttggagagattatatgttatacagttgatatactttatatgctaatacatggaactcttatagttgcagcaaaattttgacacatataggaatattagmcactgacatatttctttcaatggcagcttttggaagaaggacaagttgccgtctccaggaatatattgttatcagtgccattaatttttcctatt

SEQ ID NO: 830846 - DNA, 616 bp, Homo sapiens
tctatgaacaagtaatccaatatgctggatcattccttttgattttactttttactacttttacagtgtgaaaattggaacatgactctttaataacatatacctcttagattttgacctttggtttctctgacctctaatttttattttagaactattttttattcgagactttcctttgcctgcattatctatgaagatcttgttgtcaatgatgaataaatattgagtatttattaagagactaaaatgtatatcagaaaacctcattaattctatgtggacccagaatacattttcttttgctttccataatcgatatttccaggtataatatgcggatactataaaaaaagtttggagtatttgtagaataatggtgaagatacttaggagtaaaccttatagcaatttagaataattcaattcatacagaatcctcattacaaattatctttaggggcacctgggtaaggagcgtcagatactctgaggaaccagatgccacatctaagaaggatattcagggttcaaaagccaagccaatatgtatatgtcatcacttagttctgaagagtaagcattaggatcckagctgtaagcaaggcaagagttc

SEQ ID NO: 830847 - DNA, 631 bp, Homo sapiens
agaatgcctaaaatgaaaaagactgatcaaatcaaatgttgccaagaatgtggaggaaatggactctcatacattgctggtggaaatgcagaatggtacaaccacttcgaaaaacagtctgactgtyacttaaaaagttaaatatacacttaccatatgatccaaccatactcttaggttttcacccaagagaaataaaagcctatgtctaaacaaagactttgtacacgaatgttcatagcagctttaattttaatcgccacaactggcgataacccaaacatccatctacagataagcaaattgtgtctatgcattgtaatactactcagcaataacaaagaaataactattgatgcacacaacatagataaataactataatattcataaaaacaattatgtgagtaaaataagccagagaaaacagagtccatactgcatggttccatttatgtaaaactctggaaaatgcaaactcatctacagtgacagcaaatcaatgattttctgaggataggaacaagggatataaggattggacaggggagggagataacaaagggttgcaaggaagcttttgaagatgagggatatgttcattatgcaccatgtttcttggttgtatatc

SEQ ID NO: 830848 - DNA, 579 bp, Homo sapiens
cggagtttgttccttctgatgttcagacgtgttcggagtttcttccttctggtgggttcgtggtctcgctggcttcaggagtgaagctgcagacctttgcagtaagtgttacagctcttaaggtggctcctctggagttgttcattcctgccgtggggagttgttcattccgcccagtgggttcctggtctcgctggcctcaggagtgaagctgcagaccttcgcggtgagtgttacagctcatagaggcagtgcggacccaaagagtgagcagcagcaagatttattgcaaagagtgaaagaacaaagcttccacagtgtggaaaggacccgagcgggttgccactgccggctggggcagcttgcttttattcccttatctggccccagccacatcctgctgattggtccattttatagagagctgattggtctgttttacagagagctgattggtctgttttgacaggtgaaggatcttgcctcaatgttgrtagctgctgaccgatcagggtggtggttgctaaaggttgggatggctgtggcaatttttaaaaatgagacaaccatgaagtttga

SEQ ID NO: 830849 - DNA, 555 bp, Homo sapiens
caccccctcacctccccaaattagcctcctgcctctgctccggaagcttcctaatggtctgtgtgcaactgtgcaattacagcagcctgtgttaacaaagctgcgtgatcaccagctttgggcaaaggcttgtgattggagcggtgtgaggtgttgtctcacccctttcacaggcagtttctcgtttttcacatgcgcccacttataaatgtctgtcacagggtttcaggccattcaccacttacacatttgctaattgttccccattcttctgtgtttcttagcctcagacttttcgtatccatctgttctaactaaaatctctctcatcaaattgaaagcccctccaaatgatttcttaccattttctcctaattgccactctagagacctggctatccatttgaaatacctttttgaagtcttgattatctgtaggaaatatttttttctgacatgatagaagtaaccagttttggtgctatttgggttgcttaagtaactacaggctggaaayaggagattctctttccttttttccttctatttttcttt

SEQ ID NO: 830850 - DNA, 629 bp, Homo sapiens
cccacagaatgggaaaagatatttttaaagtacatatgtgataagaaaattatatctagaatgtgtaaagaagtcttacaactgaataataaaaatataaatattccaataagaagggaaaataggattttaacaggcctttctctaaagaagacatgcaaatggataattagcacatgaaaaaaagctgagggtcattagtcattagggaaatgcaaatcaaaaccatagcatacccgttcatacccataacaatacctaaagtaaaagggacagatgttagtgtctgtgaggttggagggaaactggaaccctcattcgctgcttgtgggaatgtgaaatggtgcagccactttgaaaatgagtctggcagttccttaaatgaataaacaagattaccataggactcaataatcccactcctaaatatatgcccaggaggaatgaaaacatgtttacacagaaacttatacatgaatatttatagcagcattatttataatagccaaaaaragaaaatagtctaaacattcatcaatttataaatgaagaaacacaattggtatatccatacaatggaatgttgtttagaaataaaaggacattaaatactgatttatgcaacaaca

SEQ ID NO: 830851 - DNA, 323 bp, Homo sapiens
agtttgtcagtcattctctcaaggaaaaatgacattcaatgaaaaragtgactagtttttagccccaacttaaatgacagacgaatgtttttcctggagactaccaggaacagaagtgctttattcccatttcatcacacacaaaattaaaaagacatgatctcaagcgctgaaatgaaataaactgtactggtttcatcaaggatttttttaaaggtgaaactggcctatatttttattttgagtgcatgacagtggagaatacgatgactagaagagtttggtgccgctgccttaagttctactaagacctccactattgt

SEQ ID NO: 830852 - DNA, 461 bp, Homo sapiens
taggcaaaggcaaattagaagaatctcaaggagtgagaagaaatgacttcagctgcaagtggaataaaaagaccagtgggaacaacatgactcctttgccattcttcaggctgatgacatagaaacacagaagactggaaccaacagacaagagggcgggtacaaacgcacagcttccagggctgaaatacaagtcagaagtaagtacaccatcagcaaaaaataagtaaaaccctaaatcataaattgcctctgaaaagggaaaagaaaataattttgtccatcattatctatggcatttatttcctaggcattgtagagagcacatcatctaattcccaaagaaatgtaaatgagaagttattcagaagagccatagcacccrccatggtaccataaacctaataggttaacaatggttaggcatttactatgtgccagcctctgggcttcttcctagg

SEQ ID NO: 830853 - DNA, 615 bp, Homo sapiens
caaacctttcccctggccttgcatcctctctatccatctgcccaaacctccctcactctccaaagtctcatttcaartgttgcttttccctgaagcttctcctggaatgacccatctctccctcctcattctgatcatttcctctttgaattcccatagcattaggtatgccctcctcttccagcactgaatccagccttgcctcgcattagagtcatttgtacacctgaccttaatccccctgagggcagggatagtttgtgtttatcccaaagtcctgaaacaactagtacagaacctgagacacaggaaggccccagaattgcctgccgaatagaacagtgatagtgctgaatttggttcctcctttaacctgtgtgaccccagacgtttgttttctatgaagcctcaaaacatggttatgtttcctaatttacaactaacacatggaaacccatgttttgaaaatgggggtggggaggatgaactgaaggcagcctcttcagccaagttccaaaggccaggtggcccactgtgaaccttgtttaaccacacagaacatatgaatagctacaacaagggatctaacagttaccagaatgttttcagaaaggt

SEQ ID NO: 830854 - DNA, 623 bp, Homo sapiens
actaagtacatatgcattaatgaaaagttaacatcaggaatttaattacccagatgatattacctttcacaacccccacactctgatgagtcacagatccccatttgtattttggtgtrgtgacagaggctttgacccgcactttatcaccaatcttgatgtgagaagaacttcttggtggaggatagcctacagatttcaataacaaatcattataatcagtattcatttatgggaattctgtctctaagaaaaagtaaaagcactaaacaaagaatgtgctcacctataagttccacatgaatgtacctaaaccagtagatgccccctttctgctgccagtcacactgcacattgagatcatgcaatccatctctgtccagcttgatgactttgccaacatcacatcaccttcgcacacttcttcgtatgttcggcagcatctaaccatcattcccacctagaattaaaatgaaattggagatccagtccatcatgtacacaggtgaaatgagccatgataagtagtattactctactcttaataaagaatttcaactgggcacggtggctcacatctgtaatcctagcactttgggaggctgaggtgggaggatcacttg

SEQ ID NO: 830855 - DNA, 434 bp, Homo sapiens
catttatgggaattctgtctctaagaaaaagtaaaagcactaaacaaagaatgtgctcacctataagttccacatgaatgtacctaaaccagtagatgccccctttctgctgccagtcacactgcacattgagatcatgcaatccatctctgtccagcttgatgactttgccaacatcacatcaccttcgcacacttcttcgtatgttcggcagcatctaaccatcattcccacctagaattaaaatgaaattggagatccagtccatcatgtacacaggtgaaatgagccatgataagtagtattactctactcttaataaakaatttcaactgggcacggtggctcacatctgtaatcctagcactttgggaggctgaggtgggaggatcacttgagctcaggtgtttgagacaaacctgggcaacatggcg

SEQ ID NO: 830856 - DNA, 597 bp, Homo sapiens
agcatgttttgtgagtgaaaaattctaatttgtaatgcatatcaagtgaaaagcctcagttcagcactcgtcatatccaaaatctgtgttatataataatgtaaaagacatattttcacacatgtagctcaaatgagattcttacttaacatttctctctcttttttttttttttttgagatggagtctcgctctgttgcccaggctggagtgcagtggcgcaatctcagctcactgcaagctctgcctcctgggttcatgccattctcctgtttcagcctcccaagtagctgggactacaggtgcccgccaccacgcccggctaattttttgtatttttagtagagacggggtttcacagtgttagccaggatggtctcgatctcctgacctcgtgatccgcttgtctctgcctcccaaagtgctgggattacaggcgtgagccaccacgcccggcctacattttacaaaatttaactcaatcttttattttaaaaaatgtgcatatactgcctgttcaagtacttamtctttttatttattatttgaaattggaggtccatctttttagattgttagaaggtcttcacgtatttg

SEQ ID NO: 830857 - DNA, 646 bp, Homo sapiens
ctttctttgtcaagacatttttattgtatgccacgacatttttgtaatgttgagcaatttacaaatatacatctgcttaaatatagaaaagagacaagataaaaaggagcaaaagaaaaaagaatggrtcaaccaagaacgtcaaacactccaacagttgagaacatttaaagatgtaagttttataaacaatcacctcatctacacttctggggaaataaatgaagaccgctctaaagaggaaagtattaagaacaggtcattcagaacatgtaacatttaaaaaataacattatttctggtatatcaataaaaagcaacaacaaaaatagaatatcagtgattcaaaacccatgatataaaataactgctgtttttgacatcacaacacgcttgggttcctgctctgcactcttcactgagtagtccttactggcactggtggtttagattggcagggaaaactgaaaactgttcaactcccttgactttagctggcatttcctctcatttgtaataaacaattctttaaaatgttatccaggcagcattgtgatataagtgtagtgaaagtgcccagttaaaagtaaaatgtgttgtttttttttttgatatctacaactttcttttttcttttaaagtatat

SEQ ID NO: 830858 - DNA, 575 bp, Homo sapiens
ctgtggttccagctaccctggaggctggggtgggaagacagcttgagtctaggaggcagaggtttcattgagccaagatcacaccactgtactccagcctcagtgacagagtgagaccccaccccaggtcaaaaaacaaagtgcacaatggtatatgctatcttttatctaagggagggagaaaatattcctgcctcagcctcccgagtggctgggactgcaggctgagccaccatgcccggctaatttatttatttattttttttggtggagatggggcttcatgttcgtggggctggtctcaaactcccgacctcaggttatctgcctgcctcgtcctctcagggtgctgggatgggaacaggaattaaaagaaatttaaaaatgtgtaaacaaaaactcagttgtatgtaaaaaaacccaattccccctgagaaagagaagagctagagtccttcaaaaaaaactactacctcctgyttttctatggcagtgagccttatctctcctcccttcccgggcattataaaaaccctaattccctaactgtacaactgcaaggtcactaaacaaac

SEQ ID NO: 830859 - DNA, 499 bp, Homo sapiens
aagaaaccaggaagaaaatgtcagggagctgttaacaatgtgcagtatcrtgaaagctaagtgtggtagtcaatattaccacttgccaatattttcacttcacctccatctggatgcaaagtagtactacacttccctgagccttgaagttcagcatggacaaatgacttgctttggctaaccaaatgtgagtgtaaatagtatgtgtcagctctgagagaggatgggaagcccctcaagagccaatacataatttgccatgttgccttcccctggccacagtaagtagcattatgccaggtggtcttggccctatcattctatgccccttattgaagatgacatagaagcgagtgggtccacttccccaaccagaggtagtgtgagtgagaaataaacttccgttactttaggacactgagattttcagattgtttcctactgcatattaatctaacccatcttgactgataaattaaagtttcaaaacaatgagagt

SEQ ID NO: 830860 - DNA, 557 bp, Homo sapiens
agactgtatctttccttcatttatgaagcttagtttcactggatacaaaattcttggctgataattgttttgtttaaggaggctgaagcgagggccccaatcctttctagcttgtagggtttctgctgagaaatctgctcttaatttgataggttttcctttataggttacctggtgcttttgcctcacagctcttaagattctctcctttgtcttcactttagataacctgatgactatgtgcctaggtgatgatctttttgtgatgaatttccaaggagttctttgagcttattgtgtttggatgtctagatctctagcaaggctggggaagttttccttgattattcccccaaatatgctttccaaacttttaaatttcttttcttcctcaggaatggcaattattcttaggtttgttcgtttaacataatcccaaacttcttggagtctttgttcattagttttaattcttttttctttgtgtttgttgkattgggttatttcaaaaactatgtttttgagctctgaagtgctttcttctgctttttctgttc

SEQ ID NO: 830861 - DNA, 538 bp, Homo sapiens
ctttagctagtttctaaagctgaaagctgaaataattgacttgagacatttcttattccgtaatgccataaatttctccctaagtgctgctctagcagcattctataaattttgatgtgttttcatttttactcagtttaaaatattttctcatttttattttgattgctcctttgccccgtggagcattagaagagtgtttagtttccaaatacagttagcctgtgtatctgtgggtttacacccatggattcaaccaattatagattggttgaatcatagattggcttgaaaatatttaaaaaaaaatcgcatctgtactgaacatgtattgacttagtttttcttgtcattatttcctaaacaatacagaataacaataatttacatagaatttacactgtatttattaggtatgacatgtaatctagagatgatttaaagtgtacwggagaatgtgcataagttatatgaaaatactatgccattttatatcagagacttaaacatctgcaggttttggtatctgtgggaggtc

SEQ ID NO: 830862 - DNA, 543 bp, Homo sapiens
agggtattgccctggtgattgatgaaaatgagagagaaatagtaaagtgtgactttttgaagggagggagtaaagattcttctacycttcctcttttttctctccttggttccacacccatttcttatgcacagtggcaggcctcgctttctgttgacattccattgttaatgatccagagaaagttcctctggatttcaaggatggattgaaaacaaattttggaagtttgaagacaaacatcacagataaaaaaggatctgtgtgcaggtaggttttgttttagtattaatgttttgtatatgcctccgtgtattaaaaagagggaatttgcctgatttgagcttatgagcaaaccccccaaaggatgtagactctgggagaagataccgggaagatgaggagaggccaatttcaccaacagaagggagatggctgcctgccgaaaagaaagcggttagcatgaacgtgcgtcaggagttgcctgttattgttgcaaaatgaaattgtttgctcactgcagatatagcaggtttgtaagca

SEQ ID NO: 830863 - DNA, 552 bp, Homo sapiens
tgtcttttcccattaagtcatcataatcctgcattccatccctttctacctaaaggaagagttggagaaaaagttcagtctggggcctcctccctaatcatctgtggccagatatacccaacaaggagtcaagctttcatcttcaggctttagcctcacccttgactgagagaagaagatacagccatccaaagtgacgtcctcgccaccctgctgaactgtgctcaggctgaggaagaggatggaaaacagagctttgaacacccagcccatcatcagcttgcaaaatcgcagtgaaactagtgtgtagccctccccaccccggctatatccctgagtgggatcaagctaatcggccccactcacactgtggttcatggtttgtgataagaggagaggagctatgaagagaacaggaagcaagatatggaatccaaaaaacccagtttccagtcctgatgctgcccctgatggrctgattttgggctgctgacttctccctgggctcagacttacagctgtgaaacgagaccccctatcacaagttccaaa

SEQ ID NO: 830864 - DNA, 511 bp, Homo sapiens
acctaaataaaaagaggaataaagctaaataaattgaaaagtataacgcattcacagattaaaaccccaaaatatttcaaatttggggaattttaatctgtgaatgtgttatacttttgcatttcataaaatctrtaactttatcacaaatttatctatacatggattgccagtcaaaatctcaaaagtttttggtagaacttcatcatctaattccaaaatttacatgaaagaacaaaagcccaagaattgtcaaagtttctgaagagcaaagttgggaactcctgccctaataattattaatatagttatatatacaataatatataagaatactatagatacaataatatatagtattaatttactataagggtatagtgattaataaaatatggtattagcaggagtacagagcccagaaacagatctcacagatttgtaaaattgatatgccagagatagcataagaaatctgtgaaagaatggggaaaggctattataactagtg

SEQ ID NO: 830865 - DNA, 548 bp, Homo sapiens
ttgctatgaaactgccaaattgttgtacaaagtatttgcactttgatttccattaggaaggtacttaggagaattactggatcatwtggtaaatttatgtttaacttgttaagaaactgccaaattgttttagagtatctgtaccatgttatatttctactagcaatggatgagggttccagtttctctacattttcactgatacttattgttgttctttatgattatcagcattcgagtgaatataaagtgatatctcattgtggttttaactcagacgttaccctactgatgcactatgctgagcattatttcatgtgcttattcataaatctttggtgagatgtctatttaaatcttttgaccattttttaattggattatttatcttcttgagttgcaaaagttctttatgtgttctgcttacaagttctttatcagatatatgatttgcaaatgttttatcgctttctatggctttactttttacttactgtggtgtcttttgaatcacaaagtttttaatttcacatttttaaaaaaacatt

SEQ ID NO: 830866 - DNA, 632 bp, Homo sapiens
ttttacattttccactacaatttattttaccatttaaatactgaattcaattttgatttctgaacatrgtctcagataaggagtacaacattacttagcttccagtatacatttaaatcgtccaatactaaattctcccatacaaaagaaatactacctttaatgaaataacctgcttatggtattcaagtgataaaattccaatgtattcagatacatttctggacccatttgtctatttttctgatttgtctattcatatgccaattctataatatgtgggctacactgacttgtcagcaatttttaaatatttggttattaaaacagtacagtatcagcacacgaacagtgaagtagatggcaaagcaaagccctctatgctcaatcctagccaggaatccttcttagttataattatcattatcttgttattctctagtagttatgtctttctttctaatgaatatgtaatttacatacagaaaaattgaaaaatagcatgtgtacagtttgatacttttgacaaatgtatatactactcatataatgcacacccagacaagatacagaacatttctaccatccatgtttttgagtcaggcatttattttttatttatccagttccaa

SEQ ID NO: 830867 - DNA, 632 bp, Homo sapiens
ttttacattttccactacaatttattttaccatttaaatactgaattcaattttgatttctgaacatggtctcagataaggagtacaacattacttagcttccagtatacatttaaatcrtccaatactaaattctcccatacaaaagaaatactacctttaatgaaataacctgcttatggtattcaagtgataaaattccaatgtattcagatacatttctggacccatttgtctatttttctgatttgtctattcatatgccaattctataatatgtgggctacactgacttgtcagcaatttttaaatatttggttattaaaacagtacagtatcagcacacgaacagtgaagtagatggcaaagcaaagccctctatgctcaatcctagccaggaatccttcttagttataattatcattatcttgttattctctagtagttatgtctttctttctaatgaatatgtaatttacatacagaaaaattgaaaaatagcatgtgtacagtttgatacttttgacaaatgtatatactactcatataatgcacacccagacaagatacagaacatttctaccatccatgtttttgagtcaggcatttattttttatttatccagttccaa

SEQ ID NO: 830868 - DNA, 610 bp, Homo sapiens
ctcaaccccagcaatactgacatttagggtataatatttatcttttgtagtagaagtcctgtgtatatagagtatttcacagcacctcagaattctacctatcagatgccagtagcagcccctccagttataacaatcaaaaatatctcagaaattgaaatactctcggcaatgtctcaaatactctcagactaacaactgagagttgtttaattccctccagcccaccccagtgataattactaataaccatcatggtacttcctatactctttttaaaagtacatcaatgaaagtactatcttagatcatttagcaaatgtttatagaacccagcaaagcagaccactcaggctggttaagattaaggctcaagctcaggttgagaccaacttggacagtggacacggaagaaaattatgatgttaataatggcggtgatcgataggacagtagaggagacactgagagaacattcatatttcttttccttaytaatagaaatttgactattttgaggtgtcaatttgcctagatcctaaaaacaaacaaacaaaaacaaaaacaaaaacccctaaactgaatctcccagcattccttacaaactcag

SEQ ID NO: 830869 - DNA, 545 bp, Homo sapiens
gaaaaaaaaagatgagctacaactattgcaaagactaactttaaatcagattttgacattagsgccactgccccccgcccccactctgccaatacccactcctcaaaaacgaacatagaaccctgcgtaactgttcccctttcttacatgtgagccctcaactcctggagcactgcctccccaaaccacacaccccagttccactgagcagctcaccctttactcagctctcccaacacccactcctcaaaaatgaatgtagaacctgcctaactgttcccctttcttacatgtgaggcctcatctgctggagcactggcccccacaaccacacaccccaaccccactgagcagctcacacttccctcagcacactctaagctcacagctttcacacttggtgcatgctgttccctctgcatggaatgcccttccaccctgcagcagatgccattggtgccccacccaatatccccttatccacttggcaagtcccttctcatccatcaagatccatgatggcaaataattttgccccctgttgt

SEQ ID NO: 830870 - DNA, 593 bp, Homo sapiens
tagtgtgcgggtggttttgagaggatcctgtacggtatggtcctcaggtgcttggcaaaatgggtccaccccctcccgggtaaccctggctctaggccctcttccatgtcctggccttccccagcagtcccctggagccctctggcgaccaaaactccacagtgaagcgccgcctggagtggtggccggtgaagggttcccagttcgggacacgttattcctcttctgtaaaaactgcaccactttcagctagactctcaggcaaaggcacagaaaattacctgattagattcatgatcttttagaggtttcctatcgctgaggtcatctgagccagcagttttcaaaatgagttgacagcttcatatcctaaaatgttgcatttaaattccagttaaaaatagtttaactactgtatttttccattctaagacagatttttttcatgctttgctttttctggagttagcatgcatcttataattratacacttcatttaatatgatgggatctcttctgttcttctaaaaaattatcaatacatttgtgatgaatattggtttaatagcatctcagaatgtaaaacatccag

SEQ ID NO: 830871 - DNA, 648 bp, Homo sapiens
tggtcttgagctcctggccccaagtgatcttcttgcctcagcctcccaaagtgctgagattacaagtatgagccactgcatcaggctgcacagtatatctcaataaaaggtttagtaactcactaatcattaattagcaattatctttaatagaagggtatttacaaaggtatacaaatcatttacctatatgttcttctaatccaagatctaatccatcaccattatagacatatagactataaaaagaattctatattatatattactcattcaacagaaatgacaactacagtaagatcagttattacctcacagacagaatgtttttacagctagtgtcatgttgtaaatgcagtatttcagactgaattaaaccataaaacacactcagatggtaaatccaaacatcagagatgtatacaggaaaaaaaagtgaaagacctataagaaatagttacaagagtagaagaatttgaaagtaatatacaaaaataattttttctcttcacatataaaacataaaagatttattcaactgtataagattattaaaaagttctactaaaatcttatagtattatcaaaatacaagcatgactgytagtttaaatagatcaaatacaggagaaaagaattgtgtacttt

SEQ ID NO: 830872 - DNA, 609 bp, Homo sapiens
taagcaagctggaaaatggtaggatatggtcttttatatagggtggtaatggaaggcccctctggcaagattatatttgagtagagastattagcaagtacaggtattggcccttatggatcttttttttttttcttatgtacttatcacagactttcccctaaactcacccccatagtgttttttttttttattattatactttaagttctagggtacatgtgcacaatgtgcaggtttgttacatatgtatacatgtgccatgtaggtgtgcttcacccgtgaatcttgagtgtgtgtgtgggtagagaaaacagtgtgaatgccctgagataagattgtgcttgatgtgctttcagaaagtacaaagatgtttgggtgctggaaggggtaatcatgcaaataatagagagataccagggggccaccctacataaggccctgtaggccaaggtaaggattttggattttactcttattgacgtagaaagctattttaaacaagagtgccatgattgtcatgaattaaaaaaaaaaatcactctgacctctgtggggaaaatacactgtatagggtggggagagaccagtaggatgccattgccatgt

SEQ ID NO: 830873 - DNA, 628 bp, Homo sapiens
atttcttttctattataatcttataagaccaccatcttatatacagtccatcgttcaccaaaacatcattattcagtggatgactatactaaacaattatgggtacaggaaggaaagagtaaaaacatagtaaattctgtataaagctggtgctttagggaaggaagagaaagtgaaatatgacaaagaagtcaagagttagctctatttgtaactttttcctctaaacataatagatctggagcatatatctcacaataaaatcatctgttaaatcttgacaccgtctataagatcatttttgtgtttgttcaatttaattacaaatattctaattaaaatatgtgatatagaaacttccaaaatcaaatggggaagaaattttccatatttcaaaggaaatcatatgttttaaaaacacaaaactgctaaatgctaatggtaagagcagtaaaattttaaaacatacttttttttttcaaaaagaaaaccttaaaaaatctgtaacaatgtctgagtgaactatttcttgtatttcagaagaatggacatcctcagtgtaaaagtaaccacagtggaactaattaagaaatttrccatcataactatagcttttagttgttatgca

SEQ ID NO: 830874 - DNA, 582 bp, Homo sapiens
tggcaggtaaggtcctttatgatccttcctatgaaatatagtcatttttcatttagcaccctcatayggtcttacccttaacacttatattttctcaaatgaaagatttttaatatgcaattccatctgcctctttcatgctaatctctcagttctgacctcacttagatgccttaactttgagagaactcatcattagtcctataagtcttccttcacctaatactatggaactttatgcccttgaatgtagttttgtattactatttattccatcctaacttatatgattttaaaattatatcatctgttctactgcttactagaagaactatgtctcactccctctctcactgttacgttcctataaccaagccgagtgccatgtcatacaaaagtccctcattaaataaagaggagagagggactgtgatacactaagaaatacactggtctttgtacagtgtcataaagcacagcacttctatgtattcagcaacccagaagctttctgaactccttcatttaggagtttcattatataggtgtaacttattaagccattggatgctggagggatga

SEQ ID NO: 830875 - DNA, 578 bp, Homo sapiens
ggggaagagtatatgtgcttgacacaagaggatgtccaaggaaggcttctaggattcttgctaaggagagctatagaaggcagaggtggggaaggtggctgctacttcaaagagcacagaaacattaaaccttaatttaaaattgcttttttaaaatttcttatccatccacagtctagtaaagagtctaatgcacagaggaaaggttataacatagcaaagaaattgagccaggagtcttacacaattgagagatattcagttttcaaaaaattgatcattacaatctgagattataatgctacaaatattcataatctacccagcatcatgcttctttttgaataaaaatatggtgtgatattaactatgattgctaaaacctcattgcacagtttattgttgcttcatatttataatgcaatatattaactactatatagtggcatgaacaaaatatgaaaaagcatagtaaacagataaaatagaaagtgagaccagactaayatggtgatggtagtctaagacagtatttcagcagaagactacaatctagctagcgacaatctgagaaccaa

SEQ ID NO: 830876 - DNA, 634 bp, Homo sapiens
tgatatagtttttggttttattttatatttggatctctaattcggctgggatttatttatttatctttagagacagagtcttactatattgtctaggctrgactgcagcgactattcacaggtgtgatcatggtgcactacagccttgaattcctaggctcaagcgatcctcctgcctcagctaccgagtagctgggaatacaagcgtgcaccaccatacccgacttattatttattttatcaccaaatagcaagccaatttctacaatgctatttatgcaataaatagaacaatttcattctttcctgttgattggtaattattatatgttgagttgttttaaaatcttgtgactttctgtgctctctattctatttcactgaaagctattcttgtcaatatgactccattttaattattgcagatttataatttgtaataactggaaggactagttagtagaatgactttaagaaatatgatctttcagcctgggcaacattgcaaaaccccatctctaaaaaaaatacaaaaaaaattagcagggtgtggtgcatgcctgtagtcccagctactcaggaggctgaggagggaggattgtttcagcccaggaggttgagactgcagtgagct

SEQ ID NO: 830877 - DNA, 580 bp, Homo sapiens
ctagagcctccggcttatttgaagatcatgtggaggatcgtgtcttgcaagaaaactcgtgctctgctcaggattcagctctgcctcctctcttggccatcagacccgaagctaagggcaagttagaacataacccagccacagaagtgctgggcccgctaagaaaacaaacctgctaagaaaaaaaagtagttgtaggcctggtcaatgtgaaccatcaggaactgggggaatatgtacgggactggatcttgagggtgctgaaccaaaggaaacaaaatacaaattggaaaagggagaactttcttttacggtacggaatttacaccctgacgaggaccccgggagatggcgccaacatactactacatcacaacctctaagaggttgcctcttagaggcctggaaaagtattgacccacgttaagtgaggtagaattggaagaactgccacagcaaatggtgaaggaaggaatcaggatgtccagagcagtgggcatgccaaactggttagactatagaggccagaaaayccaccccccacagtgttccctaggagggcccagagcatactccgttt

SEQ ID NO: 830878 - DNA, 574 bp, Homo sapiens
cctacaaacaaatagatattctgaggatgcacagaggaacacagaaagattgtatagattaagtttagaatcttgtagcagggcttcgtggattggattaaaccaaggacctggtaggtctatttccgagtgttgctttgtagtaaggagttgctgaatttaactcgatccaagatacagcttggaggcattcctgaacaggctgttagggaatcacagtaataagagtaagggcatctagaattcccatcaatctgatagtaaactaaacaaaggggaggcatatgattccttcttcggcaaacttgatcaaggtagctcctagaagcaagggacatgtaatggtatttctctctctttttttttttgagatggagtttcactcttgttgcccaggctggagtgcaatggcgcgatctcggctcacagcaacctccgcctcccgggttcaagccattctgctgcctcaggctcccgagtagctgggattacagrcatgcgccaccacgctcggctaattttgtatttttagtagagatggggtttctccatgttggtcagtctggtctcgaac

SEQ ID NO: 830879 - DNA, 457 bp, Homo sapiens
ttgcaaagtgagggcagaatctatttacattgggttgaattaactcctccccttgatgccactaaagcaggaatcacactgcagatggcactgatttgattggcaagagacatgccaggaagaatattaagggaccaggcccctataattaggcctaatcgtagcctgttgtttgaaaagggtatgaaggacattcatcaggcttggcactgtgccctagacctgctctcctgggtagtggggccctccattgcaacagaggtgtgggtgggcctgggagagtgtggcaagaaatgcttaggaggctctacttggccttaaagggctgtgtgaccttgggtaaattgccttctttgaatctctggtcctttccatttcccattctccaggctaagarctgcactctgatacacggttattcccaataataataaccatccaccccgtgcagtggtca

SEQ ID NO: 830880 - DNA, 593 bp, Homo sapiens
aggagatcctgagaacatgcgctcaaggtggttgggccacagtttgaatctacatgttttagggagacatacgacattaatcgatacatttgwggtacacgttggttaggtctagaaaggcaggacagctcaaagggggcagggaactgtgcttccaggtcctaggtggattcaaagattttctgattggcacttgattaacatagtttatctaaagagctggaatcgataggaggaagtgtctgggttaagataacgggttttggagaccaagattcttattatgcagatgaagcctctgcgtagcaggcttcagagagaacagattgtaaatgtctcttatcagacttaaaaaggtgccaaactcttagttaagtctctcctggatcaggaaaatgacctggaaaaggatggcgattctctgtagaatgtagattttccccacaaaagacaactgtgcagatccatttcaaaatatgtcaaagaaatatattgtgggtgcggggcttaaaacctggatggcagattgataggtgcagcaaaccaccatggcacatatatacctatgcaataaacctgaacattctgcacat

SEQ ID NO: 830881 - DNA, 593 bp, Homo sapiens
aggagatcctgagaacatgcgctcaaggtggttgggccacagtttgaatctacatgttttagggagacatacgacattaatcgatacatttgtggtacacgttggttaggtctagaaaggcaggacasctcaaagggggcagggaactgtgcttccaggtcctaggtggattcaaagattttctgattggcacttgattaacatagtttatctaaagagctggaatcgataggaggaagtgtctgggttaagataacgggttttggagaccaagattcttattatgcagatgaagcctctgcgtagcaggcttcagagagaacagattgtaaatgtctcttatcagacttaaaaaggtgccaaactcttagttaagtctctcctggatcaggaaaatgacctggaaaaggatggcgattctctgtagaatgtagattttccccacaaaagacaactgtgcagatccatttcaaaatatgtcaaagaaatatattgtgggtgcggggcttaaaacctggatggcagattgataggtgcagcaaaccaccatggcacatatatacctatgcaataaacctgaacattctgcacat

SEQ ID NO: 830882 - DNA, 628 bp, Homo sapiens
gctacaaagagtattttgtcttaagctctctgttttgatgttaatgctgatcagcagtgcctgtattccaaagggggaaggtgtaatcagatacatctgacctcccactcctatcatggcctgaactagtgtttcagatttactgtaggatgtccttggctgacagaaggggttcattctattggttggggggcttagaattttatttttggtttacactacaacaaaagtataactttcttgtgccaaggtgttgcatttaccacaggcctttcccaacagagtgcattcggtcctaaccacactctgcctgagagactacctctgcttccactagtaagaagctctggaaatgtttataacttgttgtaacggctttaatgccaaataaaacaagtttacacaccctgattatgttcagtagtggtaactcagaggagagcactgtgagcctgccctcatgacacagccccaccacagatacttatgcttgtgggtcttyacacaaagagaggccttaagggagagaacagatgagcattgcttaccattggttggtatgaaccagctgcctactgaggctctggacaaagggcttctcaagaacaggttttgcagagggaatgac

SEQ ID NO: 830883 - DNA, 592 bp, Homo sapiens
aaaaagaatcctaaaacttatagggatccacaaaagacccagaattgccaaacctgtcatgaacacaaagaacaaaactggagtaatcacattacctgacttcaaattaaactacagagctatagtarccaaaacaacatgataatggcatagaaacagacacatagaccaatggaacagaatacaggaccaagaagcaaatccatacatctatagtaaactcattttcaacaaagcaagaacatacattgagggaaggacagtgtctctaaagctgctgggaaaatgatatctatatgcagaacaatgaaactagatccctatctctcataatatacaaaaatcaaatcaaaatggattaaagacaaatctaatacctcaaactatgaaactgcttgaagaaaatattggagaaaccttccaggatattggagtgcgtaaagatttcttgagtaataccccttaagcacaggaaaccaaagcaaaaatgaacaagtgggatcacgtcaagttaaaaaacttctgcacaggaaaagaaacagacaatcaacgaagtgaagagacaatccacagaatgggagaaaatatttgc

SEQ ID NO: 830884 - DNA, 620 bp, Homo sapiens
tcacattcttcaagataacataataatgatgcttgtttcatgaaagaagggattaaaagaagactgaagatcacttagtacagtgcctgacatgtaacaaatgctcaataaatgttattattattattataaaatcaatcatatgtgcaacttgatgaagccctgggggatgaaaaaggggggctcattggcagacaatttaagcagcttggaaacgtatgttggcatacctgtgagcacatatgataatattgcataatgaatcctctaagttccattctattgtcaaaaaaatttgtttcagaaatggagctacaacttattccagagttagacttttgtggccatggtgaacatgatccttttaaatagagagaagggcctgggtaagtttaaactgaattaggttctcagttctcccaggctttgactttgtcatctgtcacttccctctcaaagggctggcaaagcccagggcagttcaggattctctcatctgaagttctgtccgtcgattctgaggggagtctggggctgctgacagtagatgrcctgcctctcacatctcactattctttgatctcacagttacaattgtgttgcttttggtttttacttgc

SEQ ID NO: 830885 - DNA, 629 bp, Homo sapiens
aggttaaaaaagtaaaatgacagaaagcgccacaygatattagaaaaacgtgtgatgctttaagcttgaacttctgaaagttcaagaaataaacctaccatcgttttctcaactgtactttaaacaacatttattgaacaggaattgttcaataaaattggctagccaagttctaatatatatatataaaacataataataattaaccaataataataaatacttaaacctctaatccatagattgcaaatgcaacaatgatagcttattttcttggggaacaagagtgggtggggacagagggaacgggaacaggacttttgctgaaaggagggatgacaggaacacagggctgtgggctgaaaagaagaacaaatagaagaaacagcagagaaggcggctggctggggtggggcgggcgcctccctggccctgctccaggactcaggactgggtcccgcctgggccgcccctcctgccaagcccctggcctcttcccagggtgactggcccactcctagaccctaggacatctgaagggcaggagtcccaacggcctgagagggtatgggccaggagcagcacgctgacccatctgggcccaaaagccacctgtgtttgggggctgg

SEQ ID NO: 830886 - DNA, 633 bp, Homo sapiens
atatatcacattgtgactatccattcacccgatggtggacatttggkttttttctagtgtttggctattataaataatgttactatgaacaatctgtctgtgtagtctttgcgtgcctatatgttttcatttctcttggatagatacctagaagtggaatggttggatcatatggtagtttcatgctttgagaaatgctaagctattttccaaagtaggcttttgatttttttaaatggtgctataacagctgtttttctataaattctattttgcaggagggatgatgtcaagtataaatagttactaaggcttcaggttttcagtttcatgtctcctgcaagtctggaaagagttccatacttctcatggctacgatcttatgtttttgatttatagtaaaactctacctttgaaatctacgttgaacttttgaaactttttaagggttgggattctactattggtagaataccttgaggaactttatatagaccttacatttcttgttctttagctgaagcataattcactttttcttgtttgttctaagttgagaagtggtaaagttgtgaatcccacaactagacttttggaaggctagttataacttcttctcacagacacaaagtc

SEQ ID NO: 830887 - DNA, 624 bp, Homo sapiens
tttttatgggttctgtcaaaaattagctgttaaacaaaaacacattgtcccaagtagggcaggacagagtctttctgattctgcataggcgtgacaatataatgggcccgatgctgcttctattctaggaaggttcaactttctcccaactccccatcataaactttttcatattttattgcaccattctttaaatctgaaaggtaggtgaggaagttttttcagcaggcacattgtcaagaagttatatacttttgactgggtgaagtggctcatacctgtaatcccagcactttgggaggctgaggcgagtagagcacctgaggtcaggaatttgacactaacctagccaacatggcaaaaacccgtctctactaaaaatacaaaaattagtcaggggtggtggcagacacctgtaatcccagctactcaggaggctgaagcaggaggtaaaaaagaaaaaaaagttatatactttctggcaacactgggccctctaagaayttgccacatcaaactgagaagttgctttgagagctttctggcagaaggagcttttgcagaggtcacgtttaccaagtcatcattccattgagatatgtggtattctagtgattcccaaat

SEQ ID NO: 830888 - DNA, 624 bp, Homo sapiens
aagcttatattcccctacaactaccgcagctggtgctctcttgaaagcatcacctcttggttggaggccaatcaactcaggccattacagcaactcatgacaaaataaccctgctcccaagaaggagaacacaacagctaataccactgcctgaaacatcctggctaaccagaggtcctgagtccatccacgtgacaactttactactagaataaccagcattcaagaaagccagtacactaaacatacctacagccaaagattctcacagagtcactttcactccccgccacctccaccagagtaggtgctgatatccacagctgggagagccaaagatggatgacatcacaggagtctttgcagacattccacagcagcagctcagagcctggtagccccgccgagtggctagacccagaagagcaataacaatcactgcagtttagctctcaggaaacctcatcccaaggggaaggggagagcactaygtcaagggatcattccatgagacaaaagaatctgaacagcagcccttgagttccagatttttccactgaaatagtatacccaaatgagagggaaccagaaaagtaattctggtaatatgacaaaacagggttc

SEQ ID NO: 830889 - DNA, 581 bp, Homo sapiens
tctcaaaagacatcaggatggtatgggcctcggctttttcacaagtagctgtgttctagtactattaaatgtaaaaaatgaatgtctagcaacatacacatgcacataaatatagaagtagattccaatcagtacgatttcttcccactataattttgtaaaatggacctttctctctctttagaagtttattcttgttatttcagtcttgcctgctatctgattgctaaatgtaatagaaagggacaattaaaattatgatgcagtggcaacgtagggccatactgattcagacctgctgagacctgcctgacatgattctagtcacaaagcatcagtaactctggcacaaacaaattaatcctgtggtagaagagaagcagacctttagacttgcacttggaaccagctttagctaaagtacatgtgtgattgctcacaccaacctttcaatttactaattgtttaaacctgcacaattacatgcagccttttgcaaactactgtagctaattttaaattacacatgacttttatttygggtataaatataatacaagaaggcattcaactccgatggt

SEQ ID NO: 830890 - DNA, 671 bp, Homo sapiens
gagaatggcacccttttggaatgaagactcagtcctctacaagatttttaattagaagttagaaatccatatttgtatggacaatcttcagacttaaagattgtcccacatgtgaaatcctgtgtatcagcaggktggtgccaagctcagcacactggggacagtagttggtcctcaggctgtcagcctgcagccccctggttatgtcacataatcccaaagcatctccgaaatttggtgtccttggtccagtagggatcacagtagatcgtaggacattgaggtatggagtaactggtctgagatcagagctctaaagagggtcagagctgggacttgggcaggtggactgactcaagaagctcatatcctcatgctgttctcactcacaggcagaattctggcagcaaatgatctgaattagaagtcagccgacctgggtcctgggtcagggtctgcgtatgagtgcagctatgacgcaaaagagggtgaggccagagcatccccaagccgcttccagcccttctgttgcactccacaccttgttctccaatgcattgaccagaaaggcccaccatacactagcattataaaatattgcacaggatgtgtccgaggataaattatgatagcatacagataaagattttatagttcaagaacatctatag

SEQ ID NO: 830891 - DNA, 647 bp, Homo sapiens
ccactttgcatgactcttattctgagtgactccagtgtgaatatgacattactaatgacctgctaagtgtgtacagatgtgggtttctccagatgtggtgatyaataacataatggagatagcggttgactcatgtttatgagttgtttgccttttattacgtttctgagtttatttgctttgaactgttttttaactccagccaataaactcacctttaaatcttaaagggcatcatccccttaaatctcactggggaaacagggcagagggaatgtgccccaggctagagctgagcatcaggtccatctaatgcaggcattagactgaattagggaaggctgggagttgcaatcattgccccatttcactccaaggaccataaagaggcttggtaaaccctgacacagtgtttgcagtctggcgcggctgataaaggaagatatttctttttttaaaaatctagtgaaatatgtaatcattttgaagtaagcccagagttctggccagtgtttctggaagacgttgcttttgcttgaaaacagaatgctgatgaaaagtcgagtaaaatgttgttacagatgttcaactctgcattaaggctgttggaattaccaccacatcttaaatcaattctcagaacattg

SEQ ID NO: 830892 - DNA, 643 bp, Homo sapiens
acatatgatgtttggttttccattcctgagttacatcacttagaataatagtctccagtctcatccaggtcactgcaaatgctgttaattaattcctttgtatggctgtgtagtattcactcacatatatrtgtgtgtgtgtgtgtgtgtgtgtgtgtgtgatgtgatatatatatgtgtgtgtgtatatatatatatatctcacagtttctttatcctctcattgattaatgggcatttgggttagttccatggttttgcaattgtgaattgtgctgctataaacattcgtgtgcaagtatctttttcgaataatgacttcttttcctctgggtagataaccagtggtgggattgctggataaaatggtagatctacttttagttctttgaggaatctccacactgttttccatagtggctgtagtagtttacattgccgccagcagtgtagaggtgttctctgttcaccgcatccatgccaacatctactgtttcttgatattttgattatggccgttcttgcaggaataaggtggtatcacattgtgttttgatttgcattttcctgatacttagtgatgttatatacaaatggccaacaaacatatggaagtcatttttagcacaaaacttgcctccca

SEQ ID NO: 830893 - DNA, 557 bp, Homo sapiens
tgcagaagaaaaagtaaaaacagacagaatcatcttttccttccaartggatgcagagcagattcatgtccccactcaggctgtgcccggcttgtgacaactgtcgtgaagggaaatcttagcttcagagacagaaagcagattttgggtggtcttggggttggactgaacttatggttttagcatctggctctcacatgccagtttactcctcaaaatttgtgtgcctggttaatgccttttttaagaaaatgtaatttttttttcaggtgagccatacaccagacacattcctatgtaatatcttatttaatctccctgacaacctgctgagggagagttaccaccttcattttacagttgagaaagcagagattcaggggaattaggtacctttcccatagccttatagctagtcaagggcacatggagttgatctccaaacatctgatttcaaagtctatgcttttctcggcacatcagcctgtctcttaaaaggcaagtgttatcctgatgagaatgggcctgaagctatacatgtactttcaagggtcatg

SEQ ID NO: 830894 - DNA, 696 bp, Homo sapiens
tcctgatgagaatgggcctgaagctatacatgtactttcaagggtcatgggggcacccccaggacaaacactcaaggggatgaaagtgctcaaggtgtgccagcctcacttctaaactggtccttgcacctaaggggctgaagtttgttttcaacggttcttgtctctgtgaatccccattttttgagccccttgaccctagctgttccaacaatgagagatactaggattctgttggcttcagtctttcttgctactaccactggacaaatgagtaaatctgggggcaatgtgaagcactgtgcttagcctgtctctgtgaacagtatgactgttggagtctttcttttctgtttttcttgtgaatatagatgggacttcggagctgtaaggaagagagtggaatatttgagacctagctgttactttctttgtgaagacacttaaataacattttcaggttttatttactccttccatgctcaagcggaagtttccgtgacagcagatgagaatgaagagaccactgtagcgcccaaagcctaggctcagaaaatggtccagagaaattgtcttatagtggggaaaccacagctgtagaatcagagaraagtaaaggaagtcttgtaatcccatggaccctctaagacacctcatgaaattctggataaggataggtcaactaccttatcctgc

SEQ ID NO: 830895 - DNA, 621 bp, Homo sapiens
aacacagagagtcgaatgctgctcagccctggggcaggtccgmaggtcctgggctgccagaacccctagccccgttgtcctctgcctcaagcagccttttccccatgagcattgcaaatgtgaccttttccttcctgacacaggaaaggccggagcacctctgtgcagcatgagcaaatgcaggtgcatccagcctttgctgcgggccaggaatgtgctgcacggcaccatgttagcacagccacggcacagggtaccatcactccatctcacagaagaggaagctgaggcacacagaggcccagtgactggagcagatcacacatggcaggtggcagacccaggtctctgaatccacagcctcttaagcccagcaggtttttgttgcatgaatgagagcacctggctccccatgtcggcaggcatttggtctgctcacggcagagccagcctgggtggatgccactgttccccgaaagctgaccaaaactgcctgtgaatacatcatttcatctgaggctcacaaagctcatcttgcagatttaaagcgttgccgtcaggaggaagctcacaggccaacaaacccaaacttttccttcctccacgagcgactggcttgcc

SEQ ID NO: 830896 - DNA, 507 bp, Homo sapiens
gtggaggcatcaatactgcttgtggatgtcattttgacaatggtgacgtgcaccgggattctaaccttgcctatattcacattatgaatgaaaaaacaaggtaaacccctcttccatttascagagcttccccagtttcctacctctaatccaacccttagcaatatcttcttcttctctgtcataaagggtaggatccaagcagttaagaacacacttgccttcaaagagtagaatgtgtttgctctgaaggtagtagggtatccaggagaagagatgtgtttaataaagtattgaagagttgcaatgtgggcctgtgaattaaacactagactggggagtggggcaagcatggtgttttcctggcgtcttcctaactggctcacatctgctcccttggaactcaagcatgcgtgtctgtgaatgacgcttgcaccgtgaacatctttacttcccaatgacatgagatgacatctgctttggggacttgaagcccccatatctgac

SEQ ID NO: 830897 - DNA, 613 bp, Homo sapiens
actggctttaaaaatgataatggaaacttatgttgaatctacctgtatagtgaataatctmattaacctaactttgtagcaagtaagtttgtaaattgcaattaaggtcatgatggggtcatcaatcaatgatacacacaaagatgaaagaacagtttttaaagtaaagggaaaattctaataattacataccagagcatccaataaatataaacagggcagagagagagatgaaattaggaaagataggagacagagtgtctgaagttaattatagcaaagaaaatttatggcatatagtgttgggctgcccttcagaaaactggctgataaataaattcactgaaagccaattccataaaaatcaattcattgaataatcataaaaatatcatattactggacaacttattaaaagggctgatattcttgcagccgttttgtcaatgatttgtctgtcctgctgaaatgaaggtcaaactgtaatatattcaagctattagctcattggctttctgaaaacttcttaaaagagtgggctgaaacactactacacgtgtggtcaaatggtttagtaatctgggctttgcttattagcatttgcatgacctta

SEQ ID NO: 830898 - DNA, 659 bp, Homo sapiens
taggtcacacaggtagtacaggaggatccaggattattttaytttatgtttaagatggagttttactcttgttgcgtaggctggagtgcaatggcactatctcggctcaccgcaacctctgcctccagggttcaagcaattgtcctgcctcagcctcccaagttgctgagattacaagcgcctgccatcatactcggctaatttcgtatttttagtagagacagggtttctccatgttgatcagacaggtcttgaactcctgacctcaggtgatctgcccaccttggcctcccaaagtgctggaattacagggttcagccaccactccaggccagatccaggattttacacttagtaaactgcagagactgtgctcttatgacacattactacatgctaagagtcacacaacaccttgtccaagagcactctctccacttggctgcatgcatgggcctcccagcctaatgtcttgtccacagggcatcactaccatcactaggcacaagtagtgcatgcaacctacagcagccacccagcctacatcacagcacacatacttctgagcagaagagcagaccttcaagcctagagatgcaacactgttttcccaggaaccgacaggccttgcctcttctcccaagagatttataattaag

SEQ ID NO: 830899 - DNA, 508 bp, Homo sapiens
tagttttccagtggagcaacaaatgcatactatatttctgctattgtttcttattaaatattcatatgtatattttgtgtttgcttcataactggccatttactggtgcttaacaagcataggcagtcccgctgaagagaaataacaccaaacaacagtaaacaaaaaagcagacgaatgaaaaaagatatcttatttctgcagccgttacatttaaaaagtgcatttaacatttttaatacagtccatatttcataaatcccacatgttgacatgtcctagagaaagatggatgggttgacttggaggtatgcttctatctagttttatgtgtgcatctggcagagctaatctttacttccctttagcagaacacaaaaatgtaattctctaataactgacatractgcatcattttccaatatggactgcattattaaatcacagagacaagcaaaaccagagtagtggggaagcttgacttctgcttgatatcagaccataaaat

SEQ ID NO: 830900 - DNA, 525 bp, Homo sapiens
tttatagaggaggacactgaggcccagagaggaacaggacattcacaggccacacaccaggcaagaagcagagatgaaactgttacaggcaaggggctggatcccgaccccaagagagcgttctcagatctcccgcaagacaagagttgagggcgtgtctgtagagtgaagcgaaagtatgtttattaagaatgtagaggaataaaagaatgtccactccatagacagaacagccctgaaggctgctgcctgcccatttttatggttatttcttgatgatatgctaaacaaggggtgaattactcatgtctcccctttttagaccatatagggtaactctgtgatgttgccatggtgtttggaaactatcatggcgctcgtgagtatagcagtgaggacgaccagaggtccctctcagggccatctgggttttgatgggttttggctggcttctttamtgcaaactgtttttatcagcaaggtccttatgacctgtattttgtgctgacctcctattttatcgta

SEQ ID NO: 830901 - DNA, 627 bp, Homo sapiens
agcctgctcattccccttgagtccagtcttgacactgaagaactccagcagcaaaakactttggggaataattaatgtgggagatgacgaatggggattccttagcaagactctctaaaaactctcttcacccagctctttgtgcctgactcttcaaagcaaagtccttctcctctgcctctctgcacgatctcctgtgtggtactcccatctccattctcatccttcctcattccatcttttcccagacttagcaatctgtccaggtcccatttacaactccagcctctgtggccctcactcagataagcaaaacaaagggaaggtaactcactaaagggaagataactcacttaatcaaaaatgtgtcctcaccctcattacaaaaagtgatggaggccgggtctggtggctcacatctgtaatcccagcacttcgggaggccaaggtggttggatcacctgcggacaggagtttgagaccagcctgaccaacatggtgaaaccccatctctactaaaattacaaaatttagctgagcatggtggcatgcatctataatcccagcaactcaggaggctgaggcaggagaatcacttgaaccagggaaatggaggttgcagtgagc

SEQ ID NO: 830902 - DNA, 512 bp, Homo sapiens
ccatacagataaggtagctagcttgctacctaaatatcttatgttttagctcaaagtgagagtaaacaataaagatttcttctacaaaaacccaacaaaggcccttcctatttcttagggtctcagaggtacagggttatgagacttgaaattataaaggcgatgtctggcatattcaactgcaggttaataactgcactttaaaataaagcagtttaataactgctttaataaaagcactattcgacatatatttattctatacaaatttagggcaatagtagcatatcaggaggtgttattacaaggttttgagtatgtgaatgtcttaattagtgcaaaatgtaactctgattctctgaaaatattcaattcactttcagttccaatgctcatgtgctgaaawactgatgttagctacttgaatattttaaagtctgaaacattgggaaatgaataagacatacaaacggtgatcagatatctggtacttcagcatagtccttgttcta

SEQ ID NO: 830903 - DNA, 634 bp, Homo sapiens
ttttcaaggtaaacaggagcagtgagcagtgtaactatgtacaagatgtgaaataaagatacaggtaaacagaacaagacatagagaaggrgtgggtggtctcaagtttgtacagagactatcccatcctttataacctatagaggcaccctaatatggatgcagtgaattaattagcaatcagtggtattggtgtctaatagactaagtgcatctgagggacttttacttgtcctccatgcccagcctctttgaaaataataaagtcaaaaaattatagtttcttgttttatcaaaggaacagcctcaaaagggaaaattagctcattatacattaaatgattttctacaaaaaaaagataactgtttatcaaatctcatcatctaaaagacaaaaaaacctgattgcttttaaacctgtgtttccaatggatacaaaagatgttgcctctttttccctctaaagtttgtgtttgaatcctaagttgaagacagaaatttgtagacattttaaatgtgaaatacaaatagttaaaatcattacaatacatcaaagagtgcagctcatattttaaagtaaattttcataattttcttttttagaggcattcagcgtatgtgcacacacaaacac

SEQ ID NO: 830904 - DNA, 491 bp, Homo sapiens
gcattaggaaatcttgcagcttgcttctcttttattaggcaattgtgacacctgctgtcagaaacaaagaacttaccctcttctcaaaagcaggccttttctatggaaaagaaagaaacatggctaggacatgaaaacttctgggtgaagatgagaaaataagttattttttttctgactgtttaaagtgcagtattaagcaggtagcatttttcattgaaacattctaaacagccccaaacctgtgtctctacctccccatccctggctttttccctgaggatgtggtggtgagccatttagagaccaatagttggactaatatttgcaggcatctacccaacctttgggcaggtaggtagcacttttttctagtttctagctacctacatacgtttgcctcrtatctcctttctggagatatgactttattaaggtataatttatatacatgtaaaataaaatgcacttacttttaacaaatgtaacag

SEQ ID NO: 830905 - DNA, 614 bp, Homo sapiens
aattactaaaccatatcacttctaggataaatattctagaatggaattttgtccttagcacattgccagtatagggacgggaaaaaaatctatactaaataacagctgttacaagctgtttaaaaaattgggaaactttcccataaaaataagacaaaatatttttaaagacataaaataatttattctgtcccaacaaatattttacattttcatcctgaatattctatttactaaaatcttttgaggctattgaatagactggtgaaaattttctaataactaggactaaaatgttaatgtgttcaatatattatcaagtactgttgtatacttataaaagataatattcccacagtgaaaaatcacaaagaaaattcaattacccaacaaatataaattctttaaatcactaaaaaagtacttaacaatcaggagatttttttcaatttcagtataagaaagtttgagtgaaataaattttaattataataatttttcaaaaaatcaaatatgtaatatttatcagttgctacaattatccagtatttcaaayatatgtgtgtatacatgtttgcgtgtttatatacacacacatatatgtatggagacat

SEQ ID NO: 830906 - DNA, 313 bp, Homo sapiens
gaaatcctttgctaacctatatatctgcagacagtgtagataattttttgtttatcttataacaaagctaagcataggacataacacttatttagtttaaaatcttctaaaatcacaattaatatgggagtaatataaattatctggtagattgggtttcatatttacttctttataaatttattagyattactgtaggtaaattctaataattatgtttttaatgggctatctctattctttgtcaagaagtagttctcgaaattgtaaatttccaaatttactgctatttcatgtattaaaatgtgcattt

SEQ ID NO: 830907 - DNA, 517 bp, Homo sapiens
aaatattttaagtgctaagctgagtagtttagtagacaaaggtgatcagtaatcactgggtaagatgtttcagcctcagatctacgggccaaatcatytggaattagagacttagagactcagagccagggattggtttggtgatggtggaggaggcaacttaaatatggcaaagagagcagatagccaaccatgaaattccattacatgcttagtgtgcagaggacttttatagcaaagtaaatatttgtacccctatttagtcagcaaacattaaggtgttcggctagtattatcaaagcaaataacttcatcattgtatctgtcctcatagagtttatggttttgcaggtagccagatttttaacaacttcaataaagtgtgatggatgtgaagagggagaagcccagatggctgtggaaagcatctcctggtctgtttctctctctgcccactccatgctgccaacggatgcacttaggaacctttcgaatctggctcaaaacctaccttcat

SEQ ID NO: 830908 - DNA, 628 bp, Homo sapiens
agtatgggagaaaatattcccaaactgtgcatccaacaaaggcctaatttccagaatccataaagaacttaaacaattgaacaagcaaaaaacaaccccattaaaaatgcatgaaagacatagacagacacttctcaaatgaagacgtacaagcagccagcaaacatgaaaaagtgctcatcatgactaatcattagagaaatgcaaatcaaaaccacaatgagatactacctcacaccattcagaatgactcttactaaaaagacaaaaacaacagatatgatgaagctgcagagaaaaggaaacatgtatacactgttggtgggaatgtaaactagttcagccactatgaacagtagtttggagatttctcaaagaacttaaaacagaactaccatttgatgcagcaatggcattactggagatatatatatatatacacaaattattctaccaaaaagacacatgcacttgcatgttcatcgtagcaccacttacaataaatagcaaagrcatggaatcaacctaggtgctcatcagtggtgggttgaataaagaaaatgtggtacatatatgccatgaaatactatacagccataaaaaagacccaaatcctgtcctttgcagc

SEQ ID NO: 830909 - DNA, 593 bp, Homo sapiens
tcaacacctcccccaccttttgctcctggcaacactaatatgttttctgttcctgtggtttcaccttatctctaatgtcacagaaggtaggctttaagtctggtctctttcacttagtgtaatgcatttgagattgatccaagttattgcatgtattaatagtccactccttttcaatgatggtcaggattctgttgtgtggatgtaatataacacagagcttatttagcaattcactcaatgaagatcagttgggctatttccagggtatttcggctattatgagtaaagcacatataaaaatttgtacacacagtcttagaggacataagtttcacttggctaaatgcctaggagtgaaattgccaggttgtacagtaaccctatgttcaattttataagaaattgccatacttctgagatgggagagttcccttgaccccttctcgggacttgcgacaggggtgtggcctacttacttggccaccaccatgctcaaactctctgtgggagcgggagcacgcaggcaagygggtgccagggcttcgatgagcacttttgggctccagcccaacagcagcatttagggatgt

SEQ ID NO: 830910 - DNA, 519 bp, Homo sapiens
gttctcatttagggccatgggtatccaggcatgagggtggggcctttgccatggaactgccttcttctgcccagtatttccatttctcctgtccatattgatattccactaacagtcataaagtatttggatgagctagtcttgccccttggaatttccatttggtagcactttcaggtatgttctcacagtacccactgagccacttgaagaatcagtttggaatagagtagaatgttatgtagttaataacaaagatatttaagaaatagctggattttttaaaaatgtgttttttggccaaaaaatcattgtggtgagtagtggagttagtctgtactgcctctggttctctcaaattctcctaaagaggaagaaactcagcccagaaaattttagggaactcaactccatccatattaagaacatgttatcattagttattgcatgatttgaagctaagtcatcytttcatatttgtcatgtttactatttatttcctactttttgtggggacat

SEQ ID NO: 830911 - DNA, 605 bp, Homo sapiens
cagagacgatcataatgatatttcgtctccaaatatctcgtgtcttctaatgtgatagaaaagaaacaaacaaacatctactgcttttcatttggaagacacacatgccagatgtggttaaagtttgtccatggaaagtgaaatttcaaattgtgaacataccccaaagaaaatattaaggacaaacgcataacaactaaacattaatgaatactgttgtttatttcttctccctttccttcatattttccgtaaaagttttaaagattaacattttaatattttatcaaagggctcatgattatttgacattgtctgataagatgtgtctaaacaagaaatatatatatatatattgtatatatatgcatatgcacacatacatatttatcatgggtgatgtatcacatggaggtcaaattgtgctcccttttctaggaagggacacttttccctaaaatttagccagtatgctgcacgtaggccaatgcagctagaaaaagtctcactcactctcaagggaaaggggcgggggaacaagactattgccaatcaaacaacacctgttaaatctgcctacttgggcwtacattacaatgacccat

SEQ ID NO: 830912 - DNA, 595 bp, Homo sapiens
gacaaggcatccaagagataaatctttcggattctttgaagggtggagctacctaatatttaattataagttatgtgttgattggatctttgctgttacctacttggcattaactcccaaatttaattaaattctacttgaagaaatggccctgtcagagcagtgccttgagaaaatcaaagtaaaataaattttgtttaatctttggatcaatatttggtacagaaaaagggaacagctataagaaacaaaagggggaaaatttaaagacttgagagaaagcaaaatattgagtaggaagacattataagaaatacaagctcttgtaaatgctggaaaatagtgggaagttagtgagtgatgctgagttgtccactacttctatatgagattggattcatttttatttaagttctgtcattccatgtaagtccagtctggaaggcttgaggatgtctaggaagctgacgtgttgatagcartctcaacgtttccaatcctggtttattataagatttttctaaattacctctactttttcagacgtggacatagctctccagaggctaaacatacaatccaaactcctgagaat

SEQ ID NO: 830913 - DNA, 550 bp, Homo sapiens
tgggtttcaccatgttgaccaggttggtcttgaactcctgaccttatgatccgcccaccttgacctctcaaagtgctgggattacaggcatgagccaccacacctggcctcgtatatattttttttccccctcatagagatggggtttcaccatgttggccaggctggtctcaaactcctgacctcaggtgatccacccgccttggcctcccagagtgctgggattacaggcgtgagccactgcgcccagcctctggtatggtatttcaatgcccacttcattctttgcttgaggtgtcacttgtattttgctgaccttgttcttagtttcaaataactcatttattttgcagacatagaaattttgtcattctttatgaaagcaatgcggctgttctactgctacttcttggcaggcaayacctgcatagaaaccaatgagcatggctgaagtgaatgtcagacattctatttctgtctgcccacggtgcagcaaccactgacacacttggggcaacctgctttacccaaagtgcagcccgggatgagg

SEQ ID NO: 830914 - DNA, 350 bp, Homo sapiens
atactctttcctttcaagtgaaaaaaaaaaaaaacagtatggcatattctctaacaaacacagaatttctaatatttgcggttttccttccttctttccatcttcctttgtcttctcttcccttcccttgccttcttccttcctttcttcttttcctcttccttttttcttttttcttttcctttctttctttttcttttttctccttccttccttctttccttcttycctcttattcttccttccctcctccctcccttcctttctccctcccttttcttccttcttttctcgtattctttctttctttctcacgttcttgctttctttccttttttctcccttcctcc

SEQ ID NO: 830915 - DNA, 613 bp, Homo sapiens
gattgaaagtaacagtccttgattattttcttatgagaaagaggtttattcccagatatcaacgacatttttctacagccagaaacactgaatgaagtactacaactcccaaagtgcactgcttccttagctcttcctggaccaaacccgtttcattactgcctttacatatccataagtaaaccatgcatgtagattaatatagatgcatcagggaaggtgttgatcagtgtatgaaataatctatatcatactacctattaaaataatatatgcaaagatattctctttcttgtatcaaacgctattcttccaccttctgcaataccttgttcatctcttacacatttatgtgttgtcatctactatgaattgataaagaagctgattaaattcaagataaatttatcttttaggtactattaattatttctgaaagaacacatagtgtgaatagatatattataattcatattataaatacyctgcatgctaatacttaaacattcattgtttctgaaatcccagctccaacatgctttaggcagaagaatttagttgaagaaagaaagagcagagtaaaggggcatgagagggacaatcctagagactg

SEQ ID NO: 830916 - DNA, 508 bp, Homo sapiens
gtaaagtagtaagtctttatttaatcaactgtctctccacaggatgtaatgactagttgaaagaaggaagagtaagaataatttctaaatttctgttttgataaactgatttgatggtattatttaactccacacatattttatcacgcactatttaagacaaaaagtctccaagatttaaaagcagattgtcatggctaaccctgccccaaccttgttgtactctgccaactgccctgatagcttaacacaaaagacataaacttttgggagcttttgtagcgctgcccattgcttatgaaaccagattacttccccctgggcaatttggggcaagctcaaatcccactgctattactacagctggtgctctcttgcaagcactgcctcctggctggagactgtcagtgtattatcatgtctccaggtagaataacactgcacycaggaaggagaaaataaatacataacctcagctatagccactgcatacaacaccctcactaac

SEQ ID NO: 830917 - DNA, 519 bp, Homo sapiens
taccaaacattgaatgcagaattaccatcaatcctacccaaactattccaaaaaacagagaaggctgcagtatttccaaactcatcctatgtaaaagaccattcatcacgtctaagtgggatttatcccgatgatgccaacatggttcaacatatgcaaatcactcaatgtgacacataatatcagcagaatgaaggacaaaaaccatatgataatttcaattgatgctgaaaagcatttaataaaattcaacatctctgtgataaaaagaaaccctaaaaaaaaactagatatagaaggaacataccacaacacaataaaaaccaaatgcatcagacccacagccagtatcatcctgaacagggaaaagctgaaagcctttcttytacgatctggaataagacaagaatgtccacttccaacactgttactcaacatagtactggaagtcctaactagagcaattcaggcaatagaaaaacaataaaagggatccaaattggaaagaagtaaaattat

SEQ ID NO: 830918 - DNA, 263 bp, Homo sapiens
ataaaattcaacatctctgtgataaaaagaaaccctaaaaaaaaactagatatagaaggaacataccacaacacaataaaaaccaaatgcatcagacccacagccagtatcatcctgaacagggaaaagctgaaagcctttcttctacgatctggaataagacaagaatgtccacttccaacactgttactcaacatagtactggaagtcctaactagagcaattcaggcaakagaaaaacaataaaagggatccaaattgga

SEQ ID NO: 830919 - DNA, 647 bp, Homo sapiens
atcttaacctgggaatacctggtcttctgttttcttccttctcatgtaactcttcattgattttctttaaatcaaacaagctgccatcacagactcttacaaaagaaagtcagccatggaggaaccctgggcttggaatagaagccaatctaattttagttgccggtgagcctctctaagcggtggagagtggtcagaagttcatcttggcatgtgctatcaggacccaacaggagccagccactgtcacccggccgtgggagaggggcgagtgcctcgctgatgacaagttccaccatcattttatgatgaggaagcttgtctgctccaagtaggtctttcatcctctactttttaaaaattaaaattgcttctgatttatggattaatctcttgccgacatcatgggtggggggtgcagtgcttcattttgataagcagctgagccccaagctcttgcttttcttcacgggaggttcgattccttgcctttggctgaagtcagaggcttgggcygactgtgagctgtcaggacaattcccagttgatgcctgcaggattcctaaacttcacagaccatcctactgaatcttgttataaggatactgcattttaaaaaaaattgaattgtttggtttgttcatact

SEQ ID NO: 830920 - DNA, 526 bp, Homo sapiens
tgaccttttacaggaattacttccacaatagcttattctaccaagtccactgaagttgtggttgcaacaatgaatttcctgttgtgagatgcaaattgtgggctaattgcaagatttaatccaatctcgtttggggcagttcttgaaaaattgggttcctgctgcactatttcatgggtcagtatcaaatattctgtcacgaagatgaaataacacgaggaaatttttaaagagggagaaatagtaatattcagaatgcaaaagctgtcagaaatatcgactggtcttgaatcaaatgggttttgctttgtgaataaaggtggtaatgagacacggaagtcatccagactatgcagagctccagcagaggctccaaaaagaggggcagcaaagatgccaaccagatatgcatmataaagtagaatgaggaaaataaatctgtgcctgttccctggttagtagtcactcttatgcaagacatcacactgttacacctgtctagaccttgcatgtgatctggcctgaa

SEQ ID NO: 830921 - DNA, 526 bp, Homo sapiens
tgaccttttacaggaattacttccacaatagcttattctaccaagtccactgaagttgtggttgcaacaatgaatttcctgttgtgagatgcaaattgtgggctaattgcaagatttaatccaatctcgtttggggcagttcttgaaaaattgggttcctgctgcactatttcatgggtcagtatcaaatattctgtcacgaagatgaaataacacgaggaaatttttaaagagggagaaatagtaatattcagaatgcaaaagctgtcagaaatatcgactggtcttgaatcaaatgggttttgctttgtgaataaaggtggtaatgagacacggaagtcatccagactatgcagagctccagcagaggctccaaaaagaggggcagcaaagatgccaaccagatatgcatcataaagtagaatgaggaaaataaatctgtgcctgttccctggttagtagtcactcttatgcaagacatcacactgttayacctgtctagaccttgcatgtgatctggcctgaa

SEQ ID NO: 830922 - DNA, 521 bp, Homo sapiens
gggttgtccaggctgtattcacatkcacatagattctggtctagatgcatggcgccccctagagttgtgtctgcagctgtttgcagtgcttccataagcttctgagggctctgtccatcatttctttccaggtgacagcgtggaataccaatggtaagtgtaatattccactggattaacaagaatttggttcacagcaaggatttatagtcattctgataacaaatacggtacctctttttcttgtatatatatatataggagttacctgtgtatgtatgcattttctaataagaacttagatataaatttttagctgtcatacttccatatatttaaagtataggtaattgtcagcattgtctagaggacagagaaataggcattctcttaaattcttatctggtagcatatattgttagagccttttgacttttaggaaaatttggaaatagctattacatgaaaatgctcatatcctttggccaaacagaaatgcttccataagcgttcaaatatat

SEQ ID NO: 830923 - DNA, 521 bp, Homo sapiens
gggttgtccaggctgtattcacatgcacatagattytggtctagatgcatggcgccccctagagttgtgtctgcagctgtttgcagtgcttccataagcttctgagggctctgtccatcatttctttccaggtgacagcgtggaataccaatggtaagtgtaatattccactggattaacaagaatttggttcacagcaaggatttatagtcattctgataacaaatacggtacctctttttcttgtatatatatatataggagttacctgtgtatgtatgcattttctaataagaacttagatataaatttttagctgtcatacttccatatatttaaagtataggtaattgtcagcattgtctagaggacagagaaataggcattctcttaaattcttatctggtagcatatattgttagagccttttgacttttaggaaaatttggaaatagctattacatgaaaatgctcatatcctttggccaaacagaaatgcttccataagcgttcaaatatat

SEQ ID NO: 830924 - DNA, 612 bp, Homo sapiens
ttgctttgcttggtagcagttcaagggaataaaagcattttcttgcactccacacattgcrgtgtctaactcctcagcctttgcaccaaagaggcaaatctagaatgtgaacgttggtcacatgtattttggccttaggatgaagtcctgcctgttagagtctatatatgaggcttaatattcagtatttattttccaggttgccctaaatctgggcacagccaccccgccacctccactttcactgaccctgttaaccctgaaaagaaagttaaatcctacaactcaagcctagccctgcaaaactgaagctgtagctctcaatcaaatagtctcttgccatttttaataaattggattgtggattaatcttgggagtatttgggcccctgatgaaacattctctttcagggaagatcaaaattttcctatttgcatagaaagtttacaaataaaggttctttaaaaagataagtctttaattatttggttattaacctagataacctctaagggttcttaaatctaatgatttattttatttgagttgcatttgtcaagttctcaccatcttgccaaattacttcagacaatagcaatatctaatgtttt

SEQ ID NO: 830925 - DNA, 407 bp, Homo sapiens
aatttttgtgtttttttagtagacatggggtttcaccatgttgcccaggctggtctcaaactcctgacctcaagtgatccacctgccttggcctctcaaagtgctgagattatatacagaaaccaccgcactcggtccttctgagactttcagtaactataaggtagtaataacactgttgtcactactataatgttcagaccaattgtgcattcaagactgggctttggtttgttgtgttactatttattgaagtaatgagatggaaaacatggtctctgctggcatcagaattcctctggrggtggggaggcagaattctctttttagggaagatattcttggtgagatgcttgggggaaaggtgagaccttgagggcatgggtgagaagttaacaaggtggggg

SEQ ID NO: 830926 - DNA, 407 bp, Homo sapiens
aatttttgtgtttttttagtagacatggggtttcaccatgttgcccaggctggtctcaaactcctgacctcaagtgatccacctgccttggcctctcaaagtgctgagattatatacagaaaccaccgcactcggtccttctgagactttcagtaactataaggtagtaataacactgttgtcactactataatgttcagaccaattgtgcattcaagactgggctttggtttgttgtgttactatttattgaagtaatgagatggaaaacatggtctctgctggcatcagaattcctctggaggtggggaggcrgaattctctttttagggaagatattcttggtgagatgcttgggggaaaggtgagaccttgagggcatgggtgagaagttaacaaggtggggg

SEQ ID NO: 830927 - DNA, 407 bp, Homo sapiens
aatttttgtgtttttttagtagacatggggtttcaccatgttgcccaggctggtctcaaactcctgacctcaagtgatccacctgccttggcctctcaaagtgctgagattatatacagaaaccaccgcactcggtccttctgagactttcagtaactataaggtagtaataacactgttgtcactactataatgttcagaccaattgtgcattcaagactgggctttggtttgttgtgttactatttattgaagtaatgagatggaaaacatggtctctgctggcatcagaattcctctggaggtggggaggcagaattctctttttagggaagatattcttggwgagatgcttgggggaaaggtgagaccttgagggcatgggtgagaagttaacaaggtggggg

SEQ ID NO: 830928 - DNA, 615 bp, Homo sapiens
ataacacatcagtgttgaggtatgttcagttgaggtatgttcagtgttgaggtatatcagttgtcattgttgacaaaacttaagaccttgataatagctagcgctggggataatgttaagaatgaaaatactccratatattactgaaggaaatataaattgctacaagatttaaggaaaatactcaagctgtgcttattaaagactaaaaattcacttaccctttgacatgataatcacatttatgagagcctattgaacagaacagaagtaaaagcacaaatatataataaaatatgtagaaggatgtttatttaattcttgaatgttatgtttgaaaaatcttgattcacctaaagccttatgaataggcaaatgggtgtctatattttgttagacttattctgcaattacaattactaaaaagaacaagacttgaaaagatgttctttatacgttagtaagtttttaaaagcacatttcagagtaatatgtgtaatgtcagttttataaagtaaaataaaaggaacaatttttctgcgtgtgtgtctgtgaacaaagataatgatacagaaagatatccatcaaattactagaaacagccaggcacagtgg

SEQ ID NO: 830929 - DNA, 650 bp, Homo sapiens
ccgtctcagcctcctgagtagctgggtgggattacaggcatacaccaccacatctggctaattttgtatttttagtagagacagggtttctccatcttagtcaagctggtcttgaactcccggcctcaggtgatcttcccacctcggcctcccacatggctgggattacaggcgtgagctaccgcgcccggccgcatatgaaaatatttttactgataggggtgcatgacaaagaagttggaaacatatcattcacattgttactttaggcttagctctttcttctgcttcactgttggtctttaactggctatagtggaatagtcacaaagtaaggagacttagcaaatatattccagtaatagaaagagggacctagtgtctcccaaagtgaaaagtgggacatgattcctaaaatactgacagtggcattgtaagcaggcatatccatgtaactgctggcgagggcagggccaagacgtccagatcgggctggaagtgcttcatcatataagcaaaatgttatgtgatatatcaacatgttgatgtagtggaaagtagcgtttccataaatttgtttttctggtcaactggaaattagaagccaagagtgattgcamaatatgttaatagagctatgacctataaaa

SEQ ID NO: 830930 - DNA, 498 bp, Homo sapiens
tgacaccatcaaattatatttcacatagttttactattaaccatacttaattgaagttgagtcatctgaaaattggtaaaagaaaaagccagttaatcygaatattcggttagcttggaacatcattttgagtgaacacaaacgctgccagcagttggcttttcacagaggctgaaacgaaacgtgtggcttctgccaaaatacccacgtcaacgctccccttcgtggtgacgcaaatgtcagcacaaaactcagtgccccaattagggggcatgtcatggctgcgtgagagcatttcagcagaactgtagtgtttcattcacaaaatcccttccatagggtcattcttgatgaaaatatctgcatttctcaatgattttgctctaatttagtttgcacctgccaaaacatatgtatacaaactatatttaaaatcttgaacttgctctgaattgatctttattcagttacttatttctcttttttttgaggcagagt

SEQ ID NO: 830931 - DNA, 574 bp, Homo sapiens
ctccaagagggaacagcacacagtcttctgactatgatgaatgacttgcagtttcccattcactctgctcattgcttacttgttctcatgtattatttccttaggcttgaatgctctttccatccttcccctgtggcttgtttccggagctcatcttcatccttcaacactcagcttcaacgtcaccatctccaggaagactatgcagatatatccaggtttgcatgaacagagtaagttctccaaggtgtctattgacctactctgcactgctgtaattatttacatctccccttttggttggatgaatagtccttaaaaggcaggaacagtccctcagagctgaatctgtgatctgacacacggtaggtgcctaataaaaatatacgtcaaatgaataacagaataaaatttaaaatatgcatctgtaattaaagtccaacagataaaataagtaytgtttttgtaagtgcttgcaagaaacagacactaatgcaactctggcttagaccaaagaatagtaatttgttggattatatgactgggaaattcaaagggtgggtctggatccaaa

SEQ ID NO: 830932 - DNA, 662 bp, Homo sapiens
ctggttcatactctcaaagagcttaacacccaggtaggaataaatyaggcaggtgaaggtagcttatgctgtggtaacaaataccacctataaaacaaacaacaaaagtttatctcccattcaggtacttgctcaccaagggtgggtgacaaccttcttcagggagagtcaagagtggctctgccaccgggaatgctgccagacacctccattggagaagatgaaactttcatgttagttctacttgtgtctccctgtaagccacgcgtcactttcacatttatttttccttccttagagaaaattatatgagaatttctagcttcacagtgatggagaagtatgaactacttctctgcccagtagatattagtgaatggtggcaacagactgcagggagacaggcattaaacagataattactggatgacagataatggagagtgcaatgaaggaaggaaggaaaagttaaaggtgccatgagaaagaaaattggggacttaatttggtttgcgagattcagggaatgcctctctgagagatgatacttaaggtggaacgtaaaaacatgtctgtaagagtctatgaccttatcatcctgagtctaaccagactaactatccctaacttgggataaacagtctgaaccactcatccaacca

SEQ ID NO: 830933 - DNA, 495 bp, Homo sapiens
gctaggatgtaggatatagtcggtcagctggacttttccttgaacctctacctaggtatacgttccccaaaatttatccacatttcaatttcttgcattatatattagatatccaaggattccctagtgacccttgccaaggcgtaagagcccctcctgcgtgctgactgccccatacgcgcccactgtcggtgccgattacagcaacgtcatcttctcgtcatcgcccacaccgaagctccctggtctctccagattatgcctgtggggctagtggacgagtggggcttgtggactcttgctggcttctgctttttcatccgtttcgaaatgcagactttgtgtggcctaacgattcacttattgtttcaaccatttccactttccctggattttaygtgtgtctctgagaagagagagttcccccacgtacctactgaggctctttttgcgaaaggaagttgcctcactgagactgggtaacacttgagggtt

SEQ ID NO: 830934 - DNA, 589 bp, Homo sapiens
gcagaggttgcagtgagccaagattgtgccagtgcactccagcctggstgacagagtgagaccctatcgcaaaaaaaaaagagtaaatattttcttttttagaaatgatcttctctgtaaatgagtccatagatatgtctgctcatcagagagatgcatgcttatatcaacaaaggaagaaagaaatggcatgttgttaggttagatggccgtagttgttccttctgttttcctaaaatcaaataaatatttccctttccataatcattgatattctgtttgctttgtaacatgactaatttattcggtactacaaaaactcctagatggatagatacagagataattttctgaacaaaattgtctctacattttgttctgtgtgccttcttgtccagggtttcacctaccctggttatttgatggaagggcatcagggtagagctgccacttagggcacacagcacaggactgcccgggcggcagaaagatgcacattcatgttccaaggcacgtccaggcaccgggtgctgagggcgtcctgatctttgctgttcttgctagcatttcctgagccccttgcactggt

SEQ ID NO: 830935 - DNA, 633 bp, Homo sapiens
tgcctgccatagtgagtgcctggcccttggcagactgtcaaatggagctatggagcagcagcgggagtaatattattatctagaccttatckgtccttttaaactcagttcagattccttctcctttttaaattactgcaacctgattttacctgcccctgcctccaagttgctgtatcagttagcctctgaacaattcatttagcaattttaattatatattgcttcttgacactgctttgtgatcttaaaaactctgcttcaaatacgtacttggttgcttttcctgagtgctgttaattcctgctctaacggactaaagtaatttgaaggcaggactaggttttatgcatggcacacagtctggtgccttacatgtaactactcacaaacttttttgatccaaaatttagaaacttcacacgcattcataagaaatcaataaaaataagctaagttggtttcagatacagagggttcccaggaaggtgtgtacattggcaattagcccaaatgtctttgttcataatttttttttttttttttaagtagagacagggtttcaccatattggccaggccggtcttgaactcctggcctcaagtgatctgcctgcctcagcctcccaaagtg

SEQ ID NO: 830936 - DNA, 592 bp, Homo sapiens
tagctcctaggctacagcatgctaccgcactgaatgccataggcaattgtaacataatggtaagtatttctgtttctaaacatagaaaaattaccataaaaatatgayataaaaaataaaacatggtgcacctttatagggcactcaccatgaatggagcttgcaggactggaagctgctctgggtgagtgagtgactgagtgagtgaggagtgaatggaaagacctgtgacatgactgtacaccgctgtagactctgtcaacactggacactttggctacactaaatttatacgaaccttttttctcttttcaataataaattaaccgcttactgtaaccttttaattttatcaacttttaattttattttaaaacttttgacttttgtaatcacattgtaaacacacattgtacagctgtacaaaaatattttatttctttatatccttattctatcagcttttctattattaaaatttttaattattttatttttcatttattttgttaaaaactaaggcacaaacacacacattagcctaggcctacccagggtcaggatcatcaatatcactgtcttccacctccac

SEQ ID NO: 830937 - DNA, 621 bp, Homo sapiens
catcttatagtatgactgttaaaagtttaataattgcaagggatagtgaaagctagaagattaacttggaatattgcaaaggataggaaattcaaattcaaagttagacaactttgagacacatgatactataaattaatttcttaaaatattttaggggtcatggtgtttgaatcttcgattttaaaacaagttttaagggagagaattgtaattttgaataaataataattgttttaattttagtataaacagatacttaatgagcccctacatatgtactgtttctgtggtggtcttagatgatacagccaagaacaagacagacatgacccttggccttgtagatcatggaactggtgggaaagccagacattgagccagtagtacggtcttagtaccaaaagggacatccagggagtccttgctcctgcaggagcaagggaatctgtcctcacagggaggttgggaggaccactttaaggaaaccttccagctgagacctagtgaagaggaagaggagagtgttctaaacagaaggaacaacrtatgtgaagacccagcattgagagatcgagactgacattaagaaattagggaaagcttggtattgggagaata

SEQ ID NO: 830938 - DNA, 288 bp, Homo sapiens
aaaaaaaaaaaaaaaaaaaaaaaaaaaaaaaaaaaaaaaaattgaaaagggttggtcaaaaaaagaaacacgactttggcataacccaaagcagctccggactccgytttcatcacccgcctccgataaagcaggactatatacaggaaggttaaacccccactccaataaaggaaggttaatccataaaatcccgagatttctcacaaactctctggaacaaatgaagcagcctcaggagataggaaatatcataggataaaagctccgacatacccccaggctctc

SEQ ID NO: 830939 - DNA, 546 bp, Homo sapiens
gggtcatgcacagtagcattctataatcaacagaagtggtatatatgcgattgggcttgaacaggccctgaaggcacaaataagttacatgaggaagtggctcaaatgcccattgtctattcctgccaccmtgccttctcttccccagcctgcaccgatggcctcatggggagtttcctatgatcagttgacagtggaagagaagactagagcctggttcacagatggttctgcatgatatgcaggtaccaccagaaagtagagagctgcagcactccagcccctttctaggacatccctgaaggacagcacggaagggaaatcttcccagtgggcagaacttcaagcagtgcacctggttgtgcactttgcatggaaggagaaatggccagatgtgctattaaatactgattcatgggctgtagccaatggcttggttggatggtcagagatttggaagaagcatgagaaaaactggtgacaaagaaatttggggaagagctatgtggatggacctttctgcgtggtcaaaaactgtgaagatat

SEQ ID NO: 830940 - DNA, 617 bp, Homo sapiens
tgatgattcagcaatgttgaagtctccaattatagtagtgtgttctctttgtagttctatatgtttttcctcatatattttgaagctctggtgttagggacttaagtactaactgtcattatgtcttcttagaaaattggcccctttatcatcatgtaataccattctttagctgtgataatgttccctgctctgacatcggtactctaaaattaatgttgctactctcattttcttttgattagtcttagtatgctatggctttctccatcctttgctcttaatctctgtatgtctttatatttaaagtcaatttattgtacacagcgtatagtttgtcttgtttttgtatcccactttgacttagttttttaagtagaatattttgaccttttaaataaaaagtgactattgatatagttgaatttatattgaccatattgtaattgtttcctatttgatgtctttgttatttgtcactatttttgttatctactctttttctgccttttatgtttttaataaagcatttgcagtattctattttctctcctttcataggtagtacaagtaccaamtaataataatgtatttctaatttcctccctcttgttcct

SEQ ID NO: 830941 - DNA, 581 bp, Homo sapiens
cgtgagctaccatgcctggcagtcctcttcagtttctttcatcagtgtttagtggttttcattatgggaatatttcacttctttgggcaagtaaattcttaggtatttaatttttttgtagctattgaaaatgggattgaattttttaatttctttttcagattgttcattttggcatttagaaactctatggattgtttacattgattttgtatcctgcaaatttactaaatttgtttatcatttccaatagttattatggtgaagtctttatgttttttcaaatataagatcatatcatctgcaaacaaagataatttgacttcttttatccaaatttaaattcctttttttttctcttgtctggttgctctagctaggacttccagtaacattctgaataacagtggtgaaagtgggcatctttctcacattccagatcttagaggaaaggctttcattttctgccattcagtatgatgctaactgtgtgtctgttgtatatagcttttaytatgtggtgatatgttccttctatacctgttttttttttgggagtttttaatcatgaaggggtgttg

SEQ ID NO: 830942 - DNA, 617 bp, Homo sapiens
gacaggcattcctgttttcatgctgaaaaactactttttgrcctgccatgccccctatcctgtacccatattaaccccaggcctcaggctccagaagcagaaaaggagaggagcagacaaatagcagaacagtgtggcagagaaagagagaagagaaggggtgtctgaacgcctagaggagtttgactggtgatgtatggagaggatatcggctgctgagcagccaaactccaggggaagatcatcttcccactctatccccttcccagctcctcatccgtcttgctgaaagccacttccactacttaataaaccccctgcattcatgcttcaagtccgtgtgagacctgacactttcgggagactgaacaagagctcaggatacagaaaactgtcacactggccttctgctcttataaagaggcagagggtccactgagctggataacacttaagctgtccatggatggcaaggctaatagagtgcactgtaacaaacactcatttgggctttggtagtcacaggctcccacctctggaggctgctgtggggctggagtccagtgccctggctcctaccactgcctgtctatgtgctcctccctcccataaggggt

SEQ ID NO: 830943 - DNA, 485 bp, Homo sapiens
ctattatagttaataatccttatattaagcttcctctgtaaaacctacagagttttagttttatagcttaattcttatattaaacttcctctgtaaaacctacagagtgtggtttctatctcctgatcactacaatccaagaatattctttgcccagtgcagtgcctgacaccttggaagttaccagtaaatattcattgaatgttcaacaaatgaatggagggatgagtgaatgagaggggtaaaggatccctaactcttgcacattggctgtcttgcagactagcatttcaatgtctcctgacaaagcatcatctctacttttgtcacatctaatcaaagagtcatcaaatcattagcaaggagtttggtgaccataatcttctggttmtgagccaaacagtgttagtttctaagtcctcagaaattacatataagttttaccctttatattagtcaagattctccagataaacagaaccaat

SEQ ID NO: 830944 - DNA, 501 bp, Homo sapiens
aattgttatccatggacacaatgctgtacatcagatctctagaatttttcattgtgcatacactttgattagccactctacatttccctctaccccagttccttgccattatcattctgttccttgtttctatgatgctgtgatctgaatatgtttccccaaattcatgttctggaaacttaattcccactgcaacagtattgggagatgggatcttctcgggggtgtttaggtaattcttgagggcagccctcaagaatggattaatgcctttataaaagggcttgacagagggagtttgcccctttttcgctttctaccttttgccatgtgaagacatacatttccctctccagaggacccagtgttcaaggtgccatcttggggaagcagagagcagccctcaccagatgyctgcatcttaatgatggacttccagcctctagaactttgagaagtaaatatctattctttataaattaccatatgtgtggtattcta

SEQ ID NO: 830945 - DNA, 471 bp, Homo sapiens
tttaaccctcttaacaacctgtgttatgtataattatcccccatttttgacagctgagaaaactggggtgtaaaaatatttaagggatttatccaaagcataaaaatagaattttgtcgtgtgttattgtcatttgtgtccatgttcaaacctgctctgtcccacgaaggatttgcaataatttaaagaaaattacctttccacagagtataacacctttacaatatcttttcttcttaatcttacaataaaaaacgtgtggaaataattagatattgagactactgaaaattaacatcaagatagacgttcaaggctagtggtaaggaaagagaaaaatccaccagctgtaagacacctaagtactgtgcggaagaakaactgaagccaaggtcttctgcttagtgtgcagggcttgttctagtccacaatatctgcctttcttatacagtgccctgttctagcgcaact

SEQ ID NO: 830946 - DNA, 442 bp, Homo sapiens
aagaagaggcagagagatctgcagctctactgaagggaaattatattattgaaagaaaccgtaaggaagtacatgcctaaggatattgtcaaaagcaataaaggtctgggtggtgaacaataaagagaaggctgccaggtccataatatttgtagaaataagccaagcagttggccagctagaagtttaacagaggaacctaaggaaagagatagctaaaatgagcccttctgggatcagagcaaatgacaagctccagaaggagatctatatccagaattactaaaatgtattttcaaaaatgtccagttttcagcaacaaaagraaaaaaaactataagatatacaaagaaatggaaagcatgatgcatagagagacgaaaaaaatcaggcaataaaaatagcctttggggagtccatttgctagacttaaaaaaaagtc

SEQ ID NO: 830947 - DNA, 493 bp, Homo sapiens
gaaaatagtgaacacaagaggagaggtaggtttgctggggaagaaaaacagttccagtttagatggattgaaaatttctatttcaattaaacatctgattggagatgttggcagatgtgtatacagatgctccttaaattatgtggggttacatcttgataaacctattgtaagctgaaaacttttttttcatttatttatttattttgagatggagtcttgcctgtcacccagattggagtgcagtggcgtgatctcggttcacttcaacctccgcttcggggttcaagcgattctcctgtcttagactaccaagtagctgggattacaggtgcctgccataacgcccagctaatttttggtatttttagtagagacagggtttcaccatgttgtccaggctggtctcgaactcctaacctcaagatatccacctgcctcagcctcccaaagtgctgggattgcargcatgagctactgcgcctggccagaa

SEQ ID NO: 830948 - DNA, 609 bp, Homo sapiens
aaatatacaaaagattttcacatacccaccacattttttagaaaataaaacatcacagggytagttgaagcagctcctctgtcctgagatgtaattaataattggaatatcgtgtgtctctcccccaaaccatgtctttatgctttaccacatatataggtaattataaatcattaataataatatgtttgtattttacagttccaaatactatagttggactttttattgatctggtaatttctatttttaagaatctttttaaagtattatttttttacagagacagggtctcactctgtcaccaaggctggaatgcagtgatacaattatagctcactgtaaccttcaactcttgagctcaagcaatcttctttcctggctaggactataggtatattccacaagtaactttttatttattttgtagagaaggagtctcactatggtgcctaggctagtcttgaactcttggcctcaggcaatcttcctgcctttacctccggagacaatgggattacagacatgagccaccatgcccagtatgtccattttctattattgttaatacatttaaatgtatttttacaattttatgctttctctttt

SEQ ID NO: 830949 - DNA, 541 bp, Homo sapiens
tatgaaatctgcactttctcggagtcacaatatcacagctttgtagttttgctgtagattcagttcaracgactattctgtccacagatattatacacactaacgctcctttcactctacacaccagttcttttgtttgtttgcttgtttgttcaatggattggaaaatatgcgaaaatataaacacgcttttagtatggttgggtgcctgattgctcttctaattttggaatgccttaaactgttgttgggctcagaagacgtcctctggcttgctgaggacttggagcaaagggcctgggagggccttggagggcctcagaagcaaagtttctgaccttctcctcgccttcctcctcctgctaaactttctcccccaaggccgaccatagaaactaggaaactagggccgggtgcggtggctcatgtctgtaatcccaacactgtgggaagccgaggcgggtggatcatctgaggtcaggagttcgagaccagcctgtccaacatggcaaaacctggtatctactaaaaatacaaaaat

SEQ ID NO: 830950 - DNA, 534 bp, Homo sapiens
gttgcaaaataggtagacataaacagagaggaaaacagtrttttcatacagaacaatgaagaggaagtactagatttaattggacacacgcttctcacatttaaagatggggaggagataatggtgtccctttgtgtccttcccaaagaaatatggggaactgataatgcctcacataagtcttaaaggaagaaaatgtagagcatgcacttttgcagatcactctctcattaacaaacaagctcagaagaaatgtggtctcaatgaaatgcttcctttcttggagcttaaatacggtcaaatctaaatatctaagaaatcaggaagtttgacatctttaaccactaaagattaagacaaattttttacatgtaaagttttatctggatatagggacttcctgatcaaggaaatagttgaaaggaataaaaaaaaacaactgagtcacagaacattccatcaatgaattattgtccaggtttgttcagaagtggtgacactaatattattttgctcaaagtaaataaactgcat

SEQ ID NO: 830951 - DNA, 534 bp, Homo sapiens
gttgcaaaataggtagacataaacagagaggaaaacagtattttcatacagaacaatgaagaggaagtactagatttaattggayacacgcttctcacatttaaagatggggaggagataatggtgtccctttgtgtccttcccaaagaaatatggggaactgataatgcctcacataagtcttaaaggaagaaaatgtagagcatgcacttttgcagatcactctctcattaacaaacaagctcagaagaaatgtggtctcaatgaaatgcttcctttcttggagcttaaatacggtcaaatctaaatatctaagaaatcaggaagtttgacatctttaaccactaaagattaagacaaattttttacatgtaaagttttatctggatatagggacttcctgatcaaggaaatagttgaaaggaataaaaaaaaacaactgagtcacagaacattccatcaatgaattattgtccaggtttgttcagaagtggtgacactaatattattttgctcaaagtaaataaactgcat

SEQ ID NO: 830952 - DNA, 585 bp, Homo sapiens
ttaagtaccccttgcagtttacatgaacttatgaaaaggagtcccctggttactgagtgtagaatagggcctccctctgactagggcctccctctgactgtcagtttgacagactgaggcacattcagggttcgcttcttcagcaacatgaaaagtataatcatcaattgatatctatttatcagcaacatggaaagtatcatcatcaattgatatctatttatcagcaacatggaaagtatcatcatcaattgatatctatttatcagcaacatggaaagtatcatcatcaattgatatctatttatcagcaacatggaaagtatcatcaattgatatctatttatcagcaacatggaaagtatcatcatcaattgatatctatttatcagcaacatggaaagtatcatcatcaattgatatctatttatcagcaacatggaaagtatcatcaactgatatctatttatcagcaacatgaaaagtatmatcatcaattgatatctatttatcagcaacatggaaagtataatcatcaattgatatctatttatcagcaacatggaaagtataatcatcaattga

SEQ ID NO: 830953 - DNA, 314 bp, Homo sapiens
gtagctgggattacaggcgctgcacgaccacacccggctaatttttgtattttttgtagagacggggtttcagtatktttcccaggctggtcttgaactcctgggctcaagcaatctgcctgcttcagcctcccaaagtactgggattacaggaatgagtcaccacaccgaaccaaggtatttcctttagggaaaaagctggaacagtggagactgaagagattttatctgttcaattcctccctcagccccgccctcacaccatcaggaaggcgtctgtgaagtttcttatcatattcacacaattaatctca

SEQ ID NO: 830954 - DNA, 314 bp, Homo sapiens
gtagctgggattacaggcgctgcacgaccacacccggctaatttttgtattttttgtagagacggggtttcagtattwttcccaggctggtcttgaactcctgggctcaagcaatctgcctgcttcagcctcccaaagtactgggattacaggaatgagtcaccacaccgaaccaaggtatttcctttagggaaaaagctggaacagtggagactgaagagattttatctgttcaattcctccctcagccccgccctcacaccatcaggaaggcgtctgtgaagtttcttatcatattcacacaattaatctca

SEQ ID NO: 830955 - DNA, 637 bp, Homo sapiens
gtaaaaaccagaatataaggaaagccataacaattagctcaaaaattcatccacttcagtgtttcttctctgacagagacaatccagtttgtcttctgtcagttaatattaaaatatataaggtacatttytaaatatctcagagtacttgaatgacatgtcatgagctatcaacactaaatttactaagctttttaaataactattttgtaattaatgacatattgatatttaaataggttatatgtatacagtatacaatccaaaatgttaaaatggtatgtccctctctcatgggcacttagttttcatttctggaggcaatcactcttacttgtgtgtaattttgcagagattataagtacacacacatacacacacacacacacacacacacacacacacagtcagccctctgcatctgtggatttgaccaactacgcattgaaaatatttggaggaaaaaattgtatttgcactgaacatgtacagacatatttccttgtcattattccttaaataatacactataacaattgtttacatcacttttaactgtattaggtattataagaagggtagagatggtttaaggtatacagggatatttgtgtaggttatacataaacactatgcc

SEQ ID NO: 830956 - DNA, 412 bp, Homo sapiens
aataaataagatctagtatttgatagcacawcagggtgactgcagttagcaataatctgttgtatgttttagaataactaagggagtacaactggaatgtttgtaacacaaagaaataatgaatgtttgaggtgatggatatttcctttatcctgatgtgattattacatgttataacctgtatcaaaatatctcaagtacctcataaatatgtatgcctactatgtacccattaaaaaccaaaaataaaaaaaagagaaacactgacctcccctgaaaagagaattctggcagcagactcccttcagcatcaactcttccttcagcctgcctgcctactctgcagattgtggacttggcagcctccacgatcatataaaaaaattccttaaaataaacttcttcctctaga

SEQ ID NO: 830957 - DNA, 412 bp, Homo sapiens
aataaataagatctagtatttgatagcacaacagggtgactgcagttagcrataatctgttgtatgttttagaataactaagggagtacaactggaatgtttgtaacacaaagaaataatgaatgtttgaggtgatggatatttcctttatcctgatgtgattattacatgttataacctgtatcaaaatatctcaagtacctcataaatatgtatgcctactatgtacccattaaaaaccaaaaataaaaaaaagagaaacactgacctcccctgaaaagagaattctggcagcagactcccttcagcatcaactcttccttcagcctgcctgcctactctgcagattgtggacttggcagcctccacgatcatataaaaaaattccttaaaataaacttcttcctctaga

SEQ ID NO: 830958 - DNA, 674 bp, Homo sapiens
tatcccaattaatctaggatcataaaattgagcccatattcctgccctgcaagctggtgactagtcaaattattcatggttttccccctcttgaatattccaaagttttttagtttactccacttttccccatatgtttaaagggcttttcttcaaggccagtgaaacttccccgcattttatctgactttctcttgttccagtttctgcagagagtacaccagaccaataagtgtaatagcaaggccaaatacagtcttaatatctgaaatagctagaactttcagcatttcaattggccacaggttctacccttattttcaaatttttaagctttgagagaaaaatatacacaacgtctcagatttcctgctctactgagctcagaaaagtgtgtaattctagcttagcttttataagcattgtttttggtgaccataagcttggtgtgaactcataaatctacattgaggaaacacctatttttggtaacctatttttgtcttgggtattttgattttgtcatattccagcccagatgactaaaggataattaacaaagacagttttagtttaatctgataataatatarcaaagtctctccctgcgaccatttgtattacttctaaatgtacataagcatcaaatatttaagcatgagcataaacaacct

SEQ ID NO: 830959 - DNA, 589 bp, Homo sapiens
taagttcattcggatatagtccccattaattttcatgtttttcaagcagataccatcattttccctgttccggcatccttccaggaagctgcaaggactaggttaataaaatagctgtgtcaaatggttagctaccaggatatctcagggactgaaattcctttataacaaagttggaaatacattgcagataccctcagaattttggcaacaggacagtcaaataacagagggtttgggggaatatggaaaaggatatcttctcagcctggatatgtagcaaagccacacaggtctgacagagaacatagagcccaatccatttgctattgagtcccttgacacccttccattttggagaagaagttgagggcctggaataactgagcaaaggctgcacatacacttgcatggcatcccaagtgtagcctcatgtacacatacatgctcacactcatagcattttaccataatattaccattatatgctttcaygcatatgaatctaaatgagcgtgtttcacttgaaaagacagagacattggccttctccctctgtttcttttcttcctctaccttcccttccaca

SEQ ID NO: 830960 - DNA, 626 bp, Homo sapiens
tcccatttccacatgctgaaaagactatgttattgtcacattttcctctgtgcaaatatatatgcacacattatatgaatatatacacatacaaaaacacatacmtgcacatatttcagagatgtttggtagcaccggctctctacattgctaaattctgttttttaaaactggatgtgtttgtgcctaatatatacatctttttttttcttactatttacaatcatatttaatcctgaaagttcattctgaaatatctgtcagttctttcaattaaatgtattatacagtttcatgaacattatgtccttgactgtttctgtttattcaccctctagattgccttctacttagaattttaggcttaataaactcattttattgaagtaaatgtgtctggagattttgttcttcaggaagaatagaggtaattaggattttgtgtgtaggaatagaagagccttcattaaactcagtagtcttattcagctgagattaatggctaaaaattatattttgctgcaaattatttatatttcttatgcagtcatgcaaattatattatttgttaattttacataaaacaactatgtagacagataaagatggggcatttatacttatgt

SEQ ID NO: 830961 - DNA, 506 bp, Homo sapiens
tagagtgggaagcaagtcataaacagtagacagaatggtatggggcaagcccttaaccatatggattttatatagttcaggctgtatgactgtatattggagctaatcagagagtcaaattttccaaattcaaaatcttgactgagtcagttaacatatgacatctgtaactatatccagtcttgtctacttgtgtagtgaacactcatggaaccatctgaacagtgtccattctcccctcatcgcaggaatagttctgccccactcagggacagcaccacctcagaatgaaccattttcctacctaactccatccccaggccacagttaattggtccaggcttgaagtggaccaatcacagtttttcatgaggatttttcaaacaggcgctgatgaagagctggccccagwgttggcatttctgagacgtaagctcaacaccagccacatctctcaccacgtggaagaagctagtctgcaacagagtgaagtaaacagaaaaggc

SEQ ID NO: 830962 - DNA, 555 bp, Homo sapiens
ggaccctacactgctgtcaggtttgtcccagcctctggtggaagaaccagaaaacgacattctaaaggaactgatcacackcggccttggattttagatacttttatctctaccaccactctgtcagtagggggcagcggggaagagggaagggaagggagaggttgagaggagacagatgagaagaagaaaacggacactgctattggttggtacctactacttcctggtggctcggaaccttacctatacctttcgtttaattcttgcaacaagcctataagatgttattatccccattttgcacatgaggaagctaagcctcagagatgtttagtaatggaacaaggtccccctagtcagtaaggagtagagctgggattcaaaccccaggttgtccaccaccaaagtctcaaacccttcctctctcctgcactgtcttcacatcttggtattccctgcagtgtctggcagagtaccttcatagaacaggtgcataaaaatgtttgatagatgaatgcatgaatggctgactccagccttaataccttaata

SEQ ID NO: 830963 - DNA, 677 bp, Homo sapiens
tcggaatgttggtttatgaactattaaaaagatgcttttcatttatgttaccagtgtaaggcattatataaatgtcatctataagtgactggaaagaaggaaaataatgcaagggttttctgctattaagcatttatattagatagtcaatagtattctttagctgtccaggttgaatggtggtttccagcatcctaaaggcattcagggaaatactttgcagtcttgttaaagcgatgctgaatatgtctgagatatgactcactccttacggtgaaaggtgggagaagagaaacattgccaggcatctccctggctgtatggaagccagagtgtttatgaacactcaattttttttgttcatttattaatctaatgggtattgcatgttcttctctgttcctgctactgtgttaggcgtctaaggaagagttctcctctgatacatagagtatttgatatacagagaagctgatggagagatgggaaagccgaagaaattccatgagcttgatggaaaaaattgccatgtgtgggaggcaggaaccttgacagaaagagagggagacaaagaatctgagcacattgctttaagatactgatgccctatgcagctcaagtatatcatgagccttaacacyatttgtaccaaattctatgtaaatgtaccactttat

SEQ ID NO: 830964 - DNA, 533 bp, Homo sapiens
acaggtagggcttcttgttcccttaaaacatgcgttgggtgctcatcagctgaatgacaacagcagacaattcttgttttctattttttacagtaactcagcatttaagcagacttatttgtttatagaattttttcatactcaccaaatcttcattctgacttgctaaaagatcacgactgaatgcaagctgactgacacaaaccacaaatctgtcagggaatacacagagttctgtataaaatgaagaaaaacaagtttaaaggtgtcaaaaaactataaacacagaatggttgttccagatttttgttcattttaagttactgcaatatgcacatccatataaaacatacgtctcttctctcctcccgtcctttcggtgtttgccgtcaatagggcagggtgagcgcaaagctctagggagagctgatgaggctgcaaattggtccacctgcgccccgggaccattacattrcaggaaacccccaggcagaacctctgtagcctcccctctgtgtcagtcagctgttttc

SEQ ID NO: 830965 - DNA, 247 bp, Homo sapiens
cactagcatttctaaatatggtaatattatataactacaatgtttttcacctatttttgccatcatcattgtaagtacatatggctaaacttgwgcttcatatgggaactttcgcgatttattttcaggtgtaattcctgtaactaagccaccaactagtttcatcaaatatcaccatggcagtggggaaggaagcctacaccaaatgaacacatgaaaacactggttctacaggattctaatgcat

SEQ ID NO: 830966 - DNA, 654 bp, Homo sapiens
tgccatctccttggtgttaagtgagttctcgttctgagttcatgtgatagctggttgtctaaaagaatgtggcaccttcccccaccwagctcccactctcactgtcaccatgacacaccttctcaccctttgccctccgtcatgattggaagcttccagaggcagtcaccagaagcagatgccagcgccatgtatcctgtacagcctgcagaaccatgagccaattgaatctattttctttataaatgacccagcctcaagtagtccttcatagcaacaaaaatggagcaaaaatttctccctttcttattaacaatgtccaggttttgttttttgtttttttgagtctccacactccactctgtcaacgaggctggagtgcggtggtgcaatcttggctcactgcaacctccgtctcccaggttcaagggattctcgtgtctcagcctctcgagtagctgggattacaggcacacatcaccacacccagctaatttttgtattattaggagagaaggggtttcaccatgttgcccagactggtcttgaacttctgacctcaagtgatctgcccccttcggcctcccaaagtgctaggtttataggcatgagtcaccacaattggcctgctatgtcttttgttgaacatttttc

SEQ ID NO: 830967 - DNA, 626 bp, Homo sapiens
aaaattctgagagtggttgtaaaatgtgctcaccacaaaaatgacaactttgtgaggtgatgcatrtgctagttgactgggttcaacaattccacaattcatgtaaacttcagaatattatgttgtacacaataaatatccacatacaattgtatctatcaattcaaaaaaatttaattaaaaagaaaaaactaaagacaacacatgcagatcagaatgggtggtgccagtattaatgcccattaagttcaagtgatttatgaacatggtagggtggaataatgagaattcagggaggatccacggaacagatgagccttattctctgctggcaaagtgatacatgtcatatatgtagaggggaagagaaaagtcattctaagtaaagagtcacatgaatggaacaccaagaaaagaatttccaccactgaatttagcatacagggtggtaagtatttgctaatgtattggactcctccactagcctgtgaaatttttgaaggcaggagctgtatattctcagctccaggaatattcatttacactgtacattatcagttctcaataaatatttgttgaataattggatattaacctggtttctaatgtggttgcaaatttgagat

SEQ ID NO: 830968 - DNA, 577 bp, Homo sapiens
tgatctcttagcttctagggacacattttataaaactgacagtgataggaaagaacagagaataagacattagctcacagcacccatgttgtcttggaaaaataacataataactctgagcatcatagtcttctttagtaaaaaattacaacctttgatcttttaaatcctgtgactgagttatctaggtcattctcagaatattccacagatgataatagtcatggattccacataaaaaagtgtttcttgtttacaataatcaaacaatttaggattagcatgaagattaaaataacttcacagaaaaacacaagtaaaataatacaggtatgagcatctctacatttctgtaatttctgagttgatctctattctctggtaagatcagacaaagccttctctaaagcatagtctcagaaagatttctctgtttaggctccccctatcttctccattttctcttacattttaggcatttcttacaattaccttttwtctttatcactgtaccccctttaaagtataagttcaggaaaacaattgtcaaaattcctaattactatccaccaaacat

SEQ ID NO: 830969 - DNA, 574 bp, Homo sapiens
  misc_feature 284: n = A,T,C or G
gtcaatgaataaatccttgcaaacacacaacctcccaagatagtatcagtgagaaactgaaaccctgaacagaccactgagttctaaaataaaatcagtaagaaaaaaacctaccaagaataaaaacaaagccccagaccagatggatttatggctgaattctacaaaacatacaaagctgataccaatttaccaaaacttacaaaaattcaatgagaagggactttcctaactcgttctacaaaggccaccattaacctaataccaaaacacgggcaaagccncaccaaaaaaagaaaaatacaggacaatatttctgatgaacccagttcgtaaaatcctcagcaaaatactatcaaaccaactccagtagcatatcaaaaagttaattcgccatgatcaaacaggattcttcctgggatgcaaggttgtttcaacatatgcaaattaatacatgtgattcmccatgtaaatagaattaaaaataaaagccatatgatcatttcaatagatgcagaaaaagctttcaataaaatccaacatcacttaatgataaaaaccctaaagaaactat

SEQ ID NO: 830970 - DNA, 599 bp, Homo sapiens
aagatccatatatgacaaacccacagacaatataatactgagtgggcaaaagctgggataattcatgttgagaagaggaacaagaaaaggatgttcactctcaccacttgtactcaacataattytggaagtcctagccagagcaatcaggcaatagaaataaataaaaggtatccaaaaaggaaaaaacaataagtcaaattatctctcttcactgacaacatgattttatacttggaagaccataaagaatctgccaaaaggctcatagaactgataaacaacttcaataaagtgtcaggatatttaatcaatgcacaaaaattagtagcatttatatacaccaacaacatccaggctgacagtcaaattaagaatgcaaccccatttacaataactgcaaaacaaataaaacatgtagcaatacatcttattaaggaggtaaaagatctttacatggagaactacaaaacacttctgaaagaaatcatagatgacaaaaacaatgggaaaacattccatgctcatgaattggaagaatcaatattgttaaaatgaccatatttcccaaaccaatctacagattcaatgctatttcc

SEQ ID NO: 830971 - DNA, 579 bp, Homo sapiens
ggagattaggacttcaacatatgaattttggggtgttgtggggagatgcagtttatcccataacactctacttaagtaaaatgctttttccaaaatgttgctgcagaagaattttgaagcaaaggagccaacaaattttctcttgaaactctgggagctcaagcagtccaatttaattaaattcatttactactaagtaaatgcctgtgcacacaatgtactcctctagagaaaagcctattgtcactgcatctatataattgaatcacaaaagatgcctcccttgcctccccccacgccatcaagtcctttcatctgtttccaataagggaaaaaagagaactcttctgggcatgtttacattttatctttaaacaaaactaaatggaatttgacatggtaaagccaggccatgttacatatcaatgtgaaatgaaacgtttctcgggccaggtgttgcccagcacctgtgtgcaggytcccaggattctccacgcacctgaatagaatgtggggcccagagaggaaagggagggactcagtcagcaccactgcaatatttgtgcaagaagatgtttc

SEQ ID NO: 830972 - DNA, 536 bp, Homo sapiens
gctttttcattaatcaaaaggagactagactgctgtttctgcatactatgcacagcaagattcagagttaaacatcatcattcaragagttgatgttgaacaaaaaataacagttgaacttattcctgctttacaccaaaaagtgttattaatttttaatttcctgggcatgcagtagtattttctgaattagattctgagagagtgattttgaccatgggatcactagtaaaatatcagctcacaatctacagttatcaacatccagacaaacaagctagtgttagggaatgccagcagaaactaaaacaaaacactcaagaaattttgattctgaaatagaatataaagtaacaatgtgtgaaataagaaataaaaggcagaggtagtaaaaacgtttatgaaagatcaatgagacagattatttttgaagttttttttaaaaaaaactttgtatgtgtatgtgtgtgtgtgtttgtccaaagtcttgcaagtttcatgagaaaaaagaggtagaatgggagcacattcaactt

SEQ ID NO: 830973 - DNA, 563 bp, Homo sapiens
tccaagatcaggatgtcagcatgttcaggttctggtgagggccttcttcctagtttgcagaaggctgtcttcttgctgtatcttcacatggtctttccttggagtgtgtgcatggagagagagagagaaagttccagtgtctgtttctctttttgtaagagcatatccatcgtgggggcctcaccctcatgacctcatgtaaatgtaattaactttttttttttttttgagacagagtcttgctctgtcacccaggctagagtgcagtgtgtgatctcagctcactgcaacttctgcctcccaggttcaagcaattctcctgcctcagccttctgagtagctgggattacaggtggtgccaccatgcccagctaatttttgtattttcagtagagatgggtttcaccatgttggccaggctgatcttgaactcctgacctcgtgatcctcccgccttggcctcccaaagtgctgggattataggcrtgagccaccgcacctggccataattaactttcaaaggcactaccttcaaataccatcatgttagtgattcggacttc

SEQ ID NO: 830974 - DNA, 520 bp, Homo sapiens
gaactgtcaactacagaacagtattacatcagtgttacaaatttctgattttrctctctgtactgtggttaagtaagagtatcctagcttttaggaaatacaatgaaatatttaggaactaaggagcacagtgtctccaacttattttcaagtggttcaggaaaaaaaagtatttatattttattttcttgagacaagatcttgctctgtcacccaggctggagtgcagtggaatgatcatagctcattgcagccttgactgcccaggctcaagcaatcgtcccacctcagccgcccaaggagctggggctacaggtgcatgccaccacacccagctaattaattttttttttagagacgggggtcttactttgcagcccaggttggtctcgaactcctggcggcttcaagccatctgcccgtctcagcctcccaaagtattaggattacaggcatgagccaccacgcctggccaaaatgtatgtatgtatgtatgtatgtatgtatgtatgtatgcatg

SEQ ID NO: 830975 - DNA, 520 bp, Homo sapiens
gaactgtcaactacagaacagtattacatcagtgttacaaatttctgattttgctctctgtactgtggttaagtaagagtatccyagcttttaggaaatacaatgaaatatttaggaactaaggagcacagtgtctccaacttattttcaagtggttcaggaaaaaaaagtatttatattttattttcttgagacaagatcttgctctgtcacccaggctggagtgcagtggaatgatcatagctcattgcagccttgactgcccaggctcaagcaatcgtcccacctcagccgcccaaggagctggggctacaggtgcatgccaccacacccagctaattaattttttttttagagacgggggtcttactttgcagcccaggttggtctcgaactcctggcggcttcaagccatctgcccgtctcagcctcccaaagtattaggattacaggcatgagccaccacgcctggccaaaatgtatgtatgtatgtatgtatgtatgtatgtatgtatgcatg

SEQ ID NO: 830976 - DNA, 463 bp, Homo sapiens
  misc_feature 440, 441, 442, 443, 444, 445, 446, 447, 448, 449, 450, 451,452, 453, 454, 455, 456, 457, 458, 459, 460, 461, 462, 463: n = A,T,C or G
tttaagaacacgtaggatccctggagcttctgctccacctcatcagtaggaggcatattatctggacaataargcactattgaaggttggcgtactgtttccaggagattaaagggagtattctcagctcagtctttttcttttttttttcttctcttctcttctcttctctttagacaggttctcactccatcaaccaggctggggtacagtgatacaatctgagctcctctgcctccccagctcaagccattctcccacttcaacctcctgagtggctgggaccacaagtgcacatcaacatgcctggcaaattttttgtatttatttttattgttgagatgaggtctcgctatgttgcctaggctggtctcaaactcctgggctcaagcagtccacccacctttgtctcggaaagtactgtgattgcaggcatgagnnnnnnnnnnnnnnnnnnnnnnnn

SEQ ID NO: 830977 - DNA, 483 bp, Homo sapiens
cttttgtctcaagatatttctctagagcactttagctaattaaatctattacctatttatagttcctttcacatcttttcttcaaatatgttagaaaattttagttatagagtgggttggttggtaggaaatatgaaggaaaatgaagaaccattacttctttttttgtttttgtttttaagtaggcaagctgtcttgtatctctcactctgcacaagagttctcagtttttttggtctgaagacacctttacacttttaaaagttattgaagacccatagaacttaccttggaaaattctagaaaacacaagaatacacataacatattccattagctgtcagaacaataatgtcagcacatgtcatattgcttctggaaaattccastggatactcgtgagagaatgagtggaaaaggcaaataacttcttggtactctgagaatagtttggccttgcaaacctcctgaaagggtctccag

SEQ ID NO: 830978 - DNA, 597 bp, Homo sapiens
ttcaaaagatggtacataattcacttagaaccagcaatcctacaactggaataatctgggataagaagagattaggagragattaaagacatggctgctgaattaaaactgcatggaagcaacgaatgccaggtccaacacagaagatcaatttagtaaagaaaacaaacttcagatggtctcccagaacacaggaaactgataaaagacatgaaaataagataaaagaggagctatggagggcagaacaatgaaagatgaattttgataattcaactgagtggactcatgattaatagtgaataataagagtgaggacatgttgagtgcttgctctgtggcaagccctttcaaaccctttacatgtgtgaactcatttaatcctcataacaatactgaaggatgggtactgctatcctccccctccaccccattttccatatggcaaaactgaaacacagattagtaagacaatgtgtgcaagtttatgcaggcaggagatggggagctggtgaactcaggtggtctggccccaaagtcgttgctctgaagtgctgcgctgtgctgcctcagtataacattgaaattaaattgttc

SEQ ID NO: 830979 - DNA, 630 bp, Homo sapiens
tttataacatggggtttttrttgtgtgtatatactagcattcctttggacacaaagtagactataaagaaaatttctaaattctgaatgcagtttctcattgattttaattattgctatgttccttttgaaaattttttggctggctctggcaacttatgcctgcagtcccacccagcacattttgaggccaaggcaagtggtttgcttgagcccagcagttcaagaccagcctgggtaacatggcgaaaccatgtctctacaaaaaatacaaaagatagggcttggtggcatgcatttgtagtcccagctactcaagaggctgaggctggagggatcgcttgagcccaggaagttgagactgtaatgagctatgattgtgccactgcaatccttggctgcaaagtgagatcctatctcttaaaaaaaaaaaaaattagaaaaagaataaaaaagtctaccctaaccattttatatttaaaacaagtttgttcttttcagtgtccttacttttaaaatagttgaactgatttttctgggaatctttctcaaatacaaccttaaacagaatatatggatgtgtttctgatgtcttagaattattctaatattaattatttggtgccataga

SEQ ID NO: 830980 - DNA, 435 bp, Homo sapiens
taaaaaaagtacaagaaagagctagcagttactcctagaactagtaatatcccttccctaaccaggaaaataagtagctattatggctttattgtcacatgtcatcatttggttgtcttacataacaatcctttccaaacttgagatccccctcacaaattactaaatatgctgacttccttcggtgcatcttttcttccaccaggagatctgcctttctaatatatgagaattacaagtcactcctgctggggataattaaaaaaaaaggaaggggcgggaatcaagaaggaaaacaaacgatagaacatgcatagtttttataaagaaggcttaggaaagaataaaggaagtaaaggaaaagaggctcagacctyagaaataaactcctacatccctcagtagagagagctgaaagtcatatgtaataggcac

SEQ ID NO: 830981 - DNA, 623 bp, Homo sapiens
aaaaaaaaattaaacaattaaaatccataatacataaagaaccccttaaagacaacaagattgaaacattcaatggcagcaggtcacctacatgcttttccatagactggtgtgttgtacgtgctctatcttctgtcaagagcatttccactctagcctacctggaaaccctctattaatatcttaaccctcttagtaatgtatcttcttgatgtgttgcctgattttctctctgtggtggatactgaggtgcatggccagattgtccttcagggtcagggggccagtctctccagctgccaaggcagctgagtcttgtacctctacagaaagaagctggtatccaatgattagttatccaatgactggtaactataggagtacaaatacctggagtccttgcctcaataggacaactcagtagagacatgccagctccagagatgctcatgggattggcgatggcctctgttcagcttttcctgtgtccaaacaatcctgcctccctcaccccagacaagtgttgttgccaagagtacttcccaaaaaactcttgcaartctcaccagagtatcagagtctgtctgggaacctgaactatgaaactctactgttgatggttt

SEQ ID NO: 830982 - DNA, 589 bp, Homo sapiens
atggagagtagggatgtggaggtggcagtcttaggaggcaaaactccctggtgtcatagagcctcaatacttgtgcagaacactataaaccttgtctagtgggaagtagacaagggggyaacatagagggaggcttagagaaataaggatgaggcccatatttaaaaggcaagaaatacatgtgtggtttggttcacttagaccttcagggaatctgggaaaacattgctacccacttatacactgcctcacacgtgagagcttctctccagggaaagaaattgaggaaagggacttggtttatgtcttgtggaagataacagatataggtgattctcattattcacagtacttccattctataaaatcactatgaacacagaattatgaaaatttgctcctacaggatatacagaattaggctcctgtgagcctcgagtcacaaaatttttctcagtctatcaatacataacctaatcttatgtgtgtttttgtttaaaggcaccttatttaatatatattgttaattcattaacattaaactcatggtcaacaacaatataactcatgctttcacgaaacatattta

SEQ ID NO: 830983 - DNA, 616 bp, Homo sapiens
caagtttgggtactttgtgcatgcaaggcttactgaatacctagtactagcatctttatatagtctatctcrtttctttcttacaacaatactttgagggaggtattattattattcacaattcgtaagttaaaaaagcatgagattctgtgagattaagtagttgcttaaagtaacaaagccagtacgtacacattcacacattctatccattctactgcactagctgttacaaaaaatatatatatttagaacacatgtgtgtctaatgtctaatgcttagaacaatattttaattggtatatcagaacctcttccaataaatgtttaatgaaacgaattgggcataccaacttcttgacacccttatcttgagttagagacaagaatacagagacagagaatccaagttctgaaatgagttaaactcctagttaactgcaccaccaatgccttctactttggtgtttactggtgacttccagacaaattaacatgggaatgaacacatacatgttaatgtatgaaacaagtacaatacatatgacattaagatgtacaaatatatatttaaaaaccagttttcatggatgagccatttgaaaggtcaaagtta

SEQ ID NO: 830984 - DNA, 620 bp, Homo sapiens
aggattgaatagaacaaaaaagctgagttaggaagattgcctctctctctctctctctatgtgactgtcttttagtaggacctcagtcttctcctgtctttagtttgagactcagactgggccttatacacatacacaatcagctttcgtgcttcagactcaggttgaaactataccatacgtttccctgtgtctgaaaaccgtgttaactgcaaatcatggggcttctcaacttccataatcacatgatccacacaatcttattccttataatttctctctctctttctttctctctctctctctcaacccttcatttcatttctctgaagaagccagactaatacagggaattagttagaaaatatccaatatctgtccagacactgtggctcataccttaatcccaacactttcctaggcaaaagcaagaggatcacttgaagccaggagtggaagactagcctgaacaacagagtgagtctctgactctacaaataaaaaaaattaaacagtcatggggcatgtgcctgtrgtcccaactacttgaaaggctgagttgggaggattgcttgaggccaagaagtaaaggctgcagtaatctatgatggcatcactac

SEQ ID NO: 830985 - DNA, 603 bp, Homo sapiens
tctttgtgcttgctgagggcggggggagtgtggactaagtagtggaatgtggtagcagccatgagcacgtgascagtcacataaatgagggcagctaattgttatgagatttatttcttattttgttataagtaatatgtttctccccccacttgtttttttattacataacataaaacatattaataataattaactttacatcacagtatttaatttacaggatattaaggagaagggtaaccatcacccaaggacttcacatcctcttttgggaaaaaggttaatgtgttttctattgtatgcagaattattgtgtcatgttaggtaaatatatgacttcgtttctgtcttcatttggatatttagtatggtttaagtagatggatatagatgttaagttgacaaagggaggactataatgacaaatttcatgccaacctgagtaggcaattatacacagttattcagtgaaacattaatataggtttcactgtgaagatattttgtacattggttaacatctaaaatcaattgactttaaaggatattatcctgcataatgtgtgtgaccctcatctaattattaaaaggccttaggct

SEQ ID NO: 830986 - DNA, 507 bp, Homo sapiens
ggaaacagcctaaattttttactcatctatagatgaatggataaataaaatatggtatgtacatataatgaaatactatttactattttagtaggaaaaaaacttctccatatttaacaacatagatgaacytggggaaagttatgctaagtgaaataaaccaggcccagaaggataaatattacattattccacttatgtgagatatcttaaatagtctagtagaatcagagagtagaatgttgttgcagagatttgtttagtggtcataaagtttcagttatgctagattaatacattttagatatccatagtacaatacaatacctgtaactaacaatatcatatttatcatttaaaaatcttgagtgtaaatttcataataagtcttcttgccaaaaaacaaaaacaggggcaaaaacaagaaatgaaagggcaagaggaaactgttgggggtcctgggtatatttattcccttgattgtatagttggtcttatgggtgtatg

SEQ ID NO: 830987 - DNA, 560 bp, Homo sapiens
aacaagaaccctttagattggaatggttccaggttcaacagaggtttcccacattggaactaagacattgtttacaagatattttcacctctgttgtcaacagtyaagaggtaactccagcttccatctgttgctatgtacagaacattaccagtttcacactactgaatgcctcaaatcacaattaatgaagttatgctcttgagactcacggttttttccaggtgccacttgttgtcttgtagtctaatcttcacatgtattttctattctgtttcattcacctacacctgcttcttatccacattccactctgttctctgaaatttatggttcatatttaacaaaatcccctgtatccctagatttctctttgttcataacataatggtatccagactgtctccggagaatactgattttcctacatgctctactaaaatactaaatatctaaacatttagattagtattttcttccagaactctcatactggtcctggaagtggtattaatctcttccttttttttggccatattcaaactgtttctccccttatt

SEQ ID NO: 830988 - DNA, 455 bp, Homo sapiens
cagaagacaaatggatcttggaggatgactgtggattattgtaagctttaccaagtggtgactccaattgcagctgctgtactagatgtggtttcatttcttgagcaaattaacacatctcctggtacctggtatgcagccattgacttggcaaatgcctttttcttcattcctgtccataggcccatcagaagcaatttgcctttagctggcaaggccagcaatatccctttactgtcctacctcaggggtatatcaagtctccgactttgtgttataatcttattcagagagaccttgatcactttttgcttccacaagaaatctcactggtccattaccttgatgacattatgctgattggattcagtaagcaagaattagcaagcacactgaacttattgrtgagacatttgtgtgccaggggatagaaaacaaatctgactaaatttcag

SEQ ID NO: 830989 - DNA, 632 bp, Homo sapiens
ctggtggaagaaatttctaagcagcaaagtgttcacgatatggcctggctgcttccaatagcctacagtcagatgcagaagcaaagaaatgacttgaagttgaaacttatatttaaaagagaagcagaggctgggcgcagtggctcacacctataatcccaacactttgggaggatgagtgagaggattgcttgagtccaagagttcaaactagcctggacaacatagtgagaccccatctctttaaaataaaaaaaaagtaaaagggaagcagagcataaaaggttggaaaatttgtagcttggccatgtgacagagaaagtaaaagcttttttgggagagaattaaagagggctgctgggcaaccacttgctagagaaatttgcataactaaaaaggaggcaaaggctgattgccaaaacaatgggaaaaaggcctttaaggcatttcagacaccttcatggcagcccctcccatcacaggcccagaggcctaggagggaagaatggtctcatgggccagccccagggtccactgccctgtgcagcctcgagacactgctccctgcatccctatgactccagctccagcygtggctcaaaggagttcaggtgcagcttgggctgctgctt

SEQ ID NO: 830990 - DNA, 547 bp, Homo sapiens
tctttcctgtaggcttttgttatattctcagcaaatccaatagcaagatattgggttctgaatattgcagtatgtataaaatcatgacatacgtgaaatgtgaaaatcgaatatgcagtgaaacttgatcatttgcatgtaatacaacccactggaccaggtagggtgcactgtcttccctaagcttaatgccctcccccttagcctctatacacaaattacaacccctttatacctccattctttcactcattgtactgttctctaatcctgttttacttactctttgccctcaagagagtgagatctttgacaactgggcttgtgactttcatttcactgtctcccacacctaacacaatgccagaaacactgagatgtacggactaagcagtcacctaaatttttgttgaaatgaaaactgtcaacatagagtataagaagactagaccacaccttgtaaaaggtgtcataggaaccctagmatttgtatttttgtgtaggaaattaatctagacattgtctatgtttaaataattgatttatt

SEQ ID NO: 830991 - DNA, 625 bp, Homo sapiens
gttattatagcactagcttcctacccacaaaatttgggaaacaaaagcactctcagcgattcctggaaaaaattaggttcctggaattagtgtgtcatgttggcaaagatgatagcagagacttggggggatatctgaggagggaaaaaaaattgcagagttagtcttcccaggatctgcactaaaggcccagagctggaatttaagctgagttgagatattcttccatgcagggcataatggtgacgcagtcttagggaggaaacatctccacgctgagcaaggccttgttggaaatgtgcagtggtggtagtcttaggcactgggccttatttgagaaatttattttccttccagcatatcttgaattttcatttccctttgagtgctgtgtttctgacatctcagacgtgaatggagcgtaggcttttagggacactgagccccagatcctttccgaacggtgagtagggagttagtactgggccaccatggtgcttcgcttgtctctcrctacagaattgctgaggccagaaaacctgcttcctgggagatcccattcaccttcatgtttgccagagttgggacttggactaggggattcatgcccctaacagctcaggga

SEQ ID NO: 830992 - DNA, 430 bp, Homo sapiens
ccatgtggttttaagcttacaggtgcaaggaaggcaagagttgaggcttgggagtttccacctagattttaaacgttgtatgataatgcctggatgtccaggaggaagtctgctgtagggtcagagccctcatggagagcctttactaaagcagtctggaggtgaaatgtgggtttggaggccccactcaatgtccgcactggggcactgcctagtggagctgtgagaagagggccactgtcctgcaggccagagaatggtagatccattgaaagctttcactgtgtgcctgaaaaagccacaggcactcaatgccagcccatggaagcagtcactggggaagtaccctgcagagccatggggcagagctgcccaaggccttgggaccccaacccttgcatcagtttgkcctggatgcacaccatgagca

SEQ ID NO: 830993 - DNA, 621 bp, Homo sapiens
attccacaaaaaagaaaccccacatgcacttgtatatgagtcatattctattcacaatagggaaggcatggaattaacttatgtgtgaatcaataaattggataraaatatgtgccacatatacgccataaaacactatgcacacattaaaaagaatacaattatgtcctgtgcagtaacatgcatacgtctggaggccattatcataaggaaattaatacaggaacagaaaaccaaataccatatgttcttgcctataagtaggatctaaacatggggtactcatgaatataaagatgacaacaatagacactgagaactaccaggtgaatgagggaaggaggagggcagagggtgaaaaaccataggtgctatgcttactgcctaggtgatgggatcaattatatcccacaatatatgctcactaccttggtgatgggatcaataatatcccacattgctcagcatcacacaatatatccatgtaataaacctgcaaatatactccctgaatctaaaaaatttaaggcagagacagagtaagagggcagaatagaagcctacattctcatccaccacacgaaaacaccaaattttcacaactaactacattcaagaagc

SEQ ID NO: 830994 - DNA, 635 bp, Homo sapiens
ccatgtaaagggtgaaacagtttctcagcaattgctgagatcaaggataagccctacaagtttgggcaggaaagaggactcttattactctgagrgaatgcagaaatccctccgttttgttgttgtttgttttctctgagcccttgtgatctggcccccaagaattcctgtgttggcagcagtaggtggtgcctaggagaaacaaaaccctgaggccagggcatcttcctctccagttggtgcagtagtgatcccaagagggtgatgcaaactttttaaagtcttttctcattttgccacctgtcacctggctccaaacatgggtgcagccatgaaacactgtagcagagtaccgtaatcaaagacccagcattctggccagaaaacagaaaagaggagctccaggaaaacagaaaatattggagacattgtggagaggaaggagtatgagaaagtgacaccataaagtttttaatgaactgagcgcatccccaagctgcatgtgtgtggatctgctcctaattagttaaccaaagattttgagaacgaagctagcagattattatccgagttccacactgaccaccaggacatatctgaagcaaactggaaaggttttgaaaactcgattattg

SEQ ID NO: 830995 - DNA, 574 bp, Homo sapiens
gtgtttgtgctctgagaatggacatactgcctcctcaaatgggtccctgaaccccgtgtagcctaactgggagacatctcatagtacgggccaacagacacctcatacaggtaggagaccctcttcaaygaagcttccagggaaggatcaagcagcaatatttgctgttctgcagccttctctgttgatacccaggcaaacagggtctggagtggacctccagcaaactccaacagacctgcagctgagggacctgactgttagaaggaaaactaacaaacagaaaggaatagcatcaacataaacaaaaaggacatccacaccaaaaccccatctgtaggttaccaacatcaaataccaaagatagataaaaccacaaagatgggaagaaaccagaacagaaaagctgaaaatcctacaaaccagagcatctcttttcttccaaaggattgcagctcctcaccagcaatggaacaaagctggagggagagtgactttgatgagttgacagaaggaggcttcagaaggctggtaataacaaacttctccaagctaaaagagcatgtttgaacac

SEQ ID NO: 830996 - DNA, 636 bp, Homo sapiens
aaccataaaaaccctagaagaaatcctaggctacatcattcaggtcataggcatgggcaaagatttcatgactaaaataccaaaarcaatggcaacaaaagccagaatagacaaatcagatctaattaaactaaagcgcttctgcacagtaagagaaactaccaacagcatgaacagacaacctacagaatgggagaaaattgttggcaatctatccatctgacaaagggctagtatccagaatctacaaaaaacttaaacaaatttacaagaaaaaaacaccatcaaaaattgggcaaaggatatggacagacacttctcaaaagaagacatctatgcagccaacagacacatgagaaaatgctcatcatcaatggtcatcagagaaatgcaaatcaaaaccacagtgagatacaatctcacgccagttagaatggtgattatttgaaagtcaggaaacaacagatgctggaaagcatgtggaaaaataggaaggcttttacactgttggagggattgcaaattagttccaccactgtggaagacagtgtggccattcctccaggatctagaactagaaataccatctgacccagcaatcccattactgggcatatacccaaaggattataaatc

SEQ ID NO: 830997 - DNA, 608 bp, Homo sapiens
tgactcaccagttaatgcagctatttggtcataaatgtttctttgttaatcactttcgattactaattcaatctcctaggttataggtctattcagattttctctttcttcttgagccactttggtagtttgtgtctttctagtgattcgtccatttcatccagggcagctaatttgttgttagacagttgttcacagtatactcctgtaatccttttgtatttctgtaaagttggtagtaatggctctgctttcatttattattttaataattagtcttccatcttttgctcagtcaatatagtgaaaggcttgatctttcaaataatctatgtttattcattctactgctctccaaacttctattttattgatttatgctctaattatgctctctattatttctttcatactgctagctttggatttagtcttattttgtcttcttccactgcctttaggtatagagtgaggatgttgatttsagatttttcttaaatgtagttgtttatatccatacattttcctttgaactctactttcactgcattcaataagttttggtatgttttgtttttattttaatttatctcaagatattttataat

SEQ ID NO: 830998 - DNA, 608 bp, Homo sapiens
tgactcaccagttaatgcagctatttggtcataaatgtttctttgttaatcactttcgattactaattcaatctcctaggttataggtctattcagattttctctttcttcttgagccactttggtagtttgtgtctttctagtgattcgtccatttcatccagggcagctaatttgttgttagacagttgttcacagtatactcctgtaatccttttgtatttctgtaaagttggtagtaatggctctgctttcatttattattttaataattagtcttccatcttttgctcagtcaatatagtgaaaggcttgatctttcaaataatctatgtttattcattctactgctctccaaacttctattttattgatttatgctctaattatgctctctattatttctttcatactgctagctttggatttagtcttattttgtcttcttccactgcctttaggtatagagtgaggatgttgatttcagatttttcttaaatgtagttgtttatatccatacattttcctttgaactctactttcacygcattcaataagttttggtatgttttgtttttattttaatttatctcaagatattttataat

SEQ ID NO: 830999 - DNA, 608 bp, Homo sapiens
gaacacttatacactttctgaaggaatgtaaattagttcagccactgtggaaagcaggttggggatttcttaaagaagtgagagttgatctaccattcaatccagtaaccccattactgggtatatacccgaaagaaaataaataccctatcaaaaagacacatgtagctatatttttatcacagcagtattcacaatcacaaagacataggcttaatccagacatccatcagtggtggattggataaagactcatggaatactatacagccagaaaaaactcaaaattatgccatttgaagcaacatgaatgcattctttccagaaaactaatgcaaaagcaaaaaacaaaataccgcatgttctctttcataagtgggagctaaatgctgggtacacatggtcataatacagaggggtgggaggggccgggactggtggctcacgcctataatcccaacactttgagaggccaaggtgagcggatcaccggaggtcaggmgtttgagaccaccctggccaacgtggtgaaaccccgcctctaatgaaaacacaaaaattaactgggcatggtggctggcgcctgtaatcccagctactccggggtc

SEQ ID NO: 831000 - DNA, 608 bp, Homo sapiens
gaacacttatacactttctgaaggaatgtaaattagttcagccactgtggaaagcaggttggggatttcttaaagaagtgagagttgatctaccattcaatccagtaaccccattactgggtatatacccgaaagaaaataaataccctatcaaaaagacacatgtagctatatttttatcacagcagtattcacaatcacaaagacataggcttaatccagacatccatcagtggtggattggataaagactcatggaatactatacagccagaaaaaactcaaaattatgccatttgaagcaacatgaatgcattctttccagaaaactaatgcaaaagcaaaaaacaaaataccgcatgttctctttcataagtgggagctaaatgctgggtacacatggtcataatacagaggggtgggaggggccgggactggtggctcacgcctataatcccaacactttgagaggccaaggtgagcggatcaccggaggtcaggagtttgagaccascctggccaacgtggtgaaaccccgcctctaatgaaaacacaaaaattaactgggcatggtggctggcgcctgtaatcccagctactccggggtc

SEQ ID NO: 831001 - DNA, 645 bp, Homo sapiens
aaaacaaggattttaaaacttgaattgttacagtgagtatgtcttaatataggctacagtcactttagataaaaaattacctcacatctattttcaatattacttaaagatgttcatttagtggcaaatattttttttttgcctagaggcagatattttgccacatggctatttatgaaactgtatttaaatgcatgtacacatataaaagctgccactgtggctgtaaactattacaagttatcaagattaaaaaataaacaaaaaatatttcagtttttctatgaaatgtctttactcgagtccaaatttagaggtttaaaatgcttcaaattaataaaaccaagtgtttcacatatttcagttggagtggcgtttgtcctagttttattagtgaagcagcagactgcattttttcactctcatacaccttcaaaagatggacagaaaaatttgataaaacttctagggcattatctgatgaaacacattaaacactaaaggagatatacaacttcmttgcttgtaaaagacatataagaaggaaacctacatacatatatctatcagttttgtattttcaggaaatatttgccttaaagtgagcttcataacagtatgtgttctccaacaaagccaaggaaa

SEQ ID NO: 831002 - DNA, 645 bp, Homo sapiens
aaaacaaggattttaaaacttgaattgttacagtgagtatgtcttaatataggctacagtcactttagataaaaaattacctcacatctattttcaatattacttaaagatgttcatttagtggcaaatattttttttttgcctagaggcagatattttgccacatggctatttatgaaactgtatttaaatgcatgtacacatataaaagctgccactgtggctgtaaactattacaagttatcaagattaaaaaataaacaaaaaatatttcagtttttctatgaaatgtctttactcgagtccaaatttagaggtttaaaatgcttcaaattaataaaaccaagtgtttcacatatttcagttggagtggcgtttgtcctagttttattagtgaagcagcagactgcattttttcactctcatacaccttcaaaagatggacagaaaaatttgataaaacttctagggcattatctgatgaaacacattaaacactaaaggagatatacaacttcattgcttgtaaaagacatataagaaggaaacctacatacatatatctatcagttttgtattttcaggaaatatttgcyttaaagtgagcttcataacagtatgtgttctccaacaaagccaaggaaa

SEQ ID NO: 831003 - DNA, 559 bp, Homo sapiens
gcagttgaaagggacaatcccggatctgaaagaaagagccacagtgactccaagagtggagccagggcatgctggacactgcatagctatggccaagtgtgtcacctcygagggagatgtgagagaaacgcagagggatcgcttgtgactgtgccttctcgatgtatgatggactgttctgctcaaatagtaagtgtgaccaaggagccggtgaacataggaaacaaagaatatttcatttgacattataaggaatgcgacaattctagtcacttgaaagtgaactatatctgtcgagaattcctagttttaattgggaagaaatgcgcttctcttcttgaaaagccacaggttattgctgttatgtctaatatcagtcctctctggatttctcaaaagattttctgtatatcctaccattttccttctgttgctgcagtttggaagtagtttgttatcaggattatcaaagcatcattgctatttatgacaatgactttaagaaatgcaagaatatttggaacactgtagaaaaaatattttagcctggaaggcaaat

SEQ ID NO: 831004 - DNA, 500 bp, Homo sapiens
gcaaaagttagcatttcaatgatgaaattaagatgcctttcagttcaagtttggcaattttacatatttsatgtgaaactctgatttgaaatgttgctgagggtctttagtattgcatatgaataataaaaatcaaatttgccacatattggaataagatatacagtattttatatggcaaatgtttctcttccttttaagagaagaagagaaatattaaggtggttattactcaagtgaatcctacttaaaagtaactttctaatagttgagaagtcacttatgcatacctacgtgaggaagaaagttgaattgactgtcattcattcagcccagtgggacatcaaactctccaaacctttcacagtaggaaaacaaagccaggcctccttaactatgctacatggcaagtcaaaacatgaacataatatctgaaaaagcctgaaaaacaactctggctaactagatctcattgcaggcagtgagagagtggtggcaaa

SEQ ID NO: 831005 - DNA, 548 bp, Homo sapiens
ttacaacagaatgttggataaaaatatttattttagatctggggaatatttctacaaaaaatatttattgtttacctaaaattcaaatttacctagatattttgcatttyacacagcattcttattctgttctcaggatgatcaccatttgattaggaagacagaaacacacaaaaacaaccataacaaaatacactaattaccatggtcacactctggaaaatagtcatgtgttaaatcttgaatgttaactgttcttcaaacgtgttgatgaaacgtgatgatgactggcaactctgtggtaatccctctgttgggagcttggaaacaaagaaaaatgtgattgagttttccaatgtcacgagttaatgaataattaaaaaaaagagtagaaatacaggtgaagtgtttaaggaggagatcaatcagacagaatgatgttttagagatttcaacacatagcaggaagtaaaacacaaaagtaattcatccaaaagaagtatagaatacaaaatgtgaatacttgcacagaaaacataaaccagcct

SEQ ID NO: 831006 - DNA, 606 bp, Homo sapiens
agagaatatatataatacaatttaaaaatttaaagtrtaaagcatacaaatcttaatatttggaaaaaaaataaataccctactactgatgaactctcatgaatcagaatactacaaaaatacatatgtgctactcatacctgtagtaccaccctatcacagtgttattaaggacagcctctagcaggagagtctttgtgtattgaactacgtttttattagttttctgacatgaaaccaaagccactgtaatgctttttagatgatagtcaaaatttccctgtgtctagtccctcatattcattctcttgttactcaattaacagcactttttcccaactcttcttttctagaagcttattctttattctcatcttttaactcaaacactgagatatgggtattcacttattataaagaggtctattatgaattagctatatgatcttggatactagatctgtcccatttttcctttccattttaaggaaatcctttccctcattaatttcctctgaaagctaattacaacccctctcctcaatattgtgcctctaattattttcttatttaaagtgactagcagctattatatactgttccata

SEQ ID NO: 831007 - DNA, 286 bp, Homo sapiens
ccccacaatagcacttctggaagaggaaatactgaaaattatcatctggattccatggaatgctttttaaattgtgtattgtgagcgccacgcttgacatttcctaacaaaatatttgagggtgggaatcagaaatagatgtttgtcaacaaactcaggaaattattatgcacactatagtttgcaaattacttcaaataartattatatgattgagagtataattttagaataattgttacatttcacagctacttttatttaaacaaaagacaatttctttaaa

SEQ ID NO: 831008 - DNA, 634 bp, Homo sapiens
aaatactattcagtgataaaaaaagggataagcaatcaagccatatrcagagatgcatgcatcttagctgcatattaataagtgaaagaagccaatctgcaaaagtttcatagtgtatgatgccatttgtatgacattccagaagaagcaaaattacatcatcaggaaacaaatcagaggttgactatgtttcagaatgcaaagaggttgactacaattgtggaaacatgatgccacggatttgtcaaaagtcataaaatttttataacataaggagtcaaccttaatataaaaattttaaaatatcatttaggtggttggagatatcaggatatgatgcaaaatgtgccaaatcaactaactctagtataaatgtatgaaacaaacttactaaagtgaacaggtaagaaaggaactgacatagggtagatatagatcaagagaatttaattgaaaatttgaaatcaaccttaatatttaaggttaattatttattttctttctttctttctttttttctttttttttttttgtgagacagagtctcgctttgttgcccaggctgaagtgcagtggtatgatcttggctcactgcaacctccgcctccaaggttcaagcaattctcctgcctca

SEQ ID NO: 831009 - DNA, 596 bp, Homo sapiens
atttatccatataaaaatactattttttcaataaaataagacaaaacaagaaatacagcatttctccacttgtcatatttggtggacaccttgatcagtggcatctacagagkctgttatgtttcatgggggttggcagatcagtttcatagattaacaggggttactcataaagaatactcagcagtattggaggaaatgttgtgaagtgttacgttggtaaggtcctaaagtaataggcagggactagatccagagaaatatgttacttatgctacaggaagtcaagttttgctagagtctgctgtggtctatgttgacatacaaatatttcaaagagcaatactccttaaaatttgttcttctcccaaagacagatattttcatataatcttgtaattattttcttataattggtaattttataagattatgctatgttctttgaattggtcttatatttatagacttaataaacagtagctgctaatatagaatataaggaacttgcatgtcattttaaggactttaagcaatagaatcttgatatagttgaacttttaaaaatgaacaccattacaacaatgaagaagttg

SEQ ID NO: 831010 - DNA, 492 bp, Homo sapiens
agtctgtttacacatccagttaggtcatagttcactatgtatggaaaaacctttaggccaaacttaaattatgtaaggaggcagctttaggctaaacttcttttaacagtgtggaataacaaatacatgtggtgtttgtcctcaatttctggcacagagctcctaaaacctttggaacttcctgaatgataggagtctttgttattatttcagccacagcagactttatgctagtgggtgactcttggtgggccccaacatagtttcaggtggagggctggctgccagaggaaccaaacaggtggttagagggtttgaatgttcagccccaccccgtgacctatagggaggggagcagggctggagaccaaayccaaccgccaagggccaatgatttaatcaaccataattacctagtgaaaactccataagaacacttcagcaacagggtttgaagagcttccaggctggtgaacacatcaaggtgctgga

SEQ ID NO: 831011 - DNA, 640 bp, Homo sapiens
taaaatataaatatatagtatctttattgatatataattcatataccagatggttctctcatttaaagggcacacttcaacagtttctagtatatttacagaattgtgcagttatcaccacaaccaattcagaacactttcatcaccccagaaaagaaatgttgtgctctttagctgtcatcttcctcccaacatccctccaacccacagcccctggcaacccctgatctttctgtctctatggattcgcctatttgggacattttgtataaatggaatcatataatacaaggtcctttatgactagcttctttcacttattgtaatattttcagggttcatccactttgtaccatatatcagtacttattccttttattaccaagtaatattctatcacgtggatgtaccacagtttgtttatccatccatttgctgttggatgtgtgaggtatttccactttttgactataatgctgctgtggacatccatctacaagtttttgtgcagagatagrttttcaattctcctgggtacatacttaggagcggaattgctgggtcaaatggtatctctatgtttaacccttaaaggaactgccatatggtcttcgtaagcaattgcaccacttgacattcc

SEQ ID NO: 831012 - DNA, 613 bp, Homo sapiens
ttcttacaacctttttgcttctatgcctcctaaaagatttggtgaaactctgtccctaascacatttttcagttaaatgctaaaacttttcattctaagtttaaatgcttgcaggggatgtaatttctcagcatattgtaactattcatattttaaagtattacatcattctaaaaactctagtaaaatatatatttgatttctaatatcatttgtttaaaaattcatgagattcaagaatcaatcttttgaaagttaaacattttacaccttttctttatctctttaaattcttactccatttctcttccgctgtatagaattctgtctcagtgtaatatatttttatgcttgaaagtattctattgatcactctgccatactctctgtaaccaaaaaaaaaagtatatagattgaaatctagtatttcgtatttattttgatcataagactttcaatatttaatgatttctggttgtttttaaaacaaagaattggaaattacctgacttaacagaaatagttgttacctaaatagtggagactttaaccctgcaacacgaatcaatatttttgttcctttgtttgtttctctacccaaggtcttttcacc

SEQ ID NO: 831013 - DNA, 644 bp, Homo sapiens
agaaattgcatttctaaagcaagaaacaatatgtggttaaggcctgtggctcasaatatatccaatgaatacataacctacttatcttagggatcactggattctgaatacaaattatggcaaattcagtctaataactcctgtatttgtttttgcctatacctgctcagacaggatatttagtttctcaaaaattatatctgaaagtcctcaggggattctttaaatgttctcatgagacattgttattgctattcctattttgttgatgcatatcataggataaatcaaataagtatgccggcttattttaattacttgaatttttggcacaggagaaaggaaatacagaagtaagatgaaagaggttaaattaaaatcctgtagtcttgattttgataggaagtatcaataggatcttaaaaatacatattttctatatcctctgaaaaggctgagaaaaatgatgattacagtggcaatcagcatccttaacacttagattgtgtctcaaaacaccatttcccttgagaaggaacccattatcctgaagaaatggctgatttcagatatgggacaagaattcttcaataagagcctgaagcatcttgtcatatatgaaagcaggaagcaatccaagagta

SEQ ID NO: 831014 - DNA, 601 bp, Homo sapiens
aaagaaaattatcatatatagcaaaagacaaagtgaattgataaaaggaacaattctccaagaatttgtaacaatccttaacatgtatacagccaaacacagawcatcaaaactgataaaacagtaaggagaaatagaaaaattatgctaattaacttggatacttcaatacctctcataacttttgataaataaaacgtgccacaacctagtaagggtatagttaacctgaagggcaccatcacttaaaaggatcaaattggcatttatagaatacttcacccaatgtcagtagaatgtatatttttctcaagttcatatgaaatattcaccaagatagatcatgtctgggccataaaacaaacgttagtaaattataagcaagagattatacaaagtatgctgtcagatcttgatgatgaaattaaactagaaatcagtaacaggaaaataactgaaaattaaaaaaaaattgagaattaaaaaaacagatatttaaaacacacttgggccagataagaagtctttggagagaaatttaaaatagatattttaagcaaaatgaaaatgaaaatacaaatgaaagttgggagcagcaaaa

SEQ ID NO: 831015 - DNA, 589 bp, Homo sapiens
  misc_feature 1, 2, 3, 4, 5, 6, 7, 8, 9, 10, 11, 12: n = A,T,C or G
nnnnnnnnnnnnttacttttaaaaattagaataagttactttaaaaataatataaaatggggttttctagcatatattatcacgagatagcttttcatagtcatttaggtatattgtaaaagaggcgttcaaagaaaaaaattacattatcaaaaaggcccgtgtgacttagactatatttattaaaaatgctacatttaactgagatctcatgcatttcacacatcctggatggaacactggagcgttagaaaaccctctttaaatcatttgtcctaaagtgatttaaatgaatccattgcttatcataggcttgcttttggatttgatgccaaaatagacttgtatttgagaccaaagaagttattcatctttcctccttgagctatatatttagttattccttctcagacttccttagccatataagtcagttttatatgagtctataatggatatgagttttagatgcagtcatctgaaattgaatttaccaagtagatgctattttaatactttgttttgactgatcaactcgccaaaactggaagctaaaaataatamaccttgtcattttagcaagtcaagc

SEQ ID NO: 831016 - DNA, 630 bp, Homo sapiens
tgtagaaaatacagtatggtcccagttatttttttaaagaaaacacattatacyacaaaaatgatgtactttatatatgcttgtaaaaggttctgaaaggtatttactaaatgttaacagtggttacctgtgaaaattgggagtgtcatttttgaagcaggggagatattgatctttttctgacttatttgacaattttaaatgagaatgattcttgctcagataatttcactatttgtgaaattaaaattaattagtaatgtattgaactaaaaaaaagatatttattgaaagaaaacactgagcctgcttctgtgaatctacaaaaaatctgtgattttaatgacattgtaattttttcatattgacccttagtgaaatacagcttttggaaaatcccttctctatgagagcattgctaaataaggaagtgtttaggttttgtaggagtaaaaatagcttctccagggatgttgatatttaaaataatgcaaatgtacaataaaatcccacaatctaaactctggattcagcccatatacccagagttttagaatacatttctgactaaaacacaaaagaccttgaaagcaggtgctgtctttgtcccctgataccaatgtgttttaa

SEQ ID NO: 831017 - DNA, 486 bp, Homo sapiens
ggaaggggtgcaggatggctaaccagttatctcagcaccatttattgtatagggaatcctttccccattgcttgtttttgtcarcttcgtcaaagatcaggtggttgtaggcgtgtgtctttatttctgggttctctgttctgtttcattcatctatatgtctgtttttgtactagtaccatgctgttttggttactatagcactgtagtatagtttgaagtctggtaatgtgatgcttcttgcttgcttctttttcctaggattgttttcactactcaggctcttttttggttccatatgaattttataatagttttttctaattctgtgaataatgtcattggtagttcaatagaaatagcatttaatctgtaaattgcttgggataggatggccaatttaacaatatcgattcttccagtgatagatttttcaagtacaagaatatataaacatttcattagctgcagagtgataacgtcatc

SEQ ID NO: 831018 - DNA, 600 bp, Homo sapiens
tgcctgtgtgctagatgccatatggrtgggtcgattgctctactaggtagttgaacctgtagagttgctaccaaaacttgatacagggactgtgtgggatttcttattgctactagtggttcgcagccttcactttttatagaaatcatctggataattttgcaaaactatagataattgggcctttctttaaaaatttgattttggtttgtctgatgttgggctggggaaggttttattccagaccttcccagatgcttgcaatgcacagccaggatagagagctgctgggctgaggctgtctgtagtgtaagtgctcttttgggtatctttgtctttggagatgagtctaccccttttagctctatcttggggttttgtttacctttgtttatttattcagtgtcagccttcataagtatctaacaactgcctggcattgccatcagggcatggtttatagataaacatgtggcatggtccttgccctccaagggtttgaagtctctgggtggagagacatgaaaatagatcacttcaatgttgtattccatgcaccacagcaagagtatacagagcagagccaaatctgtgggggct

SEQ ID NO: 831019 - DNA, 529 bp, Homo sapiens
caacacattccaattatattactaaatgcttgcccttccatcaagaatttggggcattttatggcatggccttcacataaaaaccttagaactgagcatcccaaggctcaactcagacttttttcctttgcatctccaatctgtcaaacatgtatatttcactattcttctaggatcaactcttcaaaagctactaggtatgagtaaacactctatacatagccccctgactccacctgttttctggtggtgttaagaaaaatatcattgctagcctatggtcctatcctcagaggaaggcaacaccaggacctatattatgactgtgagtcaggtgagatagtccgaggcaaggaacctttatagagtgtagactggatatgtgcagaggcgctgaagaacragacagccaacatggattcacttccactgaagaaggcccgggggaggaagggtgacctgagttgaaccatgagaggaggtgggggtgggaggaatatgtgaaggaacagaggtgagaggaattatg

SEQ ID NO: 831020 - DNA, 563 bp, Homo sapiens
atttgatccaaataaggaattagagtcygtgaattagtatgtggaagaaaaagccactctgcaagatcttgctcttgaaaaataacacaagtaggtgaatgctgagttgaaaaagttagcaaatctggagacttctttggacacattatatttatttgagccttatggactttctttttgattagctgcagctctgcctcagcttcttttattaattgtcgagggctagtgagactaagatctcctgtaagcatagaaaatagattactaatggcataggtaggaatgcctagagcaggttgtatccaattaatgtcccctagtaacttttgaaagtcattaaatattttcagttgatccctatgtatggttactttctgtggcacaatggtagtgtcatttagtaaggtccccaagtagcagtaaggaatagtagtcttaattttgtcaggagctataattaaaccagcatgagaaatcgaattttgcaagtgatcataacattggagtagtatttctcgagtgggggcagcacaaactatatcatccatataatgaataat

SEQ ID NO: 831021 - DNA, 635 bp, Homo sapiens
agaatgtataccttttaaagaagtaaactgtgcaacaaccacaagcaggtccttcagaaggtattttccagaagaaggcgtgttcctcacaggatatgacagcccsatgcatgtgttgcccctgacgatcttccagtgggacaagattgtgcaggtggaggacagtggtgttcataattaagtgtcttaattttaacaaaaaggcttaaaaagtaaatataaaataaaaaatagaaaaatgctcatataaaaagacataaggaaggaaaatatctttgtacggatgtgcaatgtgtttgtgttttaagctatgtgttatcacaaaagagtaaaaatattataaaactaaaaagtttataaataaaatattatagtaagttgaggttaacttattattgaaggaaaaatatttttaaaaataaatttagtgtagcctaagtatcactgtgttttagttgcctacagtattcagtaatgtaacatgctgtacaggtttgtagtctattcgacatagcctaggtgtgcagcaggctatatcacctagatttgtataagtacactctatgatgttcacacaatgatgaagttgcctaacaatgtacttttcataatgtatcctcatttttatgcaatat

SEQ ID NO: 831022 - DNA, 639 bp, Homo sapiens
gatagagccctataattttagttaatagcaaacatttataacagttaaggaaaatgctcttcacattttgcttaaatacatatttctcttatattttagctgggaarttttaagattccttctgtcaaacataagatggtggttggaagaatatcgctttgatggatttcgttttgatggtgttacgtccatgctttatcatcaccatggagtgggtaggtaacctgatataatcaggtttggggttaattgcagaagctgcaatagccattactggtgtcttggtttttattagttccattacatatgctttctctgtagtaatttattatcccattttggcaaaaggtagattataagtacattttataagtaaacaaaaggtaatcatttcctttgaaatatatctgctgaatatgctataattcgtgtgtagcttaaaatttttttgaggaaaccatttattgtaacactctcaggatgtgaacactacagcacttccaatgaaaataaaaaataatagatgagaacagttgtgaatgcataggtttttacatattacacattgaataaaatatgtattttaattgcagatttacctgggtaaaattaaattataaattaatttgaaattaaaaa

SEQ ID NO: 831023 - DNA, 476 bp, Homo sapiens
gtccctgtacctatctttgaaacccatttttaaattacttttatttatttgattaattattggatacttattgtctagagtagaaaggaccccctgtcaaaaagcttgatatctgaatccggctctaccattaaraatcctctctctcgactgggtgtggtggcttgtgcctgttgtcgcagcactttgggaggccgagatgggagttcggactcccgtctcgaacggtcaggagttcgagaacagcctggccaacatgatgaaaccccatctctatcaaaaatataaaaaatattagctgagaatggtggtggacatctgtaatcccagctattcgggaggctgaggcaggagaattgcttgaacctgggaggcagaggttgcagtgagctgatatcatgccactgtaaaccagcctgggcaacaagggtgaaactctgtgtcaaaaaaaaaaaaaaattctctatcttgagaga

SEQ ID NO: 831024 - DNA, 690 bp, Homo sapiens
tttatatttgagattaccatgaggcttacaaataatatmtataacccattattttaaaccgatgaaaacttaacattgattgcataaacaaagaaactaacaagcaagcaaaaggaaaactaataaaaactctctccttcaactttgtcttaccaccttttaactctttgtcttttctatttatatcttactgtactaggtcttaaaaagttatagttattattgtgatcagttcttctttttgtctttctacttaagatatgagtagtttatatactacaattacagtgttttagtagtctgtgtttttctctatacttactattaccagtgagttttgtatcttcagatgatttcttactggtcattaatgtccttttctttcagattgaagtacttgctttagcatttcttgtaggacaggtctggtgttgataaaatctctcagcttttgtttgggaaaggctttatttctctttcttgtttgaaggatgtttttgctggctattcttttgtaggataaaagttttttcctccttcagtactttcaatatgtcctgccactctctcctggcctgtaagtgttctactgaaaagtctgctgccagatgtattggagctccattgcatgctatatatttcctttctgttgatgcttttaggatcctttctttgtccgtgacttttggg

SEQ ID NO: 831025 - DNA, 543 bp, Homo sapiens
cacctaaagattaccttccttaagagtaagtgtggtttttgcttccrgaatcgtctggataagtgtcagcattctccaagtcactttcttggtatgaaatgaacatttgtggccaggtgcagtggctcacacctgtaatcccaccacttcaggaggccgaggtgggcggatcatgaggtcaagagatcgagaccatcctggccaacatggtgaaaccccgtctctgctaaaaatgcaaaaattagccaggcgtggtgacatgtgcctgtaatcccagctacttgggaggctgaggcaggagaatcgcttgagcctgggaggcagaggttgcagtgtgccgagatcgcaccactgcactgcagcctggtgacagaacgggactccgtctcaaaaaaaaaaaaaaaaaaaaaaaagaaatgaacatttgtaaatggagtctaattaaattttgtactttaaaagaaaagttacaagttaatttgttctgttgtttctccttgctatttttataacaattagtatttaggaataacactgtggttc

SEQ ID NO: 831026 - DNA, 622 bp, Homo sapiens
cagcttattagaaagaagccagtaaggtaaagggaagagaagtttgcatctccacaatctccttacatgtagtgagttactattaggttggtgcaaaagtaattgtggtttttgccactttataatataaagtgctgaatgtgggggcgggtgtgtgtgtgtgtgatgtagagaaataggcattagtataagatggccattgagagctataatggcatcaagaaatgtttaagtttgcttatggctttgctcccccttcctatagaatcctgtcgctgtacttgagccagccaattaagagtcagcttgttgacacacgttaaatatgtggtaataaagaaatgagaagaaaatagtttgcacagtccgagtcaattctcatatttcaaaagagaaacaaagaatgcaactggcaatacgtaatccgaatcctcccatcttagcttctcaaataaaagcagatagctgtcaagtaagtaaagcccttctctcaaagactattccttcactgtgattaggttgactcccaccaagaatttcttgtggaacacatctaccrggcatgcaatatccacgtcaaataaataagagtgttcatgaagctcactgttttgaagaagtg

SEQ ID NO: 831027 - DNA, 511 bp, Homo sapiens
ctctcagattgagtctgggaaaaggctctcaaatgtcccccagcccccaccatgctcaaactgcccattgcccactttcacttagccaagctacaaaatcacccttttctaaggtggatctgtagggtttatttcatgatttaaaaaaaaaaaaaaaaaaagctcagatgggggaaagctcatcaaaatattttccagtgatatccaccagaaagactttctgaaaataattgctcacaaagtaagatgacaataagaggtcacctatgtctcttggcagctaaactcttcagtctttgtgatagaaatattttgcctcactgcttccagcttgtttttcttttttttttttttttgagacggagtctcgctctgtcgcccaggctggartgcagtggcgcgatctcggctcactgcaagctccgcctcccgggttcacgccattctcctgcctcagcctccccgagtagctgggactacaggcgcccgctaccacgcccggctaattttt

SEQ ID NO: 831028 - DNA, 641 bp, Homo sapiens
aagaaaaatccattcacaggtgaatttccttggtatttttgttcttttgttttcccactttgactcaagagtggttccatcatggaagcgagcagcaaaagctctaagagtatttctgatcagagggcccagaaaataggtccccataaaaagaggactgggaaaaatgggaagagtagaaaattcccatcagtttttctattttttcccagttctacaccaagggcagcccacccatgaacctacaatgtggtggcaacaatgtctccagtacctaacaccttgagggaaaacccaaactttgggccagaggaactagaaaggaaccaaaaggaaatcctgtagtacaaaaagggtagatgaatcacttttatgttttatcttcctctctcttttctctgccattttgctctaaaggcagccccgatcatggagaattatgggtattatggtcactatagcttcaagttaaatcttatctttctagtgaccacataactaggaaaacaagcccttggaagtcagagaatttgggggaargaaatacttgaggggaaagagctagagaaggaaatcttctaattctgtagctaaagacacactggagttatctctgagtagcacatgcacagacagaccca

SEQ ID NO: 831029 - DNA, 606 bp, Homo sapiens
agaacccccacattggctccctgactggtagggcgagggctaccatggtggaaaaggccaaatggaagccattagagctgcctctacctagaaaaacagtaaatcaaaaacartgtcgcatccctggagggactgtggagattagtgccaccatcaaggacttgaaagatgcaggggttgtgattcccaccacattctcattcaactctcccatttgggctgtgcagaagacagatggatcttgcggaatgacagtggattatcataagcttaaccaagtggtgactccaattgcagctgctgtaccagaggtggtttcattgcttgagcaaactaacacatctcctggtacctggtacaccatcattgacttggtaaatgtctttttctccattcctgtccataaggcccaccagaagcaatttgccttcagctggcaaggccagcaatatgcctttgctgtcctacctcagggtgtatcaactctctggctttgggttataatccaagagaccttgatcactttttgcttccacaagatatcacactggtccattacattgatgacattatgctgattggatccagtaagcaagaagtagcaaa

SEQ ID NO: 831030 - DNA, 656 bp, Homo sapiens
tgctcatggaattgattggtcttaccatgttccccatcatcctgaagcagctggattgataaaacagtggactggccttttgaaatcacaattacaatgccaactgggtgacgatactttgcagggctcaggcaaagttctccagaaggccatgtatgctctgaatcagcatccaatatatggtattgtttctcccatagccaggattcctgggtccaggaatcaacgggtagaaatggaagtggcaccactcaccatcacccctagtgatccactagcaaaatttttgcgtcctgttaccgtgacattacattctgctggcctagaggtcttagttccagagggaggtatgctgccaccaggagacacaaatacgattccattaaactggaagttaagattgccacctggacactttaggctcctcctaccttcaagtcaataggctaagaagatagtaacagcattggctggggtgatttaacccccagactatcaagatgaaatcagtctactactgcacaacgsaggaagagtagcatggaatacaggagattcattagggcatctcttagtattaccatgccctgtgattaaggtcaatgggaaactacaacatcccaatccaggcaggactatgaaggatccagaccctt

SEQ ID NO: 831031 - DNA, 575 bp, Homo sapiens
tgatcacctatcttagctttcaaaagagtttgagcattacttcccaaccacaaaagacccctgaactggaaaggaatgtatctgtgacccatttgtgttgtggtccccccaaacggagggacyggctggagccgaggcagaagaacataaattgtgaagatttcatggacatgtatcagttcccaaaattaatacttttataatttcttaacgcctgtcttactttaatctcttaatcctgtcatcttcgtaagctgaggatgtatgtcacctcaggaccctgtgatgattgcgttaactgtacaaattaattgtaaaacgtgtgtttgaacaatatgaaatcagtgcaccctgaaaagaactgaataacagcgattttcagggaacaaggaaagataacaataaggtctgactgcttgtggggtcgggcagaatagaaccatatttttcttcttgcagatagcctatagacggatgtgtgagtaggagaaatatcgatgaattcttttcccagcaaggaacattaataactgaaaccctgggaaaggaatgcattcctgggggtaggcctatag

SEQ ID NO: 831032 - DNA, 266 bp, Homo sapiens
tattcagtgtcgcacagagatggtgcccattagtgtaagaggaggtgaataggtagtttctctagactaacctttrttataatctaatttaacaaaggttaatttaaataaataaggtataccatatatttggaaatacattcatgcttttaaaatgtaaatagtatagtctttttataagtctatttgcaaaatatgtcaggcatctttgttgcagtgattctacaaccaaaaatgtgtccaaaataaatacttttttgccatca

SEQ ID NO: 831033 - DNA, 626 bp, Homo sapiens
cactggttctgttaggaagatgcaaccccaccaagttctgactctttgactcaaaggtattgaatgcaaagaagcaatactggtcggaaatccattcttgcaggmgtagggcagtaagtgaagctacatcaaattccagaagaggcaatggtggtgattctgctagcctgtgcaacttccagcatccatggtttgtggggtacaacagctgtgcctgtgcccagtggtggctgcatagggatttgtatagaatcaattatctgacatcattttagagattgtttctgatggtgtggcctctaaacacaagttgtgtaagtattctagaatacagttctttcctgcataaattagcctgggttggttcatgatgcttaaaattaagaactttgactagccatctacctttctaacaaatccaaaactttaatctactgatattcactgaatgcaagaaactatgttatgtgcttgagtgaagggatagcgtcaggggtaaatactgaaatgtaagccacaggcctgctctccaggggcaagcagcataaaacaactgtaaactgagaaggatgattgtagggctacatcaaagcacaagccttgcagtacagaagaagtaacaacca

SEQ ID NO: 831034 - DNA, 540 bp, Homo sapiens
ccattatgtccaattggagctactttattccttacacttcacctcaggtggcctgcctgctgttattttcaaaagattaatcctggkggttatattgcataagactgctctttatttgacctgaaacattccttcactcctgacagacagacaggatatggcctaataggaaagggttcatgaagctccagccctagtacagctggcgtccatcctccgcctgtcgctgccaacagggctgggagatggccactctcctgagcacactggactctgcagctgggaaggtgcagttctctgggaacagtcagagttgagcccccatggtgggtggcatgtttatcttttcccttgaaaaacaaaaggtcaatgaggaacacatgtttctatgacaacaagaaattcaaaggggatgctaaatccaagcaaatgtgaatgcaagggaagaggaagagaaaagttggcccagtttgaaaggaagtgatttggtagtacattgagtctctttttatttcaacttaattcccatctgaatttaca

SEQ ID NO: 831035 - DNA, 566 bp, Homo sapiens
atatatgacaatacatgttcctcccattttcttcttaattagcattttggttgtggttaggctattgtatttccatrcaaatattagaatctgttagaaaagaaaaaccatttattgttttaattttgaaataaaatgcatatatgtgtacaatggatatctaatctcttattctgaaagtttatttatgttgaatgtttttatgtacgtaatcatataacctgtgattactgtttgtttcttattatctaattctgaattttatttcatttttttaagtgagattttgcatttatctcttgtaacagctgtatttcttagctgatagaagacctgatgcttactggatctatttagatttgagaagtaagagaatatttagttgaatatttggctttaactcgtgaactaagtaacacagaattagagaaagtttagttgccattgtggctgctttccaccttgttgttccagtggatctaaacaggcttaatgtttcaggatcaggaccctggatcagcctatggaaatcttcaatcagagaagcatctagctgatctctagtt

SEQ ID NO: 831036 - DNA, 411 bp, Homo sapiens
gtaagtatgcatcttaaaatcaaacgttattcatatctaatggtttctaatattgktatatttttggtgaatagaggtaatgtacttttaatctgtaataatgaggtaaaatacctgttttgaaaacgatttaatattcattatatgcaaatagcgatgaactagagtcagataacttttaatatacatattaaatttatgtatattaatttaaaatttaaaaccttggcaaaaaccacaccatttacatttactattgagacatatatacttctgcgataatttttaaataacatgtcacaactaacacttcttggtttgtttttatcagacctttatagagaacttcagaattacctgaaatatactttaatgtatttcaaaagcatgaaaaaagagaaaaaaggaaat

SEQ ID NO: 831037 - DNA, 590 bp, Homo sapiens
aggggacatttaaattactgaaatgaaattgggtttgaagatatgatcataattgatcacaggactatctattaaatacaagttaccagagaagccttgggcttggccagagttttcatttagttataagaaaaatagtttccctgccacataagtattaaagaaagtgtgggagaaaaacataaagttgtatttttactatatcccacttagcgtcactgttcaaatacaaattatgttctttaatgcattttctcacaacttccagatacctagaggcaactattgaatatgttggaggtctcccacaactaattacagttaaagttttaatgcacagttatagattatacttttcataagtatgactttcttgagtttatgcacatatcccaatgaaaatggaaagtgttcaaatttcatatgagtgagttttcatacgactttagtcatatgtaaaatagaatgacaataacaatcttgtaagggttgctatsaggttagtggataacttattctaatgaattaacacaccttgatcatttaatatacacagttattgctgtattactataattgctgtcacaatc

SEQ ID NO: 831038 - DNA, 503 bp, Homo sapiens
gtaagactagaaaataaaagaaccttagaatccatccactgagatgaattcaaggagagtctgcttgaaaatgaaataaatacttcaagatgtttacagctggggcmtaaattaaatatctaacattaagaggaaacattgagataagtaagaagaaaaaacaactgatcatgatcaaaatgagagtagaaggcattggatgaagaacatagattagttttaaatggagaagtattaacttttcttctgaaactgtggtaaagaaagaaagaaaggccgggcgcagaggttcatgcctgtaatcctagcactttgggaagccaaggcaggcggatcacttgaggtcaagagttccagaccagcctggccaacatggtgaaaaccctgtctctattaaaaatacaaaaattagccaggcatggtggcgggcgcctgtaaacccagctattctggaggctgaggcaggagaattgctggaacgcgagaggtggaggttgcagtga

SEQ ID NO: 831039 - DNA, 421 bp, Homo sapiens
aaatcaacaatctccacactttggcctgctctaaaactcttaagaaccctaaccccaaacttctcggagaaagatttgaggttttctcccatcttgtctggcagccctgcgattaaacctctttcttctgctgcaacccggtgtttcgggtgtatggacttgccctgccatcaggcaagggacctattacagagacactggctctgtgccctctgtgtcccagacatggttcaaaaggcaagtcccacctggccctgccctccagggctcctagtgtcgggggagcagaggcacacaggaacaggcaattgcacagcgccacsggagcaccagctccatggggctggggcaatgtggaaggggctgcattgcagagatggttccatggtaaacctgaaaatgagaactcactgtcatccat

SEQ ID NO: 831040 - DNA, 548 bp, Homo sapiens
tttgttcatttgtttgttttgctttgttatttgtttgtttttctagccaactaaatttggggtaatttgctgtgtagaaatgctaataacaccaacctatgctaaaaagcttacgtctatagagaacaggactctagaaacactgagtttgactgaacttagctggtcacctaagggattgagaacagaaacatttttgatattctgtctatgcctggaaatgcagatttatgaaaatgaactaacctttttaaaactcagttcaccaagttagcatgtgacagcctcaactgtgaccttttaaaagatatacagaaattcaaaataaaaagacataaaatgatcattaaaagcaaaaaaaaaatagtaaagttaatcttcagagatcatacttttgggaatccctttcccagtgatcayactatttcacctcctagatttggcacatagccaaggtactttccttgtactgatcaggatatattaggcttgggtgtgaaactatattaatcattactctctttgtggcataacataaaaaggttcat

SEQ ID NO: 831041 - DNA, 608 bp, Homo sapiens
tgcatgtttctttagaactgcttctccccattaaattccacgtcattctagtagagcttctaatcatagtatcatacgcaaaggccatggtaaacagccccaatgaytgggtttatcacagcaagctagctgttctttcttgagtttacatatattgaatcggaaaaataagtttctctcctcctatgagactgctaaattatagtaatacaagcttggggttaaccatagatattttctcccatcctcccacttcatatggagacagaaagaaagagtgcattgcttcccttaattgcttgtggttttgcattagcatgaattaataaatttcctttttaaaaaatcacttgggtttctgtcacttttaaataaaaagagaaaaaggaggagagatatgtattccaatgacaggttattgtaacttccctagacaataacggtgttttaatgactattaaatagtttcctgattaatgtacagtcataacaataacatcgggaaatatattagaatcacatttacacatacaacaaatataaacctgtaaattaatttgcaacataacacaataggagagttaactaccattcttctctaccactct

SEQ ID NO: 831042 - DNA, 615 bp, Homo sapiens
taacttccctagacaataacggtgttttaatgactattaaatagtttcctgattaatgtacagtcataacaataacatcgggaaatatattagaatcacatttacacatacaacaaatataaaccygtaaattaatttgcaacataacacaataggagagttaactaccattcttctctaccactcttctttatctacatagtttcatgtgtttcatttccaaaaaaaaaaagattctatgaattctacaaaattgcaggcattttttactattctgcaaacagtgggaataaaattgggtaaaatttttagtgatacatcttaaccattttttacatctctactcgactgcaggtttgagtagagcatcttaatatttactcaaagatatggggttagaaaggacttgagggatccttttaataaaaaatcttttaataaaatatccagagttagtctggcattcctgccaaaaaacacctgagaataagctttagaagtctgtacaactcaggttccactacacaccttcccaatcttcaggaactgcctctaggaatgtgaattttgataaaaacctctgtcattctgatgatgttcacctctgattgacaa

SEQ ID NO: 831043 - DNA, 577 bp, Homo sapiens
gtccctgggaatagctttgttccaacctctggaactggaggatttatcaggttggagatgactggtcttaggccaattcttgataaagaattgataaagacatactggaaactgggtgatttatacaggaaaaagggtttaatagacttacagttctatgtgggtggggaggcctcacaatcatggcagaaggcaaggaggagcaagtcatgtattacatggatggcagcaggcaaagaaagagcttgtgcagggaaactgccccttacaaaaccatcagatctcatgatactcgctcaccttcatgagaacagcatgggaaagacctgcctccgtgattcaattacctcccactgggtccctcccacagcacatgagaattcaagatgatatttcggtggggacacagccaaaccacatcaggaggtttgcataagcaaacctgttacagttactaatctcttgtaaggaattggtcatctgcttgattctccaggaaaaaakaacttttaaactctagcttatgtttctgtaactagcattatttttactaagaacaaaaagaaatagtcacttt

SEQ ID NO: 831044 - DNA, 503 bp, Homo sapiens
cctactctagacagacttctcccattctcctatattttttcattagtgatttccttcaaattattwctgatcagtaatcttgactgggaggtatatatttatctttataaaatgtcataaattattggagaggaaattctattttatttgatacaaatagtattttgttccatagttaaaaccaaatatattgtgctatttcaacatttttattaggaaatcaccttttgaagaactgttcaatctaaagggacataaaaaactcaatgttgcttcacatgataactgtaaaaccaaagagcaggtaaaagaggtaggcaaaccttgaagaaatataaggagacactttctaaaattggagttgttaaggagtaagagtaaaattagctaccttttgccaaacacatgcaatgcaccaaatactgtgttaagagctttgttatcttattccaacagttcagaaacctacatcatatgtattattagtatttttctcttacaaa

SEQ ID NO: 831045 - DNA, 605 bp, Homo sapiens
atttacaagttcttgtgtattctaatagtctctttacttttctatatacacagtcatatcatctgcaagtgaagatacatttaatccttctaccayacaatttatattttttttgccatggcgttagctagaaccttctaaacaattttgaatagcaatgaggatagcaacaagctaaggcttctttctgctttgtaggagaatagtctagcaagtaattataacacataacattaataaaggatttttttctgtagaaaactaccatattttagtaaattttcttctagatacatgcatattttctaaaatctcacaatcctttctttggaattccataatattattctgtagaattatatagcaagataaacatttgatgcattttattaggtttatttttcccttcactcttgacattacttcatgatatttctcttatttaagcaggagcgaagttgttctctgcttacagcttcagagaaaggaggacacaacagcatgtgaaaatcaataaagtcaatgccatgcccatgggttttaaaagtccaagtcttgaaggacccagggcataaacaatagatttttaaaaatagatgaaaagg

SEQ ID NO: 831046 - DNA, 547 bp, Homo sapiens
cgctgggattacaggcatgagccaccgcaccctacccagtttcttttaaaactctcttcactaagagttccaagtgaaaattcaaccaactaacccagaaaaaggggggaaatgtaatggttcatgtaagaaaagtgcataaagaataggaatcccctggacttaaagacaactgaaacaaggacgagagtgctgccaggacttggttcaccaactcccatttctacttccctctacttactaccttgtctcaaactagctccctcctcaaagttctaactgtggcttctaacagatcatattttcttagttttgctacctgggaggggcttctcctcttcccttagtttcacttcaaaaatctgagggaggccaggcacagtggctcgtgcctgtaatcccagcactttgagaggccaaggtggacarattccttaagcccaggagttcaagaccaacttgggcatcatggtgaaactcttgtctctacaaaaaatacaaaaattagccaggtatatgcctgtagtggtgtatgcctatagttcca

SEQ ID NO: 831047 - DNA, 634 bp, Homo sapiens
agataaggaaacataggagagttaagttttttgtttgtttgtttgtttgtttgttttttkttttttttttttgagacagagtttcgctcttgttccccagcctggagtgcagtggtgcgatctcagcttactggaacctctgcctcctgggtcaagccattctcctgcctcagcctcccaagcagctgggattacaggcgcccaccacgacggccggctaactttgtattttttttctttagtagagatgaggtttcaccatgttggtcaggctggtcacgagctcctgacctgaagtgatccacccgcctcagcctcccaaagtgctgggattacaggtgtgagccaccgcgcctggccaggagagttaagtttttatgcactggctgtgattagaaggggtgtagaatataggagcattgtctcggaaagatgacaggcatggtggggatagaattgtggtgggaagctttggctgcttggagtcctttgggatcctgacagtaaggaatagtgagactgagtgtggccccaagaagaattgtaagaccttaaagacaaatattttaatgaaggtcacaataggccagttgactgtactagggactatgtattttgtgatatccatatgttc

SEQ ID NO: 831048 - DNA, 598 bp, Homo sapiens
tccatcaattgaaaatgatgcacagtttcagaattcactgaaataagaatcataagggaatgtttcctagacagcacttaataaattttgtgaaatttaataaaagtttatgtgataaaatttttttccttttctttcctaagcaaacagctttaaaagatgattgatggctgccattatgggtctatatttgtatttcctcattttagaagcttttcaaaaatataaaatacacttaaagcatttccagttatattttaaaaatggtaaaaggtgattatttataggcaatcatattcatactgatagactctcagagagcaattgcaaacataaattttaaatgccttttggaaatagttgaggatgaaaacatttacataattttttagaaaccctggctttttattgctgcatttcagtattccctctgggcaaaggagcagctactctaaagatttatttgataatggaatgtttgatttctttgttttccctttccaatgtaagtttatagttttcactctaccacaatgtaccgtattttaaaatttgaattggctcactattaaraataaaaatggttctgttttagagg

SEQ ID NO: 831049 - DNA, 610 bp, Homo sapiens
aacccacacattgtctgtaaaattaataagtgatgtgttactcttttcaaatataagtagagactgctgtaaataacacaaactcctattaagtgacattactgaatccattaggcgtgtaggcagatactttattactacaaatttagctatcttatgagtaattcaatgtttctgatgttttaaaagggccctcatgaggcaatttgaaaatatgtctctaaagccttaatattaggcaggaccctgggcattgaataaagacttgttttgaggtccacagagaggagacacaaggtcacaagatggtcccatggccagcaagtggcagagtccagatccaaaggacgtctgtctgactccagacctcaggatcttaacccccacacaataaaacaaaatgtgtagatgcagctaaagaagagctcagatggaaatttatagcatttgatgcttattttagaaaagaaggaaggctcgagtcaacaatctaaacctcagctttaayaaactaaagaaaaaaaagggcaaaataaacctaaaacaagcagaaggaaggaagttttggtaagttaaagaagccactctcaaaaggttacatattgtatga

SEQ ID NO: 831050 - DNA, 577 bp, Homo sapiens
tccaaataaattgcaagcattctatccaaatggtaagcagaacatcttattatgtaatcatatttgtttatccataattaatataactttctgagtattgaaatgagaaacttgatttactcttcttcactcatgttttaatttttttataagaaaaactagaatcactaaagaatttctttttattttatttaaaaattataatcctgagatgcaaatatatgccatgtaagcctgggaactatttaatcactttactctaaaatctggtaaaaggtaaaatttctgaaaataggtgactggcaaacattttgtaaacaatatataagaagaattgtatatcaaaatatacacataaaactatcttttcagataattatgtatcatttattttcttatagcgaaattataaaaatacaacctatagccttccatagatacataattaactatgttttgaaatgatatccaattcagtaccctcatacatttgaaactttgataagctggtctatcttcactttggggatcwtcttcattaagagtttgttttctcaagttttgaggtaggatacat

SEQ ID NO: 831051 - DNA, 613 bp, Homo sapiens
acatctggtggttttggtcattctgtcttgtgttttggcctaattttctaccacgttgtaaggcacagttttaagaataattcacacatttttccatytagagatttttgaccaaaaaaagtatatttatactgatggactaaacaagttgcattataattgtgacagttacaaacttttttgaaacatgtgtatagttttttttttttttaattttaaaagtagatgtcacacctaaaatgggtaggtccatttcattttataaggaaagcacccagaagggtccatatgtatttgtgctcgaaaaggaagtaattgtgtgtgtcatttccgccccctttttatcaatattgcctaatatcaaggagaatcagtaataatagaattattaatagcagtaatagaatcagtagaataagagtggtagagttagtactcatcagtgaaaaactaatcaaccttattactttgaagggaaatctgggaagaaagagaatagaatgaggtacatgttagaaatggaaatggcgaagtaagtaatttttctgattttcataattctgtttcactagttaaatctattttccacttttcttcccttcctttatctggc

SEQ ID NO: 831052 - DNA, 594 bp, Homo sapiens
ccagcaagttgcttcccccgaggcctgtctttaactgacactttaatgttaacaggtgtggaccctcagaaaatggcctatccctggcactggctgtcaatgtatcacttttagacaggcaatgtaataactgccgaaccatcccttgacatttctagtgggtgaaggtgggggcagaacccctccccttccccattcaagcctatctatctacctataacactattactatatttttaattgaacttatttatataagtgttctatttagtagatgtattagtccgtttttgcactgctataaagaaatgcctcagacgtggtaatttataaagaaaagaggtttaattgactcacagttccacatggctggggaagcctcaggaaacttacaatcatggcggaaggcgaagcaggcatgtcttacatggcagcaggcgaaagaagtgaagtgtaagcacaggaaaaactgccmcctttaaatccatcagatctcatgaaactcactcactgtcatgagaacagcatggggggaactgcctccataatccaatcacttccctccctcgacacatggggattacaggtccctgc

SEQ ID NO: 831053 - DNA, 596 bp, Homo sapiens
gaaataaatgtacataggtttcacaaaccactatggcacatgtacacctgtgtaataaacctgcacgttctgcacatgtatcccaraacttaaaatataataaaaaaaattatgagcataatggtacagtctctctattttgtttaaggggagtatcaagtcagagtttagagtgaattatttcttttaactgcacagtgtgattcgtgaaggtcagagttgaggttcagtgcagtcaggctggaaaggtagctcctggcaataagaagagtgtgtgaataaataaaagacgtgagctgtttcctaagtttacttaatattcagattaaatgaaaattatgagcctgaatgtaggagtctggaatgaatatgagtcaaagatcacatggaattaatgtattataaaatgatatacaagataggtttaattaatcttcctcaatcattcttatttttcagatcttcaggaattttactgggataattatccaaataaattgcaagcattctatccaaatggtaagcagaacatcttattatgtaatcatatttgtttatccataattaatataactttctgagtattgaaatgagaa

SEQ ID NO: 831054 - DNA, 577 bp, Homo sapiens
tccaaataaattgcaagcattctatccaaatggtaagcagaacatcttattatgtaatcatatttgtttatccataattamtataactttctgagtattgaaatgagaaacttgatttactcttcttcactcatgttttaatttttttataagaaaaactagaatcactaaagaatttctttttattttatttaaaaattataatcctgagatgcaaatatatgccatgtaagcctgggaactatttaatcactttactctaaaatctggtaaaaggtaaaatttctgaaaataggtgactggcaaacattttgtaaacaatatataagaagaattgtatatcaaaatatacacataaaactatcttttcagataattatgtatcatttattttcttatagcgaaattataaaaatacaacctatagccttccatagatacataattaactatgttttgaaatgatatccaattcagtaccctcatacatttgaaactttgataagctggtctatcttcactttggggatcatcttcattaagagtttgttttctcaagttttgaggtaggatacat

SEQ ID NO: 831055 - DNA, 580 bp, Homo sapiens
atgatttgtagtgcaattttacttcacttgggagaaaaacaattccctttcatatttactaaatttacttaagaatgtagctagaaaaaacaagttctgtagaagtataatgcttagtattctctttcatggttttaaaagatgctattagacacaggtcagaggtgcaattaaagctaagggaagtatatttcataataaagaaatttattgcaattttgataacatgaaatttcataagcattcatgggaaaatataatttggaaaattatatttaaagcttacacagctttgctagtatttaatgctttagagacaagatggcccaacacaattagccaagtcctgaggcagcattaaaatgctgaaatatgggattgtaggagcttaccaagtcagaaattttcaaaaataattttgattcattgaaatataatttcacttataaaatgttatatagttagcaagatagtttgtgtatattttgtatcatgtaataattgctaaataaaatagcagtaamttcaatctacttatcacgtgttatgaggagggcttataaaaagatctacaatatac

SEQ ID NO: 831056 - DNA, 391 bp, Homo sapiens
ctggatcatgaattgctatatgtacatgtgtatgtctctgtgtctatctatctattctatctatctatctatctatctatctatctatctatctatctrtctgtctatctatctaagatggtctggctttatgtcctacaccaaatctcatcttgaattgtaatccaccggtattgggggagggacctcatgcaagttgattagatcatggaggtgattaccccatgctgttcttgtgatagtgagttcttatgagatctgatggttttataaggtgttttccccccttcactctgcaattctctctcctgctgccatgtgaagaaggatatgtctgtttccccttcctccatgatcataagtttactgaggcctccccagctatgcgtaa

SEQ ID NO: 831057 - DNA, 607 bp, Homo sapiens
gtcctatagcatatatgttttgatatatttttcccatttaaaattaggaggtatatagtttcatgtcattgaccttttctttcttgtrgattcaagatcaacagatgcacagaaattagttataagccttgatatattactccctcttcattggtccattcaaggccgtctttactccattctttattaataataaacactattagacttaataccctatgtaaaaacttaaatccctttctgtgatcctctttcatcgtcttttcctcttttcctgacccagaataactgctattctgaattgtgtgttcatcatgcccttgctttgaattttaaattatttcatcacatccatatgtactgtattcaaaaaagtatatttgagtatttggttgtctttctaacattatttttgaaagatctcatactgtatgcaatgttttaggtactcccatcttattaaaattatgtttttatggtaggtagccaggcagacatgagtggggcaggagagggccccctcacctcctaccaggaatgtcaggaagccatcaggtggttgttaaattgcctccctaaaatagtaattggtcacagccagcgcaag

SEQ ID NO: 831058 - DNA, 609 bp, Homo sapiens
agaaaaatctctgagttgcatgttgttttgggtaagagaaaagctgagagatcaggggaagaaaagttgaagtagtagaagaagatgaaggtstgggcaccctatcccttttgtacatgaactgggaagctctatgagaaactcagctcttcttaagtctggaggcacctcaccatcatcaggcaagctttacacacacacacacacacacacacacacacacacacacactgtgctttacactctcaggaattctgtgtaatgatcaggaagaagatgctggcttctatttccctaaaacttccctcaggtgatgctgacgcccagttcaagtgagaagtgttttcaggagtgagagaagccaatttaaaataagacatctacaaaaataagtcatcagcaaagataaatcagagcaaagctggtagaataaacaacagaagtaagagtgtaaatagaccaaagaccagagaaagtccattgactcagttgtggggttccaggagcactgctctttcttgggcttaaaaataataatttgtgttcatgtgtgtttcacataagatgaaacatgaatttctaaataccatatggaatgagcacaaattt

SEQ ID NO: 831059 - DNA, 599 bp, Homo sapiens
attgaatgaatttgtagatttggtaatagaagtagactgcgagctcctaaaatcagataatccctttttttctcttttccaatcaccgtaactttagaaagttacttaacctctctaaaatgtcagtttgctcatttgtaaatggaaataaagcatactagctcaatagcgttgttatgaggattaaaagagagaatattaatgaatcacgtaaagagtacctggcacatataggctgatttagtgttaattattgtgaatattggtgatcgttaattgtggctgcaccatgttttcatctggagaacttttaaaaaatggccacgtcctacttccagatactcaaattaattgttttagaacaaggcacaaacatctctctttataaaaagcttctcaagtgacccgtgattataatgtgaagccaaggcagaaaatcacagttatagaagaaatgcacacacatacatacatgcacgctttgtccttaaaaatatgaaccattcattacagtcatacagctattctatgagytaatttttagttgtacattctgtcattcttcaagtagttctggggtgttacaattaggtgtcctt

SEQ ID NO: 831060 - DNA, 508 bp, Homo sapiens
aatattcatttccatcctctaaatctcagctgtttttataaaattatttttaakggaaaaagagtatttggactatggggttgttaattgcatagagaacctgcaaaatttattattaattgctattttccttctattccccaaatttaaaataaacatgcttatgtgtatcttcttttcaccattgtcatgtatacataataatgtattaaagaagcaatgaagtttagttaaaattttattagtacaaacagaaatttcacaaaatttcataatagctttatataagttatatggcatgtaaaacattcagctctcttaattcttggattgtgtagaagagatacagatggtagctttttagacaagaacaaaaatatattttatgtgtgtgtaattcaagcaatgagaaagattttcagagcgtatcttgcctagagtttgcttgggtgttcattttaactttctgtttatacatttttacattctattcaatagactattgcaa

SEQ ID NO: 831061 - DNA, 577 bp, Homo sapiens
tttactttcagtctagttgtgtctttatagattagttcttataagcagcatatagttgaatgatttttttaaaatattctactaatctacatcttttaaatggaatgtttaatctatttacattcaaggttaatattgatatttaaggttttgtttctgtcatattattaattgtattctagttgtttcatagatcctttttttctctgtggtttggggaaattctcccatattgacatctgattcacttatcttccttgttcatatgttttcatcatgatgaatattggcctttcatttccatgtttaagactcctttgagaatgtcctatagggctggtttgttggtgaatagttccctcagcatttgcttatttgggaaagactttattttgccttcatttatgaagcttattcttgctggatataaattttgtgaccaaaaggtttttttgttttgttttgttttgttttttctataccttgaaaatgtcattcaatccttttatggcctgtgaagattcagctaaaaatccattgttgtctgtattagtmtgttctcacattgcaataaaga

SEQ ID NO: 831062 - DNA, 519 bp, Homo sapiens
cagaatctacaacgaaatcaaacaaattagcaagaaaaaaaccaaacaatcccatcaaaaaaattagctaaggatatgaatagacaattctcaaaagaagatatacaaatggccaamaaacatatgaaaaaaatgctcaacatcactaatgatcagggaaattcaaatcaaaaccacaatacgataccaccatactcctgcgagaatggccataataaaaaataaaaataaaaaatagatgtttgtgttgatgcagtgcaaagggaacacttctacactgctggtgggaatgtaaactagtacaaccactacagaaagcagtgtggagattccttaaacaactaaaagtagaactaccatttgatccagcaatcccactactaggtatctacccagaggaaaagaagtcatacaaaaaagatacttgcacatgcatgtttatagcagcacaatttgcaattgcaaaaatgtggaatcaacccaactgcccatcaatacatcaatcaatcagtggataaa

SEQ ID NO: 831063 - DNA, 484 bp, Homo sapiens
atttatccatttatacagacggtttcggcctgcctctctttctgccctctctggctcccttctgtctgtctctcccctgtgcccygccctcttcttttccctccttagtcttcctgcgttttcctctaggctccagtttccttgttgtgttgcacagcctttttctggtctcccaggctttttaccaagagccccctttgtcccatttgtagtccaggttctggggagcactgtctcatctttgtctttgttccagcagcgacttagtccagagataaatcaaatacaccccaagatgttattatggggaaaaaaaaagaaaactggacaattaaaattttgtagaaattgttgaaccttcttaatacaacattccaaactaatagctgtaaagaaactacgtttttggtaaatttagtgaattggttatttgaaagtactgatgaacaatcctacatttagagaaacaaaaaagaatatttga

SEQ ID NO: 831064 - DNA, 631 bp, Homo sapiens
tattctgcaactttatggaattcatttattagtttgaacagtttttggtggtgtctttaagattttctatgtgtaatatcacatcatgtgcaaacaaagataattttagttcttcctctccaatttggatgccttttatttctgttccttgcctaattgttctgtctggagcagtactgcatagaataggattactgaaaatggtcatgcttgttttgttcctgatcttagaggaaggcttttggccctttagtactgactatgaagacagctgtagagatgtcatgtatagccttctttgttaaaatatattacttctaacctattttgttgaaagttcttatgctcaggcctgagggaggggtgacatgtttaatgtgaaactgttcttcatgtcctcttcaatgtatgtttccttattcctgggttacatccaggtgctgcgatctctaccctagatttcttatcttctatgaaggtggtttcacatgtggacagcactcagmagtcctattctaccaacttgctgatgtcaccttgttactgttgattgaagagaaatccaaatgcttcactaaacagatgtgttggaggcaaataggtctttcagttgttaaagtttaaaaggctg

SEQ ID NO: 831065 - DNA, 624 bp, Homo sapiens
ttatccctggacaatatccatcattctgtgggtactgtgatagcactgagtgatgctggtaagatgtaagatgaaggaaaagttgggcaaactgtaaggcagtgtgttttacatgccagagaaattatgcagacagtgagctttaaatggagtaaggaattggaagcaaagtgatggctgggatgggctgggaaggctttggagagatgagaatggaagcaaggcttgaagaatgagtgaaaattagtgaagaatatggagtgacattacaggcagctggacttccagctgggacagagaagaagacttaaattttggagaaaagatttcacaaggcactcagtccatgcgctatgtaattagacagtaaatagcacttattgatagtgattctgcaatgaacaggtaccacaggggataccaagaagtaaatacaaactctgattcttgcccttacgcaatggtccatctagttggaaagataaggcatgagcatataataataaaaggctgaaaataaaaatcccctgatcagtaatatatataacaaaggttacaagtgttcraaagtgggaggaattatttctatgatgagatttatggtggctttaaagaattgtatct

SEQ ID NO: 831066 - DNA, 648 bp, Homo sapiens
atttagagtaagaaacaaaataaatccttgtgyatttattagccagctcactaattatcaaccgatgtcctatcatatatcctctataccctcacattatttggaggaaaattctatatatcaaatcatttcaccaataaaaatgccagcatatatcattaaacatcattttaaagaatgataaccacacattttcaaactcatgaacataaaagcattttaaggatgacctgtgattatcttgggaaccatagtgatttgtgtgagaaaatatttaatgcgggttttttgttgactttatagaaaatttttactggtaaatgagtgaatagaatattacggaaaaactaattgtctataaagcatatgaaaagattgttggataatataatgtgaattcaagtttttctttaggagacttaggctattatgggactaggtgtttttcctcaataaagtcttccctctcatcctttctcttgtctcctggttatattcttttactttcttccaaactttgccataagaaaaagaacatggttttggtatataaattcgatttgaaatcctgtggacactgggtgaattattttttaaaactgtagctctgatttctcaaagataaaatgaggataatatttatacaat

SEQ ID NO: 831067 - DNA, 625 bp, Homo sapiens
ctgcttacccaggaaagacaatctacaattctcccccatcagggacaattgcaaaaccaagccagcaatcccaccttgcatcagagtccagtcagtggtctcaccggacctcggagctcagccaacaatamcacttcacctcagagaataggatgtgacccagcccaattacaaaaccttacaccaagatatgcctgtccagtgttgctgtcagccagcccactcagaatctcaagctacactaaatagtaaatatctatctccaccaaagaacaactgcaaagtccagaagaaatggcggtctccccaaatgtgcagccatcagtgtaaaaacataaggattataaaatattagggaaatatgataccaacaaaagaaattaataaagctccagtaatgaactcggaagaaatggagatttatgaaatgactgacaaagaattcagattaatcctcttagagaagttctgggaactacaagaacacacagatagaaaattaaataaaatctgaaaaataattcatgaacaaaatgagagggttttttttttacaaggaaatagaaacaataaaaagcaaaatggaaatcctagacataaagaataagtgaactagcaaatttaa

SEQ ID NO: 831068 - DNA, 571 bp, Homo sapiens
aataaatatacatgcatacagcatcagagcacctaatatataaagcaaatattgacagaattaaaggtagaaatgragtacaataccccactttcaataaaagatcaaagattcagatagaaaatcaggaaggaaacagtagacttgagtaacactacagactaaatggacatatgacatttacagaatattctacacaacggcaggagaatacacatgcctctcaaattcatggaacactctccaagatagatcacattaggtcacaaacaagccttaaaaatttaagaggattgaaattataccaagtatcatttctgaccacaacagaataaaactagaaattagtagcagaaacgaacctggacattttacaatatgtgaatatgaatcaacattcttgattgactcaaagaaaaaaataaaaagagaaattagaaaatatcttgaggcaaatgaaaaggaagaaacaacatttcaaaacttatggtatgcagcaaaagcagtgctaagagggaagttcacagtgataaacacctgcattgaaaaaatacatgttatacataatata

SEQ ID NO: 831069 - DNA, 593 bp, Homo sapiens
atagtgaagaggggaaaggatcagcatcaccaggaggtgacctagccccaagatcagctgcagtgggggcyggagtttgtgctggtagcctttattttctttgttttcttctttctttttttttttttttttgtttgagacagagtctcactctgtcacccgggctggaatgcagtggcgtgatcactgcaacctctgcctcctgggttcaagtgattctcctgcctcaacctcccaagtagctgggattacaggcacccgccactgtgggtgcgaagagtctcatcattcaagagcacttcttgggccagtgacccactatagcaggtgtagaaaagtccagacatttagtttcacagcaagacaattctgatgggtcacatatgcccctctgcaactgtccaaggctttttaagaccagcagcaaagctttacattccttctcttcaatcctacttctgcctcatcccttctacaggtgtgaatgcttaaaaatatcctacacactaaactctttctcagcatctgcttccagagagccaaatctgcaatgtacattcaaattaggctcattcgaggaggatttaataaag

SEQ ID NO: 831070 - DNA, 476 bp, Homo sapiens
gtttaccagggctgggaagggcatgraggaggtggggatgtagagaaggtggctaatgggtacaaaaatacagttagacagatgaaataatttttagtgttctatagcacagtagcgtgactatagtaaacaataatttattgtgtatttcaaaatagctagacgagatgtagaatgttctcaatacaaagaagtgctaaatgtttgaggggatggatgtgcagattatactgacttgattaatacacattctatgcatgtaacaaaatgtcacatgtaccctatacatatgtacagttgttacatatcaacagaaaagaataaaataataaagaaatttaactaaaaaaagaaatatacactgaaaagtataaaacattgatatatgaaattacagaagacacaaataaatggaaataggtcccatgtttgtggagaggaattaatattttttaaataggcatactatggcaaag

SEQ ID NO: 831071 - DNA, 476 bp, Homo sapiens
gtttaccagggctgggaagggcatggagraggtggggatgtagagaaggtggctaatgggtacaaaaatacagttagacagatgaaataatttttagtgttctatagcacagtagcgtgactatagtaaacaataatttattgtgtatttcaaaatagctagacgagatgtagaatgttctcaatacaaagaagtgctaaatgtttgaggggatggatgtgcagattatactgacttgattaatacacattctatgcatgtaacaaaatgtcacatgtaccctatacatatgtacagttgttacatatcaacagaaaagaataaaataataaagaaatttaactaaaaaaagaaatatacactgaaaagtataaaacattgatatatgaaattacagaagacacaaataaatggaaataggtcccatgtttgtggagaggaattaatattttttaaataggcatactatggcaaag

SEQ ID NO: 831072 - DNA, 343 bp, Homo sapiens
gaaataaaaggcatacaaatggaaaaaaaataagttaaattgttcttgtttgaagatgacatgttcttatatttagaaaaacctaaagactccaccaaaaaactatttgaagtaataaattcagtaagtttgcaggatacaaaatcaacatagaaaaatcagtagcatttctatatgccaatagggaacaatttgacaaagaaatcaagagagcaraatttaaaaaaaatccattcacaagagatttaaaaaatacctagaaataaattttaccaaaaaagtgacagaactctaaaattagaaaacattgatgaagaaaattgaaaatcatacctcaaaatga

SEQ ID NO: 831073 - DNA, 570 bp, Homo sapiens
gacagtttgtcctcaatcttagggaataaagctcaggattagaaaaccacagttgaagccagtatttttgggaacatgtaacttaattcatgaaaacctgaggctcagtgtagacaagcttgagagtttaaaagtcttaggggttcagtctcaggggggtctttacacttttgtgttttacctccaggagccctgccaagttctcactgtgaaaattggagtataatctcttcatccttctggcagagggaggataaaaataaccactgtaatgtaagcccagagcagcctgcccttaccctctccttcaaggggaattacaagagcctaactaatgtgaggtaagaaaaacattcaatccattcaactcatcctcctctagctttcctgcttcacttaagtggggagaagctgagaagccctttcaaaggtcacagcccaggacacaggctcagyggaagatagcaacccaatcataagactatagaatgctgttttccccataccttacaaccacatcaacaggactactgtaaataatggagaattacaattgaaaaattgaaagtt

SEQ ID NO: 831074 - DNA, 577 bp, Homo sapiens
gaaagaaaaagaaaattagggatagtaattggggcatgaaaaccataataaggtggattgtgataattacaaaactaccacttcctctggccctcaaacacaccgagttcacacctgtccatctccaagccctcacccccaccatgccttctgcctgccctgctgttccccagctccaggagggctgactcctttccttcacttagatcttgctccaatggtgcatcctcagaagagtcttctaaaacaactgttctctctcctcttatcttacttggttttcttagcagttacaacctcagcaataacagtaccaactatgttccagacagtgttgttaaagcttttcgtgtgtgaatgcatttgatcctcacgttaaccttataaaagaagaagactgttactctgcagacaaagaaaccaagtcctaagggaggttaatgggatagctcggcactsggagttatctattcagtaaacgtttatggggtcctcattatggactaggctctgtgctaggatctggggatacagaagtcatcatctttgcattccagtcatcagcaaaccaacgttc

SEQ ID NO: 831075 - DNA, 446 bp, Homo sapiens
agccatgatttacagatgcactccaaactccacaggggatccatatgaagagaaccacacctatgtacatcatagtaaaattgctaaaaaaaaaaacaaagccaaagagaaaaaacagatatgttactttcagaagaaccacaataaaactgacagatgactttttaacagaaatgaaggaagccagaagacaatggaatgacatttccaaaggactgaaagaaaataaaacaagcccaaatctcccaaatatgaaggtgaataaagatttttttccaggggaaaaaaatctcccaaatatgaaggtgaataaaacgcattttccgacaaacaaaaactgggagaactggaacaccagcagacaccctccaccacacasacacacacacacacacacacacacacacacacacacccctaataggagttattcatgtagaaagaaa

SEQ ID NO: 831076 - DNA, 634 bp, Homo sapiens
actggcttcatttctcacttgaagggctatgacctattagagaagaatgtggaagccaagagtcaaagggagggaaaaacgcagctcatgctggaattctagackccctacaacccctgggtgatgtacgggttgctcttgaaggcagaaatctgctctcttccaatttctctggctttcatccttaaagcttgtccataatttcaggctggttgaaatggatgccatgttactgggatctacactgcaccacttaaaaaatattctcctttcacttggcctaaacaatgtgtatctcctttttacctcttcctgttgcagagataaaatgctcagcaaggagttaatggttttacagtgatgcagctggcagcagtagatcacagagctcagtacaggaatccaattatttcctttgtctaagatgaaaacctatacttcaggggtgggggaagggcctgtgctgtagggttgcttgatttaagattttgttctagaaagaaggatggttctctgatgcagctcagctcctgggtcacagaagcttgcctttctcctgcttgatgttagccacctgaacacacttgggatccaggaaataggaaaaaatagactcctttttctaggtttctga

SEQ ID NO: 831077 - DNA, 657 bp, Homo sapiens
ttgcttgtggaaatataaaatggtccagtcactttggaaaaaagttcctcaaaaagctaaccatggagttaccatatgatcctgtaattttactcctagttatatacctaagaaatgaaacatatttctacacaaaaacttgtattgaaatgttcatagcaacattattcataataaccaaaagtagaatcaacctaaatgcccaccaactaatgaatggataaataaaatgtgctgtatcaatataattgaatattattcaaaaataaaaatatatgaagtactgaaacatactaccacatgtatgaaccttaaaaatgcactaaatgaaagaatccagtcacaacccccccatgcatattgtattattttatatccagaacagatatattcatagagatagaaagctaattagtgtttttttagggtacagagtaggggtgactgctaatgggtatgggtttctttcaaggggaacaaaaatactataaagttagatcatggtgatggtagtgcaacactgcgaatatactaaaaaacactgratgtagactttgaattggtcaattatatataacataagaattatatctcaaaaaagctgttaaaagattaaacccaccctgatcctggaatggggtgaggatccctcattta

SEQ ID NO: 831078 - DNA, 657 bp, Homo sapiens
ttgcttgtggaaatataaaatggtccagtcactttggaaaaaagttcctcaaaaagctaaccatggagttaccatatgatcctgtaattttactcctagttatatacctaagaaatgaaacatatttctacacaaaaacttgtattgaaatgttcatagcaacattattcataataaccaaaagtagaatcaacctaaatgcccaccaactaatgaatggataaataaaatgtgctgtatcaatataattgaatattattcaaaaataaaaatatatgaagtactgaaacatactaccacatgtatgaaccttaaaaatgcactaaatgaaagaatccagtcacaacccccccatgcatattgtattattttatatccagaacagatatattcatagagatagaaagctaattagtgtttttttagggtacagagtaggggtgactgctaatgggtatgggtttctttcaaggggaacaaaaatactataaagttagatcatggtgatggtagtgcaacactgcgaatatactaaaaaacactggatgtagactttgaattggtcaattatatataacataagaattatatctcaaaaaagctgttaaaagattaaacccaycctgatcctggaatggggtgaggatccctcattta

SEQ ID NO: 831079 - DNA, 614 bp, Homo sapiens
tttctgcatgacaaataggtaaactagagggaaatttgcatacaaataatattgggccagatgacccaggaaagtgaatttcaaactgttccagggtgatgtttaagggtttctttgaatctcttcagagatcacctgaagggactggggaggtggagggttttttgtagaccctaatcacacaaaacatctgtttctgggattatctgagataatttgttcaaaaatagggtttccaagtattattatatttgagcaaaggatcatatggtgaaataatattgggaaaaacattcttttgaggataatggataacataaaatgctgttggtaatacatatcaatttctcaccagttgctaaatatgccaagcttatccatacctcagcgtctttgcatgagctgaaacatatttcctctcctcaccaatctctgccttacatattcctttgcaatctttaatatgcagaaaaaattctgccttctctgtaaaaccagcccagatgcatgtgtggaaatacatgtgcacatacagtagaatatatgccactttttaaaatcccctgtcatgttycttcatcagtgcatttaccacattatggtgtaatcagttt

SEQ ID NO: 831080 - DNA, 573 bp, Homo sapiens
actttgttgaagatcgaatggctgtaggggtgcagctttatttctgggttctccattctgttccattggtctatgtgtctgtttttgtaccaggacaacgctgttttgattactgttgttytgtagtatagtttgaagtcagataatgtgatgcctccagctctgttcattttccttaggattgttttggctattagggctcttttagggttccatatgaattttagaatagtttttattctagttctgtgaaaaatgatgttggcagtttaataggaacaatgttgaatctgtaaattgctttgagccttatggccatttaaatgatattgattcttctaattcatgagcatggaatgtttttccatttgactgtgtcatctatgactaattttagcagtgttttgcagttctccttgtagagatcctttacctccttggttagatgtattgctaggtattttattttatcttttgcatctatcgtaaattggttgcattattgatttagctttcagcttgaatgttattgatgtatagaagtgctactgattttcatgcattcattttgta

SEQ ID NO: 831081 - DNA, 622 bp, Homo sapiens
tcagtcatcacaaacatcaagatgtgaagtagatgctattagaattgttaaagaacaagcatcaagcatacgctactcaccccctactcccctgaaaggcaccaccttacttcacagaggtcttttgagtggctgagagtaagtgtaccgatctaaaggtcagcagacactaagttctggctttaccatttaataactgattagccacatgatcataaaaaaatctctctctcaaactcactttcttgaaccagaaaatgggagtaacgctctacctgcttcaatcttgttacataaattaaaaacttttgtcaacgtgggctgtgaactgaggtactgcataatgtcatatacacatatgtaaagtttaggccagaagcagtgactcacacctgtaatcccagcactttgggaggccaaggtgggagtccaggaattcaagaccagcctgggcaacatagagacctcaaatccacaaaaaaaaaaaaaaaaaaaaaaaaacacaaaaattaggccggtgcaacagtcccagctactagggaagctgaggcaggagggtcactkgaactcaggaggtcgagcctgcagtaagctataatggcgacactgcacttcagcctgg

SEQ ID NO: 831082 - DNA, 613 bp, Homo sapiens
ctggtctttgcccactcacatttttgtctgggcctcgcttcatttcatctgttaaatttgatctactcaataacaaactgaacagagaaccaacaggcaaacttaaataaaatataaagcagaggatgtaatataaagttaaatttcagtcatgaaaagttctttttattttggtatggagtattatacattataaagagagagagcaacacaaagcacaaataggagagtttaacacacctttttctcagtccttcatgatcaaatatataataagtacctctacagaatatttgaatgagataaggtttatcaagtatctaaaatacatttaaatgtacaccttataaacagacactgaactgataacaactagtaatatattatattacaaacaaacagaaaataagagtaaaaattacgtatctctggctatgaaataatattataaataccaactgtaaaaacaaaatagtaaaatcccactcattttgaaattataaaaacggcttaaaaacaaccttaggaccaaaaaggaagtcaagtctgaaattgcagaatattttgaaaataatgatagtaggarcattccaaatgaaaattcatgacttac

SEQ ID NO: 831083 - DNA, 441 bp, Homo sapiens
gggaatgggagttattgtttaatgggtatagagtttcagttttataagatgaaaagatttatggagttggatgatggtgatggttgcacaacattatatatgtatttaacaccattgaactgtacacttaaaaatggttaagacagtaaattttatgtgatgggtatttcaacacagtaaaagtctggaaaacaattttatatctatattccatatgttaaagaaggtagaagaaatattgaggatgttaagtaggaacatagaagatatacaatattcccaattgaaattctggtaaaaacacaatgtctgggatgaaaaatatactgaataggataaacagcagaatagacaatgcagaagaaaagattagtaaatgtaaatacatttaaaacaataaatagcaaraaaacctgccaaaatgttgaaacacagaaggaa

SEQ ID NO: 831084 - DNA, 630 bp, Homo sapiens
ccctgcctgtgttcccccagtgtcattgcctgcagtcaatctcctttctaaaataaatcccagaactagctatgtctttgtccttttctgacatctgaagactggcatgatctgaaagcaatctatgccctctcgcctcaaacactctctaaaagcaaatatctaaaaatatctaaaagcaaattcctgcatccctagaaatctaccatggcaaaacacgcacacgcgcgcgcgcacgcacacacacacacacacacacatataatgattgtaggaccaaaataaaaaatctaaggcatttttccttggtggtacccattgggttaatcaaatttcatctaaaataagtcatctcgacccccaggcagtcaccaggaagaaatttaagttcagtagtgattcagaatcagaggataaacacaaacatgtgtctttggcacacagagaaagcctggggacaggatgtggttgcaaaaggaatatttcccctttaagccactggttttgtgagacktttggtaagaaaagattaagaggtaattttcctctgagggcttacaggaaataatttatgaacgtaaatagctaccaatgttactgaaagttagaggatgcttaggtttgttagtt

SEQ ID NO: 831085 - DNA, 630 bp, Homo sapiens
ttctcctaatagaatgtcacagaagaattcaaccttcttcataatactgtaattagtatttcatatactataattttactcttgatgagataagcactttctgaagaaatttcaatatctatattgctagtgctagcaaaaaaaaagcaatttaaaatgacacattttaatacataatagctgccccaaccttttgatgtagcagcatgaatatcaaattctctgggtgagaatgaggtttgaggtgccttcaaggggttggtgcctttataaagaacacaacacgtatctgctgaatggagccaacctcagccccctgggtcctttagtgatcagactggtgagaaaattcccttcagctaatcttgtcataattcaagccgacttaaccacaggacatgttaggaacctagtgagattgcttgtagataagcaggaagaagggttataataattttgagtcacctaccatgtactaggcatcatgctttaccaacagtatktcattaatcctcatagtatagatgagaaaaatcaatgctcaaaagagtgaacttactactgaacatgtaagactaataggtattaacccacatctacctaattagaaagtccattctctgaacattg

SEQ ID NO: 831086 - DNA, 630 bp, Homo sapiens
ttctcctaatagaatgtcacagaagaattcaaccttcttcataatactgtaattagtatttcatatactataattttactcttgatgagataagcactttctgaagaaatttcaatatctatattgctagtgctagcaaaaaaaaagcaatttaaaatgacacattttaatacataatagctgccccaaccttttgatgtagcagcatgaatatcaaattctctgggtgagaatgaggtttgaggtgccttcaaggggttggtgcctttataaagaacacaacacgtatctgctgaatggagccaacctcagccccctgggtcctttagtgatcagactggtgagaaaattcccttcagctaatcttgtcataattcaagccgacttaaccacaggacatgttaggaacctagtgagattgcttgtagataagcaggaagaagggttataataattttgagtcacctaccatgtactaggcatcatgctttaccaacagtattycattaatcctcatagtatagatgagaaaaatcaatgctcaaaagagtgaacttactactgaacatgtaagactaataggtattaacccacatctacctaattagaaagtccattctctgaacattg

SEQ ID NO: 831087 - DNA, 635 bp, Homo sapiens
ttggcaaaggtcatggggctggtattttatgaggtttccagggtagactgtgagacctcaggccagtgttcctaacctagctctgaactgycttttatagacattgccagaaagcttaccaacaccaccaggtggcttatgctagagaagagggcaataataaggcagaaatcagattaacacatagagttggggaagccggagtagacccctttgagctaaatattcccaggtacatacctatccagcagagaagcccctgccagcagtgtggctttgtaagctgaaaaaagactaaatattgaataaaggttcctgaataaagatgtttacttcccttcatggctatcagtttgcccagctttagattttacttcttgcattctaagcaagaaaacacccttaaaaaagcaatttctttgtcatgtttttaaaacagataaaatctagttttcattttaccatcttatgaaatttatgttttctattaccactaaaagtagcatggggccagtcagacacattgttttagaatcataatctgaattttgaggattcgttctgaggttgagcctttatagttaagggtcaaacaagctgctggtaaagttaaaaaattatatttattagagaag

SEQ ID NO: 831088 - DNA, 547 bp, Homo sapiens
ctgccttccatttagaagatgtggatgttgaagccacagacaggaaaatcccgaaagtattytatagaaaaaaaaattctcatactgtgtttataaacctaaaaatgcaaacaagatggtactttaggaagaaagtttcagaccagtagttagcagagaaaggaactaagacccctgagataacaaaataaatgaataaatcagaaagggctaagtcccgtcttcacctaggaaattagacattattcttaaattagaaagactgtttttggggcatggagagtatgggcaggcattgcctcctctgcctcttgataaatgaacaaggagtgtgaagggctgtgtttgacttgctgaatgcctatttaagcctcttggtggaatgaaaacagagaacatgagacagggatgggaaaagtgtgtggctggttgaaataagcacatgtggttgaaagagacatattgctgtttggttctcccccaactggctgtgtgcctttgagcaagggacagcacttctttaaagtggtggatgatcaggatttct

SEQ ID NO: 831089 - DNA, 607 bp, Homo sapiens
agcttgactccagagtctatgcttttaatcaatacttaaaactgtcttgatgtagattctgatgggatattcagctatttctcctcagarttgtatatgtggtaatagtatctgaaaaacttggattcttttaaatgtaaggaaaatgattaataattaaacagcaaaattacattataggtaaaccatgtgtaggtttataaatagtaattaaggcatatataggagtacacaaaaaatgttttgcttattctctatttctgccacattaaaaatcttgtgtcatgcgagaatgaatgtcaggcctgaatgaggttgtcattagtaccatcctttctttgatttcaggcttgtgtagtggactggtctgaaaaagtgctttgcctccagggatttcctccacacttgttaaattgaatccctggcagtcaaaatgttctgtccttactgcagatgctgttattctgttgcctttactttagaatcttctgtttccatctctttgcattttcataataatatagacgagttgaggattctgaattttgtttaggcggaaaaccctaaacttttctttttatttatttatttatattttgcacaatgt

SEQ ID NO: 831090 - DNA, 658 bp, Homo sapiens
tagttaagtctcatactctcagcagttcactgtattctcagagccccgcaaccacctgccccagtgacaacattcactatgtctstcctctctgaatagattcagggagacctaacaaaggcctcctctgtttcacatgtttaacacagaatctcttgtttttcctgaagtcctttatattgaggtaccaatgaagtgtctgtgctgtgtgctcccgtcccaccgttcagagtgtgaattatatgttagttcacgcactgtacttctgctttgtgctttagaggcctgtctgggtgctgttccaagtgctggtgtggtataggtagcttgaaagtttcctgctgctgctaacaaaatgataagaatcaaggagagacagcagcagaatggagaataatgtgaatggtgatcaaggggcagccaaggccagcagcaccaggcagcatgttggcatcagttacactttagccggtgttcttgaggaaccactagtctctgcactgtgttgagttcatccttattacaatgaagtgcagtgccaaactaaaacctccacttaatttcttagcattaagtcaatttcaatgacttcactagactctcacttgctcctgcaaatctctaaaggagtattgaaattggtacctaaacatgtcac

SEQ ID NO: 831091 - DNA, 613 bp, Homo sapiens
ccatcatcaattaacaggatcaaattgacatttattactttattcaacaatagaagactacatattttcttaagctcaygtgaaacattcaccaagatagaatgcatcgtgggcaataaaacactttttaatttttttttaggcaggatctcactctcttactctgtcacccaggctggagtgcagtgggatgatcatggcacactgcagcctccaactcctaggctcaagcaatcatcccgcctcagcctcctgagtaggtgggactacaggtgagcgctaccacacccagctaattttcgttttttgtttttgtaaagacgggattttgacatgttgcccagactggtctcaaactcctgtgctcaagggatcctccatcttggcctcctaaagtgctgggattacaggtgtgagccaccgtgcacagccaaaaagaaagatctaaaatcaataatctaagcattcatcttaggaaactaaagagagcaattaaataaaaggaagcagaacagaagaaataaaaattattgcagaaatcatgaaattgacaacaggaaattaatagataaaattaacaaaagctgatctttgaaggattaataaaattgat

SEQ ID NO: 831092 - DNA, 573 bp, Homo sapiens
ttcagacccagagtttgtgacaggtgttcctcaaggatcaactctgatcagttggtaagcactgcctagagcatgtgattgaggtgaactcagaggccacgtctaggcacagtgctacagagtgctgggattcacaagtgatgtcagctgagaacatagtaagagaaaaaatttgcatccctgccaagcctctgccaatattgactgaaaacattataattcatttatagaatcaagacctgatagaaatgactgcgatatgcttgcccatcaaaaataccaaagttttagaatgcttggttctgaaggagctggttcattttccagagggtgatatttattatctaaaaggctgccttgtgtttgattttccttaccctgaatttacacactccattaccttctctaaaatccagtgcttcaggacataacacagtgtattccaacagtagatgttcaatgaacactgaactgaatcrtatcacatacagcaggttaagtttaaaaagatactttgcacatattcacatattcattcagcatgacttgattgaataattagatacagtctct

SEQ ID NO: 831093 - DNA, 634 bp, Homo sapiens
aaaaaaaaaaagatacaatgtaaattaactatggagaatggcagcygggtgaataattaagaccccagacactgaagccaggatcttcagttcaaatcctaactgttgcttagtagctggaaacgttaacagtttcttaacatctcttgccttagtttccacatttctaaaatggggttaataatggtgcctatttagcggtattattatgaggattaaataagttaatatttggaaagtgcttaaaaccatgcctcacatataataagtgctgaatatgcatcattaaagtgagcagtgtttttcttcttaaaaagcagggttctagccttacaatagttaaatttaatataatttcttccactaggtctatgctaacataataatcttatactaagtggatctgaattttaagaataaaaataatatgttatttttattaaataacttttttaatgagtagtaccttaagatttgtgaagatctgatatgtggaactttatttaagagcagtctaaatgctgtcttcttcagaatagtatgtatactgtgctatctttttgtaaaaaaggaggaatataaaggtacttgtgatttttttaaatgaatgagtaaaccgaaaataaatataaat

SEQ ID NO: 831094 - DNA, 420 bp, Homo sapiens
cacccagttcaaatctagctaaaagaccccatcacttttccttatcaaaggcaatatcccttaaggcctgaagctcgtaaaggattaaaggatactgttagacatttaaaagctcaagtcttagtaaraaaattcagcagtccctgcaacaccccaattctaggaatacaaaaacaaaatggtcggtggagactagtgcaagatcttagactcatcaatgaggcagtaattcctctatatccacctgtagccaacccctatacactgctctctcaaataccagagtcagcagaatggttcactgttctgatcctcaaggatgccttctgtattctcctgcactctgactcccagtttctctttgcctttgaggatcccacagaccacacgtcccaacttacatggacagtcttgcctcaa

SEQ ID NO: 831095 - DNA, 637 bp, Homo sapiens
cagtccatatgaaatgctgtatggatgaccttttctcacaaatgacctcttacttgatcaggaaatggccaacttggtcaaagacataacttctttggaaaaataccaacaaaacattaaaaacctacctgaaggacatcacagagaaaagggaacagagttgttccaactgggagatctagtgttggtcaagtcccttccctctaccttcccatctatgaattccttgtgggaaggaccatactcagtaatcctctctactcccactgcagttaaggtagcaggaggggaatcttggattcaccacacccgagttaaactttggacaccccctgaggaacctgcaggaccatcagatcaggagtcccaagatcagccagaccagcctcaatacacctgtgaaccattggaggacttgcgtctcctatttcagaaggaaacatcccaaactaaaaaggctccttcagctgatcctgaggaaaaaccccttcctacttaaaaaagwtaagtgaaaacctacataatctttaacacctctccttgcccctttaatggaatccttttactgtttcatcacattattaggcagtatactaaacatactctttgcagtaggattatatactgtagcttctgc

SEQ ID NO: 831096 - DNA, 637 bp, Homo sapiens
cagtccatatgaaatgctgtatggatgaccttttctcacaaatgacctcttacttgatcaggaaatggccaacttggtcaaagacataacttctttggaaaaataccaacaaaacattaaaaacctacctgaaggacatcacagagaaaagggaacagagttgttccaactgggagatctagtgttggtcaagtcccttccctctaccttcccatctatgaattccttgtgggaaggaccatactcagtaatcctctctactcccactgcagttaaggtagcaggaggggaatcttggattcaccacacccgagttaaactttggacaccccctgaggaacctgcaggaccatcagatcaggagtcccaagatcagccagaccagcctcaatacacctgtgaaccattggaggacttgcgtctcctatttcagaaggaaacatcccaaactaaaaaggctccttcagctgatcctgaggaaaaaccccttcctacttaaaaaagttaagtgaaaacctacataatctttaacacctctccttgcccctttaatggaatccttttactgtttcatyacattattaggcagtatactaaacatactctttgcagtaggattatatactgtagcttctgc

SEQ ID NO: 831097 - DNA, 633 bp, Homo sapiens
tgagaagatcacagttctctggaagtgagcttttgtgttttgctctaatcagcaggatccaactttactactgtcatggagggaattacagtaattctaccaacttttgaggcaaccttcttctgacactgtgtgaaacagactgaaaagactctaaagatggagagagctcaatgcttgagaaaaggaattctgtcctttgaaaggtctctagaacaaagggtatgcaatatgtttatcacttcaacttcagaaacataataggctctagaaacacattctcattgatctgtttctactgctcctgtttttttttttttctgcttcacccaatcgtcttcctatttttatctctttcattccactctggagccatgttgcttggtcaggccacccttcaaaataaatgattttttccctctttcatgttatacctgttttcttaattcttggctgttacttttctcagttaacctttggcaaatcataatgaaattaaatttagctggttgtagagagaaagagtcattgtagaagttgggatggtctggaagtgaattaaaaagtattttgatagccctcagaatgtggacaaaaatagyaaaaatccagctgggagtcagtgtatccatt

SEQ ID NO: 831098 - DNA, 603 bp, Homo sapiens
ttgaagcaataaaaggagccagggcattcctgcttcttaatggtctccagtcatccccaccctcgacccagccccacacagccccagcctcctccggcttgggtcagaaaatagcatggaccaactttgggatgcttctggctttctggtcatttacaaagtgcgttggcatcttttcccttgtctgagccttgtgtaaagtcaggtaaaaaacaggagatttgccagggcagggagtatgattcccatgatacacggaagggaactgaggttctgggagaaaagtgagttggtggagccacactgcgggaagagaagtgaggactggattctaggcctggggagacgctttcctttcatctcttccctccctccaagtagaggcttgtgaagagctcaccagaatatctcattctgggttctgtgttcctagggaatgatggtggtcaaagaagccaggtaacccacagatcccggtacccacagatcccggaaacagcccctccaaaccacggagcggagtgaaggaggcagtgtccagatsgcagagggctttcatgcccactttctcccaacggccaaacaaatgaccctggcaaggca

SEQ ID NO: 831099 - DNA, 592 bp, Homo sapiens
ttggcaaacttcggagtcggtgaggtgtcactactttttaatgaaactgtttgacctaggggtgtatcgaatggaacaccaactcctgggcttttctctctgtcctttagatcttygaaagactacccaaggcccactcatatgtccagcctgtgctgagacctagagacacaatgattaagcagacatgggacacagacacacaaacaaatggaggcacaggtcagtggggtgtgaataagggaatatccagatccacctgtgggggaggtcaagtctttataagagacttatagaggtcaagatttaaaactaggtcttcttcaaaccccaccattttgcacccactgttccatgagcacctactatatgcaggaaactatgccaggggtttcaggagaaactggtgagtcagacaaggtccagctctcagaatgatgcgcaggagccaggcatgtccacaggaattcaagagaaggaacaccaagagacaagagtgtcacatccagggtgggctaaacatagcattaaagaacctacttggtccaattctacttctggttatatggtgtgtaacaatgacattcatgca

SEQ ID NO: 831100 - DNA, 655 bp, Homo sapiens
gaccctcaaccagatggagatgggcaatgcgggaaaaaccggatcctcgagtggaatccgtgttggaattcctgctatgtccttcattaactgtgtaaccttgggaaaaccatgtcacctctctgagctgcagtcctttgcgctataaaaatctcctaggtgtgttgggagtcagcgtgagcgggaactcccggcacacagtaggctgtgagtgcagactgctccatcactacctcccagcgcggaaggtggccgacctctccgcctggtagatcccatgtttcttgccagagaaggaaattggtccgtaaaggaacagacccaggaaacccctgcccactccgccctcggttgataaaccagggaacacagttcgaaggactgggatggacgagaagcagtgccggaagcgcagccgcgatttccggccggacccggctgactgtggctctgggtgttctccccacaccagcgtgccgctccgatctagcaaacaattatcgagcaccttctgtgtgcacaccctgttcagagagggaatgcggaaacaaaaggggggcaaagaatgggctagacggacagaaacaaaaatgsggagattcggaggcccagaagtggaaggaagcccctagccaaggccagcagccagaggcgg

SEQ ID NO: 831101 - DNA, 623 bp, Homo sapiens
tgaatgactacagcgtgaaaatggcaaagcagacatttttcccaagctccgtcctcaaggcacagaggaattttaaatggctctgggttggggtacttgrcataatttgcagcactaaatccaaaacagatttgagcagccacagccacagagccacagtgctgggtcccaggtctggaatgtcattggaacaggagttgcccagcttgtgctggaagaatgaggagcactggtgggagaatggagtggaggctacacagcgttctgggcaccagatgcaaggtggccgagtcgcagcgctgcagtcatgggcaaatcacttggcttttctggacctcacttttctcatctctgaaatgggagaggggtttcagttgatgatgccaacgaattacaatggctcaaggaagtggtgttgagaggattcccaccttggccctcagcagccctatgggacactggggagtagtgtttaaggcacttggcaccagactggatgagactgagtcctgcctctaccacttatgggctgtgtggctttgggaaagtaactttacctctctgtgcctcaatttcttcctctgcagaatggggatgatcgtaacccccaccgtataggttag

SEQ ID NO: 831102 - DNA, 450 bp, Homo sapiens
ctcgcattccctcccaccccctgccggaactgagatggggcccacggcgggctgcgcagggcagagctggaggggagaagggccagccttcctccgccggggtgggcagagccagaatggaagacgtttggtcgaccctggagcctcggggtctgcctgacatctccgggcttaaataaccgtgcgcctttgttattcgtcggcagcaaagtggttcgttacgcctgattggtctaattgctttgaaatgggatatattatctataattatagagctctaggagagccggccggcctctcctttcatcttcccaagtgcaccctcacgtcgcgatcacattaatttgggccatttgaaagcgaggggggaggctggggctctcttctcctgctgatcctggycctgctcacccccttccaaatttaaagacacaaggaagcccgggcctg

SEQ ID NO: 831103 - DNA, 450 bp, Homo sapiens
ctcgcattccctcccaccccctgccggaactgagatggggcccacggcgggctgcgcagggcagagctggaggggagaagggccagccttcctccgccggggtgggcagagccagaatggaagacgtttggtcgaccctggagcctcggggtctgcctgacatctccgggcttaaataaccgtgcgcctttgttattcgtcggcagcaaagtggttcgttacgcctgattggtctaattgctttgaaatgggatatattatctataattatagagctctaggagagccggccggcctctcctttcatcttcccaagtgcaccctcacgtcgcgatcacattaatttgggccatttgaaagcgaggggggaggctggggctctcttctcctgctgatcctggtcctgctcacccscttccaaatttaaagacacaaggaagcccgggcctg

SEQ ID NO: 831104 - DNA, 611 bp, Homo sapiens
acggtaatctttctgttgaatacattctaatagcattattttatattaacattataagtgcarttttttacttataatttaaaaggtttttttgttttgtttttttgtgaaacagagtctcgctctgttgcccaggctggagtgcagtggtgcgatcttggctcactgcaacctccacatcccaggttcaagcgattctcctgcgtcagcctccccagtagctgggactacaggcacgtgccaccattcccagctaattttttgtatttttagcagagacggagtttcactgtgttagccaggatggtctcaatctcctgacctcatgatccgcccacctcagcctcccaaagtgctgggattacaggcgtgagccaccgtgccccgcctattttagatagatcttttaaaaacttgagaccgaatatacttgcaaagcaaactgtttatataaaaggaatattgaagattaatcatataaattataaataatttagtagaagatattttatccttttaatataactttacaatttttaattttttttttctccttaaccctagcccaccaagaaaacacattgtggagcgctatacagagttttatcatg

SEQ ID NO: 831105 - DNA, 616 bp, Homo sapiens
gactgcttgagcctaggagtttaagaccagcctggacaacgtggtgaaataccatctctacaaaaaatgcaaaacttagccagacacagtggcacatgcctatagtcccagctactggggaggctgaggtgggaggatggcttgagcctggaaggtcaaggcagcggtgagccatgattgcacaactgcactctagtctgggtgacagagcgagaccctgtctcaaaaaaaaaaaaaaaaaaaaaaaaagacatagccaatactaactagtaaattatctatatcctagacaggccagacttcaagaagtttaccatgcccataagtacagtagactcaaagtgcctagattttccctctcctaggtatctgtctacccaagagaaatgaaaacgtacatccacacaaaagcttgtacacaaatattcatagcagccttattcataataggtaaaaagtggacagaaatgtccatcaactgataaataaacaaaacatggagtatccrttcaatggtatattatctaactataaaaactgaactacagatatatgctatataacatggatgaactttgaaaatattatgctaagtgggggccgggcacggtggctc

SEQ ID NO: 831106 - DNA, 616 bp, Homo sapiens
gactgcttgagcctaggagtttaagaccagcctggacaacgtggtgaaataccatctctacaaaaaatgcaaaacttagccagacacagtggcacatgcctatagtcccagctactggggaggctgaggtgggaggatggcttgagcctggaaggtcaaggcagcggtgagccatgattgcacaactgcactctagtctgggtgacagagcgagaccctgtctcaaaaaaaaaaaaaaaaaaaaaaaaagacatagccaatactaactagtaaattatctatatcctagacaggccagacttcaagaagtttaccatgcccataagtacagtagactcaaagtgcctagattttccctctcctaggtatctgtctacccaagagaaatgaaaacgtacatccacacaaaagcttgtacacaaatattcatagcagccttattcataataggtaaaaagtggacagaaatgtccatcaactgataaataaacaaaacatggagtatccgtwcaatggtatattatctaactataaaaactgaactacagatatatgctatataacatggatgaactttgaaaatattatgctaagtgggggccgggcacggtggctc

SEQ ID NO: 831107 - DNA, 466 bp, Homo sapiens
tttgtaccttcaaatatatacaggtgcttctgatgtgatttaatatgcagtttcctttgctaatggactgcctcacagcagcatcttgacattccattttctaaaaaaaagaaccctaaacrtaaaactgctattgaatgaacatctgaaatatatatatatacaaagacatatatatctcctctctacaattgagctctcatttgtgaaaaagttgggaaccatttttctccctcattttatctgacttcaaacattgtgatatctaggctctaaaagagactcatgactgtgatttcttctattatttcttcctctctctttccaaaggcacataaagcatctttcacttgctctaaatttcttttggtgccgttctggctacttctcacccttctctccaaacaccactgcccaggaacatcaggaagacaaacggtaagtttggaggagaataattacaggc

SEQ ID NO: 831108 - DNA, 567 bp, Homo sapiens
tttgcctacttctcaccacctagtctacagccctcattctgctctaaaccgtcattgtgctacccagaccattgtttcccagacttctttgactgcacttcatagcaagaaatttatttcagctgggcatggtggcgtgcacctgtgctcccagctacttgggagggtgaggcagagggttgcttgagctcaggagtttgagatcagcctgggcaacatagtgaaatgctgtctcattgtgtctcaaaaaaaatacacacatatatgtgtatataaaactgcaacctaggagacatattcatatatataagcaaaaggttcacaaagcagtacttacctttactgtttgcagtatagtctgatatttcattctcttatttcgtgaaaaaacaaatggtggttgaggcccatttcatgacccagtttcagtcgtgatctgcagcttgaaaaacactggtttggatccttgctatttaaggtgatctgtggagccagcarcattgacattaactgggagctttttagaaatgcaaatctcaacccctctcctggccccctgaatcataa

SEQ ID NO: 831109 - DNA, 611 bp, Homo sapiens
ctctatctacacctgctatttttgtcaagtttccattcttttagttttaaatgtsatctatatgcagacaactccatgcacacatcttgaacctcttctctctctacctccactatttttgtagttttccattctcctagttttaaatgccatctatgtacagacaactcctacactatatctccaactagaatagtcttccaaactccagactccatatatccactttacaagtctagtagagacttcattcttaacatatccaacactgaactctcagtccacctcccattctattgctcctgcagttttttccacctcagtggatggtaactccattcttcaagttgcttagaccaacagcctgaaagtcatgcttgacttctcttttgcctaaacatcaagaagtcctgtatccagaagtcctgtatccagactatgaccatttctcttcactgtttcaagtcaccaccatcttctgtcttggttattgaaattgccttctaattgacctgacctctctttctctctccctactcccgtactgcttgttctcaacaatgcaaccaaaatgattagttagaatgtctgttatttcatgtcttctgtca

SEQ ID NO: 831110 - DNA, 495 bp, Homo sapiens
gaggccttccaagccatgaggaacaataagtcaattaaaccttttctttataaattacccagtctttggtatttccttataacaatgtgagaacgaactaatacagtaaattggtaccaaggtagtggggtattgctataagatacctgagaatgtggaagcaactttggaaccaggtaatgggcagaggttggaacagtttggtagggcttagaagaacacaagaaaatgtgggaaagtttggaattatctagggacttattgaatggcttggaccaaaatgttgatcatgatatagataataaagttcaggctgaggtggtctcagatggagatgaggaactttttgggaactggagtaaaggtgactcttgctatgctttagcaaagatactggaagcattttgcccctgccctagagatctgcggaactttgaacatragagagataatttggggtatctggcagaagaaatttctaagcatcaaagtatt

SEQ ID NO: 831111 - DNA, 622 bp, Homo sapiens
gccacccagactatacggttttttgttatgaaagcccaaactgaccatgacagtaccttttcactggatgattctgaaattatcagtacatgtcagtcttttctcaggggtaatttagattctccagagaagaatccttcaatctgctatccagtctgttgccaaaattctggaagtagagcaggagaagggagtccagaaactacaattcagtgtgacaattttctccatattaggcctccatgccttgtccttttgccagtcctagtgtctcaaagtcaagagtctctaatcaaatttctccagagaataagactccttgggcaggttggaagcacatggggatagggtcttctggctgggccatgtaaggcaggggattggtgagctcaatcattctataaaactttcaacaagcattcctgttttcatccaggcttctcacctctgccttctgtagtacctggagtacctggagaatccaagtgcagaacatctaarggttcctacatggcaaactgcctcgttcctcattaaatttctcattcctgttacttcttccaagtacacaggtgtcaaatccatttctacttctccatatactttccatattccaaaaatg

SEQ ID NO: 831112 - DNA, 553 bp, Homo sapiens
ttcctaaacttacattgaagatatttgcagtatcatttataagttaaatataggcattataaataatcacatctttataaaagttatttttcttattaaatgaaaatcaatamaatatcttagaaatgaaaaacttttagataattaaactaataagcttatgtgaaggataaataatggacacctatgagacttagagcaggcctggatttcattcttggattctgattccagctccatcactatcacattttagttcttataggcaattcattaagacattcaaaactgttcacattggtaaatgagggagtttgatttgattctttggctctttttaacaataaaagtctgtgattgcaaaataaatttccatggtactcttacatacttcatgtcagtttaaactcaagtgtcttttctgaggtccagtgtgccagatatggcttgtcttttgcaaccatcatgccggggtttttgaattaaagatacgaccaggattctatgtcctcagaaattggaataaatattcttgttctctttgcatattaaa

SEQ ID NO: 831113 - DNA, 340 bp, Homo sapiens
aacatgagtttttagtatttaggcaggacgaatttaataagcaactcacttatgcatggttttaggtattggtgacacaaagacacatattagaaagtgtgcatcctacactgtcagttgttgtttacatacacagacttgtctcccttgctggcgttctttcatgggtgtccaacctgtcaccttataagatagggaaggcaaacattgcccttggtccayagataaaacatgcttaacataaggttaagccaatcactgatgttccatttgatttattggtaatggcaggagtatttggcctagttgcatctaatgaaacatgaggggaattcagcat

SEQ ID NO: 831114 - DNA, 630 bp, Homo sapiens
ctgctttgccaaaatgtaggctgactgctactttaagcrggtccctcatcccactcctcctcactcagcaggaccactcaactggggcctccaacgtccctggtgttctcctgctgacagagatttgcaacatccctgagatgaagctcccagaggaaggagtatgccaccatatttgttgtttgggtgacttagtgattccaacctttgggctttggagcgtctgaggcaacagggggctgaaatggacccccagaacagcagagctgccctatcaaaatgtggccagactgctttttaagcgggtctctgatcccgtttttcctcactgggcaggacctcccaactgaagtctgcagacacttcctataggcgcctttaggccagcaacaggctcttacttccctggggcaaagcttccagagggaggaatgggctgtcatctttgctgttttgcaggcttcactggtgatacctccaagtgctggaaaatctgaggcaactagggactacagcaaaccccaaacatactgcaacagccctacaggaaagtggccagactgttatagggctgccctttctcaaaactcctcaccagtcaggtcctccaggccggggtctccagccacc

SEQ ID NO: 831115 - DNA, 396 bp, Homo sapiens
ctgctcactgatatgaaacacttttcaataattaatgcagtccaacaatagttgaaagccatacatacactcccctatctaggcagagcctgaaaaggcactkcataaatatgctccagaggatattcgaagaccaggtaaagaattgggctaaaagaagtatgcagttccttttaattttaaaattctatcaaactcagaaaaaaaatttgaggggggatgtagaagtttaattgagatatactctctcactcattgaaaatatgcatttttgcaacctttcagaaaatctatttgacaccatataagaggaatcttaaaacatgtaatcctgttgattcaataatgccaatgattccatgtatagcaacatattttaaacaaataatcacagat

SEQ ID NO: 831116 - DNA, 540 bp, Homo sapiens
tttgctttttacttatatcactaatatgcatacatttatgtataaattatgcatatatgtttaaacaataatatmtcagaataagtttgtcatatgaatgaaatagtgactgtcctcctatttagttatttatgatcaaatttgtccatttctctccagatgatataagcttaagccctctagaaagataaagataaaattcttgtctgattatttgattgattgaactttagcttagagctggagccttgggatctctgggcatccagttgcctatgtactgataagaaaaggtcatagaagatttagtaggacattttttttagtagctagtgtcacaccttcacacactgccataccccaaagaagcgaagcctgcgtcagtctcacagcacacactgcaaaaagtgacactctattgctgggcaggcaatgggaagaatcttcgtttacatttgtcgtcctggggagttcttcctccccagcaaagctgacttctgctccaggatggagaatgcaaagtgtggacatgaatggcct

SEQ ID NO: 831117 - DNA, 607 bp, Homo sapiens
tctcactgttgcccaagctggaatgcagtgccrctatctcaggtcactgcagcctctgcctcccaggttcaagtgattctcctgcctcaacctcccgagtagctgggcttacaggcgtgcaccaccacacccagctaaatttttttgtattttagtagaaatggggatttgccacattggccaggctggtcttgaactgctggcctcaagcaatacatctgcctcggcctctctaagtgctgggattacagatgtgagccaccgcacccaggcttttcatttcctttttatttatgtttcactccatcttcatttggtctctttgcagaggtggaagtccccaatgttttttatatgatttctcatgctctcacaagccaacagcattacatgcattaacatatgtgtattcagttactcacatgtgcctatacacagtacgccaatctcatagagtaactacctcatgctcactcatctacacacattatcttatctatcaagcctcctgggctgaggtctaggctaggggctgtgaggcccaggggtctccaaacttgggtaagcatacttactaaagaaaaacaattcagatgtccagaacctg

SEQ ID NO: 831118 - DNA, 641 bp, Homo sapiens
cctgtgcaaatatctgcagctgagcagctgtctctaccaacggtaaagatacgaaactcccagaagtagaaaagccatgttcagggaarctctttctacccgacaccttgagtcccaccaagtttcccagccttggagttcagacctgagagagagctcagggaggtcatttgctccagcccctgcttccaaccagccacaaggtcatctccattttatggaaggaataactgaagcccagagaagttaagggacatgaagccccccagcaggcagtggcaggtagaatgcggcttctaagaacagcagctccctcacacagtctgcgtgccagactggcctgctctggccacgggtggccgtggggagctggggtgcctgggccacctctaacagccatcagcagctcctcaggagagcaggcatctccccctttgtcaaggctccttcccccaatcctaggactccagtgtcccagggtcctgtagatgggataggaggggagagggcgcacatgccctgggaatcctggagtcttccagcaggatgacttcctcttgtgtgctctcatcttcagccatcctggccagtggctggcagcccccaaagacatgggggctcactacctcctgctgctcaag

SEQ ID NO: 831119 - DNA, 630 bp, Homo sapiens
actaagaattttgcatatagctggcttgttcattttgcaatggttggggattgatttctcagggggaatcattgtttttttctctcctagtttataagacgtatctatattttaaatggctttatttatttatttatttatttactatatttttcgagatggagtctggctctgctgcccagactggagtgcagtggcacgattttggcttactgcaacctctgcttcccagtttcaagtgattctcctgcctcagcctaccgagtagctgggaccacaagcacacgccactgctccaagctaatttttgtatttttagtagagatggggtttcaccatgttgactaggctggtctcgaactcctgacctcaaatgatccacccaccgtggccttccaaagtgctgggattacaggcatgaaccactgcacctgactaaatggctttattttgaattgccggtgaaattaagaataatttaagaatatcttgtctcaatattagtatccaaaatgttctagratgtccagggattgaaaattcttaaaaattgagctttaagtacttggaagaagaaaataaaattattatatttatatatgaactggtaatttacttagaaaatccaaa

SEQ ID NO: 831120 - DNA, 570 bp, Homo sapiens
acataaagccccttaagtactcaaaatcaaaaatctttattgttttttcttttgctgagcatttttcctcccaagccctccccaccttttgtggaaatttagccacttcagaggccttgttcctcataatttggaactttcctttagatttgatcaagttggatagtttcccaatgaagaaagaaagaccaaaacaacaaaaacagaaacaaacaacggcaaaaaaaaaaaaagttaagcaaaaacacaaagtatctcaaaatttatatgattactgagcactctaatggtaaggagaaattaagaccagcttgttgttaatcttaactttagacaagacaaaacccctattgagctacttacctagtgatgggtctcaggctgaagactgctgtctgttaccctagaagcaggaaaaaactcagattcatcttccgtgctgggagcaaggtcaaactccataaaggaattacctgccttccattgwcatggaagcaggaaaacttgccttccttgttgaaagcaggtaaattttcagaaaaggagttgtgcagcaaaataaagtttaga

SEQ ID NO: 831121 - DNA, 570 bp, Homo sapiens
acataaagccccttaagtactcaaaatcaaaaatctttattgttttttcttttgctgagcatttttcctcccaagccctccccaccttttgtggaaatttagccacttcagaggccttgttcctcataatttggaactttcctttagatttgatcaagttggatagtttcccaatgaagaaagaaagaccaaaacaacaaaaacagaaacaaacaacggcaaaaaaaaaaaaagttaagcaaaaacacaaagtatctcaaaatttatatgattactgagcactctaatggtaaggagaaattaagaccagcttgttgttaatcttaactttagacaagacaaaacccctattgagctacttacctagtgatgggtctcaggctgaagactgctgtctgttaccctagaagcaggaaaaaactcagattcatcttccgtgctgggagcaaggtcaaactccataaaggaattacctgccttccattgasatggaagcaggaaaacttgccttccttgttgaaagcaggtaaattttcagaaaaggagttgtgcagcaaaataaagtttaga

SEQ ID NO: 831122 - DNA, 570 bp, Homo sapiens
acataaagccccttaagtactcaaaatcaaaaatctttattgttttttcttttgctgagcatttttcctcccaagccctccccaccttttgtggaaatttagccacttcagaggccttgttcctcataatttggaactttcctttagatttgatcaagttggatagtttcccaatgaagaaagaaagaccaaaacaacaaaaacagaaacaaacaacggcaaaaaaaaaaaaagttaagcaaaaacacaaagtatctcaaaatttatatgattactgagcactctaatggtaaggagaaattaagaccagcttgttgttaatcttaactttagacaagacaaaacccctattgagctacttacctagtgatgggtctcaggctgaagactgctgtctgttaccctagaagcaggaaaaaactcagattcatcttccgtgctgggagcaaggtcaaactccataaaggaattacctgccttccattgacatggaagcaggaraacttgccttccttgttgaaagcaggtaaattttcagaaaaggagttgtgcagcaaaataaagtttaga

SEQ ID NO: 831123 - DNA, 539 bp, Homo sapiens
attttttcctggtaaaggatcttgccttgatgtggatggctactgtaagagtgatagttgctgaaggttggaacggatgtggcartttcttaaaacaagacagcaatgaagtttgcttcatcgattgactcttcctttcactaaagattttcatttagcatgtgatgctgattgatagcgtgttacccactgttgaactactttcaaatttggagtcaaaaatctcaaaccttgtcactgctttatcgattaagtttatgaaatattctaagtcctcgatggtcatttcaacaatgtttaaccttcaccaaaagtagatttcatcatttcatctaaagaaaccactttctttgctcttccacaaaaagcaactcttcatccatcaaagttttattgtagcaattcagtcacatcttcagactctacttctaattctagtttttgtttttgttttccaccacatctgcagttacttcctaccctgaaatcttgaactcttcaaagtcattcatgagggctggaatcaacttcttcaaaac

SEQ ID NO: 831124 - DNA, 553 bp, Homo sapiens
tacattcacactcattctcaatcctaggtcactctctgttcctacgcagaggacaaagaacactgcaagagtaagtcactgaagatgctgacaaattmttgtgatctaattgcaggcacctgggttcttcacagcagcccagggctaagttctctgtctttgctttcagatcctgtttcttcctgtcttctccaagactgtgtcctctcgattacccctgctcttcatcccatcttcaattgtaccttttcctgtatcttctccctttacatctccacccccactctctttgtttggcttaagtgacactatgttatcctggttgaactacagctgcagtctcctcttcctcatcaactcttccttctctaagggctggccttctgaaatttctctgttacagtcttttagggatctcatttattcaaaataatttgtacattggtaattttcagatttctctcactggccctgattgttctcctgagtcccacagctgtctctagtggcctgctatgactttcaaactaaagcatttaaaaactattcatct

SEQ ID NO: 831125 - DNA, 635 bp, Homo sapiens
ccagggatccataaaattttttaaacaaaacaatgaagaaaatcaatgaactgaaagctggttctttgaaagattaaataaatttgtaagcctgtagacagactgaccaasaaaaaaaaaaacagaacatacgcattaccaatatcaagaatgagtccccatatacattaaaaggataataatactacaaacgaccgtcggcccataaatttaacaacttatgtcaaatggaccagtgtcttgaaagacagaataacaaaactcactcaaaaagagatagaaaatctaaatattactgtatatattaaagaaattaaaaatatttctataaaatccaggtccagataatttcattggcaatttctaccaaacatttatggaacaaacaatattaattctacactatctcttctagaaaatgcaggagggaaaaacacttcccaactcattttatgaggtcaacatcacactaatatcaaaaccagaaaaagacattatattttaaaaactgcaaccactatctttatgaatatagatgtataaatcctcaacaaaacatgagtaaattgaatccagcaacatataaaagtacaattcatcatgagcaaactggaggttatctagaaatgcaaagc

SEQ ID NO: 831126 - DNA, 628 bp, Homo sapiens
gaaaaggggaccaaacttgcccttttataagaaaccaactcccacaataatggcattaatccatttatgactgtggagccctcaggatctaaataccccttaaaggtctcacstcttaatactgttaaaatggaaattgaatttcaacatgagttctggagcagtctctgactctaattcccccagcatgtgcttgactcgcagctgccattcactaaaagaataacagaaagttagctgggcatggtgacatgcacctgtgattccagccacttgggaggctgaggtgggaggatcgcttgagcctgggaggcagaggttgcagtgagccaagatcgcaccactgcactccaacctgagtcagacagtggaccccatcttgaaaaaaaaaagaataacagaaagaacgaactgaccagtagatgaaccactggtcatagagccttagagcctaatggtgttgatggaagaaaagctcagatttacacacacattcataagagcacacatccttccctcacagctctcagaaggaaacaatcctgttgacatcttgatttcagacttccagcctccagaaccgtgacagaatagattcctgttaagtcgtcctgtttggggtactttg

SEQ ID NO: 831127 - DNA, 605 bp, Homo sapiens
ttattctttttgcttaaaattgtgttggctattcagactcttgtttggttccacayggattttaaaatactttctttctaattctgtgaaaaaatgtcattggcagtttgatatggatagcattgaatctgtaaattgctttgggtagtatggccattttaacaatattgattcttcctatccatgggcatggaatatctttccatttgtttgtgtcacctctgatttctttgagcagtgctttgtaattttcattgcagagatctttcaccttcctggttagctgtattcctaggtattttattctttttgtggctattgtgaatggaattgtacgcttgatttggctctcagcttggatgctattggtgtatagtagtgcaaccaatttttgttctttgactttatatcctgacgctttgctgaatttgtttatcagatctaggagcttttgggcaaagattatggggttgtctaggtatagaattatatcatctgcaaacacagatagtttgactttctctcttcctgtctggaggctgtaaatccatctggtcctgggctgcttctgtctggcaggctttttattaccgattcagttccag

SEQ ID NO: 831128 - DNA, 442 bp, Homo sapiens
accaggagaggggagatctgccatctctttgctttctttattctctagacaatttttttatttcttttaaaaacaaatacatgctttttggaaaaaagtaatcaggctgaactcagtggctcatgcctgtaatcccagcattttgggaggctgaggtaggaatgtcacttgaggccaggagttcaagatcagcctgggcaacagagcaagaccttgtctctgcagaaaaaaaatctttttattacctgggcagaggatcacttgagcccaggagactgaagctgcagtgagctatgttcatgcctttgcactccagcctgggcagaaagagtgatatattatctttaaaaattaaaaaattattattatttttgagacagagtctcactctggttgcscaggctagggtgcagtgccttaattgcagctcaatgcagctcag

SEQ ID NO: 831129 - DNA, 562 bp, Homo sapiens
caggttgcaaattttcctctcttttatgctctgcttcctcttgaatgctttgccacttagaattktttttccaacagataccctaaatcatctctctcaagttcaaagtcccacagatctctagggcaggggcaaaatgccaccagtctctttgctaaaacatgccaagaatgacccttactccagttctcagcaagttcctcatctccatctgagaccacctcagcctgcacttcactctccagatcactaccagcattttggtcaaagccattcaacaagtctcttggaagttccaaacattcccacatcttcctgtcttctgagccctccaagtctctagagttccaaactttcacacattttcctgttttcttccaagttcttcaaagtcttccaacttctgcctgttactcagttctgaagtcacttccacatttttgggtatccttatagcagtgccctgctcctggtaccaatttactgtattgatccgttcacacactgctatgaagaagtacccaagactggataatttataatggaaagaggtttaattgat

SEQ ID NO: 831130 - DNA, 505 bp, Homo sapiens
gggctatttttattttttttttwaaaaaaagaatgctcaaaaagtattttcctatttaaaaaaatcactgtcctctatccccttaagtactagatgagcccctgctttaaccaccaggtttgctgagctgaggaggataagaggaaagaatcctcatgtctcaatgcaacacaaaaacactaaactcaaagtgtgaataaaacctggtaggcagaaaggctcaacaaggacttagtcagtggccggattctgtgctggattctgagatggctgctgagatgtttgaaacttgatcactggcttcataacaataataattctaagaatagcccccacgtttggggcattgactatgtctgaatcgttgcaccagatgccttgaatattgacagcaaccttatggggaagctgtgattatagagtcaggtccaaaagtttaaaaaattgaaatatctggatcccttcatggacccgctgaattgggatttctagagatgagaccctg

SEQ ID NO: 831131 - DNA, 635 bp, Homo sapiens
tgcacgtgaagaaaggaatagcaagatggctaaacaaattctattgttggctgcagtcagggcaccctaagggcttatcagatctctacacaaagactttgctgaggagtaggagggatccggaaaacaatgctttattcgctgctttagtaaaaacagaaagtgtcagaatttttaagtgtgagacacaatgaaagtaaatcaagcaggtgtaaaactggataacaagtccccagtgtgaaacgggtcccattttctaacactgagtaaactagggagttatgaaagtgcaccagctgatcatggctgagtttcctaaactaatttttctcttggcttccagtgacgacccacattatttcatgacatcctattgcttctgcagaaaatgcctctacacctgtttggaaaacgaagcccagagttacaaaatatttctaatgatttacttccacattaaaaaataaatcaaaatatttaagaggtaacctcaaagggacaaaaactaacacaggtgtgaaatttgacatctataagaggcaatattcatactccagggaggtatacgcacactttgytcaacagagtggtgccccccacacacacactcacacacacacacactctctctctct

SEQ ID NO: 831132 - DNA, 578 bp, Homo sapiens
cagacattctttcttaaatagtacctctccactcatacccatacacaccataccacttcccagctttatttttctctattaaaaaatatcaacctctaccatactaaatatcttattaattttatttaccctataccagagtgtaagttccatgatggcaagggttttcttggtctgttttgtttactactttatctttaagttctacactagggtctaagattgaataggtggtcagtaagtactcattgaattaatgaaacaacatttggcatgagagattatccagggaaaattctaaatacttaatggattatatatttgtcaccctttaaatttttgtatttcttaaattttgaaaaatgactttttttcttctctagggaaaatccaattgttgggaaagcatcttagagtttaacagattggttcagaagaactggaaaatattatttttcttggagcttttcaattcatcatrtattttgttcatggtatttaagaatgagcatccgcttcaatgtcatctgcctccacattgtatttaatatttaataattgaaattaattgtttggga

SEQ ID NO: 831133 - DNA, 572 bp, Homo sapiens
taaggtcagctgagagaaaggaagaatagacccaaagtcaggcgagtamgtttattgaacctgccggctgctccatcacactcagaggaagcagccctgagcttacaaagtgaggagtttatattgaggaggggtgtttgaaggagttctttggtatggccacattccggggttgtttgctgtttaattttgtcacatatcactttgtgacgtttatggtagcaactagatgaacagcaggaatttacaggtgtaggtaaagtttgtttatgcttcccacgacctcccccgtgcggtccgggtggtttgtaattggggtttgcttatcgcagcaagccctgataggtgaagtctgctggcttcaccctggcgcctggtgcctagataagggcttagaaatgtaaaggggctcagggggaagggtggacggcacagacaagagttgcagagcattaggtggaggggtgggcagcatggagaggtttgggggaagtgtcagcagtaccaagaagctgttggggaagtttgtccttaacagtcataaaacctaggagggattttctgaccttcca

SEQ ID NO: 831134 - DNA, 637 bp, Homo sapiens
aagagtggtttgcaatgagcttttcaaggagccaaaaaactacctagtaacttacattcctcttcaaaaggaacggagagagaaggggcaaaatatacctttatgattagaagcaggtcagtcacattccaaaacatgacagggaaaggctcagagaaattaactttttcatcctcaagaaggaagatttagggaaaagctcaaaatatttctccatattgatgcttgcggaccatcagtccaagtatttctactcttccataaaatagcacattttctttcactcactatgaaacagattatccacccaacctcttccttgaggactacatggattcattatctcaccacatgccaaccctggagcttcctctgacagtgggtcaacttggactgacacttggaagccacaaactaacacaccagtggccacacagctatgaaatccagctaatctatctgcctcctgcctgccttctgggctgtcagctgcttactcaatgaagacacctgtcacccacctcatcttagccatgccygtcacctcatttggcctccctggcatgcaggcagtgctccagcatggccttattccttccatgatgtctgcgtctccatcacctccagactcggctga

SEQ ID NO: 831135 - DNA, 637 bp, Homo sapiens
aagagtggtttgcaatgagcttttcaaggagccaaaaaactacctagtaacttacattcctcttcaaaaggaacggagagagaaggggcaaaatatacctttatgattagaagcaggtcagtcacattccaaaacatgacagggaaaggctcagagaaattaactttttcatcctcaagaaggaagatttagggaaaagctcaaaatatttctccatattgatgcttgcggaccatcagtccaagtatttctactcttccataaaatagcacattttctttcactcactatgaaacagattatccacccaacctcttccttgaggactacatggattcattatctcaccacatgccaaccctggagcttcctctgacagtgggtcaacttggactgacacttggaagccacaaactaacacaccagtggccacacagctatgaaatccagctaatctatctgcctcctgcctgccttctgggctgtcagctgcttactcaatgaagacacctgtcacccacctcatcttagccatgcctgtcacytcatttggcctccctggcatgcaggcagtgctccagcatggccttattccttccatgatgtctgcgtctccatcacctccagactcggctga

SEQ ID NO: 831136 - DNA, 583 bp, Homo sapiens
tcaacacaataaagaccatgtaagacaaactcacagctaacattgtactgaatggtgagaaactgaaagcttttcctccaagaacttgaaaaagacctccaaggtaatgatcaacactttcaccactctcatttaacatagtactggaagtcccaatcagaacaattagtcaagggaaaaaaataaagagcatccatttggaaaggtggagctcaaaatataatcttccacctttccaaatagatgttctttagtcccttcctttccttttccaaaatatgtttgcagaaaatatgatcttataaataaaaaaaatcccgaaaatgccatcaaaaactgttagaactaatacgtatattcaataaagttacaggacacaaaattaacatacaaaaatcagtagcatttttatacaccaataatgatctagcagaaaaagaaatcaagaaggagatcccatttatgatagatataagaaaagaattwaaatacctagaaatgaattcaaccaaagaggtgaaagatcttacaaagtaaactataaaatactgttgaaagaacttgtagaagtcacaaaaataat

SEQ ID NO: 831137 - DNA, 649 bp, Homo sapiens
ttacctactttacctctcataatgttcaaaatgaccctttgaatgagaaagtaaaattttaaaaattcgaggaaaatgttattcagatgacattacacatattaataaatgtcagaagtagaatttaataccagggatgttgggctaacagtcctttccattttcaggatgtcattataattccataaaagaagatcctagctattttgatttggtctggaaagtgaactagaatcagtgattgtacactatgaagacaaattttgattccatatgcaaaactatgcaataaagaggtgtggtgacaataaaataagagataaggtcaagaatcttgatttaaaaaaaaaaaagaaaacaactctaaggtactaagtcagctgacatatatacttcccaaagaaattcctgaagcactttcccagaatacattaatggataggtaaggtgtacttacaaatggaacaaagcaacacacacattcgatcaggtagaattatcataagaatttaaattcattatgtgtcgtgaaaattgattataggaattggagttattcttrtctaatgcaattagatttgagttgagggaccagggaaaaaatcactcaggtacaaagcacctgctccaggaactgtttcataaaccc

SEQ ID NO: 831138 - DNA, 642 bp, Homo sapiens
atttttgtatttttagtagagatggggtttcactgtgttagccaggatggtctcgatctcctgtccttgtgatctgcccgcctcagcctcccaaagtgctrgaattacaggtgtgagccaccgtgcccggcctgttaacaatatttttaaacctcaatagatagatcagcagatttaatgtagctgaaagagaatatataaactggaagacagagctgatgaaaatatgcagaataaagcatagattgacaaaggggtggaaaatacagaggagaaggtgagaaacacagaggatggagagaaatatctgaacttaaatgaaattaggtttctaggagaaaagcagaaaaagaaaaggaatataagcaatgaatgatgagaaataattaagatttttcaggactgatattaagacacagatttgttctctattaacccaaatcaatttaaatataaagaaggctatacaacaaaaattaccatgaaattgctgaagaacaaaaacaaagtgaaaatattagcagtcagaaaggagtacaatgcatataccatttggaaaggagtgacaaactgagcagaattctcagaggaaataacagaaaccagaagacaatgtattgatattttctatgtgttaaaaaa

SEQ ID NO: 831139 - DNA, 678 bp, Homo sapiens
acacaaacacacctatatatatagctagtgaataataaagatatttagttatcatttatttataataatgaaatcttcctttttaaatgattaaaacaactaatattaatagaaaaaagaatgaagtaaggtgattatatttcagataaatggaaacacacttgcctcatgagctattttatatcaatgacttcagggactgagttatcttctacttaatggtatacatggatacaatatcaaaaatatatttccccttatatttaaaaaaacaaaaccaaaagttgcattttaaaaagtcaggaaaaggcatattttcaatgacagttgtttcaatccagctctaagacactgaaaacaatttctgttaatattgtaagttcaagaataatatagatttaactgcatgtaggcacaaatgtagagaaaaataatgtgataaaaatagggtctagatgcaaaatacaaaaaaactattttatatgtaattaaaaggccattaaaaatctatagtagaataaaggatcattcaatacaggctgcaaaactattaataatcagttaatttactcctaaattcaacaaatgtttattgagtttctattacatactaggcacrgtttagtattggaaatgtagcagtgaagaaacaagatacctaataccatggatataaca

SEQ ID NO: 831140 - DNA, 517 bp, Homo sapiens
tagaaaaagtaagttaacagcagattctttactttttcacagtgaaaactgtcttactaaaatagagccaacataaggcttgtgacttacataacaggttmtcaacccctttataagactgaaggaaactgaggttttgactttcaagtaacataacactagagtagaaagtctggtttttgctggttcttatttccactacagccctttccgcatatggaaagtgaaagggctacaatttgtattgtcttaaaaacaagaaatatgagaatgttcatgtcagtctggaataaaactattctatacaatggctattttaaaatattggaattagaaatatttagtggtctaatgttttcaagcataaagaaactgcattgcttacctttacatgtggaaacaagaaattttccattaaaaaggagagactaatgagataagcgtgtatcaaagagttgactgtttttaaaacttggatgtttccatacattgcaatcaaaacagtttcagtgttttt

SEQ ID NO: 831141 - DNA, 446 bp, Homo sapiens
ggctgtccttgcctttgctggtgtctttctctactccatcctcagctatctggagagtcttctattcatgcacttgtggaatagaaggggtaatatttaattcttctgtaaaagaaattttttttgcagagaaagatttgccggaaatatcaaacggaagactagctccttcagaaaatatttctgacttagtctgagatctgggaacagggactcctagatttctttactttcgcacattcataatcatagctatactatgctactaggatcaaaggacctttcaccaatcctgtcagtcgagctacttaatgtgtgagttaaactttctaataaratatattttactcaaccttgttcattcattcaattttagggttacagttctaaaagcttcccctttttgtgactcctagctcctgcaatttcaccattcaactcaatgt

SEQ ID NO: 831142 - DNA, 535 bp, Homo sapiens
caatgttccaatttaatctggggttcacacatgttcacatgaaaagttatggcatctcattctttctcaatcaatgccctcactttaaccgtagacaccctatgaagctgggagttcaacttgcattgtaatttagtcaattggcagatgaaattctgtgtttcattgtcagctgtttcagctttgtggctacaggaaataagaagctccttcagggcatatttagatgccttcaggtcatttatacagtgcttgagtttagaatttaaatccctgaacttatccttttcttttggcacttcatccagagctattataagcaaaaagccactcccgttgtattcattagtttttcaaaaatatttgaaaatataatatacagagccacttagctccttgcttyttataagtggctaactaggattatttaatggacatattttgtataattctatcactagattacactatggactatcagcactctccttatgaaaaatagactcattagaatctttattttacttcttttttt

SEQ ID NO: 831143 - DNA, 607 bp, Homo sapiens
agaaggaaaatgttgagctctgatggctcagagtttcagratctaagcctgctctgtgaggaactgatcaaacctcaggatcacagacaaaatctgacttcaataggacaatcttttctgcaccaggtcttccttcataagagaaaaatagtttctgtttctcctcacgttgccagttcttctgaatttgcagatgtctggagttttaatatgtcttgaatttattaagtgggttaatgcatcttagaaatgaagttcagtagaaatgatgtgaagattcccttaatgcgttcaaagcagctcattcttctctccagtctgtgggggatgcagctggccaagcttcgttcttgcatgtattcacagtcagagatccacactctaaattggtctcaggatcattccatgagaagaccaccttttgcttccccttctttggaaatgtatttctggatctcctcaaattgtgttatttcttccaattaattaaactgattatcttctaaactctgaattttttcttgttgtcaaccttgaatgtagatatgaatcacctcattgttaattcagcctttgaatgagtctacctttgaaaatgtagaaacgt

SEQ ID NO: 831144 - DNA, 607 bp, Homo sapiens
agaaggaaaatgttgagctctgatggctcagagtttcaggatctaagcctgctctgtgaggaactgatcaaacctcaggatcacagacaaaatctgacttcaataggacaatcttttctgcaccaggtcttccttcataagagaaaaatagtttctgtttctcctcacgttgccagttcttctgaatttgcagatgtctggagttttaatatgtcttgaatttattaagtgggttaatgcatcttagaaatgaagttcagtagaaatgatgtgaagattcccttaatgcgttcaaagcagctcattcttctctccagtctgtgggggatgcagctggccaagcttcgttcttgcatgtattcacagtcagagatccacactctaaattggtctcaggatcattccatgagaagaccaccttttgcttccccttctttggaaatgtatttctggatctcctcaaattgtgttatttcttccmattaattaaactgattatcttctaaactctgaattttttcttgttgtcaaccttgaatgtagatatgaatcacctcattgttaattcagcctttgaatgagtctacctttgaaaatgtagaaacgt

SEQ ID NO: 831145 - DNA, 563 bp, Homo sapiens
tttcttctgtagagttggactgcctagtcttattttctttggtaaatttagactagtaaatgcatgattctactgagggatattaatcaacccataacagatatggagatatgtaaaaggtaatttaacaaactaggcattggtttacttatattttgttataggtaaactgtctaataaagttggaatttaggaagtattcaataatagagagacttatgtgtacaaattctttgagactgagtgccacactaacacacatgaattgtggtgtctaaaataatcccagatccagttggtaaaaaaagttataggataatgtgataacagtttaaagcagtcatatattaaatatatatctatatgcacacatacacatgtatgtgggtatttctaaaattgtatcagacaaccaagacaaatatattcgatataatattcatatgatttgaatgtaaaattatgcaaatgtgtaatagaaattctgatckttctgggaaaataatgatcaatgtgaaaattccactttgaaagtctcaaaatctgctgaaaaaattcatgtg

SEQ ID NO: 831146 - DNA, 580 bp, Homo sapiens
aatttatcgtagttaattggaaggagaccctgactgagagtgacagctcacttcactgacactgaagattcctgggagccacagcacttttacaaagcagacaatgctcaatgattctgctccccacaaacattaacaaaatgtaatcttagtcactgctctccaaagagcaaaatattgacaataaaaagttttttttaaagtcaaatctcaattaagttaaacctccttagaaccttgcaagtatgtctagtagaacacagctacttctgggtttcctggtagccaatgacccccttcagcgattattctgctcccaccctttcttaattctcgtttcagtgcctgttagaacctctatgagagaaggtttcacatcgaggaaaacgaagagccaaatcaaacattttcatttttttttaaattctgcttaaaaatcactgggaaggggagtggtgactattggwttaagaaactgtaaatttcaatgctagatgatatttccatctcccacctgcagttcagtccccctcaaggttactttctttttttaaaaatttattaagtaattagtttattt

SEQ ID NO: 831147 - DNA, 577 bp, Homo sapiens
aactcatatggaagaacttcttatatctagaagctgttttacctaaaaatgtaagtcatctttttaaaaatatatattaattctagcaagataggtagatattcattctacatttcaaagcttattttcaggataaaatttagtttttataaataaatatacagtaagagagaaaaccagagagagaaatcaaattgtacaaaaagagaaaaacaggtgtctttaatttgaagttctcagaagaatagaggtagaagaaaatgaagacaaaagaaacacctgactgtagatactgaatgtagctgaagttatgtcactattcctgtggtgagatcagacagtaacatatgtccaggaaggatgcaagaagtgaaaactcaggcaggaagaaataaagcccataagtaagttatatagatatttagaaagatttgaagccctttgcaattgaatatgtcacacacacacacacacacaaattttgaagtgatttataatggagaatatcctaaacacacaaataccacatccacatatccawtatgcacacgtacaccataacaaacacaaataaata

SEQ ID NO: 831148 - DNA, 595 bp, Homo sapiens
agagtctttatcatgaagggatgttggattttttgaaagctttttctgtatctattgagatcatatcatatgtaaattctatttatatggagaatcacatttaaagatttgtgtatgttgaaccaaccctgcatcccaggaataatccctacttgaccatggtgaattaatttttttatgtgctgctggatttggtttgctagtattttattgaggatttttacatttatgttcatcagggatattggcctgtagttttcttttttcattatgtctttgccagattttgatatcaggatgatgctgcctttgtagaatgagttagataggagttcgtccttgattgttttgaatagtttcagtaggattggtaccagctcttctttgtacaactgatagaatttggctgtgattctatctggtccagggcttttttggttggtagtttttattactaattcacttttggaactcattattggtctgttcagtatttcagtttcttccytggtcaatcttgagagttgtgtgtttccagcagtttatccatttcctctagattttctagtttgtgtgcaaagtggtattcataata

SEQ ID NO: 831149 - DNA, 644 bp, Homo sapiens
gggggctcacggacaagggctaatggaaagaaaatgaaaaccaccttttctcaatctcctctcctggccttggactaagctcccaaaatatgtggcaatggcctccatagtttcttamgtaaccaattaacaagtcaagtcaatttttaaacaactgacttgcacattttcctctatctctctgatcacctttctaacaaaattcctcaaaagagttgttgatatggactatctctcatttctcttctccagttctgtctagaacctttcaaactgcccttgacaaggccaccagtgacctctgtgctgccagattctgtggttggttctccaatccttgacctttcagccacatttgacagtcaatcacactgtccttggatggaaggctggagtttggggctattttgttcactattgtatcccaacttctggaacagtgcctagtgcatataggtgcttcataaatacttattgaataaattgttcacttcctggaggaggtgaacataaagaataggtaagaactaaccaggcaggtgaggacggaagagaattctggccagaagaaatagaagttcaaagctacagaggcctgagaggacttggcagattcagtaacatccaagtagttctgaatggtt

SEQ ID NO: 831150 - DNA, 543 bp, Homo sapiens
tagcacgtcactccctgacgtccggaggttgagtccaatgaggaagacagacatgaaatgagtgccctagcgaaggccgatgagtctggcgggaggactcaatgcatctttatttcagcttggttcctcctcactctggggcaagctcctgttgctgagtgaaccacagcatgctttccctgtctattgttttccaaaggccagaggaacttcttggatgactcaactggggaggatgggagagaggcaaaagctgtgagatggggtgggggtacccccaggatgggaagctggtggagctctgtgagaactgcaagtggaggtgagccgggaggcaggagcaccttagcaaccaatggctttggggtgcttggggaggatggggatcccagcctccatggagattctcargtccagtcatggtgtggaagctgcaagaccacctgactccaaaggaccatggggacttacatgatggagatgccaggggttacagtgttgggtaggcagaacaacactcccctattcctcaaagatactcac

SEQ ID NO: 831151 - DNA, 619 bp, Homo sapiens
gccaagacggagcccctgccagacattgcggtagctgagcsatcagcgaggacagggtccaagcgcggcctcttactggttgtgtggaccggcattggcccgcttgcaacctgaaagagaggaaacaacacaggttagaagttcctcagcatggagccaacgtgaaaatcaagcacatccaaagacaaggtgcacacgccatgaaattcttagtacagtatcgacaggcggtccttggaagtagggacagaccctccacctgagtgctgatcaggacaagacacatgaaagatgcgctctcgagctatgtgtagctgatctaagcacaccattgttcaaaagatcgcgtcttgggcattaactggatcaaagcgcctccactcagccttccatgaagtggaacggactaatgcccttcccaaggcaggttgctggctcaagggtactcgggacgtcttctctgaacacatgcatgttcctgggtttcgccttctccacgtttggggcctctgagggactaatttcctcatgccgctaggaacgtgttgttggcaggcttgccataattggacagaaagaaagcaacaggaaatacggcatgttcagatgccttcgcctg

SEQ ID NO: 831152 - DNA, 645 bp, Homo sapiens
ccatggtgtatatgtactacactttctttatccagtctatcattaataggcatttaggttgattccatgcctttgctattgtgaattgtgctgcaatgcacatatgcatgcatgtgtctttataatagaatgattcacattgctttgggtaaatacccaataatggattgctaggtcaaatggtattttgtctctaggtcttcaaggagttgccacactgtcttccataatggttgaactaatttacactcccatcaacagtgtatacacgttcctttgtgaaaaaataattttaattttctaaaaggttagctttctaagacaaatggtatgcgaggaaatttccacaggcctaagccatccagctgctcttctgagaggctacactcttcctcctcaggctgtcctctaagagatgacccaggggatgatattcattagacactccaagagatatggccactgtgggcatcttgggttatccctgacggttctgaaaatcatgaacaagaaaagacckgagggctgccacaaagggccctggaatttctccaaagcaaaacttcaaccgaaagacctactaacaaggtgtatgcaccagggaagataaaaggacagtcacagagattttttttctttttaaca

SEQ ID NO: 831153 - DNA, 572 bp, Homo sapiens
ccagccaagattgataaatatgcccaataagtataactgttctctgtgttagcccttgctgaaggaatactcatggcaatggtgatcactgctatcatagctatcattaaattactcacygtgcctgctttcctcaggttttcttccaccatctgtgacagcttcttgatctgtccccaggtaggtggctgtatttgatgggtgttgctcatgatagttggggtcctcctcagcatcagtcttgacatgactgcaaccagggggtccttgggatcctcccagaatctcttcctcagcatctggctcatggtaaggtttcaggtgttttgatggtatccaaatcggttgctggagaaacataagcataccctctaccccaagttattattttacctattttccaactttttgttatcagatctctccaccaaaccagttgttctgcttctgtcattgcagctggtttctgtagatgctgttcatctgctgataacatctggcctttgggcaggctcaaaaaatttaaggttaataatgttagattcaattgtatatatgaggtgtcccatagt

SEQ ID NO: 831154 - DNA, 632 bp, Homo sapiens
gtaaattgaaaacaataagaacataaaatgactgagattctccatctgcagaaataaaccactcaggagatggttgtaaatgtgctgttgatgtgartgaggattctccccattttctgtcaaggagaacaggatgccttacaaattcacttaaggacacgagagtctcccccaagtccagtcagggtgaccccagggtgtctccccaggaaaacacattggaatgtggtttatggtaacctactcagttgaactgcaatgaatctgagctaatgttgtgttgtcatagcagagggtgggggtccgcaggagtctggaaactgagagccaagcagtgaggctctcagggtgtctccaccgctgcccagagctctgcttctagatcatcagtcctgctaggttgaaacatcccttgaagacagccaataacctctggtcaaattccaggatatccaaggaaaatcttagctgtcacttggtgtcttcaatggagtgactaagtaagaaggcaagtctcacaaagatgagtgccctcgctcagctctccaaccagaacctcacccactgtcaattagtacattgcttttctggcttttaattagcgaaagaaacatttctgcataattattgct

SEQ ID NO: 831155 - DNA, 497 bp, Homo sapiens
ttctacccaaggccgggatgtctggggtgtgggggttggtgggtctaccctacgtgccccaggattcagctattctggaagatcagagcctaagaactgggacttgatcctggtcctggccctccctaagcatcatgtgtcccaggagcaggactgactgggagagggggaccaaggtcctacccagctctccctgtgcccccattcctccctccggccatactgcctttgcagttggactctcagggattctgggcttggggtgtggggcggcgtggagtaacaggccagagctgtctgaacttatgtgtcagaagcctccaagcctgcctcccaaggtcctctcagctctctcccttcctctctccttatagatacttgctcccaacccattcactayaggtgaaggccctcacccccatccctgggggccttgggtgagtgatgcgctaaggcccctccccgcccagactacagggcttagtttagggcttggt

SEQ ID NO: 831156 - DNA, 622 bp, Homo sapiens
gactgtcatgatgattaaatgagataagagttgtgagctgctcagcacagtgcctagtgcacagcaagcactcaaaagatggaagctattattactgaggattgaatggaaattaaattaaaataagtgcggccaggcacggtggctcacgcctgtaaccccagcactttgggagactgaggtgggcagatcacgaagtcaagagatcgagaccatcctggctaacatggtaaaaccctgtctctactaaaaattagctgggcatggtggcatgcgcctatagtcccagctactcgggaggctgaggcaggggaatcacttgaacccaggaggcagaggttgcagtgaaccgagatggctccattgcactccagcctggcgacagagcaagactctgtctcaaaaaaaaaaaaaagtgctcagaacaatgcccaggcccatagtaaacactaaactttactgaaaatgtacgaattgtaaatgaagttctaaagcaaaacaatttttttatcttcatgtagaggatacratagtattttggggaaaaaaattcatcactagttatgtcattttgggtaagtcactgaaacctctgaatttctgtttcttctctgcaaaatgt

SEQ ID NO: 831157 - DNA, 548 bp, Homo sapiens
ttgtgaaatcagtattccattgatcttaacattgcaaaatccaattatccttatataggcttcccaaattctttagaatttagactctcactgctgctggctagctttgttcccttaattttttttattatttatttatttatttatttatttattattattattattattttgaaacagagctttgctctgttgcccaggctggagtgcggtggtgcgatctcggctcactgcaacttccgcctcaagcagagttcaagcgattctcgtgcctcagcctcccgagtagctgggattacaggtgtgcaccaccatgtccagttaatttttgtatttttagtagaggcagagtcttgccttgtttcccaggctggtctggaactcctgagcttgagtaatccatccacctcggcctcctaaagtgccgggawtacaggcatgagccaccgtgcccggccgaaaatttttattaaacctctttgaccttaatttactcatctgtggacacactaaatcatttactatttcactaataatttatggatcat

SEQ ID NO: 831158 - DNA, 558 bp, Homo sapiens
attccatttggaatttattgaatgtagaatgtcaaagacactgtaaccaactgaggggttctttctgcccactgcacaaataaaggccatggcattgcagtaaagaaactctttaattgacacaaggctggccatgctacgtggagatggagttattactcaaatcaatctcatcaaagggtcataggttaggggtttttcaaaggtagtttagaggaaggggtggagatggttaggccatgggtgagtgcttgctgttgattggttgggtcagagaggaaatcatagggagttgaagctgtcctcttgcactgagttgcttctgggtggggccacagaagccatggtaagtgggatcaggtggtagagcaatgggtgtccgacatgcaaaaatccagaaaagttatctcaaaaggtcaatctacaacagtgatgttctctgcagcagtaattaaagaaactgcatatcttttgaccagtctacaccttagcaagatgaaggctcttctcctccccytagcctgctgatgtctcattaactttttaaaggtggttgag

SEQ ID NO: 831159 - DNA, 618 bp, Homo sapiens
agctgtttcattgatactgcttccctygtgcaaataggagataataggagaataatgtctacataacacagcagttgtgtcttagttcatgtataattttttttccagcaggttaatgttttaaagtggtcagagtaggctttcttacaactaaagaaagagccttagcaatctgtgaattaactctggaaatctacagaactgcaggtggagactaggttagtggcttcaagaattgctaccctttctactatgccaagcttcttgggtaaactgttactgcagataacaaagctgcaatgacatttcccttctattaaaaaaaaaaggtacactctggataagatttctaatatttgttaaataatctactagaagagagtgtcctctaggatctctccttcaaagggaaatcaccagaaccaggagttaaaattgcgaagattaactgattggacataaatacaaagagagatttaacaatgctggtatttctattaggagggttaattattctcattagtgtcttggttgcaaaattccatagcttatgaggaatttgtcccaattctattctttccataagctctcttatttttagtgtccaattttacagag

SEQ ID NO: 831160 - DNA, 543 bp, Homo sapiens
ggtaaactgttactgcagataacaaagctgcaatgacatttcccttctattaaaaaaaaaaggtacactctggataagatttctaatatttgttaaataatctactagaagagagtgtcctctaggatctctccttcaaagggaaatcaccagaaccaggagttaaaattgcgaagattaactgattggacataaatacaaagagagatttaacaatgctggtatttctattaggagggttaattattctcattagtgtcttggttgcaaaattccatagcttatgaggaatttgtcccaattctattctttccataagctctcttatttttagtgtccaattttacagaggtgaacatgcattgtaggagaaatacctgaattattttataaacaggagaaaatccaaattttctaaatgtaagagattaaagccaagtcacaatccaatgaggaggcagagtaaaacattaggatttatggttcttaattctygcatgactgttttaggaagtacttgtttgtatctaccactgaagatat

SEQ ID NO: 831161 - DNA, 616 bp, Homo sapiens
aacaatgtaaaacaaaccttttgctcattactgcttatgtgaaatggctgggatgaaagctcaaggccccyaactttgagtcttggggatttttctgtgctgtttgcttttccaaaagcctagtgtcttgcacgtagcatatgttccttacatagctaatattttagtttaaaaaatataagtgtatggtgcatagatgtgtccttttcacagtggtactaagattttaaaaaatgtttgtttgttgtttctctcattatcatagctaaggtactgagaagttctacaaggaaaaaagctgcatcgccaaacatatcttgtcctaggattctttttgggtagaacagctgttagcatctcactgcacatttgtctctcagagactagagtatagaaaatgctactccagtgattgaaatggaaagttaggagcaatttaagttcatggaacctaactaagctgaatcttgactgacaatttttatcctctttgtttcctggaggcccctccctggtgcaaaatcatctgcatttcaacctgagctcagtctgatatcccagccatataagtaaaagtactaaaaaaaaaaaaaaaaaaaaaaaggtagttactatg

SEQ ID NO: 831162 - DNA, 297 bp, Homo sapiens
ataaataggctggctcatgctgtaatcccatcactttggaggattattttaggccaggaggagtttgagacgagcctgggcaacatagtaagactcagtctgttaaaaaaaaaaaaaaaaaaaagacatacagcatccagctgaaagcttgtgtttccaaagytcctcaatagctagtttcctggttttgtttctttgaaagtatccgacagctattccaatgttccctttacatgaataatattcattataaagagctaccgtttatcaagcacttactcgagtagataataattg

SEQ ID NO: 831163 - DNA, 524 bp, Homo sapiens
gcttgtctcctgctaagcaatccctctctcagcttccttttcagtctgtgtgacccccgactcagaccatgtgtggcagctcccaacagcaggcactgcagatgtcccagcagagatggagacccccactgggagaggagacctgcttccaagctgtgaggagccagctgccaaaacttacagatgtccttccaagtgtcaatgttgcaaatcagaaaaaaaaaaagtccatgggtatgcatgactccagccaggagggcagtgtggccagcagatatgtggattcttagtgacagaaggataataaaagtactggacttgatagaaagaggaattttaaaacttcagcactcttatttctgcaggattctggtctccagattgctcagcagagggtaggcgccctcgtggagggaagggaaccaggaaatgagtttcattgaatgaatgtgggggagagtgaaagaattctctacgragggtcttaaaaccattccgggcttgttttaaatttagagaaaatt

SEQ ID NO: 831164 - DNA, 620 bp, Homo sapiens
aaaaaaaaaaaaagaaagaaaaagaaaagaaaacaaacaaaaaaacccagcactctgggaggccgaggcgggtggattacaaggtcaggagatcaagaccatcctggctaacacagtgaaaccccatctttactgaaaaatacaaaaaattagctgggcatagtggcgggcggctgtactactcgggaggctgagacacaagaatggtgtgaacctgagaggcagagcttgcagtgagctgagatcatgccactgcactccagcctgggtgacaaagcgagactccgtctcaaagaaaaaaaaaggaattcaggaggttagttattaagctaatcagggaggaaccaaagaaaggcaaagctcagtgcaaggaaatccaaaacatgatacaagaagtgaggggagaaatagtcaaggattatcaagaaatattcaatagcttaaagaaaaatcaacaaaaaaaattcaggaaactttggacacacttttaggaatgcaaaatactctggaaagtctcagcaatataattgaataagtagaagaaacaaattcagagcttgaagacacggtctttgaattaacccaatccaacaaagamaaagaaaaaagaataagaaaat

SEQ ID NO: 831165 - DNA, 657 bp, Homo sapiens
attttatattttgagttattatttgataagattttactcatggkgggactcaaacagttccagctttggccatcaaaagctcagaatttcttacagaaggctgctgtgttccttttacataccacaatcaatgtgtttgtgtttttgtgtgtgcatgtgtaggtatttttttttactttctagcattttaagatgctttaagtttatattgtatacttcctgccccattgctagaatcagccagttcttaaaggctcgtagtttcctttaactggggaatggtattagagaccaatagctgggtgcgaatgtgcttactactactatgatgtgactgcttttagacctcttaactgacagagcaaggaaatatatgtgtttatacaaaactatgtgtatatacatatttataaatatttctatatgtaaccatcagtagctatattatgctaaacatgagctcacactatgtctctagctctatccactactatgcagatcagtctagcctcctccacctgcttatgtataaccacttattttaacaagagcagtgtagatccctccatgcaaaatccatttacttaactattcacatatgtagcagtacaagtgttgttaactcaaaatgccacaagaagcatctttgttaactga

SEQ ID NO: 831166 - DNA, 634 bp, Homo sapiens
ttgtttgtatgaccctgatatggtttggctgtgtcctcacccaaatttcatcttgaattttagttcccataatccccaggtgttgtgggaaggcccaggtsggaggtaattgagtcatgggagtggttacacccatactgttatcatgatagtgagtgagttctcatgagacctgatggttttataaggggctttgccccctttgctcagcacttctccttcctgacgccctgtgaaaaaggtacgtttcttcccctgtgtcttctgccatgattgtaagtttcctgaggccttcccagccctgtggaactgtgagtcaattaaacctgttttcttcatgaattacccagtctcaggtatttcttcatagcagcatgagaacgaagtaatactgactcttcaaaggggatctgagcaagaattttttgaaatgcctaccaagaatatagcactgtagcaacgtgttctggagtaggattgtgtttttaaaatctaatcctatatatttctaatttaataatttaatgcttcagtttcaacatttgtacaatgaggattttgaactattttcctcatatatttgctgttgcctgaatgacagagtccatgtcaaaagcttaaaataatatctgaa

SEQ ID NO: 831167 - DNA, 538 bp, Homo sapiens
acccagaggcagaggccgcggggagccgacaccgcaccactgcactccagccctgcaacaagagggaaactacgcctcaaaaaaaaaaaargagagagagagagagaccggttttcaccatgttgcccaggctggtctagaactcctaggatcaagggatccgccacgctcggcccgtccaaactcctgggatcaaaagcgtgagccaccacgccaggccgatccttcctgtcatcccagcatttgagaggccgaggtgggtttacctgaggtccggagttcgagaccagcctggccaacatgatgaaaacccatctctactagttttacaccagcctgaccaacagggaaaaatccccttgtgtgcgctagcgggtgcctgtaatctcagctactcaggcggctgaggcaggagaatcgcttgaacctgggaggcagaggttgcagtgagccgagacagcgcaccactgcactccagcctgggtgacaaagtgagactccgtctcaaaagtatatatatataaaaataaaaaatgaa

SEQ ID NO: 831168 - DNA, 538 bp, Homo sapiens
acccagaggcagaggccgcggggagccgacaccgcaccactgcactccagccctgcaacaagagggaaactacgcctcaaaaaaaaaaaaagagagagagagagagaccggttttcaccaygttgcccaggctggtctagaactcctaggatcaagggatccgccacgctcggcccgtccaaactcctgggatcaaaagcgtgagccaccacgccaggccgatccttcctgtcatcccagcatttgagaggccgaggtgggtttacctgaggtccggagttcgagaccagcctggccaacatgatgaaaacccatctctactagttttacaccagcctgaccaacagggaaaaatccccttgtgtgcgctagcgggtgcctgtaatctcagctactcaggcggctgaggcaggagaatcgcttgaacctgggaggcagaggttgcagtgagccgagacagcgcaccactgcactccagcctgggtgacaaagtgagactccgtctcaaaagtatatatatataaaaataaaaaatgaa

SEQ ID NO: 831169 - DNA, 693 bp, Homo sapiens
tgcaggcccattggctgcctagccagtggtgatctcgctcccaccctcatttcttctttgttaacaaaaccatgrcctcattaaatactggacacctataaacctcatggaccctcctccagcctccccaccgtgtaccggtgagtctaagtcaactctagtcatttcattcctctggacattgactgcttagggcttgggcatgagctgcctcttcacctgagcctgagccacaggtaccctctgcacctaccacgctgatgcactgggccagggagagcgccgtctggatggagatgagctgtgaggagctggtggctgggcggatcaggttgttgtaacaggttttgttcagaaggtcgtccatcagtttctgctcggcatgggccatgcggcagtcccctgggtaaacacacagacatgctgggcccttgtgcagctgtctcccactgcagctgacagctatgaagcaggagctgagagggccagggagcacagacaccctgagagctggctgaagcagtgaaggtgctggccggcctggctttccctggggacttcaaatgacattcacgacagagctcagctacctcctccccatgccatacctcttcctcctcctcctccctccgtcaatgaacagcatcccacgctctacacatctgatacaaaactgggtgtctcttcctgact

SEQ ID NO: 831170 - DNA, 497 bp, Homo sapiens
atgtataaagatgaccaggaagctttgttttccttattrtcatgatgaccaatccattggcttttagggtgtgatgtctccactgttatatttttgatgatcagggaatccttttgagtaatctttgaaagctcccttcctttatgatacaagttgatccagcctcttcctgtatatttcctgcctgagacacaaagccagacagtgttctaaagagtttctcttccctttatcattaaataatacttagaatgcactctgggtgctagatgaaattcttttttttttttttttttttttttgagatagggtctcactttgtcactcaggctggagtgcagtggtatgatcttggctcattgtaacctccaccttccaggctcaagcaatcctctcaactcaagtctcccaagtagctgggaccacaggcatgtgccatcacatctggctaatttttgtatttttggtagaggtgggtttcgccatgttgcccaggt

SEQ ID NO: 831171 - DNA, 430 bp, Homo sapiens
atgttgcccaggtttgtctcaaacacctgagctcaagtgatcctcccacctcagcctcccaaagtgctaggattacagatgtgagccaccgtgcccagttgaaattmtttattaagagtagagtaatactacttatcatggctcatttcacctgtgtacatgatggactggatctccaatttcattttaattctaggtgggaatgatggttagatgctgccgaacatacgaagaagtgtgcgaaggtgatgtgatgttggcaaagtcatcaagctggacagagatggattgcatgatctcaatgtgcagtgtgactggcagcagaaagggggcatctactggtttaggtacattcatgtggaacttataggtgagcacattctttgtttagtgcttttactttttcttagagacagaattcccataaatg

SEQ ID NO: 831172 - DNA, 536 bp, Homo sapiens
tgagtttttgtttacacatttttwaatttcttttaattcctgttcccatcccagcaccctgagaggacgaggcaggcagataacctgaggtcgggagtttgagaccagccccacgaacatgaagccccatctccaccaaaaaaattaaataaataaattagccgggcatggtggctcagcctgcaatcccagccactcgggaggctgaggcaggaatattttctccctcccttagataaaagatagcatataccattgtgcactttgttttttgacctggggtggggtctcactctgtcactgaggctggagtacagtggtgtgatcttggctcaatgaaacctctgcctcctagactcaagctgtcttcccaccccagcctccagggtagctggaaccacaggtgtgtgccaccacacccggctattttttttgtatttttggtagtgactgggttttgccatgctgcccaggctgatatcgggctcaggcgatccacctgcctcagcctcccagagtgttttcaaagtgctggg

SEQ ID NO: 831173 - DNA, 500 bp, Homo sapiens
cttcttacttggtacagatatttacattttaagaaaaagaaaaggagtggttaaatactgggttacatatgattaaagaaaaaaaaaggaacagggagaaaggaaaagaacacttgattgatgatgatgaggctcctgatggacagccagctgggtccatgggtaatgagttttcagtaagggctcttaatcttattaaaatttgtcagaaaattgcttaagcattttcaagaatgcaaatttctttctagaaagagattttgaattaccttacatggaccaggctgggcacaattttccttttataaataataaaaacagtaatcaggaaaaaaaaaagagacattgggtagtaatagcaaatacaatttgtcttaaatttgcatggaacataaaacagataatctaaatatgctgcttttaaaaagaaaatgcatagkgattatctttaatgtactcttttcagaatggaacaaatctaccagaaaacaaaaaagggt

SEQ ID NO: 831174 - DNA, 460 bp, Homo sapiens; identical to SEQ ID NO: 826052

SEQ ID NO: 831175 - DNA, 622 bp, Homo sapiens
ttatatgtgatatggcttagatctgtgtccccacctaaatctcatgtctaattgttatccccaatgttggaggaagggtttgttgggaggtgatggatcatgcgggtgcgtttctcatgaatggttaaatactatccctttggtgctgttctcatgatagtgagtgagttctcatgtgatctggttgtttaaaattgtgtggcacctccccgtctctctcttcctcctgctctggctatcacctgcttccccttcctatgtcaaccataattgtgagtttcctgaggcctccccagaaggagaagcctatacagcctgcaaaactgtgaggcaattaaagctctttttctttataaattacccagtctcaggtacttctttacagcagtgcaagaatggactaatccaatatgattcacaattgcatacacaacaaagtactttgactaaaaatgagccaaggcggaaaagaggaagagcattttaaaataaccattttatttggacaatatcaaacttcataatttccatttgattgctagatttgctccacatttaaaaagttacaaatacatacctagmtctatgaccacaacacaaatgtatcttccaggtcctgacc

SEQ ID NO: 831176 - DNA, 505 bp, Homo sapiens
gtatgggttctgcatgaaaagggaaagcaagaataaacattgaagagacagtagaatgttgatgttttaaaaatgtaaccagatttaacacakaagacaggattctaaaaataacactaggttaaaagtggagaaaactcaggcacactcttcacacacaccctgcccacctttcaggcaaaacttttaattcccatgaatcagttcatttactttaaaatcacagaatttatactgtaattcacctataccttcccagaaagcagttaaatcattgttgattttctatccataatagaaaaggattggtaactcctaagaataatttaacgtatctgttaccaaaagaagaactttgtttcacataaatcaaaacagggctccacctcctactgggctcaggtacttttggcaaccttaatttgctttggtcccaggtcacagaggacctggtcccaggtcaaaattgaggaattctaaacaaattttagaattcctcaatttt

SEQ ID NO: 831177 - DNA, 594 bp, Homo sapiens
tgaggcaggagaatggcgtgaacccaggaggcggagcttgcagtgagaagagattgcgccactgtactccagtctgggcaacagagcgagactccgtctcaaaaaaaaaaaaaaaaggtataggtcaagctgcaatccaaacaacaaaacctcaccagcttaaaactgattctggttgtttgcgctggagaaagtgtttttccttttcaaccttgaagctctcaacagggttgatgtgaattactaacagctgccacctcctgttagtggcgacaaccttctggaagaaagtgaagtgtgcttggtatgtgaagggcatttgactctttgaaaaagacatgtgatctaggtgacaatgagtaatgatggcccagaatcctgaaaggtaaaactccacaagtgacaggtccttaacagcatgggttcaactggagtgcattcaaataccggtaggtccttgtcaccgaggagaatgtgcctggggagtgtggggaggtggttatgtgcaggatggacaggctgagctggatggcattcrgaacctaacctttgcctgagcagaagtgagaatattattttctgttgagacaagtg

SEQ ID NO: 831178 - DNA, 559 bp, Homo sapiens
tagcgggctttgaaccctatggtagaaaacgaaatatcttcatataaaaactagacagaatcattctcagaaactacattgtgatgtgtgcattgaactcacagaatttaacctttcttttgatagarcagttttgaaacaccctgtttgtaaagtctgcaagtggatttttggagcgctttgaggccttccttggaaacgggaatatcttcacataaaaattagatagaagtattctcagaaacttcttagttatgtctgcactcaacttacagagttgaaccttccttttgttagagcagttttgaaacattatttttgtagaatttgcaagtggatattttgagcgctttgaggcctatggtagaaaaggatatcacttcatgtaaaacctagacagaatcattctcagaaactactttctgatgtgtgcgttcaagtcacagtgtttaaactttcttttgatagagcagttctgaaagactctgtttgaaaagtctgcaagtggacatttgtagcgctgtgaggccttatttggaaacggaattatcttcacata

SEQ ID NO: 831179 - DNA, 365 bp, Homo sapiens
aaagaaacatggcccttccctcaacctacacacaaaaattaattccagatggattgtatatctaagtataaaaggtaaaacaataaaatatctggaattaataaagaagaatatcttcatggccttgtgtgttctaattaacttttatagattttgtaattgatgatttggcatccattaatcacacggtgaaactaatagctaaagttgtttacatctcccttgcagtctggcttttgcaggcatgtgaaaatcatattacraactctccaatcacaaacttcaacatctgtgttttacttcctgcccaacaggtgacttccctacctagcaacttcctggcatttttgcccatgtttctcctt

SEQ ID NO: 831180 - DNA, 631 bp, Homo sapiens
cccaaataggaagaagagagcatcgttggtgtgggggtggcaaagccagagcagggagaggacggacgggtggtatagcacaggaggacaaggaagccatttaaactgaaggtcyacctagcaagggtatatgagcctgaatatgaacaacaggaggttattcatgcaagagaagagggaaaccctgacacaggttttggatcccaagtaggctgaagaaagcctcctctgcgtagaagggcagcttgagcctgagagaggtgagaaggatttcagcataggaagacagttcagcagggagtactacagcataggcagagtgaagatggtatctgcatgggggagggagcagcagtagtaggagattggtattcctcctgaatatatcaaatatattaatatattaagaataatgaagacttctcattggataataggatttctcatcaggtttttcattgacagagaagagagttactaatatggaaagagagaaaactagtatgaaccctgtgactgtaaattgaaattggaagtattggtatgaacgtatgattttctattgtatagataaatacagaaataaatatagaggtcaatatctatatatttatgcatatatatatatata

SEQ ID NO: 831181 - DNA, 581 bp, Homo sapiens
ttctcctgtcccagcctcccaagtgttaggattacagatgtgagccaccacacctggccactaaattgtatgatttttattgtgaaatttcttttcgtttggcttggtttgttctagacatatgatataaatacctggtttgtctctacctctgatttttaaaattggtgtgtaatatgctgtgttaaagtgatttgtaagtgctagcatatatctcaatgtctccaggcctgcatgtttgcaaaaagaatactgcttttgtctaagtcacagctttgtgttgtatgttacatatggtaatgcatttgagttctttgcaaactgtagtatgctatataagtgtaatgtcatataagtttaagcttacttatgtatattttcatagcttattcttttaacagtatattgtaattagaaaacaatgtctttttagattaataattgtgatgagaattagaatctatatttctttactaaatgtcctttttaaagacaaattttwatgcttttctaggtgaacacttttaacagtgtcattataaataaaatgaacagaactcattatagtttttgggttttat

SEQ ID NO: 831182 - DNA, 632 bp, Homo sapiens
tcagattggtttatttgggaaatttttctcatttaaaagtaatccagaaaaaccttccatttattagaagtttccaattgcagtcattgggtggtaattagctaaagttttcttaggcttcctttaattattcttttaacttggattgtttataattaaggtgaatctgtgctgtttttgaggaataattatgagcaaggcaatgtgacatctaaatcttatataaataggcagatatcgtattcttattacaatcctatgaggtattatactcattttaaagataagaaaaccaaagctcagattaggaatgtacagaatgtagacttcacattaagaacaggcctggctttactttttgttcacatccaaagctgggattttaacaatgacaccatactgctctgtttctattacagcattctagaattttgtgagtagtcacattcatacttttttctgattttagcaaataattccaaaagcaattgtctacaaaggtcggcacgtagtggaaaggtgtgatgcagctgtatgccagagacagtaaggagaggtaggaatgtggctaactggagaatayggaatttgtctaagggagtagctgctgcctagctttagcagtccattgt

SEQ ID NO: 831183 - DNA, 408 bp, Homo sapiens
tgcagattgcttgtcacacatttgaaaatgagatagaaattttaaacattttaattaaaaaaaatragtcaagtgccttttctcaatggataatacaaactttgctttgacctccaatatttcccattatatgtgccttatttgcaacaaaaaaaagtaatatttcgctttgagaaaatatgttaccctgcatggagaccctccccttagctcaaaaatagcttggttatcaaatgaggaaacaaaacaccaaatagtaagaattacagagtagtcagagcttcttcaaatttgtacaaggacgtaagtaatcaaacctctgcttacctctccaacttcagttgctttggcctactttctctttttctccaggctccccaatactgcatttattgtagttcctcactg

SEQ ID NO: 831184 - DNA, 541 bp, Homo sapiens
gaggttgagaccctcctggccaacatggtgaaacagcayctctactaaaaatacacaaaattagttgggcatagtggtgtgtgcctgtagtcccagttacttgggaagctgaggcaggagaatcacttgaacccgggagggggaggttgcagtgagttgagatcacgccactgcactcaagcctggcaacagagcgagactccatctcaaaaaaaataatactatgaataaaacaggccaattataggtcaatcactctcataaatataaatttaaaaatattaacacaatcttgataaaccaacacaacaatatataagaaatgtattttgtttattatcaaggttgatatatctaaaacatctattactgtaatttgccatattaataggttaaaagtttacgtactatataatatatgcacacattatgtatatattaagaaatatatacatatgtcaacataacataaccataccaatacatacaatatagccatatcaataggtggggataaaagctcgataaagttaaatgtcag

SEQ ID NO: 831185 - DNA, 541 bp, Homo sapiens
gaggttgagaccctcctggccaacatggtgaaacagcatctctactaaaaatacacaaaattagttgggcatagtggtgtgtgcctgtagtcccagttacttgggaagctgaggcaggagaatcayttgaacccgggagggggaggttgcagtgagttgagatcacgccactgcactcaagcctggcaacagagcgagactccatctcaaaaaaaataatactatgaataaaacaggccaattataggtcaatcactctcataaatataaatttaaaaatattaacacaatcttgataaaccaacacaacaatatataagaaatgtattttgtttattatcaaggttgatatatctaaaacatctattactgtaatttgccatattaataggttaaaagtttacgtactatataatatatgcacacattatgtatatattaagaaatatatacatatgtcaacataacataaccataccaatacatacaatatagccatatcaataggtggggataaaagctcgataaagttaaatgtcag

SEQ ID NO: 831186 - DNA, 632 bp, Homo sapiens
ctaaaattgatcacataattagaagcataacactcctcagcaaatttaagaggtattaccctacctgacttcaaactataatacaaggytacagtaaccaaaatagcctggtacaaaaacagacacacaggccaatggaacagaatagataactcagaaataagaccatgcatctacaaccatctgatctttgacaaacctgacaaaaataagcaatggggaaaggatttcctatgaataaatggtgctgggaaaaccagctagccatatgcagaaaattgaaactggaccactttcttacaccttatataaaaattaactcaagatggaataaagacttaaatgtaaaacccaaaagtataaaaaccctataaaatatctgggcaataccactcaggacataggcacgggtgaagatttcatgatgaaaatgtcaaaagcaattgcaacaaaaccaaaaattaacaagtggaatctgattaaactaaagagcttctccacagcaaaagaaattaccatcagagtaaacagacaacctacagaatgggagaaaatgtttgcaatttatccatctgacaaatgtctaatgtcaaaaatctacaaggaacataaacaaatttatatgaaaaaaa

SEQ ID NO: 831187 - DNA, 556 bp, Homo sapiens
tgatcagaaactcaaaagaatgcgatcgtttgtctcttatctacctatgacctggaagccccctccctgcttcaagttgtcccgcctttccggaccgaaccaatgtacatmttacatatattggttgatgtctcatgtcaccctaaaatgtataaaaccaagctgtgcccctaccaccttgggcacatgttgtcaggacctcctgaggctgtgtcacaggtgcgtccttaaccttggcaaaatcaactttctaaattgaccgggacctgtctcagacatttgaggttcacaccctttaggaccagcaggaaggcagactgtcctggaaggaggaagaaagaccacttctccagccctgctccccacaccctaaagagagggccacccgcccacctgtcacccccctgtcagatctgcctcatgcctgagttgtttctaagtcacctctgggcccagggtaggagcagaagagctagtcatcttcagattcacctgtttcttccttggcacctagtggatgcttgataaatgatcatttataaaggaagggggctgg

SEQ ID NO: 831188 - DNA, 573 bp, Homo sapiens
ccaatcagacttttcaccgatatcaacctccatctccaagacttgccactatttatggtcttacaaaatagtcctgaattcactcttgtttaagttattatatttttcatgataaatgtagtgcagattattgaaaatgtaagaaataaagaaaaaaatccactcgcaacacaatctcaacataaccatttttggtatgttggcacatttttcccatcatttttcccagcatgtgtagtagttgttgttattgtgtagttttaacagctttatcgaggtataacttatacactacaaaatgcattcatttttagactaagtattaatgttttggtaaatttatagatttatatatccatcacccccaaaagttcactcctgccacttgtcagtcaatccctactcccgccccaagccccaggctaccactgttctgctttatttctctatagatgtgccatttctggcaatttcacaggagtggagtcatatgatatgtgtttcttatgtctgtcttctttcacttagcatgtttgaggtgcattcatgttayagcatataccagtagtctat

SEQ ID NO: 831189 - DNA, 636 bp, Homo sapiens
aggaaatgatgtttgaattacagtctaaagaataaagaggaggctgggcgcggtggcttatgcctgtaatcccagcactttgggaggctgaartgggcggatcacttgaggccaggagttcaagaccagcctggccaccatggtgaaaccccttatctactaaaaatacaaaaattagccaggcatggtgacacatgactgtaatctcagctacttgggaggctgaggcatgagacttgcttgaaccaaggatgtggaagttgcagtgagctaagattgcaccactgcactccagcccaggcaatagaacgagattctgtctcaaaaaaataaattaaataataaataaataaataaataaataaataaataaataaaataaaaaataaataaagaggagtaattaggtaatggtgtgtgtgtgtatatatttgtgtgtgtgcacgtgcgcactagcgcttaccgctgtggaggagggaggatattccagagagagaactgagtgtatgcaaaggcctggaaggagagagatgagaaggggcaagtgtggctggagaggtgggtaaaggcagggaggacccaggtcactcagggccttaaaggccacggtgaggattctggctgagggacaatgaa

SEQ ID NO: 831190 - DNA, 419 bp, Homo sapiens
aataaataagatctagtatttgatagcacawcagggtgactgcagttagcaataatctgttgtatgttttagaataactaagggagtacaactggaatgtttgtaacacaaagaaataatgaatgtttgaggtgatggatatttcctttatcctgatgtgattattacatgttataacctgtatcaaaatatctcaagtacctcataaatatgtatgcctactatgtacccattaaaaaccaaaaataaaaaaaagagaaacactgacctcccctgaaaagagaattctggcagcagactcccttcagcatcaactcttccttcagcctgcctgcctactctgcagattgtggacttggcagcctccacgatcatataaaaaaattccttaaaataaacttcttcctctagatagacag

SEQ ID NO: 831191 - DNA, 419 bp, Homo sapiens
aataaataagatctagtatttgatagcacaacagggtgactgcagttagcrataatctgttgtatgttttagaataactaagggagtacaactggaatgtttgtaacacaaagaaataatgaatgtttgaggtgatggatatttcctttatcctgatgtgattattacatgttataacctgtatcaaaatatctcaagtacctcataaatatgtatgcctactatgtacccattaaaaaccaaaaataaaaaaaagagaaacactgacctcccctgaaaagagaattctggcagcagactcccttcagcatcaactcttccttcagcctgcctgcctactctgcagattgtggacttggcagcctccacgatcatataaaaaaattccttaaaataaacttcttcctctagatagacag

SEQ ID NO: 831192 - DNA, 628 bp, Homo sapiens
aatacccctcccaacaatgacagaatatccatattcttttcagatgcctgtggaacatawagtaagatagagcatattcctgggccataaaataaatctcaacaattttaaaagaattgaaatcataaacattgtgtattatggacttaattatgtcccccctcccccgtgccaaaattcatatgttgaagccctaaccccttagtgtgattttttgaagacggagcctataaaaaggtaattacggttaaatgaagtgaatatggtgaggtgaataaggttacatgaggtgaatatggtggagccctaattcaaaatggcttatgtcttgatgagaagagtaagagacaccagggatatacactcacagagcaaaggccatgtgagggcatagtgagaagatctgccagcaccttgatcttggacgtgtggcctccaaaactgtgaaaaaaaaaataatttctgtggtttaagtcaactagcctatggtactttgttgcggccatgctagaaatcaataatagaaagaaacaggaaaatctccaaacacttgttaactaaacaacacagagttagctctctatatctatgggttctgcatccatggattcaaccaaccacagataga

SEQ ID NO: 831193 - DNA, 591 bp, Homo sapiens
catgtggaagggaaggtagaggaagaaaagaaacagagggagaaggccaatgtctctgtcttttcaagtgaaacacgctcatttagattcatatgcrtgaaagcatataatggtaatattatggtaaaatgctatgagtgtgagcatgtatgtgtacatgaggctacacttgggatgccatgcaagtgtatgtgcagcctttgctcagttattccaggccctcaacttcttctccaaaatggaagggtgtcaagggactcaatagcaaatggattgggctctatgttctctgtcagacctgtgtggctttgctacatatccaggctgagaagatatccttttccatattcccccaaaccctctgttatttgactgtcctgttgccaaaattctgagggtatctgcaatgtatttccaactttgttataaaggaatttcagtccctgagatatcctggtagctaaccatttgacacagctattttattaacctagtccttgcagcttcctggagggatgccggaacagggaaaatgatggtatctgcttgaaaaacatgaaaattaatggggactatatccgaatgaactta

SEQ ID NO: 831194 - DNA, 591 bp, Homo sapiens
catgtggaagggaaggtagaggaagaaaagaaacagagggagaaggccaatgtctctgtcttttcaagtgaaacacgctcatttagattcatatgcgtgaaagcatataatggtaatattatggtaaaatgctatgagtgtgagcatgtatgtgtacatgaggctacacttgggatgccatgcaagtgtatgtgcagcctttgctcagttattccaggccctcaacttcttctccaaaatggaagggtgtcaagggactcaatagcaaatggattgggctctatgttctctgtcagacctgtgtggctttgctacatatccaggctgagaagatatccttttccatattcccccaaaccctctgttatttgactgtcctgttgccaaaattctgagggtatctgcaatgtatttccaactttgttataaaggaatttcagtccctgagatatcctggtagctaaccatttgacacagctattttattaacctagtccttgcagcttcctggarggatgccggaacagggaaaatgatggtatctgcttgaaaaacatgaaaattaatggggactatatccgaatgaactta

SEQ ID NO: 831195 - DNA, 608 bp, Homo sapiens
tcttttatcatatgcatagctatttttgcctacttgggattcaaagatgcagtggggaccatatacatgaggctgatcattttagaaaatgaatcataaaatagttgcacatgaaataaagtagggagtgaagagtcctacaagtcctgtagtaattattaaagagcaattagtctctttataaatcagttcatcaaggaagtcttttaaaagtcaagctgcttgaatataatgatcacttatttaattgacgtaaataaaggaaggaatgaaatttaaatttaaaatgtagataccttaggtggtgaagagtaagagagggggaagattattgattgtcagaatttcaattcatatacattgtccccttccaaccaccacaactgaattctgagacattttggggaatatattagaaattagtggggcaagttcaccagaaaccttttggcatagggtcttaggattgtacttggaaggcacttaccctgaaaataaaagatacctgaaccaatatattaaatgattaagaaattattttwaaatagaacacagtaactgactctcagctttaacttttgtttcaggcatccttactcctgaaccat

SEQ ID NO: 831196 - DNA, 523 bp, Homo sapiens
accttcagggctctcttgccttttctgtttacttcactctgttgcagactagcttcttccacgtggtgagagatgtggctggtgttgagcttacgtctcagaaatgccaacwctggggccagctcttcatcagcgcctgtttgaaaaatcctcatgaaaaactgtgattggtccacttcaagcctggaccaattaactgtggcctggggatggagttaggtaggaaaatggttcattctgaggtggtgctgtccctgagtggggcagaactattcctgcgatgaggggagaatggacactgttcagatggttccatgagtgttcactacacaagtagacaagactggatatagttacagatgtcatatgttaactgactcagtcaagattttgaatttggaaaatttgactctctgattagctccaatatacagtcatacagcctgaactatataaaatccatatggttaagggcttgccccataccattctgtctactgtttatgacttgcttcccacccta

SEQ ID NO: 831197 - DNA, 614 bp, Homo sapiens
atttttgaccggggaagctaaacatgacttttatttttatgttattctatatcttctaactttcctacaatgataatgtatacaattagaaaaattctgttattaaattacttgtaaaataatgtattattctagcattatagcaagagttaatttttttctttgttatgtgaaaaactgaaaaattcaaaacgatgtgtttattccatgacatgcagtagaacaaaatgttttttctttaacttttcaatgtcaggataaaaaatctataaccaatagtattaaactatcagttgtatcaaaatttaaataaaaatatattcatactcattcaaggtagtcttattttaaaataaattagcatctattttaagtaatgaagataaatacattgcaataaaattattttattttaaagtaaatataactttgccagattttaatcaattaacagcagtttagagatatagatatacatatayatatatgtgtagaatatatactttttttaaacaggaaggcatactttatgatatataatctttttaccacaaactatatacacttctcagatattaaatcaaactaatatactaggaagacactactacttg

SEQ ID NO: 831198 - DNA, 614 bp, Homo sapiens
tatttattattttctatgaaaatcaaaataaaaccaccgaatcacacagacaaacaagcragcacatgttagagcacttgaatcctaagaaaaagttgctgggtggccgatttcagtatgagaagtttctaacatacccttttataataaatttatatctaatattgcaaattctacaaagcaagtgtgggaacaaatttgttgagtttttaaagttgaaatttggcaaaaatgtacttaattaaaatgaaaagtatccatcaggagctttgaaatgtataaattaattcacatttgaagagataaaccaactgctcggggcacttccattagagtgatccaaaattgatgcacctcacagaatagatattgcttctttttttcttcctggaaggatcatatataatattttaaatttctataccatccttcctccaggcagtataaagtacttcataaaccttatgttgatgatgttaacatacttgtgagactaaataaatggtaagcaacatgctccccagcttataaacaaatcaaaagctcagagaggaacagaattttatttccaagatattttgattcgtttctcttttttccctcacttagaataa

SEQ ID NO: 831199 - DNA, 558 bp, Homo sapiens
ccagagtgtctatctaaatcatcaattctcctttactttaataaatgtcctcccattttcccccagccaagaaggaaagctcargcagcatgtatcatctaagtgactcaccagccaaacttgagcagatggaggtagcccccaaatctagttgaaccaattctattctctcttccagagcttcagaattgtgatttaaaggtgacagctcatctgctctggtggctgaagctggactttgccaatcggggagccacaggatgtccttagtctttttgagtcaactaaggagtccccaaatctgattttcagggagagggaaagaagcagaggtgccaatgggagcaaggattggaaactaagcatgcatgctgggttactgctcacattccagatctttatttctgatttccccatggtctaggagtgacattcctggccttgggctttctcaggaattcttgtattcttataataatttccttatttttgcctaatctagcacagggtgatttctatttgttacaagcaaaatggccttatcaaattaatacactg

SEQ ID NO: 831200 - DNA, 654 bp, Homo sapiens
gaaatctctgcagaacaaattaccagtttcttcaaccaataaattgcacaggaaatttgtcaatggacatatcaaccaaatgcaatatgcataccttgttaggatagtgattggaataaataatttaaaaaattagaataatgtagaatatttaagtcctgacaggataattgacataaaagaaaactattacataaatggcctgatggagctgaaaaacacaacacgagaacttcacaatgcaaccacaagtatcaacagctgaatagaccaagcaaagggaagaatttcagagcctgaagattatcttgctgaaataagacaggcagacaagattagagaataaagaaaaaaaaggaatgaacaaaacctccgagaactatgggattgtgtaaaaagaccaaacctacgactgactggggtacctgaaagagacgaggagaatggaaccaagttggaaaatgtacttcaggatatcatccaggagaactttcccaacctagcaagacaggccaacattcaaattcaggaaatacagagaacaccactaagatactacatgacaacatcaacccaaaacacrtaattgtcagattctctaaggttgaaatgaaggaaaaagtgttaacggcagccagagagaaaggccaggtt

SEQ ID NO: 831201 - DNA, 526 bp, Homo sapiens
aatttagttgctaaatttaggttttatttcaaacttaggagattttattcctaattttacgtcactataacaataactaaaaatactaaaaagttcaaatgctacgtttgcattttttatttttcttgaattcaagaagaaaaaacagcatataattaatcacattatttctagttatgtgttttacaattctatgttactcataaatcgtgaccatttttgttttcagttatgatagccacttagttagactcaaataatgttttctaatagtcttgtctaaataattcacaaacaggatccacaagttccaaaatgtaatattttatttgattaaccagtaatttttagtcctcatttttgcttggacataactttgtcaagaatattataggactatatacatttcttactatctatattcacttcaaaattttagctaatatagatttcaagttcttgtttcttgcagaatctcccaccccaamcccattataaaaaggtttgtttggaaaaagaaatattt

SEQ ID NO: 831202 - DNA, 609 bp, Homo sapiens
aaacaataaatgaatatatatatagactatatatatagtctatatatatatagtctctctatatatatatatatatagtctctctctctgtatatagtctctctctctatatatacacatagtcaaggggttgaagtgaaattagcaatgactctaaaggcaaaggcagaatttgggktaatttctttttataagagaaaactaaattattatatatgatgccacatcaactcttcaattacatttatatttgaatgaaaaaatctggttttctaaacgcatattaagtaattttaaagttctttaatgtcatttttaggacattaaacattatgagaaattctaacaaataacggtttctaaaaaataattcctaagccttatagtcgatttcttcagttgtaataaaacgtttctctaaaaagtatgtatttgtgtttttaatgtaaagtataagcatgaaagatttgaaaagtctaaaggaactttgagatcaaagctttgtttataggatttataatactcagttgaggataagaattacagttacattactatggtactattgtacagttgtacatactaatattaatttatatgatgataact

SEQ ID NO: 831203 - DNA, 656 bp, Homo sapiens
tgcatttaattcagttttttattctgtgtgtgtgtgtgtgtgtgtgtgtgtgtgtgtgtatgtgtgtgtgtgtcttttttggtaagaataacctacttttaatttcactgtaaaargcacagatcatggcatttggggcatttactaaatactgtgctactggctattttcctttctctatgtgaatgtgacaacattgcattagctggacacagaatgacagtattaaatgttaaagacaacacagtgatatcacaggacaagcaagcttggacataaaaaagagagaaagaaggaaaaacccaatacaattctagagatcataaaactatgtagctctcaaaaatgaaatgtaaagtcatgaatgcgaaaaagacacatattagaaatataagtgaaatccccatccctttttttcagtccaaaactatatttacaaaaaatttatcccagcgtaacacatcccacacatacatttatgtaaaattttgttaaactatatatttccctatcaaatgaataacaaagtgttccactgtttgaaaacaacactggggaaagtcaaataaaatattggattactatttttgatcaaaagtatatttttggaaatgcaaataaatgtgatatatttataattgtggaaaatattgtgg

SEQ ID NO: 831204 - DNA, 591 bp, Homo sapiens
tgaaagtgattcagagagcagcacrgttgctactcccatcacatacccaacaaggcaaaggtgttttctctttggtctcagaggaagagggccacctcctgggtttcagcagggcagaatgccactgcccagtacctcaggggcagggctgcccaggccacagggatggggcttctgtgcagagtaggggaggtgacgctattaccccagtggacccaaaaggcagcgcatcagaccaaagaggattatgcgtgagccttaatatctaaggaaatttgccttgttaggcaaacagggctggtgtcctttttagttggtaaagagacaagagctctctcttacagagaatgatcatgtgaggatacagcaataaggtgctttctacaaaccaaggagagagagagaggcctcaccagaaaccaaccttgctggcaccttaatcttggacttccaaactccagagctgtgagaaactaaatttctgttgtttaagctacacagtctgtgatgttttgttatagcagcttcaggcagactaacacacatacataaatatgcagactgatacatatgtatgtttatatatttcta

SEQ ID NO: 831205 - DNA, 638 bp, Homo sapiens
ctaacatactgaatggtgaaaagctgaaagcctttcttctaaatactgaaacaagataaggatgcccactttcaccacttctattcaacataatactggaraccctagccagagcaatcacgcaaaagacagaaataaaaagcatccaaatcagaaaaaaaggaaatcacgttgtttctcttcagatgaattgatcttaaatcttaaaaaacctaaacgctctaccaaaaaactcttggatctgataaatacactcaataaagtcgcaggatacaaaatcaacatataaaaatcagtagtatttgtatacaccaataatgagttagctgagaattaagtcaagaaggcaatctcagctgggcacatggcttatacctgcaatcctggctagtaagaaggttgaagcggcaggattgcttgaggctaggggttcaagaccagcctgagcaacatagtaagacccccccatgtattaaaaaaaattgagaaaacaaaaagtaaataaaaatttaaaagaatgtaatcctatttacaatagccataaaaaattacttgggaatatatttaaccaaggaggtgaaagacatctataaaacacttctgaaaaacattaaagaggaggcaagcaaatggaaaaa

SEQ ID NO: 831206 - DNA, 613 bp, Homo sapiens
tcacattcttcaagataacataataatgatgcttgtttcatgaaagaagggattaaaagaagactgaagatcacttagtacagtgcctgacatgtaacaaatgctcawtaaatgttattattattattataaaatcaatcatatgtgcaacttgatgaagccctgggggatgaaaaaggggggctcattggcagacaatttaagcagcttggaaacgtatgttggcatacctgtgagcacatatgataatattgcataatgaatcctctaagttccattctattgtcaaaaaaatttgtttcagaaatggagctacaacttattccagagttagacttttgtggccatggtgaacacgatccttttaaatagagagaagggcctgggtaagtttaaactgaattaggttctcagttctcccaggctttgactttgtcatctgtcacttccctctcaaagggctggcaaagcccagggcagttcaggattctctcatctgaagttctgtccgtcgattctgaggggagtctggggctgctgacagtagatggcctgcctctcacatctcactattctttgatctcacagttacaattgtgttgcttttggtttt

SEQ ID NO: 831207 - DNA, 613 bp, Homo sapiens
tcacattcttcaagataacataataatgatgcttgtttcatgaaagaagggattaaaagaagactgaagatcacttagtacagtgcctgacatgtaacaaatgctcattaaatgttattattattattataaaatcaatcatatgtgcaacttgatgaagccctgggggatgaaaaaggggggctcattggcagacaatttaagcagcttggaaacgtatgttggcatacctgtgagcacatatgataatattgcataatgaatcctctaagttccattctattgtcaaaaaaatttgtttcagaaatggagctacaacttattccagagttagacttttgtggccatggtgaacacgatccttttaaatagagagaagggcctgggtaagtttaaactgaattaggttctcagttctcccaggctttgactttgtcatctgtcacttccctctcaaagggctggcaaagcccagggcagttcaggattctctcatctgaagttctgtccgtcgattctgaggggagtctggggctgctgacagtagatgrcctgcctctcacatctcactattctttgatctcacagttacaattgtgttgcttttggtttt

SEQ ID NO: 831208 - DNA, 576 bp, Homo sapiens
attagtgatgttgagcatcttttcatatacctattggtcatttgtatgtcttcattagagaaatgtctattcaagtccttttgcccatttctaacaagattatttcttttggttttgttttggttttgctatgggattgtagctcctcatgtattttttaaaattttttccccacccctccttatgtattttagatatgaacctattatcagatatgtggtttgcaaatatttctcccactccctaggttgtggtttcactctgctcattgttttctatgctgtacagaagtttttactttgatatagtcccacttgttcatttttgcttttgttgcctgtgcctttagtgtcatatccaagaaatcattgtcaagaccaatgttctgaaaattttttcctatgtttttgcctatgagttttacagttccaggtcttatatttcagtctctaattcattttgagttgtttttagtgtatggtgtgagataagggtctaatttcattwttttgcatagttttgccagcaccatttgttgaagagactatcctttctccattgcatattcttagcacc

SEQ ID NO: 831209 - DNA, 613 bp, Homo sapiens
tcaagaaataaaatgctcttattttcattttctcttcacagtgagtttgtattaacatgcagcctaatctaccaagtttgagaaataattaaatttagttaaataatgtttacaattatttgaacatttaaatggtgactttttgatcctctgttagcatcatatgtcatatatttttttttaacccaaagaaaaataatttaaatggagcttgagtcatgtaaagcatatagctgggaaaccttatttgtctgaactgtgatgaaggaagccaaggaagttatttcaaccaagtctaatcagtttccccagggttgtccattgaatagttcccagaggtgtcattcacttactagctctaagaatggcacccctttgagttatgcagtacacagactgcagtcctatgtggtggccctgattccttctagcctactactgtccggatgctggcttaacgaaccaatccctcagtatctactccacattctgcaaagcaaaattctcattcagaggctacctgccattataaagtcaaattagaacattgttccattttgcyagacattgtattatctattccagaactcccatttatgaataagaataatat

SEQ ID NO: 831210 - DNA, 484 bp, Homo sapiens
agagttactggattctggagtcacaggcttggaatcagataagacctgggaaaccttattctatagataaggaaactgaggcccagaaraagaaaatgactcctccagagtcacagttaggggtggcattggagttttaaaaaatcctcaaatgtttatcacaccccacactatgtcaggtcctaggctagacattcaacgtgtgttaactcatttaagcatcactgtttcattcctccctttttgctttgggatgggaatccagggttgggaaatggaaggatcaggatctcggaatctgggaaggattttcgtgcatttatgcttgaacagaaaatgagctataaatattatataaatgatcacagtctgttccctggtctcgccaaccgttctcagcagtagagaaagcaacaagctctttcctcatggcctaggggaagaccttggtttcctgaactccagacctattccatgtcattaa

SEQ ID NO: 831211 - DNA, 512 bp, Homo sapiens
gccaggcgcagtggtgcacacctgtaatcccagcactttgggaagctgaggygagtggatcacttaaggtcaggagttcgagaccagcctggccaacatggtgaaaccccatctccattaaaaacacaaaaattagctgggtgtggtggcaagtgcctgtagtctcagctactcaggaggctgaggcaggaaaatcacttgaacccgggaagtggggttgcagtaggtcaagatcatgtcattgcacttcaacctgggcaacagagcgagactccgtctcaaaaaaataaaaaataaaaaataaggctgggcatggtggctcatgcctgtaatcccagcactttgggaggctgaggtgggcggattacttgaggtcaggagttcgagaccagcctggccaacatggtgaaaccctgtctctacaaaaatacaaaaacatatccaggcgtggctggcgggcgcctttaatcccagctacttgggagggtaaggcaggagaatcacttgaaccc

SEQ ID NO: 831212 - DNA, 631 bp, Homo sapiens
gagtggaggcaattctcactgagcagacctaggtacctgtcgaactgcaggatgtgagtggcgtggtgatcaaacccctgctcccgggcmaggaagacgtcagctaccttctgctggctctccctgcagccaggaatggggatgggacagtgagaactcagccttgtaaccaacgcagggttagaagcagggggcctggagtcacatccctgggtgcagatcccagctcaacccttgcacagttgttttactttgagcaaatgacttaacacttcggagttcggctttcccatcaatcaaatggagatactatttcatatggtggtgtttttatccgtctccattcccccagtgcaacaaaagtggaacccgggggtccagggactgctcaccaatttgacagcctttcctccagctcctccaggatgccttgatgaaggtcgtggatggctgggagttcactcaggccctgcctcagctcctcccgggccaatgtgtctctgccttcatggtccatgtcatccaaggccctcatgacagctccatggaaatcctgaaacaccaaaaggtctgttacccacaggttgataggactgagcacaagtcctccttggcagatttcccctggggc

SEQ ID NO: 831213 - DNA, 596 bp, Homo sapiens
ccttacaaagaagaaatcttgtaatgacaagggtatacatttagarcttctttccaactaaaccctgcctgccatcttttactgaattactatgttgtagggtgatatgtttgacagatatctaaagaaaatcagaaagctgcacaatgtccacatttatgaagctgataagttatgaatacatatgatgaatctatatggtgaagttcattagtctccctccctcatgcgtccttttccagaaccttctgtctctctttgtcacctccatccacaaggtataacagagacaaacatgttacgttgtaactcagatcttaatttggggtgattatttcaaggttagctaatgaagtaggactttttttccttgggacaaagaaaagaggacattcttactattcagagctgtaaaattccaagatgttggctgtaatgttttccacatgtggcaaaagctggtctgtagtgacagaaaaggttaatcctgacaattttgttgtgtgtggttgcaatttcttttttctgggatcaagtcatattcccttcttgatttccctgaaacatctcagtgttctcattaataataaatcatc

SEQ ID NO: 831214 - DNA, 563 bp, Homo sapiens
tgaagtgtgataactattttgatagaggaagtagaatgctgtgggaatagagaaaagaatttctaatctagacaagaaaaaaaaaaaaaacagagaattcttccaaatgagcagaagagagccagggaaggaagaaaggggcatgtgcaattagtcaacaaaatcacagcccataacctaactctgattggttcacaaatcagccaactgcttctattaacttcttcccccagatatccacttggttcactccttaatttcacttgggtctttactcagatgtcacctttttactgaggtctttcctcaccaccctatttaaattacactacacctccaacactaccaatttctctccccaacattcacctaactacatattttgactgttgtttattttttgtctattttctttcatacaaatagatgctcccttagaacaatttttttctgttattttcactgctatatcttaagcatctaagacagtatttgcaacataacagkctcttcgtaaatacatttgggcagtccataaatacttgctgccactagctgatgaa

SEQ ID NO: 831215 - DNA, 617 bp, Homo sapiens
gaggatcctgggggctgagaccttttcctggctctgggtctccttatctttgctctctgcgaggtcataagccatgttcatagtgagcagaaggggattcttcttcaagccatggacccaagagcggacagcccaaggggatcttcacccctcccaacttctgggagagccgctggaacagagcgagccaaacattcacacagccatgtccagatgccctgtcctgggtccttaatgcatctccgagtccactgtatccattcgtcccttgggctcagtcacgtgcacttgggcttcctcaacagacaatagactgctggggtgggagggtgaggaggagacctggagcctccctgtgggcccgaggtccctttagccgataatagggagggattcctaaggggggtacaggatgtagcgcccagataagacttctgcggaacaataggaggaactgaagaagggagacccaccctcactgcaccccaccccccgggctttggggtcgtggactgggrgaccagaggatcatggggaggggtgccgaagattcttgtgaatgggggtggaggatcatggcaaacagcaggattctggagttagaacctttatatttc

SEQ ID NO: 831216 - DNA, 604 bp, Homo sapiens
gaaaagaaacatcagggctaccgaggttagtcctgcacactctctgccccaggcccggggcttctccacctggcacctaagaattcctcctgaacaatgtttacctctcatcgacaggtggaaatgagctgggacagtttcaaccgaggtgatgtcttcttgctggaccttgggaaagtcatcatccaatggaatggcccagagagcaacagtggggagcgcctgaaggtatggcttcctagccttagcactttctcaagttcctctttcttcttccctccatgctggctcttccccaagaatcaaggtggagccctgcctttgagtagaatctgtcttggagacaggccaagtgtgtgagtttgtgactcaccctggactcctcagcatccaagtaactcctgtgtctgggatctaggctgttctccccaaagacatcaggcagaaaggggtcccagaggagctgagggcttccttgggcttctttgacaggctatgcttctggcaaaggatattcgagacagggagcgagggggccgtgctraaataggagtgatcgagggagacaaggaggcagccagcccagagctgatgaaggtccttc

SEQ ID NO: 831217 - DNA, 685 bp, Homo sapiens
tggtcaaaacttgttgtgggaggagttcaggtttgggaaagatggtagatgaagataatgtgacacttctctatctacaaagacttagaaaatgcttcaaaatgtaataaaatgaaatgtttaaatgcagaatgaactcacaagcaagaagaggaacacccaagctgtctgaaataaaggaagaactaaaacaagaatcagaaacacataagcgaatgggtcaggaaggccagagtgtggtgaggtggggaccattttaatactatgtgccaggataggagatagagtctttaaaccaagggtaaggacagtgggaaccaagcctctggattaaagctgggtgtctccaagggtcgtagcctcagtggaaaggaagacttgagaagtcctaaatgacttgagacgaacacatggatttgccaaataacagacactgtgagtcaccatttctataaattatttctaaagttatgatgtacattagacttgcagatgctactgtggtaaggggtgtgatatagaaacttgtctgtctctgcctgagatttgggtaggaatgcaatttttyccagagggaaaaaaaataaaaaacaggatagtgctaaggtggtcgatcatcttggtttgcccaggactgtccaagttttaagtctggaagtcttggatcctggaaactccctcagtt

SEQ ID NO: 831218 - DNA, 530 bp, Homo sapiens
gattctatatgcttaagaaagagttctgattcctttatttctcactacttgttttataaagataagtgggaataggtaactttttgctacagatgtagctatcagggcgacatctccggttgyagaggaacaaagagtagaagagaaagataagcaatctgttttatctctttacttcaatgccatcttataggggatttatactcttgggacagaacattggtcacaaaacctaagtttaactgagaaaataaagtgggaagtcaaacatttaaagcaaaaccaattctcagagaatgtggaaggcttcctgttggtgaagaaggaccaaggcgctggccgcaggcagttacctttgtaaaatggccgcccagtaagaacatcccctcggttagcaaagccagccccgcgggggcacagcgtctcgtattccttggtgccaggtttggggcactcctcacactcggtgccccaagccgccccgacagcacagcagcaggcatccatgcggaactttccaggaacggggt

SEQ ID NO: 831219 - DNA, 574 bp, Homo sapiens
atgttctgtaaatatctattaggcctttttgctctacagagcagataagtctgattttccattgttaattttctgtctggatgatatgtccaatgctgaaagtgggatgctaaaatctccagctactatygtgttggggtttatttctctctttagctgtaagaatatttgctttaggtatctgggtactccaatgttgggtacatttacaactgttatatcattttgctgaattgatccttttatcattatataataatctttgcctctttttatagtttttgtcttgatatctattttgtctgacataagtgtaactgttttatttttgctttctacttccaaaacacctgtctttttttgcttttctcctccaaggtatatcattttccatccatttctttacagtctttgtatatttttataggtgaaatgtgtttcccttgggcaacagattattgagccttggttttttaatttcaatagtttgggggtacaggtggtttctggttacatggataagttctttagtggtgatttctgagattatgatgcacccatcaccttagtagtg

SEQ ID NO: 831220 - DNA, 358 bp, Homo sapiens
tgccttcctctgggagggtccacagcagtcgtgcgacagccgctccctccccactgcagagcctctgaccttagatggagctttaggctggggagggtgcgtggtggccctgggggcgcctcaggatgctcttcccaggagccctgggcctggccccggccaggggaggggactgccagtgtgcagggctgaggcagtggtgggggcaccggtgtcagggcgcagggacgccctctggactttgcaaggcgcccgcccccagagtaggcggctggsccatggggttgagaagactgaggcgtgccacccaggcagggcttggggacgcagggctacgccacagggcagggctgccgag

SEQ ID NO: 831221 - DNA, 358 bp, Homo sapiens
tgccttcctctgggagggtccacagcagtcgtgcgacagccgctccctccccactgcagagcctctgaccttagatggagctttaggctggggagggtgcgtggtggccctgggggcgcctcaggatgctcttcccaggagccctgggcctggccccggccaggggaggggactgccagtgtgcagggctgaggcagtggtgggggcaccggtgtcagggcgcagggacgccctctggactttgcaaggcgcccgcccccagagtaggcggctggcccatggggttgagaagactgaggsgtgccacccaggcagggcttggggacgcagggctacgccacagggcagggctgccgag

SEQ ID NO: 831222 - DNA, 632 bp, Homo sapiens
gctcagcaaatcaggattatctgcaaaatacacaggaatgtatttagtatttccatgcacactttagaggctcggtttaaaacaaatctctttaatactgtagcttgtcactggttccatatgccatagctggacttttggcaaacgacaactttatgaaggcgctctttgctagaactcattaacttacaggaaaatgaaaaatgaacaccatggcatgacatgaatgccaaaatgatattttgtcatatcaaggaaattacatgttatcaggaacttgagtgggagaaagttgtcagaattcattgtatgctgtcagagtctacaggatgaacaattggtttcatcattaatctaagaaaaacacagcagttggtaaaaaataattacctaatctttaaaaaagtttaatgttcaaatctaactaaactcaaagaaaacaaaaaataaatttctttacacaaagaatcattttcttatggcagaatatatgcagagtgtgatgttaagtcacgctcggggaaaaataaakaataattgaaatcaaaatttagcatgagattcatacatgcaatttacatgtaactctcgtagatatcaaaatatattcaatagtttcaaaaacatcttaa

SEQ ID NO: 831223 - DNA, 553 bp, Homo sapiens
ccagttcaaagttccacagatctctagggcaggggcaaaaagctgctagtctctgctaaggtacaataagagtcacctttgctccagttcccaaaaagttcctgatctccatctgagatcacatcagcctggactttattgtttatatcactataagcattttggtcaaagccattcaacaagtttctaggaggttccaaactttcccacatcttcctgtcttccgagcactccaagtctccaggatgttccaaactttcccacattttttttatcttcttctgagccctccaaactgtttcaacttctgactgttacccgattccaaagtcacttccacatttttaagtatctttacagcactaccccgctctactggtatcaatttactgtgttagtctgttctcacactgctgataaagacatacccgagactgggtaatttataaaggaaaaaggtttaatggacttagtttcacatggctgggaaggcctyacaatcatgaaagaaggcaaaggaaaagcaaagtcacatattacatggcggcaggca

SEQ ID NO: 831224 - DNA, 611 bp, Homo sapiens
acacaggcaacaggcagaaaatgagaagtagaacacagctattgtgatttactatccagttatattttaaaaatagtattcctctctttttacttggaagattcattttttttgccgttgttaaaaggctttttgtctgacaattactgtttttaaatattcaaggtttaactccttgtcgtatctgaaaatcaaggaaatatcaacatatattctctctgctctagagaaatctgcattttacccagtttctgtaaagtgtgtgatatcttaccttatttgaaaggtcaccatttagcccaccaccgttttatatattctggaagaagattctggagttggagacacaggactttattcttcatggcatagcaagaagcatgagcttcattcacattggctcatctttccccaagtcctgcggggagcaatacagaatggtcctggaggaagctgtctacacacaattaacttgtgtcacaaccaaggtaccttgagttagaaaagccttagtgttataaaggaactgttggcaaacctgctcaaacgttgccttcaatgtgttattgyctccattactctggacagcaaaataccttctactccagaca

SEQ ID NO: 831225 - DNA, 620 bp, Homo sapiens
gcagagaaccatgatctctcctaaatggacaaagcaaggaactggcaactgaccctaatgaaatggtgatatgtgaactctctgaccaagaattcaaaatggcagttttaaggaaactcagtgatattcaggataacacagaaaagcaattcagaaacttatcagagaaatttaactaaatgattgaaataatcataataaaaagtcaaacagaaatcttggaactgagaaattcatttgccgaaatggaaaattcattagaggctctcagcagatcaggtcaaggagaagaaataatcaatgagctctatgacagaccatttgaaaataaatagtcagaagagaaaaaataatgaaaacaaatgaagattggctacaagatatagaaaattacctgaaaagatcaaaactaataattagtggtattcaagagggagttgagcaagagcaagggatagaaagcttattcaaaaaaataataacagaaaactttccaaaacttaagaaagggataaatatccagctttagaaaggtcagcaaacscaaaacagattcaatccaaatacaactactccaaggcatataacaatcaaattatcataagccaaagaaaaagaga

SEQ ID NO: 831226 - DNA, 601 bp, Homo sapiens
cttttcaaaactgcaaagtaacaataactagtattgctgtgcaccaaaagccatcctcaagggcaccaaaaacctcaaactgacaggtcactgaccacttgcctaatggggagtagtactaagggagttggtaagaaaacttcctgtgccctggcttgttcttgtggtcttagcaagtctctacatacacgaaagaaacacaggctaaacacagagaggaaataaaatatggctttctttaatgagagatgaccctactgcctgcttgactacagttcaaagcatccgaagtcgtaactggagcccagccaagctggaaagcccaaatcctctgtcccactaaagtgtgaactaaagcaggggagaggaagtctagcaatttgaggtcaaactgaggcacagaaagcctgatgccccaggctcctcccaagcactccttgggcctccctgctagacaaagcagaaggmtacagaatgctttaggccaggggttgactttttattttctataaagggctaggtagtaaatattctaggccgtgtgggacataccatctctgtggcaattactcaactttgccactgtagcatgaaagcagcc

SEQ ID NO: 831227 - DNA, 616 bp, Homo sapiens
atgggagggtgcaggttgttttcakttctagcaatgactggttgttgcccatggcatctaactcagtagaactaggggtggcgtattctatgatgcagagcagagtcccacgcagtaaggaactgtcacacaccctggctctccatgtctcacaacacgttcttgtgggtcaaagctctgtttataaatatctgagctgagaacatgactctctttcacacacaaacactaagtaaaccctttctggactgttctgttcccctgctccccagaatgcttacaggaaaactagttcaactctgggcacacactactggtttaataacaaacagaggaaaaacaagcagcctaccattagaaataaaatgaagtttgcagatttttaaaaaggaaagacttgttattgaagttcaaaactgtttacatgccttctagaaatttagtcacaccaaattggcaagaactgaaaatcaaaattttgaatctcaagtgagggcaagatagggaaatcagagagcatcactgccccgttagagatcctggacctaggaaaggatgatactgtgatttcactgctcaaggaaacataaaggacatctcctacccaatgagtggg

SEQ ID NO: 831228 - DNA, 540 bp, Homo sapiens
actcagtagaactaggggtggcgtattctatgatgcagagcagagtcccacgcagtaaggaactgtcacacaccctggctctccatgtctcacaacacgttcttgtgggtcaaagctctgtttataaatatctgagctgagaacatgactctctttcacacacaaacactaagtaaaccctttctggactgttctgttcccctgctccccagaatgcttacaggaaaactagttcaactctgggcacacactactggtttaataacaaacagaggaaaaacaagcagcctaccattagaaataaaatgaagtttgcagatttttaaaaaggaaagacttgttattgaagttcaaaactgtttacatgccttctagaaatttagtcacaccaaattggcaagaactgaaaatcaaaattttgaatctcaagtgagggcaagatagggaaatcagagagcatcactgccccgttagagatcctggamctaggaaaggatgatactgtgatttcactgctcaaggaaacataaaggacatctc

SEQ ID NO: 831229 - DNA, 591 bp, Homo sapiens
acctaatggcgcaaacagaaatgaaaaggtatgtrgggtggtggggctggaagtgggagttgccctttgggatccctcattttcaatgcatttggaagggagggtctgtgtttgttatgcagaaactttagaatgtagagtccctgtcttgttccccagcctgggtcctggagatctgaagttcatgctgtaaaatgcattaccacatcatgttgggaattcctggctcccaagggctcacagcatttggtcaccagtgaatcagcatgtttaaattatgtgcatctcagggttaaatgtttttcaactcagatgcatgaagtgactgatgagcccaaggtttggcaccctaccccacacccccttgtactaatttaggaacatgaaaaggatcccttagaagcctcagatgggatgtcagtttctcctcccctttcctattctctttgaattaaagctttaaatgacaaacttttcttccacccactgtctcatcagatctggaaattctgacttcccttcctggggtttcatctgtttgtaacaacttctccataatgtgacttactgtgaaaccaagcaaagaagtta

SEQ ID NO: 831230 - DNA, 585 bp, Homo sapiens
agttgaaatgaaggaaaaagtgttaagggcagccagagagaaaggttgggttacccacaaagggaagcccatgagactaacagtggctcgctcggcagaaactctacaagccagaagtgagtggtggccaatattcaacattcttaaagaaaagaattttcaacccagaatttcatatccagccaacctaagcttcataagtgaaggagaaataaaatactttaaagacaagcaaatgctgagagattttgtcaccaccaggcctgccttacaagagatcccaaaggaagcagtaaacatggaaaggaacaactggtaccagccacggcaaaaacatgccaaatcataaagaccatttatgctaggaagaaactgcatcaactaacaagcaaaataaccagccaacatcataatgacaggatcaaattcacacataacaatattaaccttaaatgtaaatgggctaaatgccccaattaaaagatacagactggcaaattggataaagagtcaagayccatcaatgtgctttattcaggagacccatctcatgtgcagagacacacataggctcaaaataaaggg

SEQ ID NO: 831231 - DNA, 588 bp, Homo sapiens
tatttttgcaaaatattattccattgtacgaatgtacctcattttgtttatccatttatttactgaagaatgtyggtgttccttccaatttttggcaattacaaataatgctgctataaaaattcatatgcaggattttgtacggacatattttcaacgcatttgggtcaatacctaggagtgtaatgctagatcatataaaggcatgctttattttaatgagtttccctttacagacagatattgtctgttgtacaaatggaaggtttttggtaaccctgtgttgagcaagtctaccactacaatatctccaacagctcatgctcactttgtgtctctctgtaacattttgataattttcacatttcaaaacttttcattattattatgtctgttatgttgatgtgtaatcacagatcagtgtaattgtttggaggaatcaagaactacatctatataaaacagcaaacttaaataataaatgttgtgtgtattttgactgttccaccaaccagctgttcccttgtctccctctccttaagcctccatagtccctgagatacaatattgaaataggccaattaataa

SEQ ID NO: 831232 - DNA, 639 bp, Homo sapiens
cttatttcctggatcccaagtctttttgtttttaatttactgtcwggttttgccaggttggaacagagcctcaagtagctactcaccagaagagatgaagtttctcatttcttacacatttaaattgtgtcctctttaccttcaaaattcacttttataatttggctgagaacagaattctagattgaacaccactcctctcagaatcttaagtctggcttccctgtcttctagcacccactacagtacatgagatatttattctgtcaagtctcattttatgtgtttttttcctaccttgttccatcatcattcctctaccatcaatagaaattttaacacattctctttcttttattgctttaaaatttcacaatggtaagttgaggtgtctttttaaaatcagctttggatatggtttgactctgtgtctgcacccgaatttcatctccaattgtaatccctatgtgttgagggagggatctgtaactcccagctattgagagacaaaagtgactggatcatgggagtggtttccccatgctcttcttgtgacagtgagtgagttctcacaagatctgatggttttataagtatttgaaagttcttcctttgctcttctctcccttgtttccctgt

SEQ ID NO: 831233 - DNA, 696 bp, Homo sapiens
tacctccttctgtgttccaagggttctagyctggctgccagaccgaagtccccaacttttagttccatggcttcattaataaaaaagttccctagacgataaacaaaacaaaatgtgaatccctttgaaaatgcgttctaaccaagtacacacacatccactttggagccaggcagccaattgttatatgaaagtcgcccattcaaaagcaagattgcagacacgagatcccaattaagaacattaatatgtaaaaaaaaacagagagagaaaaaagaactctaacacaaaactcagcttttggcgtcaatgacttacctagtttgagatctctgtgcaagatttcttgttcatgaaggtatttcagtccagacacaatctgcctgaggtagtatcgaacttctggctctgtcaacacctttcttgctttcaaaatatgagccattgactaagaagaggagaaggaaaaaagagaatctgtcaaaacagttatcaaaatcactggtttccctttgcaggatgagcaatgaaagttaactttgcagtgtaagtgctgccacagctaaaatcccagataaaatactctttgaataccatgttaattcggggtaagcaaatgttctcaaataggagttgacacttacccttctactgcagtattccaagagaatgtaaatgttttctttgtcctcgaag

SEQ ID NO: 831234 - DNA, 216 bp, Homo sapiens
agctctgttgactacagaaccaaagagaacactcaaatagaaaatgaaataattaatattctratttcttttcaaattatataagctagaaggtagtgaattctgttttatttgtaagtagttgttcaatatctaaccaactatgattacttgagagcagacaattacattcaaactcctttaaattcttttgtttttatagtgtagtgcattaag

SEQ ID NO: 831235 - DNA, 567 bp, Homo sapiens
cttctctggcctcagcactgctgaaggtactgggatacagtgccacatgagtcagaggaggttcctgcttccaaggaggctgagcctcagcttttggggtacatggtgtaacagacctgggatgaagggattggatatggcaaagaggaatgttccaggaaacaaacatcaaaattgttttaaggggaatgttggctgtagaacctatacctcttaaaatgtcagagatgccatagaacaaatattagtttttctatcatgcttctacctatagtttttcactacagcattgaaatatgcagagctcctatttaagtcaaaagctattgtataatcttttctgaatgaaggcagtaattactccttataatatggtttattataagaaactgataaaatgttagatctcaaaacaatatgcacaataaaatcctgatacaacatagttmatctatactttgggggtttctttcaattatcattataaaaaggtttcactctaacaagaagagcagattaatttgtaaaagaattagatatgctggtttagttcaataaagaaaaaca

SEQ ID NO: 831236 - DNA, 614 bp, Homo sapiens
gctccgtcccgggctgggggtgcccataggagaactcacccacaaccccgaaccctccgggcagagatggagcctggggcrcagaacagtgtggaccccacaggttccagagggttgggagcgattagacccctcgggatgaaatgtggatggagaaattggcagactgagattctaaacaagtcacaggcagcctcttttccagtgcgggagattatttgtagacactattacgaggtaaatggaagggaaatgagatagtctgccccccggggcctcatctgtccttccccagacaaagggcgaccagtgagggccgagtcttcggagctggaggagagagacagagacgaggggcaggtcagcttgccgggagacaggtgtggcagcagctgacggggctcagacgtggtgtcacgtaatctccatcttcatgacaggtccccagaaaatcacgatgaaaactttgcatcgggaaatctcaccatttatataaaccaaggcgaatgttgcatctaacaataaaatacaggaatgtatttgaatgtttttttgttttttttttcagttccaactaaggaggcatttgtgggtgctttattcacacccggatg

SEQ ID NO: 831237 - DNA, 307 bp, Homo sapiens
cgcagggccatccagccacggctcaggattctgcgcaacaaacaccttgaacccactgtaattagcaaaatgtaccttttaacccaatcctgagtcctgaagtgcaaatataaattccaattaacagccacatytacttggcaagctatgcttgcatgtatacatttttaaaaaattacttaagataaatgattactggaactcctcattagttttaagcagaactaaatgaatacagtattaaaaaaaattaacctgccttcttgaaaatattatactaacttcaaaataggagaggcttcgtgtt

SEQ ID NO: 831238 - DNA, 633 bp, Homo sapiens
ggggctccactgattggatcctggatcctcattcggtccccgttccccagccccagcacttaggttcccccatgttgcacacgtgggttgtctgggcatgctcaggttatatgaccttcagcctgggggtccacggcaactgaagaacaagtcacaactccattacacggatgttgaaccagattggccagatgtggctataagctgggcatggtgaatcctgcctcagccagaattatgtgcaaagttggaaatgaatgtgttgccatgggctgagcccacgtggctgccgggttctgggggacgtggacccattttgtgtacgtggctcatgcatcttgccaaaaggttcactggtgtggtttatcctcagcacatgtccagggaggccaagtgcagtcactccacagtgcttttctgagcctgcagagccattgccacacccgggaggcctggacacccgcagccctcatcaaatcagttctcacacctgggccttcattattctcagtctgtgtcccatgtgccacacaggtgggttgctrggagttcagctgcagacactcccgggtgcagtgttcaatatgagtgagggaaactgaaaaaggaaatgaagaaggggaaggagtagct

SEQ ID NO: 831239 - DNA, 565 bp, Homo sapiens
gattacgtttattgatttgcgtatgttaaacaagccttgcatcccagggatgaagcccacttgatcatggtggataagctttttgatgtgctgctggattccgtttgccagtattttattgaggatttttgcatygatgttcatcagggatattggtctaaaattctctttttttgttgtgtatttgccaggctttggtatcacgatgatactggcctcataaaatgagttgggaggattgcttcttttcctgttgattggaatagtgtcagaaggaatggtaccagctcctccttgtacctctggttagaattcagtataatattggctgtgggtttgtcataaatagctcttattattttgagatacgtcccatcaatacctagtttattgagagtttttagcatgaagggctgttgaattttgtcgaagatcttttctgcatctattgaagatcacatgaatgaaatgaagcgagaagagaagtttagagaaaaaagagtaaaaagaaacagacaaagcctccaagaaatatgggactatgtgaaaagaccaaatctacgtc

SEQ ID NO: 831240 - DNA, 455 bp, Homo sapiens
ccgcaatacggaacaatccagaggaggtttctgctgagttccacggggacttctactcccaaccaggtggacttactcctcctaaggaattgcaatctatttgctaactgctgaaaacccccttaacaaaactctctaggactgtgtaaaattgagccagaaggttacagagtattcctcctccagaaccctctgcctcaaggcaattgtgcttcgactcagcagaggggagccttctgtctccaggacacctggagtcctgctcctcctcaccatacctggaccagctgactctgctcaccgcctggctctcacctgtgcctgggcctgacccacggtgtctgaacacacctgttctgttttccaagggactgacctctgcaccagctrggaaccagactcagccagccgtcaaccatgctcctgcacatcccagttctcctgggcaggtggcc

SEQ ID NO: 831241 - DNA, 496 bp, Homo sapiens
atgggtacaatatccaggttctcaggtgtgtgctgcagtgcaagtccatggccagaagagatgtgggaaagcatttgaagcaaatggccattttgttcatagagtgaaaaaaaggaattaaaagttttccatgagtgtgtaaagaggggagcgtttgggcctacacctaatctacaatttctgtgtgttgatgaaaatctccaaaattcagtaagttctactgttgttagccgtaattctagagacatcgggggtttcatcctgatttgtggattcatacaactatattggtaattagtattctctaataatctttccatctctcaccatgacctcgcatctctgatcaaaacactcaagaacaacgcatcctgargactttatttaaaaacagtctccgagtcccagaataggctggccatactttcagtcccacccttccctggagggataactctatctaaggtgtcaagtgtcaagtgatgtcaccttgggg

SEQ ID NO: 831242 - DNA, 524 bp, Homo sapiens
aaatttcctaggagttggacactttaatgaactactcacagcagtgtcctgtcagtggccagtgtatcagagcaggcgaggggaaatttatctcgctggcacaatatgtagtgttgcttgtcaccagggcatggactaatttaaccctgcagtttcccgaattaacaaggcttgtcttcaaaccttgggacatggggtgctctgttccgatattattttattgtctgcctccctgtcctcccttgggacgcacgtgatttaatccacctggagccttggtaaccaagctgtgccctcccgacctttgtgactgatgtttcatatttcatgctggagcgggtgtttccctgctcacatgacacccctctgcctactggccaacctacccccctytttttttttaagaaggaagaataaacctttgacaagtgaactctttgtcatggaagctctaacacagtccgttccagggggcagtcattcaatctgtcaggccctaaatgtggatagatcattggctgatg

SEQ ID NO: 831243 - DNA, 262 bp, Homo sapiens
tttaatccatcttgagttgatttttgtatatggtataaggaagggatccagttttaatttttttggataygactagccagttctcccagcaccatttattaaataaggaatcctttccccattgctgtttttgtcagatttgtcaaagatcagttggttgtaggtgtgcagtcgtatctctgggttctctgttctgttctcttggtctatgtgtctgttcttgtgccagtaccatgctgtattgcttactgtggccttatag

SEQ ID NO: 831244 - DNA, 603 bp, Homo sapiens
cagacataataacaaacattatattgctcatatttcagracactgggtggaatatcaaatcttaatattgaagctagaatggaaacatgataaagattttctaaaacataaaagggacggcaatttgaaattttaataaagtttgaaataaactttattaaaattttatggcatcaaggaaatataaaaacgtgaaatattttaataattatttctaatgtaaatatgctttttcaaaaaatcataaaatatagagacttttatcttctccttattagtcgagatacagataagattctgatactgatagatgattagagtggtttattgttgaggaaaatcaagtccaagtgatggattgtagtgcaattaaaatgtcagagcagtaaattctgatgtgtgactagtaaaccacttgaatcatgcaccaacgtgatttattgctctttcttttctttttctcaaaacaagtgctactaactggccaagatttgcaaatctttaattactaattgtgtgccatagatctttgaggggctgacttttaagttaaaaaaaatgttcttaatctcagctgcaaagcactgagggagattagaaatt

SEQ ID NO: 831245 - DNA, 526 bp, Homo sapiens
ttaatagaagaataaatttaacaaaataagtgacatgacatctgtgccaaatttacaaaaaaacatagcagaaattaacgaagacctaaatagtgagggaaaaccatcatcatgaattgtaagatgccatatttttaaaatgttagttcctctcaaattgatctatagcttcaaaataataccaagtcaaaatcttagcatttttttgtagaaattgacaatctgattctaaaatatatatggaaatacaaaaatcatacaatatctaaagtgatcttgaaacaacaaatctggaggatttagactagctgttttctagccttactacaaagctacagtaatcaagagaatatggttttggcataagaattaatctacctattaacagaataaaacaatcmagaaataaacccatatttacatggtcatttagttttcaatgtagggaccaaagcaagctggtggggcaagaaaaggcttttcaataaatggtgctggagttactggaaatgtatatgaaaataat

SEQ ID NO: 831246 - DNA, 640 bp, Homo sapiens
attttcttctgcaatgctgcttaaccccaatacaaactcgacaatggttccaaatagccagaaaatggcactttcaatttttccatcctacaaggtccagataattcttgtcgtaaaatgagcaaatgttctgaggtgcctgacgtccaggcattcttttacacatcagtccatccttagtctctgttcccaatgcaacttgtcccaaatcttccttctttccctcccgcctgtcccctcagtctcaaccccaagcattgctgagtttctacggacccatctgacctctcccctcctccccaagctgctccttgccaggccgagccaggtccaattcttccccagcctccactcctccaccctgtaatctttctatcaccttccctcctcacacccggtctggcttacagtttctttctgtgactagccctcccccagttgcccaacaatttcctcttaaagatgtggctgaagctaaaggcataggcaaggttaatgctcctttttctttatcagacctctcccaaatcagttagagtttaggctctttttcatcaaatatgaaaaacccagcccarttcatggcccgtttggcagcaaccctgagatgccttaccgccctagacccagaagggccaga

SEQ ID NO: 831247 - DNA, 608 bp, Homo sapiens
catagattcaagttgccctgaatagacactctgattagcagcagttacagatggactttcaaggcaaaaaaggggkacagggagtggactgatacaaaattgtcaggatttctctttgctttacagaaataacactgattagttagctaatagctagacgttgttaagctatagggtatgggtcggagtgtccagtgtggcaccgttaggttaatttataagtacttgtggcagaagcaagcagcttcaagagatggagacagagctcaaagccgggaggagggcatgattgctatatcgttttaatgtctctttgggcctggccattaaaaggattgtgttcctcagataaaagttattttcttttctaactccccacttccttctcaaaccctgtccttacaattttaaggaaagtacattctcctctccacccacaaattcccctttcagctatagtccagtccaagtgctccttttttcttgactacattttgagcctagtgttggggggtgtgagtgggcctgatctagtccacagccctgggacccttgtggactttctgcccttctcccctgaaatttccagagcctggatccatgcagga

SEQ ID NO: 831248 - DNA, 609 bp, Homo sapiens
gaggttccacttctagtgattccatgacccagatagtgaagacatacccaacaggaagtttttcagcccttgccctactccctcccttttttttttttttttttttgagacggagtctcactccgtcgcccaggctgtagtgcaatggtgtgatctcaactcactgcaacctccgcctcccgagttcaagtgattctcctgcctcagcctcccaagtagctgggactacaagcgcacaccaccacgcccagctaatatttacatttttagtagagacaaggttttgccatgttggccaggctggtctcgaactcctgatctcaggtgatccacccaagttggcctcccaaaatactgggattataggcgtgagccaccatccctggcctacaccctccttttagagtccccaatctctatctttatgtctgtgtgtacccagcatttagctccccatttttcagcccttgccctaccccctccttttagagtcccctgtactatctttakgtctgtgtgtatccagcatttagctcccagttataagtgacagcatgcaaattttggttttctttttctgtgttaattcacttagaatggtggcctcca

SEQ ID NO: 831249 - DNA, 604 bp, Homo sapiens
cgactattaggattgttttttccatttctgtgaaaaatttcattggtattttgagggagaatctatagattgctttgggtactgtggtcattttaatgaccattaatttttttgatccatgagcatgggatgtctttccatttgtttgtgtcctcttcaatttttttcatccaaagttttgtagttttcccttacaaagggttttttttttttttttttttttgcgcctccttagttaaatttattccaaggtattttattttattttttgatagctattataagtattgtaagtgggattgtcttcctaatttctttttcagctagttcattattggtgtatagaaatactacagatttttataagtgaattttatatcctgcaactttactgaatctgtttatcagttataagaggtttttggtgaagtcttcagggttttctaaatgtaaggtcatgtcatctgcaaagacggacagttgcctyttatttctttctctcatctgattgctctggctaagatttcaagtactttgttaaatagtagtggtgaaagtaggcatccctgtcttgtaccagttctgagaggaaaggctttcagct

SEQ ID NO: 831250 - DNA, 532 bp, Homo sapiens
tacattgatatgtaactggtctcctccccatcgggaacactctctgctcacagcaacccacttgcaagtgaaggccctgggcctggctgtgttgaaacgcgtgaacgattgttctctcctgttgatttgtcctcactagctagagtgactcactggcttccagcagtggaaggcatggatgtattatgaggaataagaaaaaaaggagagaggcagtttaataataaaatagctttgataataagccttagtttctaatgcagaattgatccaatttccgaagcttctagactggaagcatcgtgaggccacggttgcatctgcctcgcctcctggtgtgtacccagtgatccagacgtgcctctgacacaggagtgtgtggtaaacatttgctgagtgactgaatgaatgaacagrtcatttacatgatccatgaaattgtgaaagaatagcctcaaaatagaacttaattgtttagcaatttcccttcgtaagcgtatcaaaatggcctccacagaattgcttaatatga

SEQ ID NO: 831251 - DNA, 532 bp, Homo sapiens
tacattgatatgtaactggtctcctccccatcgggaacactctctgctcacagcaacccacttgcaagtgaaggccctgggcctggctgtgttgaaacgcgtgaacgattgttctctcctgttgatttgtcctcactagctagagtgactcactggcttccagcagtggaaggcatggatgtattatgaggaataagaaaaaaaggagagaggcagtttaataataaaatagctttgataataagccttagtttctaatgcagaattgatccaatttccgaagcttctagactggaagcatcgtgaggccacggttgcatctgcctcgcctcctggtgtgtacccagtgatccagacgtgcctctgacacaggagtgtgtggtaaacatttgctgagtgactgaatgaatgaacagatcatttacatgatccatgmaattgtgaaagaatagcctcaaaatagaacttaattgtttagcaatttcccttcgtaagcgtatcaaaatggcctccacagaattgcttaatatga

SEQ ID NO: 831252 - DNA, 631 bp, Homo sapiens
ccggatggatcaaggagttttcttggcctcattccacttcccttccctggtggctcccaccctaargaatatgaccttaggagtccctgtgagcacctttgcaatactgctgctttccttagaggggggacctcctctctgggcagctgaggccaggaagcagaactccatcctacacagtaataaagagagtgtttcagcacagatggggagtctggagccctaggttgtatttctagctgagctgcttagagtcctcaggattagccacaagtcctttaacctccaggcatctcaaggctccacagagactgaaatcctttccctcccattttgtgcaaatggtgggaggataaattcagtcatgactgtttaatgcttctgtgccctccggagaaaagaaagaacaaaataccagggagagaaacttttttaatagcttgttggtggaagctgatctttgctgccactgtgccctggcttctaatcccacatctgactttggctcagggccatgagccacagtgcttggtttctgcagactcactgaacagcaaaccaaatggaaccatcaggcccgatggtgagaattgtgtgtctgacacacagatgaaggggaggcttcacaccg

SEQ ID NO: 831253 - DNA, 631 bp, Homo sapiens
ccggatggatcaaggagttttcttggcctcattccacttcccttccctggtggctcccaccctaagraatatgaccttaggagtccctgtgagcacctttgcaatactgctgctttccttagaggggggacctcctctctgggcagctgaggccaggaagcagaactccatcctacacagtaataaagagagtgtttcagcacagatggggagtctggagccctaggttgtatttctagctgagctgcttagagtcctcaggattagccacaagtcctttaacctccaggcatctcaaggctccacagagactgaaatcctttccctcccattttgtgcaaatggtgggaggataaattcagtcatgactgtttaatgcttctgtgccctccggagaaaagaaagaacaaaataccagggagagaaacttttttaatagcttgttggtggaagctgatctttgctgccactgtgccctggcttctaatcccacatctgactttggctcagggccatgagccacagtgcttggtttctgcagactcactgaacagcaaaccaaatggaaccatcaggcccgatggtgagaattgtgtgtctgacacacagatgaaggggaggcttcacaccg

SEQ ID NO: 831254 - DNA, 631 bp, Homo sapiens
ccggatggatcaaggagttttcttggcctcattccacttcccttccctggtggctcccaccctaaggaatatgaccttaggagtccctgtgagcacctttgcaatactgctgctttccttaraggggggacctcctctctgggcagctgaggccaggaagcagaactccatcctacacagtaataaagagagtgtttcagcacagatggggagtctggagccctaggttgtatttctagctgagctgcttagagtcctcaggattagccacaagtcctttaacctccaggcatctcaaggctccacagagactgaaatcctttccctcccattttgtgcaaatggtgggaggataaattcagtcatgactgtttaatgcttctgtgccctccggagaaaagaaagaacaaaataccagggagagaaacttttttaatagcttgttggtggaagctgatctttgctgccactgtgccctggcttctaatcccacatctgactttggctcagggccatgagccacagtgcttggtttctgcagactcactgaacagcaaaccaaatggaaccatcaggcccgatggtgagaattgtgtgtctgacacacagatgaaggggaggcttcacaccg

SEQ ID NO: 831255 - DNA, 642 bp, Homo sapiens
tcacggagtgatcagagtatggggttggtcaatgtacagtgctgaatactgtcccccgccaaaattcatgtctagccagaacctcagaatatgaccttacctaggcagggcgyggtggctcacgcctataatcccagcactccgggaggccgaggtgggtgggtcacctgaggtcaggagttcgaaaccagcctggccaacatggtgaaaccccatctttactaaaaatacaaaaattagctgggggtagtggcgtacacctgtttccagctactcaggaggctgaggcaggagaactgcttgaacccgggaggcggaggttgcagtgagctgagattgcaccactgcactccagcctggtgacagagtaaggttccgtctcgaaaaaaaaaaaagaatatgaccttacctagaaattgggtctttgcagatgtaattagttaagaagcagtcatacaggattaagtgagccctaaatccaatgactggtgtctttatgagacaaaggatacggagttttggacatagacacacttcacagacacacacagggacgaaggtcacaatgtgggcagagattgaattgatgcagctacaagccaggaaacgctgggggccaaaagaagttagaaaatttcccta

SEQ ID NO: 831256 - DNA, 628 bp, Homo sapiens
tgaaactgatagggaagagacatgaatcgcagagtgagaggctggcatggtggtgaaggcaggccccaggggcttggaggaggaccctgtgcttgtaggaagaagggtaggagggaggaagggagaaagcttccttaggcctttggttctcatcacatggagacaacctcattctgcagctggcctgttgaagagctaatgaggtgaagaaaattcttgggaaacgatggattaaaacaaatcgtggaaactttcaattgcaactggctttccaaagagttgggtgttttaaacatctaggtggccgtggatataaacacagggtttattttattgtttgagagtcttgtgttgaaaattaggagccctgggtttcgtgactgtgttttgatacctactttaggtcttattgtttaagctcaatgagccttactttctgtatgcaacctttttttataccttattaaaatatatttaaattataaaaggaagataacattacagaaagaggaggaaaacctatgctcttatcaccgaatgccccaactactttaaattattaggaattatctgccagtcttctgtgwtttgcatattactttttttttttttttttaccattgcaagg

SEQ ID NO: 831257 - DNA, 666 bp, Homo sapiens
ctttccgcttaatcatttctattatcatgtagtactatttttwaaaaaaagttgtttacattttcatctagaaagatccttaatctctttcctttagaaaagagttcttctaaagatcttacatttatggttttctgcaatcactctgctctcattctttcttgaacccctgacaaaaaggattttttgcctctatggcacaactaaagcaactattgttattgttaataatgacatcaatgatgctaaatctgattttcatttcaaggttctcatttgaaatgtcaacaaaattggaaatagttaataaatccttttttcttgaaatgcttcctagtttttctatgtccctaccacttccttcttttaactctttcttgttcaacttccaaaattataaatattgtaaaacatttctgtccttcttttcttctctgtctccacctgctccctgaatgattttatctagccttttggcttgaaattataatatgtggtaggacttaaatatataccactcatcttgaccttcaccaacaactgcttactcagcagtacaacttggatggcagagggaatctcaatcctctacctgtcctcctctgtactgctttctatttacacatccagtttctgtgtatgccctgaaaccagcttgctcacaac

SEQ ID NO: 831258 - DNA, 666 bp, Homo sapiens
ctttccgcttaatcatttctattatcatgtagtactatttttaaaaaaaagttgtttacattttcatckagaaagatccttaatctctttcctttagaaaagagttcttctaaagatcttacatttatggttttctgcaatcactctgctctcattctttcttgaacccctgacaaaaaggattttttgcctctatggcacaactaaagcaactattgttattgttaataatgacatcaatgatgctaaatctgattttcatttcaaggttctcatttgaaatgtcaacaaaattggaaatagttaataaatccttttttcttgaaatgcttcctagtttttctatgtccctaccacttccttcttttaactctttcttgttcaacttccaaaattataaatattgtaaaacatttctgtccttcttttcttctctgtctccacctgctccctgaatgattttatctagccttttggcttgaaattataatatgtggtaggacttaaatatataccactcatcttgaccttcaccaacaactgcttactcagcagtacaacttggatggcagagggaatctcaatcctctacctgtcctcctctgtactgctttctatttacacatccagtttctgtgtatgccctgaaaccagcttgctcacaac

SEQ ID NO: 831259 - DNA, 551 bp, Homo sapiens
aaaattgttttaattctcttttctggttattgattgctagtgtgtgaaaaccaaactgttattttcatgttgactttatattctataactttactaaattaattctattaattaacacttttgmaaagtcttaagattatctatatgtaagatcttgtcatctgcaaactgaaaattttacttctttctttgtaatttggatggctttgttgttttcagagacccaggaaagctgatgatgtagatgaagttcaaaggcagtctgctgaataaattttcttttgctcaggaagcccatcttttggttctattcaggcctgccattgattgagtaaggcccactcacattatggagagcaatctacttactcagggttcactaatttaaatgttaatctcatccaaaaacactgtccccattgacatgcaatattaaccatcacagcagagagtattgaaacctactactattatagtagcactgtctatttctcctttcaacctgtcagtgttttaattcatatatttaggagctctgatgtttggtgcac

SEQ ID NO: 831260 - DNA, 616 bp, Homo sapiens
gctggaataaatgctccctgtgaggacgctggctgaattcagcccagtattggtttctgctgtgacaggcagcactgagttacaatkcaagtctcatattcactgtactctccctctctcaactgcacagattcttttcctgcaccatgcagctatagccaagagatgggagaggggtgttgtaagcaattcgagatgtattttctgccctcttcagtgcctaaatataaagacaggtacggtgattgctcacgtgattttcagttcttataaaggtgcttttttattctttcatttctttttttaatatttttggtggttttttttttttttttttttttttttcgcggggatagttgttcaatttgttgttgctgatggccgggggaacggggagtgtattaccactggaggcttcttttcagccatcttgctctgcctccaggataaaatgtcttgtaaggctggtcaactagcaacaagtttcctcaatttttgtttgtccaaaaaagtcttcatttcttcttaaaatctgaagaatattttcaaagggtacgtaattctaatttggtgtgttttgtcaatgctttaaatattatatttcactatctttttg

SEQ ID NO: 831261 - DNA, 555 bp, Homo sapiens
gtctgatgccattatatagtcgcctgaatgacttaaaatttaaaaacatcttataatagcatatgygaatgagattgtagaaaaactgaaacttatgcttcgttgaatgtgtaaatttggacaaaaactttgaaaagctctttgatataatcaattaaaactgaatttacttctacttatgactcagaaattacattcctaagtataaacccaagagaaatgtatgtgtgtgtatactaaaagacaagtacaaggcatttcacagcaatcttatttataataaacttcaagtggaaactaactaaatgattagaaacagtagaatggataaattattctatattcacataatggaatattatataataactgtgaatgaacaaaccacatctttatacaagaatttcctactatcccatattgaatgaaagaagccaggcatagtgtagaaaatatataacttattctatatgaaattcacattcaagcaaaactaatttattgtgtaggtcacgacggtgattacttttgttttgcctgaacagtggttacttt

SEQ ID NO: 831262 - DNA, 588 bp, Homo sapiens
ttcaaattagcagtgtttctgctggggtggctgattaagactgtgcttcacacccatactgatccttttatcaaacagttgttgggcaatttgcaataygaataggctgcaatatggataggttgcatatgtataggctgagaaatctctaagtatttttctgctcatttttgtttaacaactccgtcttcaatatgtttctttcttcttacattttattataatcagtcaggagtaaccaagctgttccttcaatacttagcttagaaatctcagctaaatatctatctttatttcttgcaagttctatattccagaaagcactagaacatgaatacaattcagccaagttctttgccactttataacaaggattaccttttctcccttgtctaataacctttcttattcccatctaagacttcattacattgaccttcaccattcatatttctaccaacattctatacatgattgtttgtgttctttatgaaaatgggagcttcttctccaggtctctatgtcctgtctaacacccaccagaattgctttgaatagttcattcagggaaatattggttttatttag

SEQ ID NO: 831263 - DNA, 598 bp, Homo sapiens
gtcacttaacatcatgactccaaaaataataaaaagcaaaaatatccmggaatcagcatactaataaatctcataggtataaaaatattattcttttcaaagctaatgactaatactattcaaataagtatggtttttaaaacagaagtttgcctttctgaagccatttaatggatataacactacaaaaaaatacatccaagtcaacaggacatttttcagattttaaactttattaatatcagtacacaatcctgatttcccatttttaatttttttcaacttttattttaggttcaggggtaaatatgtaggtttaataggtaaattgtgtttcacagatgtttggtgtacaaattattttgtcacccaagtaataagcacagtactttatacgcagtttttccatcctcaccctcctcccagcttccaccttcatgtaggttccagtctaggttgttcccttctttatatcctaatgtactcaaagtttagctcccagttataagtgaaaacatttggaatttggttttctgttccagtgttagtttgcttaggatactggcctgctgccttttatgtccaaaacggtatttcc

SEQ ID NO: 831264 - DNA, 624 bp, Homo sapiens
cagaagaaggccctgcaacaggtccagtctgctgtgcaagttgctctgccacttgggccatatgagccagcagatccaatgatgcttgaggtgtcagtggcagatagagatgctgtttggagcctttggaaggcccccataggtgaatcacagaggaggcctctaggctttaggagcaaggccctgccatcttctgcagataactgctttccttttgagagacagctctttgactattactgggctttggtggaaactgaatgtttgactataagtcatcaattcaccatgagacctccactgcctatcatgaactgggtgctttatgacccatctagccatatactgggtcatgcacagaagcatttcatcatcaaatggaagtggtatatatgtgatcaggcttgagtaggtcctgaactcaaataagttacatgaggaagtggctcaaatgcccatggtctccactcctactaccctgccttctctctcccagcctacaccaatggccttaaggagagttccccattatcagytgacataggaagagaagactagggcctggttcacagatggttctgcacgatattcaggcatcacccgaaagtggacagctgcagcact

SEQ ID NO: 831265 - DNA, 615 bp, Homo sapiens
gagaatttcatttaatcttatggcttgggaaacttacttttaccctttgatatagtttgtatatttgtgccctacaaatctcatgttgaaatgtgatctccagtgttggaagtggggcctcgtgggaagtgtttgggtcatagaggaaagtcccccatgaatggcttggtgctgccctcatggtaatgagttaattctcctttttaattcccttgagatctggttgtttaaaagagtcttgaacctccctcctctctttctccttaccttgccatgtgacacacctgctccttcttctccttctgccataactggaaactttctgagatccttaccagaagcagttgatgttgccatgcttcttttacagcctgcagaaccattagccaaataaactttttttctttgtaagttacccagtctcaagtattcctttagagtaaggcaaaatggacccttgtaaatctcaaatttatatctctattcctgacctcacctgtacaactacctgctcwgtgtctttacttggatgtctaataatcattgtcaaagtattctgactaagccatgtttatgatctttcccttaaactgacacatctgcagtttgtcccct

SEQ ID NO: 831266 - DNA, 621 bp, Homo sapiens
tgttctcgcaagccccatgagaatgaagactggattttacatttgccctccaattcactgaaatgttttttcccaagaaagaaccccttctgcttttytcattagtagacctatattggaaaaaaaaaaaaaaaaactctgtgctcaattattattatcttttgaatttcatttaaaaaacccatggaaagttgttttctctcttgttacataaagtgcccacatgatattgcaattttggctcttggctcacatctcctaaaatatttatcacctggccctccaaagaaagtgtttgctgagcctggctttagatgctaatttaaacttagtaagtatcaactatgtttcagccaaaatagaaatatttacttttttgccatgtgaagacagggaagcacataaagtttgcacacttactattcttaacttatatactttgattacatacttaatatactcatatattgaagaggaaataaacattaaaatggtgaaaattaggaaaagaacactgaataacaaggaacgtcatgtactgatagcagtttctgagcgtaggagctcttgaatgactgcctatataaggaatgtgtttggtcaactagatatatcttgaac

SEQ ID NO: 831267 - DNA, 549 bp, Homo sapiens
agcagaatcttgttatctgctcattcaaccccttcatgtcacaaatgggacagggggagaaatggcatatctgaaatttacaaagaaaaaaatggcacatctgaamtttacataagaaatggcatatctgaaatttacaaacttacatttacatgagtggtgccacaaccaagatacattgactcacagcatcttttatgaatgaaggagaaaagagtgtctgctgtattctgtcacttccacccccagagtatcccagttttgtgtcaacctcataccttgaaactcagaagttcaggtggacattttggctgtgaacttagctttggccacaaggtccagaagccacttcgaggagccgttaaacacacaacatttgcaagcacaaagatctagatgtgacctgcagctcttcaatttgccaggtctgcaaacttcgccaagttactgatcctctctggacctctggttcctcatttgagaaagatagctcaccgtagttctacatttaaacgatagtttaatgaggtaaagtgcataaagtgcctg

SEQ ID NO: 831268 - DNA, 615 bp, Homo sapiens
atgttgcccaggctggagtgagagcctgggtctttttactggttggatgctttcatccagctccctccgtgggtgggtactaagggattctcaggtgtaatgcgctgagatattgtgaaatattaacttggtcttcattcccgtttcctggcatacaactcctggagtccttgggatcaccaaagtgctgtcttttatgtgtcttttgtctgataggttcagggtggggctggttaccagagtggccgaggcagaatcagagggttgggacttttagccccaggaggggagaggggctgaaggtcaagttgatccccagtggccaatggcttaatcaatcatgcctgtgtaatgaagcctccataagaagaaaagaggacaaagttcgagagcttttggatctctgaacacgtggtgattcctggagggtggcctgcccaggtgtcagaggctttggaaccagagtgactccatcaaatggrtgagactggaattggagggactggtttttcaagatacaggccacaaagaccctgctgataaaataaagtgcggtaaagaagccagccaaaatgcactaaaaccaagatggtgacaaaagtgacctctgattgt

SEQ ID NO: 831269 - DNA, 576 bp, Homo sapiens
aatggattttaaaaattagttcaccagaagtcagtttgcccaataccagttcatggaagttataaaaatttgtgaagttaccaaaaactagtcttgaaaaaactccttgaatatgtcccttctaacagctttttaatacatgttcaggatgaaaaaaactaaggctcttgggttggtttagtctttttattaagtggagcagaaaaaaatggacttcactcaaatgtacaggtatgctgtttggagtttattttgaacgatcagagaaggacatccctctttcagatgcttccaaagaactagcaagcacgtgtgtcttttatcaggcatcgtgcccttaaagggattcctcccagatagcagtgccagatactagggcttgactgtcagaaacaagcaacctacatttcaggtcatgcagatccacatttttcctagaaggtagctctacacactgtccaaccaggractgtcaaaatccacagattttagcatttcctatggggactttagcttatcctaaattctgaaatcttctttgttattttccatttgatatttagctttcttctatca

SEQ ID NO: 831270 - DNA, 610 bp, Homo sapiens
ttcaaaagattcccttgcctcagcctcctgagtagctgggattacaggcgccygctaccacacctggctaatttttgtatttttaggagagacaaggtttcaccatgttggccagactggtctcgaactcctgacctcaggtgatcctcccacctcggcctgtcaaagtgctcggattacaggcatgagccactgtgcctggccagactgccctttctcacagaaacaaagcaactagtagccagtaaattcacataaaattttcatagtggaaaaaatccccatgcaacaatcgctggtaagacagaatcattactaaatgaagcaaagagttatatctggtcttaggaagaaagataccaggcctagaatgtcatttacaaaatgaaaagaatctgagggtataagaagaaaagaaatttagatataaaatagaaaaggaaagcgaccttacagaaccagatgattcagagaactctttgtcagaaaaaagaaaaaaaaatgagagaacaatttgttaaagaatattatatttcttgctaaccaagacaaatgaaaacaacccaagcgcagcctagctaaattatgccatcagaattagtaactttcc

SEQ ID NO: 831271 - DNA, 578 bp, Homo sapiens
cagtaatcaaaacagtaactggcacaaggatatctaacagaccaatagaacagagcagagaatccrgaagaggtgtatggacactcggtttatgacaaatatggcactgaagagcaatggagaaaaatgatctcccccgcacagaacacaaaagcacacttaccacaaattactatctatgtagtaatttaaaaacatactaccaaactactcatggcttaaagaggaactcacaatggaaatcacaaaataattaaaactgaacaacaaaggtagtatcacacatgtgaagttcagctcaagccattcttaaatacaaatttacaaattcaatgaatttttaagactaaatttaaaaaaaaaacagttaagcccccaactaaaaaggctagaaaaagaacaacctaaagaatgaagaaggaaaaaataagagcagaggtaaatgaaaagataacaaaatcaataagagagacagacctacagcaaaactgatcttggaagaaatgagaaaaagtacatataatcaatattaggaacacaaaggagtatatacctataggtacaatgaagagctcttc

SEQ ID NO: 831272 - DNA, 578 bp, Homo sapiens
cagtaatcaaaacagtaactggcacaaggatatctaacagaccaatagaacagagcagagaatccggaagaggtgtatggacactcggtttatgacaaatatggcactgaagagcaatggagaaaaatgatctcccccgcacagaacacaaaagcacacttaccacaaattactatctatgtagtaatttaaaaacatactaccaaactactcatggcttaaagaggaactcacaatggaaatcacaaaataattaaaactgaacaacaaaggtagtatcacacatgtgaagttcagctcaagccattcttaaatacaaatttacaaattcaatgaatttttaagactaaatttaaaaaaaaaacagttaagcccccaactaaaaaggctagaaaaagaacaacctaaagaatgaagaaggaaaaaataagagcagaggtaaatgaaaagataacaaaatcartaagagagacagacctacagcaaaactgatcttggaagaaatgagaaaaagtacatataatcaatattaggaacacaaaggagtatatacctataggtacaatgaagagctcttc

SEQ ID NO: 831273 - DNA, 514 bp, Homo sapiens
tgtatggaagaagtaatatatgagcaatctattttctctgggtgaagacagcaatgggcatatttcacttccattgttaattggggatagtattgctctaggccaagacactaagtcagctaagcgctgactaatcgaggaagtgtttgcaggtgcactgggcccaaggacacacaggcctcttgtactttaacttacatgtggtgttctcagacctgcatgaccaattctgcaatagtatctgccacagaaaagacactgtgtgaaattcttgtgcagctcttccccatctaacctgttcctcacaatggtgaacacccaggggaagtgaaaggaagtgccccagactgagactgggaaccgtcacctcccactggatgagcaatgggagacgcccaggagtrtgaattccctgcctccataatgccttttctctcccaaagcattagtcttggagagatgagcaatgattggtaactctcctctctagttaaatctgaatttccagttgctt

SEQ ID NO: 831274 - DNA, 590 bp, Homo sapiens
aaatgtacacaggcataaaagaaaaatgagtacatttgactacataaaacttttttaaaaacaacctctgtatggyagtataccataaacagtatcaagagatcatcaacatactgaaaacaaaacaccagtgacaaaaggatggttcacttaatttatgaagaattcatacaaattaataaaatagaaacccaaagaaaatggataaaagatagaaatacacagttcaccaaaagaattacaaattactaagaagatataaatttatttttaaaataatagattcaacagtaatagatgttgattgaaaaattaatcatattcctgttgacatttatttaaaatgtgttctgacttgattgttattatataactcaattaagaaacctcaattttcaaatactgtgttataaaacatttaggaagaaatagatgaggtaatacaagcacaagattatgtttctggtaggtatgatactttatcagtgatagatagttacagttatatgtacaagttgaatgtaacatgattaattaattatgaagaccatataaaacttcaacatcacaggagtatatccagcattcta

SEQ ID NO: 831275 - DNA, 581 bp, Homo sapiens
actgttgaatgacaacaaaatgtggtatctccatagaatggaatattattcagcataaaatgaatgaagtacaaggtgagcatctctagtccaaaaattcaaaacctaaaatgctccaagatccaaaaccttttgctagctgacatggcatcgcaagtggaaagtttcacacctgacctaacatggtgggtcttcgtcaaaatgcagatgcacaacacacagtttatttagtgttcccagtggaaaaaagatcctttcagccccttttggctgtgagagtatcttttctgcacatgcccaaattgtcccacagaagcacactcataaaatgtaagaaaatgtcatgtgtgcagttcggacacgccaacagcatatttctcacaatgacccatgtggagccaagacctatgtgccttatttacagtgttttgttttgcttatactttgttctgtggcataagggtattgttgaaaataccagcaaggcccggagatacctctgtgggtaacrgtaataagaaaaagagaatgcctttgtttatggatagcacaggaagtccagttgttggagaagctagaca

SEQ ID NO: 831276 - DNA, 619 bp, Homo sapiens
tcttttccactaagtggggagagcgtcttaaaattaaagggaaaaaaactgcatgyagccccctgagctacaattggtaatctagtactcagggtagtactcttggtacaagatggatgggcacctataacaacaacaatgcccagaaagagacaacttttgaggcacctgtttatactgctcccacctgcattctccttttagctagaacttacatgagctgcctgtgggactctctccctccctcttgttaagagtaagaacagagcatacattttgtaaattagtgactgttccacttttcaaggctagaaggaagtgaggagccaaggtagtgcatcctatggccttaattccactatattgcctgtagactcctacccaagacatcatgaaggatatagatatatggaagaaatttttaaaaagtccatctaaagaagttattttatcctctttaataaaggcagtattttggcatgagcaaatagtacttatttgcataaataataaagtatatttacttctctatctgtcacacagcccatttggatgacttccatgatgtaaaataaggcatgttatggtattaatatcattagtcctgatgattcattat

SEQ ID NO: 831277 - DNA, 501 bp, Homo sapiens
aaagcttttatttttgcattttataactggtcaccttcctaaacctttattatttctaataacttctcaattaactgagwtttctcattaattttatttccacgtattgataattttgtccctgttttgtcattctttctatatctcctttgtatcaactgtattgactagcatattggtaaaatcttaaataggcaccctaattatctcaatgtttcaccactgctgatgctttatgtttttcatgttaaggaagcatcctatttctgttttagtaagagctttagtcaaggataaatgttgaattgtattagttttttaatacctttactgcttgatttcttaatattgactatatttctataataaaatccaatgtcatgttttatactttcaatgtaatgttagactgcatttggtaataattcatttacaatgtttgcattaatattcaaaagtgagactgtttttagtgttccctttgctagatttttctgtgtt

SEQ ID NO: 831278 - DNA, 657 bp, Homo sapiens
ttaagatgcatttatttccccagtcatattgccttcataagacttttttttttttttttgagacagggtctcgctctgtcccccaggctggagtrcagtggtatgatctctgctcactgcaacctccacatcatgggttcaagcagttcttctgcctcagcctcccgagtagctgggattataggctcccgccaccacagccagctaatttttgtatttttagtagataacggggttttgccatgttggccatgctggtcttgaacccttgacctcaagtgatctgcctgcctctgcctcctaaagtgcagggattaacaggtgtgagccaccgcacctggcccataaaaaattttgattattcatataggaaaggtaaaaataactcagccttcacctagctgccgtatatctagtcactggttttggtacttcatctgttttgataatctgtttttaatttggatcacctggatactctctatatatttttaagaactaatttttttaagatctggagaagtaacttctatagaacaggaatgactattttaggttataatacaatacttgctgtgagtcatcagcgaatctcagttttcatggttttctaaaataaactcatttaaagaatatgtaatgggaagtgtcatattt

SEQ ID NO: 831279 - DNA, 472 bp, Homo sapiens
ggcttctcttctttcaactaaaaattgagtgatttaaactaggttagccatgtgatgacttctagaaaaaaaaaatgtaaaatcctgtgctgactcagacaaggttgaccccatgaaagaagaagaatatcatagaacaaaaatataacacaatataacacatagtgcttggccttgaaaaatggattgaatttagatagattggtgtataaatataaaattatgtgactagaaggtcagagaagaaatcaaacatctgtaccaatagatagtgtaattatgtaaaggaaagctctatatcatcttgtatgtagctccttgagacatgctactgccaaaaggaacackccaggtatgttcctatttgatgagacttaaaatttattccatcttaaagactgccctttcccctgactacctctgcattctgagattataaagtgtggaacctcttctattacatttttagaaa

SEQ ID NO: 831280 - DNA, 614 bp, Homo sapiens
tatagaaaaaaataatatttacccataggtcactaaaatatgttgcaaaaatggccamaaatccctcccattcctctatgcatacccttttgtggcataatttcgccttttctcatatcagaagtgaagtctatttatcctcttaaatctaggcagggatacgtgacttctttagccaaagggacaatatgaaatgtgacatacgcagggctgtgaaaagcgctcatgcattaggacttgccctcttgttgctggaaaccctgagaccatcatctgatgatcctggaccagcctattgacatagcatgagagaccatgtgggagagatgccagccaacccagccatcccagccactcgcagaattgtgagctaaatgaaatagctgttttaagctactatgttttggggtggtttgttccacagtaaaagctaattgctgcagttctaccacaaaaattccagatggattgtagatctaaacgtgaacagtaaatgacaaaagcttctacaacagtgctgtccaatagaaatgttccctatttgcaatgcccagtagggttgccaccaagccacttgtaactactgagtactgaaaacatgactagcacaaatg

SEQ ID NO: 831281 - DNA, 604 bp, Homo sapiens
atgaaaactaaaaatgaagtatgtgtagagaaagagtggattcattgaggaaatgttgacaaaaagacaaggggagttttggtgggggtaagacatattgagcttaagatttaggaatgtaaagaagagggagcttcttataatggctcactgttgtctttagggcatcatgaggtgaaaggcactgcatatatgacccacaacataaaaccagagccagggaggtactcacagtggtgcacacctttaatcccagctacttgggaggctcaggtggaaagacggcttgagctcagaggtttgagactagcctgagcaacatagtgagacactatctctcctctcctcttttcctctcctctcctcttctctctctttggggttcaccagccctccctcccatcttctacacccttgcagataacacaaagattgaacaactctgccacatcttcctggtgtccttgagagagttgggattgtcagcaaactctsattctgccaataacaccctgtccattgtctctgtaaggctgataatgggttccagacaggacttgaatctgcaaaaataaattccttcatgttactccttacaaagacc

SEQ ID NO: 831282 - DNA, 563 bp, Homo sapiens
gccaggtgtcattattttgcctattttaggccattgttaaattagacagacacaaattcccttcacccattttactttggataatgaccaaacataaaataaaatgatgcctcaaagaatattgcatccattctttcccaatcaacagaaaagtcgagggtggaacgtggtaggacaaatccttcatttgcaggctggagggactcgaccatttgaaaggtgacaaaactgccttcatctcggaaaatatggaccaatgttccatgagaatggtaccaacaaggcctggaccatttaatcaccaaaagataatttgaatgacatataaaagagttggaaacaaacatgtgagatctctctatgtcatgaaagatcactcatgccttctcctttgtaatatttatgttaaaaagcagaggaagcttatatctgagtgtgccagatgagaaaaaataaatttgatttaatgtcgtcattatcagcacyatctgtcatctcagtagtaaaggaagaagttaagttacttcattcaggcagagaagtaaccacgccacaattatggg

SEQ ID NO: 831283 - DNA, 585 bp, Homo sapiens
caccagattaagggtggatccgccttccccagcccagggactcaaatgttaatctcttttgccaacaccctcacagacacagccaggatgaatactttgtagctctcaatccaatcaagttgacacacagtattaaccatcacagtccttaaagtctaaaactcacttaatgaaacactcaaacaaatttaagaattcaagaactgcaatctcacataataacaaagtgtattgtccttgactttgtccattgattctgaagaaaggctctggtcttgtcgtctgctctaggaagtttattgccatttcaaaacttcatttaaattgaaaatagattagttccatgtcaaaaagcagtgtctacaaacttgcttcatgtcaacctgtctaaagagatggaaacttgaaaagagtatattcaatttagaagagatctttaagggaatctaatttaggcaatttkcctttttaactttatatttatatagagttaacatatataacatatatagttatataatgttgagcacagaatcttactaccaccagaatgcctattcttcactccaattcattgaaagagaa

SEQ ID NO: 831284 - DNA, 691 bp, Homo sapiens
tacctgtagtcacagctactctggaggatgaggtgggaggatcacgtgagcccgagaggttgaggctgcagtgaaccgtgatcatgccactgcactccggtctgagtgacagaataagattctgtctcaaaaataaaaataaaataaaaatcgtttctttttcaaatatatttgtaaaggtgccccgccccgccctgccgtttatatttttttacattaaggaaccgccaaaaatccttgcatgtgtgtgctatgaattgccttgttgtgtaaggcacttagaggtccgtaagaacagccatttgaaatgtgatttcatacatcaaaacaatctattcccacggaggaagctatgaatatctctcaacatcttttggccacccgtgaacatctcagcatcaccaactatggaaaaggaaagattagtaatacataacacatttttcataccaaatctcacttttctttaagtactttttctttgcagggatgtaaactgaccctgacaatgaataaaaaataaataaataaataaaagcactaacttcatatttcaaaatgtcstgtcagctggtgtaaatgtctacctatcaagttaagatcaaaaaagtgaatgttagtggggctagttagctattaacagtgttgatttggttccggtttatggatcctggttttcaaataggtagta

SEQ ID NO: 831285 - DNA, 571 bp, Homo sapiens
tctcccttggagttagtaaccatccgtggctacaaaggagtctgagaaaatgccttagcttcctagcttcttgagtagaggaaaatgaggcaaaacaaggtttggggataataaatccatgctgtcttccacaaacctacttgcaaaatatttttacaacctgctgttttattttaaatcaacaaactaaagttagcttttctgtgtatcttcttctccggttcttctggtgtttgttgtgtaaacttgtgtatttggccccagtcctttgtggaaaataataagaaaatgaatcattacctcgcagttgggtgatgattaatgattattgatcaatggtctctgtgagaaaatactataaagactggaatcctttcactttcacattgatattttaatgactgattttaaacaagctattaaaaggttaatatttcagaggaaatawacagatgttttttgaaactgtcataccaaaggctgtgtgtttgctatgacagcagaggccataacaaaccttttttctaaagtggctatgtaacacatccactcaaacaaattaatgttcccc

SEQ ID NO: 831286 - DNA, 606 bp, Homo sapiens
acaagactcagagaggacacagaagttggaactatctgacagggaaagtaaaataattatgaatgatgtattaaaggctagtggacaaagtgggcaccatgcaggaccgggtgggtaatcacagcrtagagatgggcatgaaagaaaccctcaaatggaaatgtaacatctgtaacatcaatgccagagatgaggaacgcatttgatagcactcaacacagcctggaaaagaatcattattcaagctgaaacagagaaagaagaatgaagcaaacagaatagagcattctaagaatttggagacagcctcaaactgtccaacataggtgtaattggaatctcagaagaaatagttgaagaaataacagtcaggaattttctactgagccaaagaccatcaagtaagttaaatacagaacaaaaacaaaacaaaacacttgggcatatcatattcaaactgatggaaaaaagaaaatcttgaaagcagagaaaaaagacagattacatacagagaaacaaagacaagaattgtaacagacatttcttcagaaaccatgcacactaaaaagacaatagagtagcatcctcaaccagaaaaactgtcag

SEQ ID NO: 831287 - DNA, 564 bp, Homo sapiens
tagggctgctttttctttttctgtgaagaatgtcattgcattttgatagggattgcattgaatatatagattgctttggggagtatggtcattttaacaatattaattcttctgatccatgaacatgagacatcttgcagtttctttgtgtcctctttaatttctttcatcagtgttttgtagttttccttgtagaggtattttacatcattggttaaattaattcctagattttttatttattttatagctcttgtaaatgggatttatttcttgatttctttctcagttcattattggtgtatgggaacaccactgattcttgtatgttggttttatatactgcaacttaattcacttatcagttctaagaaattttttggtgaagtctttagattttctctatgtacaattatgttatctgcaaagagggacaatttcacttcctctctttcaatttggatgccttttatttctttctcttgmctgattgctctggcaaggacttccagtaatatgttgaatcagagtggtaaaagtgagcatccttgtcttgtttcagtt

SEQ ID NO: 831288 - DNA, 589 bp, Homo sapiens
gtatagtctttatatgattttttttcagcaccagtggtggtggtggcaagtcaggtgtgccagtccttgggcccctggatggtgtataaggataccagtggtagtgggtgtaggcaggacaatctttgggtctccaggtgacttttgcgggtgccagcattggcagtagtgggctaggtgggtgagtgggtctcatggttgcatagcattgatgataacagtactggtggtgaacgaatccatgccctcccccctctgcagcacatgctggcaccagcattggtggcacaggctgggtggacccatcttcaggcccccaaaaggtgtgtgcaagtgctggtggtagcaagtgggatgggtcaattcctcggcccctgatgtgtgtgggtgctggtggtagttggcaaggtgttcctatcctcaatatcccccgtggtgtaagcacatgctggtggcagcaggtaggcaggttgatccccmgggcccagacaatgttcatgggcaccagaaggctgggcagactcatcctccagccctggggatgtttgtgtgggtgctggtggcagcaggggggcagatcaatcccctg

SEQ ID NO: 831289 - DNA, 495 bp, Homo sapiens
ggttttgaactccagacctcaagggatcctgctactttggcttcccaaaatgctgggattacagggtgagccactgcttctractaaaatccgagggtttttttttttgtttgtttttctttttttttctggagtgcagtggcgcgatctcggctcactacaagctccgcctcccgggttaactccgttctcctgcctcagcctcccgaatagctggggctacaggcctccgccacgacgcccggctcattttttgtattttttagtagagacggggtttcaccgtcttagccaggatggtctctatctcctgaccttgtgatccgcccgcctcggcctccccaagtgctgggattacaggtgtgagccactgcacccggccaaaatctgagtttcttatataacttataaaatctggctctctggtccctgctcaccctgtggcttccttcccctctcctcaatcccagccccaactctccctcccatgtgcct

SEQ ID NO: 831290 - DNA, 522 bp, Homo sapiens
aggaaataactgcagccaagtgcagtagttcacacctataatcccaacactttgggagactaaagcmggagaattacttgaagccaggagttcaagaccagcctgggcaacaagtgagaccctgtctctccaaaaatttaaaaaaaaaaaaaattagctaggcacagtggcatgcctgtagtctcagctactcaagaggccgaggtggaaggtgggctccttgaatccaagaggtcaaagctgcagtgagctatgattgtgacactgcactccagcctggggtcggagggggagagagagaaagggagggagggacagacggagagagggaagaaagggaaggaagatcactatttaatcgacttcgccattattaagaagattaaatgtagtcatgtgccacttacctaaagaatggtatagtgaaaatagttacttcagtttaacaaatatttatttggcactaactttctgtcagtgaaaatggaaacaaaacttgatatccagtctctgctgtgcact

SEQ ID NO: 831291 - DNA, 489 bp, Homo sapiens
caggtggtaaattaaaagatggcagtggaaaatagaacttctcaacacctgttttcttctctcttgaacagaatgattttgaaagtgaagagattaaaacaaacatgatcaggggagaataaaggaacgagaaagagggtgaggagcaacctctgtatccccggtcccagtttcttctagccaccgatgtccttcacctgaagccttggtcttcctcagtttataaagcagctctcaacagagaaggtgtcaaatgatagattcaaacagagatgccctaaaaagactgtcaaaaatatgtccttaaaggtagagagcaaggccttcgaaagctgtacagaacaaatggtgtggttcattaaaattacttggatttaaaytcatttaatttttttcatgtttatttgttcttttactcagtctcccttacacactatgcaccatgcctctatttaaatgtgagcttcaaaagagcagaggccttgttag

SEQ ID NO: 831292 - DNA, 604 bp, Homo sapiens
agttcgtcatttagttagccagtatgttgatttttttggtgaagtgtactctctgtttcacacctgtcagcttttttaatattggattttctcaaaattcacataacaatcacactgtatgagtactggtttgaaggttgtctgctagtcagaatgaatggagatcaatgtgtaggacacctttactgatatccagaggtttaccaaaagacaagtcaccaaatgtggcagaaaaacatgataaaatttattaggaaaaactaaagcttatggagtgaacagttatttcaggttggtggaattaggcaagaatccaagaaaggaagacagttttatatgggagactttgttaatggtggtcattgtgctagatattttggagatagtattttatttaatcctcatgcaagccattgatattggtggcattgtctctaacaagtgagaaaactaagactcagtaaggttaaataatttgtccagggtcactatggtggtgcctgctggattacattaatggacagattcaaacctargtctgtgatatttcaaagtccatacacttcattgtatcataggacagtagttgacggcgttttaaatg

SEQ ID NO: 831293 - DNA, 643 bp, Homo sapiens
ataacttacagtaagaaaagttggtagatatttcagcaatgccataaaatatgcttccatttaacactttgagacarccaatacactatttatattattgagacaaaacaaatctaagatcacagaaaaatatttattttaatagaatggtatttaagtagatagttttttttgttgtgtttttgtttgtttgtttgtttgtttttgagatggagtctccctctgtcgcccaggttggagttcagtggcccagtcttggctcactgtaacctccccttcccaagttcaagcagttctccctgcctcagcctcctgagtagctgaaattacaggcatgcaccaccacgcctgtttaatttttgtgcttttagtaaagatgggatgtcactatgttggccaggctcgtcttgaactcctgacctcaggtgatctgcccaccttggcctcccaaagtgtaagtaggtagtctaaatgattatgggtttcaataggttttgttaatttgttttagttgacatacaagagcactacaaaaccacattattttattttaatttttatcagtaaacttcattatattaaaggccacatattgcccactgaatatgattttgataagcacaacttctataatttacaactt

SEQ ID NO: 831294 - DNA, 636 bp, Homo sapiens
tcatcttgaattgtaatgcaaattgtaatccccacatgttgggggaaggacatcatgggaggtgattagacatggggatcatactgttctcatgataatgagtgagttcttatgagagctgaaggttttataggggctttcccccactttactttgcacttctctctcctgcagccatatcaagaaggacatgtttgctgccccttccaccataagtgtatgtttcctgaagcctccccagccatgcagaactgtgagtcaattaaaactattttgattctaaattacccagtctcagtcagttctttatagaagcatgagaacagactaatacagtgacccacccctttatatttgtttaactgagttgattcaatgaatccatctcacagctctcagtttttttcctcagcttagtcctttctgttgttaatacttccagttaaacaatgaaatgctcatagtgagtttttcagctattagacgagtttgggtcattgtctttttttccttttttttttttttgtgtgtgtgtgtgtgtgtgtgtgtgtgtgtgtgtgtgtgwgatggagtcttgctctgtcaccaaggcaccaaggctggaatgcagtggtgtgatctcggctcactgcaacc

SEQ ID NO: 831295 - DNA, 509 bp, Homo sapiens
gaaagcgctccaaatgtccacgtccagatactacaaaaagagtgtttcaaacctgctctatgaaagggactgttcaacactgtgacttcaattgaaacatcccaatgaagyttctgagaatgcttctgtctagagtttatatgaagacaatcccgtttccaacgaaatcctcaaagctatccaaatatatttttgcagattttacaaaaagagtgtttcaaaactgctctatcaacagaaagtttcaacactgttagttgagggcgcacatcacaaataagtttctgattatgcttctgtctagttttcaggggaagatatttcctttttcaccataggcctgaaagcgctccaaatgtccacatccagatactacaaaaagagtgtttcaaacctgctctgtgaaaaggaatgttcaactctgtgacttgaatgcaaacatcaaaaaacagtttctgtgaatgctggggtctgctttttatatgtaatcccgtttccaacgaaatcct

SEQ ID NO: 831296 - DNA, 235 bp, Homo sapiens
gtttccaacgaaatcctcaaagctagacaaatatccacttgcatattccacaaaaagagtgtttcaaagctgctctctcaaaagaaaggttcawctctgttagctgagcagatacatcatgaaaaagtttctgacattgcttctatctagcttttattggaagatatttcctttttcactgtagtcctgagagcgctccaaatgtctacttccagatactacaagaagagtgttt

SEQ ID NO: 831297 - DNA, 235 bp, Homo sapiens
gtttccaacgaaatcctcaaagctagacaaatatccacttgcatattccacaaaaagagtgtttcaaagctgctctctcaaaagaaaggttcatctctgttagctgagcagatacatcatgaaaaagtttctgacattgcttctatctagcttttattggaagatatttcctttwtcactgtagtcctgagagcgctccaaatgtctacttccagatactacaagaagagtgttt

SEQ ID NO: 831298 - DNA, 519 bp, Homo sapiens
aggatatttggatagctttgaggatttcgttttaaacgggattgycttcatataaactctagacagaagcattctcagaagcttcattgggatgtttcaattgaagtcacagtgttgaacagtccctttcatagagcaggtttgaaacactctttttgtagtatatggaagtggacatttcgagcgctctcaggactgcggtgaaaaaggaaatatcttccaataaaagctagatagaagcaatgtcagaaactttttcatgatgtatctactcagctaacagagttgaacctttcttttgagagagcagttttgaaaccctctttttttggaatctgcaagtggatatttgtctagctttgaggatttcgttggaaacgggattacatataaaaagcagacagcagcattcccacaaacttctttgtgatgtttgcattcaagtcacagagttgaacattccctttcatagagcaggtttgaaacactctttttgtagtatctggatgtggacatttg

SEQ ID NO: 831299 - DNA, 600 bp, Homo sapiens
agatggagggaaagaaccccaattgctcaatgagtgtctggatccagccatgcctgaaggcatgtttctagattttcctttaattgaactagtaaaattcacttctatcttaaagttgtttgagttttgtttctgtcaatcctgtggcatctagaggaacatattacttcctaggattgttgtaaaaatcaagcgagataatatacataaagcttttagcatggcgaatggcacatggtaagtgcttaacaagtgttagcacatgttatagcaaatagtgtgtgccaagccctgtgttcggtaccagagaatcagaggtggatgagactcggtgcctgccttgaggatctcacactagtgaaggagacagataagccaacagacaggcataaaacactataaaatgagattaggtactgggtctcatagcaatacagaaaaactattgtttggaaggagtggtggagtaggtaggttaggaaaagcttcccagataacaagaggataaaaggagtcttttttattttaktcttttttttttttttttgagatggagtcttgctctgtcatccaggctggagggcagtggcacgatcttgg

SEQ ID NO: 831300 - DNA, 464 bp, Homo sapiens
tcaacagagaaactcttacctgtatccataagaaaatctgaatgaagatatattttgaaaagttttatttattattattattatttttttttttgagatgaagtctcactcactctgtcattcaggctggagtgctgtggtgcaatctccactcactgcaacctctgcctccctggctcaagtgattctcttgcctcagcctcccaagtagctgggactacaggcacgtgccactatgcccggctgattctttgcatttttactacagacagggttttgccatgttggccaagctggtctcaaactaatgaccgcaggtgatccacccacctcagcctcccagagtgctgggattagaggcatgagccacccctcctggctatcaaaagttttaaggttttacttttcacttwtaagtctttcattcatctggaattaatttttattaatttgggtataaggca

SEQ ID NO: 831301 - DNA, 650 bp, Homo sapiens
atggtggaagacgaaggggaagcaggcacattttacacggtcaggcaggaggaagagagagagggggtgagaacttgctcactattgtgagaacagcaagggagatatccacccccatgacccagccacctcccaccaggtccctcctccaatactgggaatcacaattcaatgtgggatttgggtggggacacggacccaaaccacattaggttctcacaagaaaaacatgagaaagattccctcatggttctgggttcgtttttgccttgtgccctgagctgttgggatatactctgtctccctgcaaccctgaactgaaataattgggtaaatcattatcctgtttttattaatatttctcaaatgtatgtacagctcacgtttatttcaatgcttaatattataagtgttttggtctttagcagtttgatgatggttttagtgacaggaaatatgctgtaggaacttaaccctgctttacatcaattagcctgtggtaagattggcttcattaggcatygttttttaaagttgcattttctaagaatctattgatgacactaagtgaggacctcctgtacctgctggctttttgtatatcttctttggagaaatgtctattcaggtctgcagtccattttttaaat

SEQ ID NO: 831302 - DNA, 470 bp, Homo sapiens
ctgtgaactttagttaatagtcatctgcggatattgactccccaattgtaacaaatataccaaactcttgcaagatgttaacaacaggggaactgggaggtgaggtggaggtgctgggggcgggggctctatgagaactttctgtgcttctcattcattttcctgtaaacccaaaactactcaaaaaataaagtctattaattaaagaacagaacacacacatctgggtctgcccccgattaggaagtgtggtagatttcaaatagccacacactgtcatggcccttcccagcaaaaggtgaagcttacgtctccactctcttaaccagggctgggctttgaccaacagaagtggcaggcgtgaggtwgtgtgtgttcctagcccaggtctcctgaggcctggcagcttccctggtcaccctcatggtcccctgaggccgccacgtggcagaacccagtctcaccccttg

SEQ ID NO: 831303 - DNA, 527 bp, Homo sapiens
ttagatcagtttatttggttacatttagaaatcacttcctatgaaatacagcctatgaaaataattagaaatgccaagaggatttatgcacacacatgtccattatagtgtagtttataacagtaaaagtgtgaacaggacctgttgtaaggaaaataatcatagcatggcgtgtccttattacaaaatgctatataatggcaagcaaactttctcatattataaacatgtaaaaagtagaattttaaaaaagtgatctaatgatcccaaacttataagagaaaatcacaaattagctatcatctctctacctacatacctatttacaaagaaaaagtctagggagaaaactactgtaacacattgaaataaatctgggaagtaagactatgagttatttttagttttsttttaagaaatacttttattaatttttgaaattgctgcaaccgttgctttcataatcagaacacttaaaatctcatatttaagtgtaattaattgtcagaaaaaaatgctcctgacat

SEQ ID NO: 831304 - DNA, 539 bp, Homo sapiens
  misc_feature 1, 2, 3, 4, 5, 6, 7, 8, 9, 10, 11, 12, 13, 14, 15: n = A,T,C or G
nnnnnnnnnnnnnnnttttgaatattgaaagaatgcttccttagttttctgtgccattcacaatgtaatagctgtagaaayaccacatcttaaagttatatctgcgttattgccatttatccgttactctttcaagtctagatgatcaaaaaacaataaatccagcctgatgcgtacgcttgtcaattttggtagcatgaatgctcccaccatggcggatttcaagacattgcgtggcgtccagtttggagttagctgcatggacccactgttaagcttccttccactctgtagctgtgagatgcaaataacctcaatttaattttaagttatcctattggtagcccttatgaaaaattatacaaaattgtgatgcaaataaaataattatgcacttggatattaagaaaaactttattttccttccataagcaatgtattttaaatatagttgagatctttattataactgtaactaatgcattttcctccaacttgcatacttttctctttcttggtcatttgaatacagatctcat

SEQ ID NO: 831305 - DNA, 565 bp, Homo sapiens
ataaatgaagagccaaatcctccgtccaaacaaaaccgaagtggcctggccaggccttcctctccacgcgctgccccgcgcctcgcctcccctcaaccgcaggaacatatggagtcggaaaatgcacgttaacaaagcgctgcacgtcgccaggcgctggctagtccctggaagagacacaagcatttcccagcctctgctgaggggccagatgttttcctcattaggttttcctcgggtagaaataattcttgcctgtttaatgttcaagtcaattagtaatcactctacaaggcctgggagctgtctactttcagttgcctttagagatgaaactctaaaaacatatcctagcacacagcatcatctatgaaacatacctgccaaaaacgctgaccctggacccagcctgctgccaaacttacctccagtttaccggatataccaaaagtagaggaacaagctaagtgacaccagggataaacaggcatgcaaatccagaatatgggatattmtctaagacaaattttctggactctttagtcaactcctgagattttttttt

SEQ ID NO: 831306 - DNA, 564 bp, Homo sapiens
  misc_feature 1, 2, 3, 4, 5, 6, 7, 8, 9, 10, 11, 12, 13, 14, 15, 16, 17,18, 19: n = A,T,C or G
nnnnnnnnnnnnnnnnnnntctgttttaacttataatatggcatttactatagagatagcccacataaaagtttctgggggttcgcaataattttttaaagtgtaaaggagttttgaaamcaaaaagtttgagaatgactgaaaaatggcattcaacttgactttaagcatgttacttaatctctctgagactctataaaatggggatgatgatcaaagtacttccctcgtaaaaggatgaaaggagttaatacatgtcatgagctcttaacaatacatggcgcagagtaagtattcaatatatattagctttattatcatgtttaatatgaaagcaaaacttccttgactccaaacactactgaagcacagttgaagaattcttccttgtttttggagccatctgtattgtttttgtaaaacaaaatattccaaagggaaagaaataggattttgtgatttttcttttgaattgagatataacgggtttttattggcaagtgatcagggtgtggaagcttgaagcgatgtagattcagaataccttgaggcgctttttcacac

SEQ ID NO: 831307 - DNA, 604 bp, Homo sapiens
actcaaagtcaatgacttttcatggatccatcagaaaactgaagatgtggggcaaacctccaccacasaatttggagaggaaacacattcagagccatggctgagatctgtgtacctggagccgtagtcactgaagccataaactggtaggaaaactgaaatggtaattttgacgaacactgaaatggtaaatttgactgtgaattgactggtctgagagtggcagccagtattaagaagccccccactcagctgtgagttttactcccaggaaccccaccaagtcctcaaggtaaagagccagtaaagacactctcatggctccagcatgaggaggtgagagtaacccttgtgaaatgcacccagaaccttctccatgacaaaggcccgagccccggggggaaagactttctcagaaccttgtctcagagccacgaggaaagcccattcctgagtccagtcccctctggcctcctgtctcgcttatggggctggaaaagctacacaagaagaaacgtgtgaagacgcagcctagggacccaggcccactgaaagactgagagtgaatcagaagactgcagaccactggccctccccacacctt

SEQ ID NO: 831308 - DNA, 535 bp, Homo sapiens
tcagctcactgcaacctccacctcctgggttcaaacgattctcctgcttcagcctcctgagtagctgggattataggggcatgccaccacaccaggctaatttttatatttttagcagagacggggtttcaccatgttggccaggctggcctcaaactcctgacctcaggtgatctactcaccctggcctcccaaaacgctgggattacaggcgtgagctgcggcgcctggcctccagctggcatcttgacctcagcatcatgagagtcccaaaataagaacctagcagctgaactcttcttgaatataaatgattaaattttggagtaatttgttatgcagcaatactaaccttaataacctgtataaaagatgaaataatactaggagtaaaataaatcataaatagatatcccacaaagcctraaatatttactttctggccctttatggaaaaagtttgtcagcccatgtcttagaccaaaggaaacaatttaacctcaaccaccacaacaatcgtcatcattgagatgtg

SEQ ID NO: 831309 - DNA, 582 bp, Homo sapiens
tatatcactggattgaacatcatgaggatcattgatgaccttgacaagagctgtttaggtggaatggtgaagggtgaaagcctgccgtagtgagatgggaaaaaaatmtcactattggagggtgctaagtaacaaacttattattattattattattgttattaccgagacagcgtctcactctgtcaccttggctgcagtgcaatggtgcaatctcggctcactgcaacctactcctctcgggctcaagcaaacctcctgcctcagtctcccaagtagctgggactacaggtgtgtaccaccatgcccagctaatttttgtatttttagtagagatggggtttcaccatgttggccaggttggtctcaaactaacctcaagagatctccctgcctcagcctcccaaagtgctaggattacaggcatgagccactgcgcccagccccagctcattatttttaaaaactgctaagtaaagggaagaaatcaagcatctttcctgcctttctatagaaacatacagtaggtgaggggacatttctttttatagaagtattccagctaataaatgaagatgggat

SEQ ID NO: 831310 - DNA, 622 bp, Homo sapiens
agagggagttgagcaagagcaagggtagaaagcttattcaaagaaatagcagaaaactctccaaaacttgagaaggatataaatatccacatgcaggaaggccagaggacaccaaaragatttgtcccaaataaaaccaccccaaggtatataataaccaactctcagtggtcaaggacaaagagaggatcctaaaagtagcaagagaaaagtagcaaataaccctaatggagcttcagtcagtttgtcaacagacttcttagtacaaaccataaaggtaaggaaggagtggaatgacaccttcaatgtgctgaaagaaaaaaaaaatttaacatctaagaattgtatatccaacaaagttatccttcaaatatgaaggagagatacattctttcccagacagaagtttgagagaattgaccactaccagacccatcccacaagaaatgctaaagggagttcttccatttgaaatttaaaaaatgctaacacaccaaaaaaaaaaaaaaaaaaaaaaagaaaaagaaacacactggtaaaattaagtacatggacagagttagactcttaatactgcagttgataactctagtataaagcccaaaagacaaatctaccaaga

SEQ ID NO: 831311 - DNA, 621 bp, Homo sapiens
gaaaaagaaaaaaaaaagaatttaagtagaacaaagaagaataaaacatttttaccaaataatggatgaggaagaagtcaaaattatgaactattaaacatggaaatggcagcattttttgtctagatgaagaagatcaggtgttgaaattttattctgtgaaatgtccttgcttattttataacatgaatatatttcttaaccacctgatcctcatatctaagatgtagagtttaatgtttatcataaaaatctcattcatttgatacttacaaaagtaaatgaggtgaactatgaaaaactgttgtggaaatctagacagtactaagctcataatagcttctaagagctcacatcaagactagaggaaaagtggtcatggaaaaactttgtttttcttcagttcccttaacattatctgagttgtcatccttttgaaatcacagaggtgggaagtagcatagcagaaaataaaaactacagtagaagaagaaaatttgagccagaggtaatgaggagaaatataatcaccttcaaaacttcctaaaatattgagggtaggaaagtakgaattgtgatgggatgaggatttggttatacatttaagccattctttctctc

SEQ ID NO: 831312 - DNA, 640 bp, Homo sapiens
ctgataaatatatacaattgcttaatcatccactatatacaacaatttcatcaccccaaagaytcccttgccacagcgctgcaatcactgaccagctttctatcctcgtgaattcgattctattaaatgtcatgtgatgaaatcacatatgattcagtattttgtgtctactatcggttagcataatgcttgtaagaatctataagttgttgtctgtatcagtagttcagggtttttattgctaattagcattcattgtataacatagcataaattctttttttttctttttcttttcttttttttttttttcttttgagacagcatctctgttacccaggctggagtgcagtggcgcaatcttggctcactgccaattccgtcttctgggctcaagagatccttggggctcaaggaatcctcctgcctcagcccccttagtagctgggagtacagtcatatgccatcacacccagctaatttttgttttcttttgttttgagggggggttatttttatgttttggtagagatggggcataatttatttgtccattcacctttcatgaacattctggttattttcagattattgctgttataataaagcagctgtggacacttgaatacaagtctttgtg

SEQ ID NO: 831313 - DNA, 611 bp, Homo sapiens
agctaaatgagttttaccacactcctgaactgttcatgtgcaaagtaatttttaaagtgcrtcttcaaagttaaagctgtgacccattggaaaaggaaatttcaatcaaaaagaaagatattttctgactctaatagggctcaaaaacatgggaaatggagatctatgtcactttctcagaaagtgtgtctttatttctccacttaaaaacagacaccagagatgaagcattaaccaaggaacttggtgtgcgctttaatttcatttcagatcactctagtcaaattgtactccttcatgtactatcactttgttctttacagaatattactcttctgtcacacttcactaactttatttttcaaggtcaggcacttcaaagaagtctaagatgagtcactaatgagcacagagcaaatgaacagtattgcttgaaatcttcatgcaggaagcatgcatagtgtggtcagaggaatatatccaaactactagctgacatccttcagcagagaaaactcacttcatagtttaattatgacagtgatttgacaggcattatatcatgagagaatttgtcactataaagtagaggtgttatatatgcggttatt

SEQ ID NO: 831314 - DNA, 653 bp, Homo sapiens
tgctttggctacagcttccagtagcatgttgaatatgagtggtgagaatgaacatctttgtctttttccagttcataggaggagtcctttcaacttttctctattcagtacgatgatagctgtcagtttgctatatatgtaatcttcttattttgaggtatgtgccttcaatgtctaatttgttaattatttttatcatgaagggatgtttaatgaaatgcttttttccacatctataacaattattgtaagtaataaatgtggtttagtttttaagtctgtttttgtggtgaatcccatttattgatttgtaaaggtttaaccatccttgtatttgctgaaataaaacccactttatcatgatgaattttctttttgatatgctgttagattctatttgcttgtattttactgaggatctttgcatctatgttcatcagggatattggaccgcagttgtcttttttgttgttgttgtgtctgcgactgttttttctatcagggtagaactggttttatagaatgagttggggtacaattcctcctycttcatttttgggaatattttctgtagaattaatactagtccttctttgtacatctgataaaatttgtctataaatccattggatccaagtcagtttggttagaat

SEQ ID NO: 831315 - DNA, 532 bp, Homo sapiens
gttctttttaagctaacaatgtgttacctacaggatgacacagcgtggtgttaagaatagaaagttttgtgctagagaggctggggttagaatcctggtgctgtcactacaagcctggggactttgggagagttacttgttttattttgtgccttagtttcttcatctataagttgaaaatggaaagatgcttctttcttttttcgaatcagagtcttgctctggggcccaggctggagtgcaggaggcacaatgttggctcactgcaccctcgacctcacaggctcaagcaatcctcccacctcagcctcccaagtaactgagactacaagcatgtgccacagcacctggttaacttttttcatttttgtagagatgtagtctcgccatgtttcccaggctggtctccaaatcctgagttcaagcgatctgcccgccttggcctcccaaagtkctgggattataggcatgagcaaccttgcccggccaatgatgcttatttcattagattattaatattaaaaagtatata

SEQ ID NO: 831316 - DNA, 606 bp, Homo sapiens
attttaaggagtttcgttagaatttcatagaaattccataattgtatattatttctaaattacacattttcttttcattttcacataaacagagaattttaatgctgtaagtggtgttaaagtgtactaagttcaaattctttgtttttatagacgagaaaacccagagtaaatgtctatgagtgttattcaatttaacatttgaatactcattcaattaatatttattcaactggtaaatgtaaagaaaacatgagaaggaacaactctgtaaagtaaaggtcagatagatagattggtaggcatagatatagatacagatatatgttaggtttaaagatgttggcagaatatccatgtagatgtttccaatagtcagctaaagatcttagaataaaatgaatctgggtctatcaatagatacatagatagagaaatagatagacagatagatagacagataatttcttttaatttccccaaagatgagagtgggaagatctaataaagattacagataattcaccaagaagaacacctwaagctgaagaacagaatgagaaagtctgagaaaatgtcagaaatgtagtagaagcaagagaatgt

SEQ ID NO: 831317 - DNA, 588 bp, Homo sapiens
aaaaccctacctggaaaataaaaaaaataaaaagaaaaaaaaggtaaatataaagactttatttttaattctttttaaaatatagttttctgtttaarcccaaaataataacaatacagtatgtggttctgagcatgtatagaagttaaatgcatgacaaccatagcatgaggactgagagaatggaaaaggtagtatagagttgtaaggttcttgtaccataagagaagtagtataatgttactttaaggactggggtaagttaaagatttgtactataaaccctaaagaaacatcgtaaaactaagtactatagctaaaaaggcaacaaaatagataaaatgaaataacaataaattctcaatccaaaaaaagataaaaaatattgatggatttattagacacaaatagtcagatggtagactttaatcaaaccttaatagttaataataatgtcatatattttacaatagctaaaagaagggatttcacatcttctcatcacaaagaaatgataaatatttgagtgatggatttgctaattagcctgatttaatcattccacaatgtatacatacatcaaaactt

SEQ ID NO: 831318 - DNA, 277 bp, Homo sapiens
cttgacctcaggaggcggaggctgccgtgagctgagatggcaccactgcacttcagcctgggcaacagagtgagaccccrtctcaaaaaaaaaaaaaatatatattaagcactcttctgcggtgagcaggtctatgcaaacctacctccaaaggcccagggagctgagaggccaaagaaagaggctgacaaacacagtgatcagaaggaaacatttaatagggacttacgaacagaaaccatgtctcaggcagcctccagatgacatggtggatccc

SEQ ID NO: 831319 - DNA, 550 bp, Homo sapiens
atgtacacacccgtgttcatagcaacactatttataatagcyaagaggtggaaggtacccagatgtccatcatcagatgaatggataaacaaaatgaggtatatacatacagtgggatattatttagctttagaaaggaaagaaatcctgttacatgctacaacatggaagaacttgaagacattatgctaagtgaaataatccagtcacaaaaagacatatgcaagccaggtgtggtggttcactcctgtaatcccagcactttggaaggacaaggcgggaggattgcttgagcccaggacttctagactagtctgggcaacatagtgagacccttttcctacaaaaaaatttttaaaaattagccaagcatggtggctcctgcctgtagccccaactactcaggaggctgaggcaggagaatcacttgagcccggaaattgcagctgcagtgagctgtaatcatgtcactgcattccagcctaggtgacagagcaagaacctgtctcaaaaaaaaaaaaaaaaaaagacatgctgtatgattctactt

SEQ ID NO: 831320 - DNA, 581 bp, Homo sapiens
tcttacagttttaaaaaaataaacaatagcaacaaaattaaagctccctaatatttggattaaacctcttcrtttttgtatttggtaatatcgacatttaaaaaaaaaagttaaaataaggtatgtaatttggtgcctcctcaaaggaaatatcaaaatgtccttgataatattgcatgcttatgtgtaagcactttcttttcttttttatttttcctttttttttttttttttttgagatggagtcttgctctgtggccaggctggagcgcagtggcacgatctcggctcactgccacctccgccttccaggttcaagcgattcctctgtcagcctcccgagtagctgggactacaggtgcatgccatcatgcccagctaatttttatattttagtagagacagggtttcaccacgttgtcgaggatggtcttgatctcctgacctcgtgatctgcccgtctcagcttcccaaaatgctgggattataggcgtgagccactgtgcctggcctgtgtaagcactttcaaagccatgaactgagcatgaaagtgaggatccagtggaagggcatatttgcca

SEQ ID NO: 831321 - DNA, 644 bp, Homo sapiens
attatctgtaagtctctccgtggtttgatctagaaatttattcatytggaattggcctgtactaggaatatgccagttagaggaaaaatattgtagattaccaaggaaatagctaaataaaatgtgtgccttttgatgtgaaaattgtttcaatgtattttttcttccaatttaaaaaattgtgtttaaatacacataacataaaacttatcgtcttgaccattttttaagtatacagctcagtggtattaagtacattcatattaggtaaaaggatgcgtattctattatatgcacacgtcatgttgtgcttatccatttttctgttggtggacacttgaattgctttcacgttttatctattgtgaataatgcggctgtgaacatgggtatacaaatatttcttcggtactcagttttcaggttttttgagtatatactcagaagtggaatagctagatcacatggtaattctgttttaattttttgaagtgttgccatagtactttccacaatagtggtaccattttacattcccaccaacagtgcggaagggatccagtgactccacgtcctcattgacacttgttatgttttttttagtagccatcctaatgggtgtgagatggcttcttagtctgttc

SEQ ID NO: 831322 - DNA, 625 bp, Homo sapiens
ggcaagcctccttgaggtgtggtgggagattcctggctgctttttttacctactcaagcctcarcaatggcggatgtccttcccccagcctcactgccgccttgcagttcgatctcagactgctgtgctagcagtgagtgaggctccacaggggtggaagtctccaagccaggtgtgggatataatctcctggtgtgctgtttgctaaggcctttggaaaagtgcagtattagggtgggagtgtcccaattttccaggtaccatctgtcatggcttccctttgctaggaaagggaattccccgaccccttgttcttcctgggtgaggtgagccccaccctggtccgttggctgtacccactgtctgacaagccccagtgagatgaacccggtacctcagttggaaatgcagaagtcacccgtcttctgtgtcactcatgctgggagctgtagactggagctgttcctattcagccatcttggaacctccagataaaggttttaaacagagatatctgggtgaagaaaaatatctgagagttgttgatatgtggatagtaattgaatctgtgaggtagggtgagtctgcctagaggaagggtgttaaataaagaggtaaagggctt

SEQ ID NO: 831323 - DNA, 631 bp, Homo sapiens
cattttcacaatattgagtttacccatccatgagcatgtgatgtgtttccatttgttggtgtcatctattatttctttcagcagtgttttgtagttttctttgtagaagtccttcgactccttggttaggtatattcctaagtatttttttttttgttttttgtagctattgtaaaatgggttcagttcttgatttgattctctgcttggttgctgttggtgtacatagaagagctactgatttgtgtatattaatcttgtaagtggaaactttgtcgaattcttttatcagttctaggagctttctggaggagtccttagggttttcaaggtaaatgttcatatcgtcagtaaacagtgagtttgacttctttaccaatttggatgccctttatttctttctcttgtctgattgctctggctaggacttccagtactatgctgaagaggagtggtgagaatgggcatccttgtcttgttccagttctcggaaggagtgctttcaacttttccccattcagtattatgttggctgtgggtttgtcatagatggcttctattacatgaaggtrtgtcccttggatgctgattttaaagagttttaatcataaagggatgctggattttgtca

SEQ ID NO: 831324 - DNA, 473 bp, Homo sapiens
tgatgtgatgtgtaggcagttcagatggcaggaggcccctgcctccccacctcgttcttcgcatctttccactccattctgccayccccgtttccctgggaaggccctcctgagaggtgaatctgtttcagcacagccaactggacgcaatcttttattctccaactggcacttccaaaggccccagcactgattgtaaagctcccgtgtgacttaatacatctgattacttttgagtgtggggacaatggatgctgcctgtcttgcatctgctttcatcttttcttctggctttgccacgccttcctgataacagagtggcaacttcagccaaggagtactggctagttgctggtgttaagtttaggcagcctatagctccacaagagctgtcctttaactcaacgtctgatttcacactggtcacacatactgtccctgaagaaccaactcttcactgacacccacccccc

SEQ ID NO: 831325 - DNA, 644 bp, Homo sapiens
agtgaggtcccatgcctggcccatgaaaccattctttcttcctaggactctatgcctgtgttgacaggggctactacaaaggtctccaaaatgccttcaaggtctttttctcattgtcttggatattggyagttggttcccttttatttatgcaaataacatgctaaacatgataaatatcctgacttcaaaaatcatgcatattccatggcagacgggaggcaggactagattgcagctccagacagagcagcatgtggagttttgcattgtgaattttagctccaggtctactgcaagaacaaaccagcaatttcgagagcacccagagaccctctgaaagaagagaactgttcttacaggacccaggagacactgcaaatactgtgagtgccccagctagggaagtgggaaacagagactctcctttactgaacacacacccccactggagaagctgaaggtctgtttgtgggagaagtttccaactttatatggagctgaatcaagttagccaagcgaaatacaggggtagaggaagcagcaaaaaggccctgggggttgctgggtccccaagcagcccattcctgcctgacaccacagggatccatcaggagggtggccagaggagcagcgcataaaac

SEQ ID NO: 831326 - DNA, 533 bp, Homo sapiens
aagtaaaagaattaataaaarggaagataatatcaggtataatttggtgattaatgtccaacaatgtgttaaaatagagagtgaaagaaaacttatgcaaaaagggaaaaaagcagagaagagaaaaacgaacaaaatcttaaagatatataaggagaaactgaaaaaaggaataaaaaatgacaataagaagtaatttttttaaagagattggaaatttcttactatcgtaaagcaaagcattattattttagtaacaatatcaaaaatgttaaatcacagggtggttagtaaacaaatacaaaattttttttaaagttgttacataccactgtattgctttttatttaattaattactgccattttaataaaaatatctatatcctcttatatcataggatggattatttcatatagataagctcatatgaaaacaaagtaatcacaatgtctcaaatgcagaggactcatgtgtgtacgttaatcagaatattcaattctacttgaataagcacaatttaatgctaaact

SEQ ID NO: 831327 - DNA, 533 bp, Homo sapiens
aagtaaaagaattaataaaagggaagataatatcaggtataatttggtgattaatgtccaacaatgtgttaaaatagagagtgaaagaaaacttatgcaaaaagggaaaaaagcagagaagagaaaaaygaacaaaatcttaaagatatataaggagaaactgaaaaaaggaataaaaaatgacaataagaagtaatttttttaaagagattggaaatttcttactatcgtaaagcaaagcattattattttagtaacaatatcaaaaatgttaaatcacagggtggttagtaaacaaatacaaaattttttttaaagttgttacataccactgtattgctttttatttaattaattactgccattttaataaaaatatctatatcctcttatatcataggatggattatttcatatagataagctcatatgaaaacaaagtaatcacaatgtctcaaatgcagaggactcatgtgtgtacgttaatcagaatattcaattctacttgaataagcacaatttaatgctaaact

SEQ ID NO: 831328 - DNA, 614 bp, Homo sapiens
ggggttcactttgcacatcacaggatccaaactgaagaagatkaagggaaggcttttataggcacccactttcctcccttctttctgattacaaatataattttgatcccttactctcctgagtacattctagctcctaccaatttctcatttctgctcaaaacctttgatgaaaaataggaaagagttccttagaatatatgagaccatagtctagaaatacccttttacatgggtatagcatatgcatgggctattctgctttgagcataggaagggtaccacctgtgactgtcagtgtggacatgtctcatagtgtggaggtccagccacagctggaagatcccatagcttcccaccattctgctctcatttcacatgcagcatgtactgatttcctgctacttagaagagactgttgccgtcactcattattgcccactgtttggtactataaattaccgaaacttgaatttcagaaaaatcctcctaaaagtcctgcaaatttttttcaaaagttttccattgagtatccaggaactgagtggtttcctgttctgctaaatatcttcctcccttcctgattttccaaacgctttcctaagaagaaaagc

SEQ ID NO: 831329 - DNA, 547 bp, Homo sapiens
gaggtaagtgttcacttttattgtaatcacaattactataaagtaactgcagaagttagcattgatcctaaagcrtatattgaagctagaacatgagggaacagggactaatctctcacagtggtctacaaattacagatcttattgaatactctctctccagtgtgcatatatggccactattttaactgttaaagagacttccagtcacacactggagggggaaaaagacagagtaatatccagaaaaacagcacactagactccattctgaccacaagtccctggatatggctgccagtgacgtgaatgaaagagactcatgccagtagaaacaaggccatgggcagggagatgtcttagcactacttaaggcaagtcatggtgggaggagtcagccaggcagtcaacatttacctttgcctgtagtgcaaaagcaaaatcagacagtgatgaatatttttttctttttagagaaaggaataaacaaggagaaggagtgattgtcattcttttaagacctggaataggagagagagattcacat

SEQ ID NO: 831330 - DNA, 601 bp, Homo sapiens
gtctggttttgaactcctgagctcaggcaatcctcctgccttggcttcccaaagtgctaggattgcaggtgtgagccaccgcacctggccccaacctttttaactctcgtgcttagcagtagtgggacctatcttgcagtgaggggctgaaaagaaagcagggagatgggatgaccatatgccattccacagtcagttccagggtggttgcaaacctaagttatgaacacaggcaaccagcttggatttgaagggtaggctgaacaataaaaatgtctgtacagttctctagaacagttgcattaaccagccttggaaaggagaaagggcttctatttatgccaagatctaagcaaacagatgaagcagaagcacccagcttaggtgatctcaaggttctctcaggtatgtaaatggatgtggctttgtataaacataggaggaaaggctggggccgaccctaaacataaaawgtgcttagttcatctagacacacccaaatttcaatcatacatgatgaaataaagctctacactgccctaagtcatccgccagatttgactcactgcctcacattttgtctactctggcataaatagtg

SEQ ID NO: 831331 - DNA, 587 bp, Homo sapiens
cttagagaacataaatactaaaaactcaaaccaattttatttcttgtgttacatagtactcaatccaggcattattttcctaaatgtatatttagtaatactgaaaccaaaaaataatccctaagytgtttgctctgggaaatacttgttcctagaatatatgactgcaaaccaactagaacagcttacttttcaaaacaaactgcttgctcagcaagactgctctagggccttcactctgttgtatccaccaacctaagctatttttaatggtctctgcccaattttcaaccaaattcctgccttataagacctactgattacccagtccaggccatgggaatcctttgaaaactgttgcctaacttcattcttctaaaacactacttagactatccgtgtggtattcttatttgctgtaaggaattttaataaatcagctttattgatcaacacattttcctcatggtcctcttaggggggcttttccagtacattgcccaagatcaatgaggagccaggacttgaacccaatttcttctgcctccaagttcatgttcataactattatctaccccatccttctt

SEQ ID NO: 831332 - DNA, 606 bp, Homo sapiens
aggctgtagcaagctgtcctggggatactgctgctgcaggacccgctttcaggctgtacatgaacatatgcaggtgttggggatgggggctaggcaggttgaagcagttgtttctgggggtggattcaacataggactggctgtcaggctaggtataagcactcacagggttggcagactgtgcagtgtaggtgcacatggatgtgatggctagcaggctgttcagccactttctgctgtgcaggttcacctgtttattggaaggttgtgacaaatgccacatgggtttggatgccagggtctcagtccttcgatctggcctatgttctgggcagctgaggtcatggtactgtaggcactatggtagtatgatggcagggcctcaggaatggaaagtcaattgatactgatccccagggcaagacacactgtatacatgggtccaggttcaaaatagtatagagccatagcagcctaggtcacagtggtrggaggtgctcaaggtggtctcttacaatgaggcaatggagttgcacggacctcagctactctccagactggatttgaggcctgtggggattaggggctgtcctgtagcaaggattg

SEQ ID NO: 831333 - DNA, 489 bp, Homo sapiens
atggagacataggtatttatgaagataatggtgagaggccatttgttgycttattttgaggggtgatgagcaaggagtgggaagaggctttgtgccttcttcagcctaaactagcacattcttaaagaccaggtggacttcagtttaacttcacatctgatagaagacccattcttcaagcctgcaaaatgactagtcctaccaacaccttagtattttgaactccaaaacctgtgcatcctgtttcctgtagggtcattcagagagcaggccataacataaacatcaactagcatactgaacattgataagtgaacagtcaaatgcagaagacaattaagatatgatttaagtagccccagcatgagatgagtcagctaaactgggatactctctgctaagattcaacctgttcctacggaagcattcagagcagtagtggatcctcacaaacagatggtggccttaaactcactttttcattcccag

SEQ ID NO: 831334 - DNA, 577 bp, Homo sapiens
tctttttatttttttagtgatgtgattgattttccaacattttattatacagcaaagttgaacattctccagtgagctcacttatacscagtacctacatgctgtgattctcattttactgtatttgtcttatcatgttatctgtttatttctctctctccctctcttcccccatctatccacccatccatccattttttcttcttttaaataatttttttaatgcctataatcctagcactttgggaggccaaggcgggcagattgcttgcagccaggagttcgagaccatcctggccaacatggtgaaaccccgtctctactaaaaatacaaaaatgagctggatgtggtgacgggcacctataatcccagctattcaggaagctgaagcatgagaattgcttgaacccaggagggcagaggttgcaatgagctgagattgcgccatgcactccagcctgggcgacagagtgagactatctcaaaagaaaagaaaagaaaagaccagcctgggcaacatggcgaaaccccatctccacaaaaaatacaaaaattagccaaatgtagtggctagca

SEQ ID NO: 831335 - DNA, 492 bp, Homo sapiens
ggtctcatgagacttattcactactatgagaacagaatggggaaaactgcctccatrattcaattatctccacctggccccgcctttgacaggtggcgatttttacagttcaaggtgagatttgggtagggacacagccaaaccatatcagtggctgaacctctctgtgctctggtttcctcttctgttgaatggacacattccagcacctaccccaaggctgaggatcaagtgaggggatgcacagagtgtgcttagaaggaacctggcattctgcaagcatccaacacatgtggctatgacgagtagctgttgtcattattgttattcctcgatattcttccgtgtgctttcccttaaggccagttttgttgcaccggcctgtgataccagggtgcagagggcacctgacattgctcagggaaagctagctgccacacagtagtcaacctcaaatatgtccttgatggcaaatctacctgacccagatgc

SEQ ID NO: 831336 - DNA, 475 bp, Homo sapiens
tactgactacaaacttaaatgtcttttcaatggaagaggtgtttttcaataaaattatagtatacccacaaaagtcaatattttgcatactctggagttatgtgatagatttatttgtattgacatggactattttgggaaatagttttagcaaaacaaagaaaggtacaaactttcagttataagatgaataagttctggagacctaatgtacagcaaggtgactacagttaacaataatattgtgtatgcttgaaatttgctgagacattgaatctgctggcaccttggtcatggatttcccagcctccagaaaagtgcaggagtggataaaatgttattaatgtaagctaaaatatcttatatatatagcagaatattatttttgctatattagtcaatgagtccctctccactatatttctcttttattcaatttaaamtggacattgacacccaagacctcagggctgtt

SEQ ID NO: 831337 - DNA, 589 bp, Homo sapiens
acagcttggtgatttactggattaaattttaaatgttctttttaattgccaaataatagttatatatctctgtgtgtgtcrtgtgtatatacatacacacaagattctcattcttataagaatgaatgggccggctaaggaagaagaaaaatgaaaaataagcatagatgtttcagatggtaataaatgctattaaaatgatgaagagtagcaataggatgggtagtaagcagtttgaacaggaggacaattttggctctggcagttctcaaggagcacctctgagcagtggcatctgagctggggtcttatatcatttatgatgcctttggctgcaagtaacagaaaactctgactcaaaatgaccttaacaaaataggaaaaaaattagattgcttcaaccaataagaaatactctaggggcctctttcaggtttgattaattctatgattccatgatgttattaaaagtccagattctttacttcctgttgtcactgtgtcctccccctttcagcttgttcctcaggctgtagccattccagcagacatacatgatatgacactcaaatgcataaaggggaaaact

SEQ ID NO: 831338 - DNA, 561 bp, Homo sapiens
atgtgaaaaatgtgaccagggtgggtgccttaaattcttcaggattatgtgaaagctgtagagacttcaggccagcagccctcccggaagactcaagatgaaaagggcactgacttttgttatgataatgtcagagtgtcttgtggacatcaaggacagggaattagccacccctcccttaaggacaagctggaaccaacgcttttatttctgcttctctctgatagagaaaagctctgtttctcagtgcatgtctcagccaatgaccaccaactttcccaagcttatatcccttcttttcaagaagaaagctaagacagagactcgatgcctaaattccattcctgtcgcagactggcctagtttggggcaggtgttcacctataaaccagtcagcagcccaggcctggcaggatcatgcttcactgttgctatytccatagagatggtaccaagaaaagggaattttctgagggctggttagtatagcactgtttgatgacttcacattcattcagtggacactggttgatcactcttaatgttctggacactaaattg

SEQ ID NO: 831339 - DNA, 633 bp, Homo sapiens
gaatgaaaatgagttgttatgtttaatgttttccaatggaagaatcttattttacgatggcttcatgtttcagaaaaaaaccaggggttaaattacattatgtagcatggtttaaaattcagggtagcagawgagacatttctctcatggaacagattaatacaagacctaatagaattttctgaccctaaaaaccaccaagagaagatttcatttatttctcttctgtatataaattttacatattataaaaattatttcagaaatgttattgccaacaaaaaacataaaatatagtatgaactaagataaaatggcagaataccatttgcaaatgattaatctagcctaacattgctttttaaaaaggccaacaactaggtttcatcttcagaatctgctttccaatcccagtgagcttgctcagttatgaatgcaacatccaagactgctggtttcacctccaacatgtgaatcattttaaagtcaccactcccattcataaaacaagaaaggagctcaacaaactgaaaacccacgacttttattatgcacatcagaaactgtaggtcacagcacagttacccccaaacctggagagacagggaaatatagataatcacaattaatgtc

SEQ ID NO: 831340 - DNA, 618 bp, Homo sapiens
catacactttaaaatttgtgtatacacaatggaatactattcagccataaaaagaatgaaatcctgtcattcatggcaaaatggttggaactggaggacaccgtgctcagtagaacgakccaggaacacgaagttaaacgcctcatgttctcacttattcgtggaagcttaaaaatgctgatctcatagaagtaaaaggtagaacagaagatcctagaggctgggaaggattggagaaagggagagatagggagagatttgttaaagaatacaaaattacagctagacgggaggaataatttctagtgttctataccactgtaggatgactacagttaacaataatatatagttttaaatagctatagggaggatattgacaaggaaataataagtatttgagatgatggagatgcaaatcaccctgatctgatcactgtaaaacatatgtattaaaatttccctgtttacccccatgaaggtgtacaattattatgtgtccatgaaacataaataaagtaaatttttaagactccaacaaatgctgaagtaggaaatctatctgtttcatgaggtaattgacatcaggcctcaggagaagcaggaatgctcagcatg

SEQ ID NO: 831341 - DNA, 602 bp, Homo sapiens
gactattaaagcaacacatgaattcagattgaatttttttttcttcaaggtttactccacaaatagtagattccccaggagaattactgtttcatgtgcaggccctgggcaagcagtaatcaattgtttyttaagaactttgttccttgaaaaagggaaggttaataccccatttctcactctgatgataattggcagaatgccatggctgagttgtgccaatattaagggaaagtgagagctaagaagcatgaatttattttgagggtgcttagctcctttaagggcaggccttggtgaaaatagtctttactccattttctttatttccccttttctgcaaaaaaaaaaaaaaaaaaaaaaaaaagaatatttcgctatgattctttggtttagtaacctgtatagtttatctccctttttaaaagactgccatattgctttttttggtttgccttatataatggtaaaaagagtcatgcatttgttcaattatactgcaatatcatggaaccctttcatccttcccataacttggttatctatagccaaagttgaaacaccctgtaaattgcctttacaaaatgaatggcatatcaaag

SEQ ID NO: 831342 - DNA, 604 bp, Homo sapiens
caaattattcactttttagttggaaaaatgaccactgagtggatccatgaactcaatggacctactgtaagctgaacctagaccagaactaygtaaggttggcccccatacatcgttattctaaaaggggcatcatgattatccttcacgtctccaagaatcagtatcagttcatatcctatgtccaacatatttttatatgtcttagcagtctgagtattctcctttccccggtgcacagttagttgtatcaatggtcacaaatcccacggaggaaggactgagaatgcacacctgtagtggtgttgcagagttcttcctcctgaggacctggcctctctttccgccattctgttgtgggtctaaaatctgatttagatctagaaagtgggaaggggtcatgatttttattgaaatggatgccctagcttcctgatcatccatccttgaattattttgattgtatagattgagcaagaatccttgtaggttgcccatccatcctgtctctaaggcactgtgttctatatgaccatccctatatctctctgaaggtcagcaccaccaccattttctggcttgctgccccactcagaccttgctg

SEQ ID NO: 831343 - DNA, 576 bp, Homo sapiens
attggagatatttgacatctgaacaatattgacactttcaatccatgaatatgttcacttatttaagtcttccttagtttctctcagcaatgctttgtaattttcagtggacagatattatatatgtcttggtagatccattcttaagtgtttcatgtttttgatattattgtaattaatatttttaaattttctatttcagattactcagtgcaaagtatatagagataaaatttatttttctatattgatcttgtaacttttcaaattgataaactctcttattagttttaataacttttttgtaaaatccatggggatttacaccagacagtcatgttgcttaaaaataaggagaatttacctatttttttctaatttctatggtttttgttcctttttcttaccttattgtcctggacagaacatccagtacaatgttaaatagaagtgagtagggtgatgtccttaccttgttcttgatcttaggaagtaagygcagtatccaaaaaatgatgttaggaccaggcatggtggctcatgcctgtaatctcaatactttgggatgccaaggca

SEQ ID NO: 831344 - DNA, 590 bp, Homo sapiens
ttctcaacaacaaaatggggataatactatttaattttagttaatcaagttgtaagaattaatggagatatgtacactgtggttgtcatagattaagaactcaataaaaagaagattattacgtttattgttattattatcaccactataactcatactttttggatatgctgctagataaaatccttttcttccttgctttagaatgcatttttaactctaaacttaaatatttatctttaaacattgtactttctgagcaaagtttatttctataggctgtctaatgaggccaacagaatataaacagaaggccctattcagtcgtagccaacatgtataaagagtcacaaaggtgggtgtgggagtcttcctgcgttggaaatgggaattcacgtgtttgcagaaatccagtttactacgcacctgtgtgagtatgattttcatcttctttgtgtctttctgatgtatattacagaaggagaaaaaacagcagaggggtagcagagaaattataagagaatatgaaacatgtcttctgattaagtttcagaagsagattgtgaaacagtcattcaagagaaagagca

SEQ ID NO: 831345 - DNA, 538 bp, Homo sapiens
taggctatttcccttggtatgagcaaatcaattttattagaatatttgccaaccataagctgtgtctatagacagtgtacatgctttatatkaagctacttcaaaggctgcgttggtagaatcatcaaggccctccagtacaggcgtacttgtaaattgctagtgtgtccttttatctttgagatcttctgatgtggagaatggataaaagtttggaaccatttttaaagacgcatttaaaatttcatctatgcagatgcagattttatttatatttcttttactcagatgcttttttaaaaattagattaattcaaatcttgcctccccttttaatctattctatgcattcacattttaattccgctcaccatcttttgatgcgcagtaaacatgtagactcaaataaagactcaaataaagaattagatttcactctcagctcaacttctgggtcaccttctatgacccagaagacatagaaaggtggaggccagctattcttactttcccctagaggtctgctaaggcccctcaa

SEQ ID NO: 831346 - DNA, 555 bp, Homo sapiens
aacttctgtcctcggctcatcttacatcatatatttactctcctgttgcaggtttgaggctgcaaacaggagagtaagtatatggtgtaagatgagctgaggcctaaaggaccatgcaaatagtgctggtttcattcttaagagggggactcattctagacccttttgacacaggctgcttttttctatgggcccattcagagtttcatgatgaagcaccaaactctcttcacacaaaagcagcagtgactctatatctggctgccatttcctgccttccaattgaagtctttcctagtaaagagttaggacacccccaaacctgggcagaacatatcccccacccccaaccaccaatgtcaatggctcaaaagctacacaagtaaaccttaagtattagtaaagcacaaatcatgtcacttccagatggaagactgtgtcattcctgaatcaaacactcattygtggtacccattatggtgccatttggccctacaaatcctctatacagaaagtgcaaataatacacaagtgcttatcaggttaatctgagtg

SEQ ID NO: 831347 - DNA, 632 bp, Homo sapiens
  misc_feature 1, 2, 3, 4, 5, 6, 7, 8, 9, 10, 11, 12, 13, 14, 15, 16, 17,18, 19, 20, 21, 22, 23, 24, 25: n = A,T,C or G
nnnnnnnnnnnnnnnnnnnnnnnnntaaagtccccccttaaagcattcaaaattatttaaacactggagtatttgggctatttctctttggtgggaaacctcattttatattttatcctagttgtgaggcatgggaccattttgttttggcaaatgtcgatagatcaagaattgtattaaatctaaagactcagcatagaattgaattgttcaatttgttggccaaaccagctcacaaagtagaaaaattaaggcaaaaatagacagtagaaaaaggacacctagataagtatttattctttatggtttctcgatttttaaaagctgcattctagctttggtgacagtgtttcttcaacaaggtagatagacaatggtataaaaaagatttgagctgatgccaatatcgatctctggtttcttctcatagtggacctagtgataacaccaactggtatggctaaggtaacagtttctattgtagtccaatatggttcatttctttttattactgtggtcaactgtaagttatctccttgttgctttatgatctttattgytaagtgttagtctttgcttaagtattgcttaaagtgcattttgaatactgggctttcattcattaatttttt

SEQ ID NO: 831348 - DNA, 441 bp, Homo sapiens
ggaaattagatcattctaaaatatctattagatcaaaagttttgcaatcctgtctacccccacccccgatgtcctatataataggaarcctgaagaaatataaaaggaaatgcaaagttaaaagaaaaagaaagtcattgtagcaaatatcatgtatcctgatggtcaatagctatataatatactgctgctccttatgatattatggttattataagatatattatctatctacctttttagaaattcttattttttttagtgactaatcactcttacccacagtattgtcttctttatcttattagtacttatctcttactttatttcattactgtcttctgtgttcccaatgaaaatgtaagtgccctgagagcctgtccattttctttactgatgtattcccagcacctaacacagtatctggcacatggtggatat

SEQ ID NO: 831349 - DNA, 341 bp, Homo sapiens
cttttatattttccaggtctctacttaacatttttgctctagcttttgtgctatagagtaatacagttacaataactgtttaaatgtccttgttggcgatttctaacatytaagcaagttctggtttggtgtcatttgacaagttttcctcctcatcatgggtcatctcttaccacttctttgcatgcctaggaatttttaaattaattccagacattttgatttttaccttgatgggtgctggacatatttgcatttctacagatatttttgagttttgttcaaagacacagttacattacttggaaacagtttgacacatttgaatcatgcttttgaga

SEQ ID NO: 831350 - DNA, 607 bp, Homo sapiens
attaatagggcagggaccatgattgtgtcattcactattgatccccatcacctagtgtagtgtctggcacataatatgtactctataaatatttaatgaataaacagatgttgtctttgtaggatatcaccattctagctggcctgcaggagcagagaacatactttaggaataatggggaattagtttgggtatgtagggcaggacccatgaaaaccagggagaagaaagtcatcattttaaagcaccaacatactagaggtggattattcctttagagggtttgaaaggcatttaaggaacatgcctccatgactcgctcccttccttccttttttgtccactagatctccagtcttcctatgaaactgggttgaaaaatacataaaattaacttgacaatctacttgtgccatctgaatttgccttagtttcatctggaaagaggaggtattgatgggctttcagaatccaggacaagcgatcakcctgagagtcatgtctctcttgtcatggcttctgaaatctacagactgtctgtggctttcttttgcctcccctctcttcgctgagccaagctggacaagaactggcagctttaccagga

SEQ ID NO: 831351 - DNA, 422 bp, Homo sapiens
agaattccctttctatgctctttgtacgagctgcaatttggtttctcatacttacattttgtgaaggtttctcataaaatggggttttctagcattatctgggccatttatgtcactatttctatctctctctctgtgtctgtttctttttgcattagagtgaaagagtacaaaatgtaatttgtccattagtaaaaaattatgagtccaggttggcaagggcaaatggagacctcaacaataggtcaattgtgatgtaattaattacagtcatgtagcttggagttcaggctgatgacgattcagttacacatcccagagagagggagaaagagaacacagaytgattctgttccaaacagttaacagaaaatgtcgttgtgccttattctgcttacaagtgaaactcttgaaaaatctta

SEQ ID NO: 831352 - DNA, 496 bp, Homo sapiens
acaccatttattaaacagggaatccttttcccattgcttgtttttgtcaggtttgtcaaagatcagatggttgtagatatgtggcattatttctaaggccactgtgctcttycgttggtttatatatctgttttgataccagtaccatgctgttttggttactgtagtcttgtaatatagtttgaagtcagatagcatgatgcctccagctttgatctttttgcttaggattgtcttggctatatgggctctttttcagttccatatgaaatttaaagtcgtttttctaattctgtgaagaaagtcaattgtaacttggtggggatagcattgaatctataaattactttgggcagtatgccattttcatgatattaattattcctatccatgagcatggaatgtttttccatttgtttatgtcctctcttatttcctggaacagtggtttgtagttctccttgaagaggttcttcatacccttgtagtttgcatt

SEQ ID NO: 831353 - DNA, 556 bp, Homo sapiens
tcatcctgataccaaaacccggcagagacacaacaaaaaaagaaaatttcaggccaatatccctgatgaacttcagtgcaaaaatcctcaataaaatactgccaaagcgaatccagcgccccatcaaaaagcttacccacaatgatcaagttggcttcatccctaggatgcaaggctggttcagggtgttttttttaacatgaagggatgttgagttatatcaaaagccctttctgtctctattgaggtaaccatgtggtttttgcttttatttctatttatgtgatgagtgatatttattgatttgcctatgttgaaccaactttaagtcccaggaataaagcctacttgatcatggtagattggcgtttttatttgctgcagaattcagtatgctattattttgttgataatttttgtatctatgttcatcagggrcattaacctgaaggtttctttcttcattgtatctctgccaggtttcggtattagaataattctgaactcacacaatcagttaggaaggagtcccttcttctcaattttctgtaatagt

SEQ ID NO: 831354 - DNA, 646 bp, Homo sapiens
gataaatcaaatattaaaagggaaaactaaaaaacatctccaggcttaaaaataaacctctccctggaccagaaatggtacagaaatgcaaagtggtgattgcatgtgaagcaacaggcctgctgggcactggctccagcaacaggcagtggcggctgggaattggccctggcagatccttccaaagccaaaaggacctaagccacgctgactacttaatgccagggattgaggtagggcacacatgctcatgaaaacaggttgaaaatagctagcgctccttgcttcctgggaaagtcagtaagtggcagggtagaaatttgaacccagcagcctggttccagcacctgtgcttttaatcacaatgccaagcatagtgtttacagtctctgacccagaagttctacttcttgatataaccctgggttaactccctacgatgcaacagaaaattgtacaagaatgttcgctatggtattgtttgtacaggtgaaaagagaaaattaagtgcttttaagcaaaggacaaagaaactgagaaatatgtrtataaaggaatattacacagcaatcaaaacaattgatctcaccactagattctaacactgcatacatcacatggacaatctgagaaagacaatgtcgag

SEQ ID NO: 831355 - DNA, 649 bp, Homo sapiens
cctcatcccagaaacctcagaatcattcttgattacattctcttcctcatctcgcataccactctcttcaccgaatttatccctaggcccattgtattcgaccattaaaaaacatttcagatccatctatgtctctatttctatgaaccatttaagccttgataatctcttacctgaatataaaaatatcctcctcactttttttgcccaatccctttcttggtatgctgactgccccaatcccagggtattattacaattagccagagaactgttctgtatgtaaatagagccatgtcatatccagtttaaaaccgtttaatacagcacttggaataatatggaatcttcttagcacagactattgggcaatgcatggttggctgctgctcacctcacctacctcttgttcttactaactctactcatccaccagtttctttcttttcctaaaacatgctcagttcttgtcttaaccctttgtagggctcctccctcttcttggaatctccctgacccccgtctttcttccttcagacctcagcatacctacygtcttctcaagaaggattccctaaacacccgatctagagttgctccaaccacccactcactatgctttctcacagcatcctattttttgcttcct

SEQ ID NO: 831356 - DNA, 646 bp, Homo sapiens
gtttgtgataagagaagccaagatgtgtgtgtttccaggatccatccctttattgattcwggcagcttgtgtgagtagggatctggctttcaaaacccaccttaaggccagggaagggaaacaatcagactccctcgtcttgcctttttaacatggggtatatatagtatggtgccctggaatcagcgccagcctggaattttggagatttcaactcaatttccagtcttccaattgacaacggcatggcttaattcgattcctggctttggtgtttctttttctccctcctcctgctctcctccttcctgctgtccctagtgtaaaagagaaaataaagtgtatgcactctaccttccattgctcctctgaaggatgagatgcctttctgggaatacttggaagtggtctattcatgcactgaaaagcattttttggcctggaatccaataatccataaaggagatctttcctactcacagagatatcatagcctggtaagaacaacagactgaaaagaaacattacagatgagacaggtgctgtgtttgggctgtgttcagagggtcgctgggacacaggaggccctccaaggctttcctgtttggtggtggtagatccagctcattgtggttctcccgtgcag

SEQ ID NO: 831357 - DNA, 584 bp, Homo sapiens
ccctccaaaattcctatgttggaacctaatacccaatgtgatagtattgagacatgggatctttagggrgtgattaggtcacgagggctctgccctcatggatggaattaatgcccttataaaagaggcttgagggagcctgtttcccccttgcaccatgtgaagacacagaaagcgccatctaggagaacaggccctcaccagacactgaacctgttgatccctcgatctgggacttcccagcctcgagaactgtgagcattacatttatattgtttataaattactcaatccatatcacccaatccaaggaactttttaacttttttttttttttttttttttttttttgagattgtgtctcactctgtcacccaggctggagtgcactggcatgatcttggctcactgcaacctccacctcctgggttcaagcaattctcctgcctcagcctcctgagtaactgggattacaggtgtgcaccaccatgcctggctaatttttgtacttttagcagcaatggggtttcgccatgttggccagactagtctcaaactcctgacctcaagtgatccgcccacct

SEQ ID NO: 831358 - DNA, 576 bp, Homo sapiens
agggagtccaactgaatcatttcttaaatcccctcttagtktagaaagccaagcttttggcttggccatagggagcctgtggattctgaagaaggcagatgacagacaaaatgaaggaggctttcttagaatacagttatgttgcagggtgccttgcggactggaaggagggtgaccaggaggcagggaggttacaccaccagtagtcccagagatgtgttgtgtaaggttctggactgtagcatcgcaggaggggaccagccagataggcaaaagctgtgaggtccacaacaaaaggaaaatgaccaggagagcaatcccatttggccactggccttcccagatagatagaaactgatatattaatcatcaaggctgagggcacagggcctatttccaaggaggcactggggaatggatggggtagggggaggatgaggtcaatgtgtagattaaaagaaccaaagaaggcttgcttctaaaaatcatgtaattgcctctggagtagaaagtgagcaagaaaagcctgggagggttttctccaagtacaccacagctccgcaccaccccacggac

SEQ ID NO: 831359 - DNA, 620 bp, Homo sapiens
ctgaggaaggaggatcgattgagcccaggtggtcaagcctgatcacaccattgcactagagcctggacaaccacaccactgcactagagcctggacaacagaacaagaccctgtctcaaaaaaaaaaaaaaaaaaaaaactcacaaagtaggtatggctatgagttctagccaatgtaatctgagtggaagcaatgtgccctacctccagcctggccttctgcacaatccatgttcactctctcccgtctcctgccagccagagacagatgattcaatgagggttccaaggccttagaaaatgacaaggccactagatgaaagatatctgggtccctgaatgtctgcatgaagcaaagccctcctctttcttccagcaggaaataacctgtattagtctgtttcacactgctgatacagacatacccaagactgggaagtttacaaaagacatttaatggacttaccgttccatgtggtggggaggcttcacaatcatggcagaaggtraaaggcacacctcacatggcagcagaccagatgagagcttgtgcagggaaactcccccttatataatcatcagatcccgtgagactcattcgtcaccaccagaacagcaca

SEQ ID NO: 831360 - DNA, 590 bp, Homo sapiens
ggacacagtcaaaccacatcataacctaagttaaaccactgagatttggagttctttgttacagcagagagcctactctgacttacgtaagacatattgcatatataytgtcatgtttaaccctcttaacaacctgactggtaaatattactatttatattttacagatgaggaaattgagtctcagtgaagggaagtaacttgctcaacatcatactgcttcaaagtggcacaggcaacatttgaacctatgcatctctaactccaaagttcatcttctttattttttgggagatgattgctaccaaagctcctctatacttccctccttgcttctgggtacccttcccagttgcaaacagttcctgcaggtgccgctcctacataaatacacttgctactgagaagcagtgcagggcacgatcagcaggcctagctaggaaaccagaggcaaaggaaggccagaaccaggctttgctgtccagtccaaccctggatctgactcaatcagtctgtgaacagtagaagataaaagctcctactaagcccatatcttcagaaatatcaataatatgctctaggaaataatc

SEQ ID NO: 831361 - DNA, 590 bp, Homo sapiens
ggacacagtcaaaccacatcataacctaagttaaaccactgagatttggagttctttgttacagcagagagcctactctgacttacgtaagacatattgcatatatactgtcatgtttaaccctcttaacaacctgactggtaaatattactatttatattttacagatgaggaaattgagtctcagtgaagggaagtaacttgctcaacatcatactgcttcaaagtggcacaggcaacatttgaacctatgcatctctaactccaaagttcatcttctttattttttgggagatgattgctaccaaagctcctctatacttccctccttgcttctgggtacccttcccagttgcaaacagttcctgcaggtgccgctcctacataaatacacttgctactgagaagcagtgcagggcacgatcagcaggcctagctaggaaaccagaggcaaaggaaggccagaaccaggctttgctgtccagtccaaccckggatctgactcaatcagtctgtgaacagtagaagataaaagctcctactaagcccatatcttcagaaatatcaataatatgctctaggaaataatc

SEQ ID NO: 831362 - DNA, 552 bp, Homo sapiens
tgtcactgggcaagacaactgtctttagcagaggcaatacttgaagagggctgacagccaaaggccattagctggagcttcctggctgctggaggaataaatgtttaattcctgaaggagacctaagcatcctccaccacacttcactatggccatcttgattggagcccctctcttctcaagagcagtgcaacagctcctcactggtctgcctgcttcaatcctcttatcacacaagctagggtaatcctttgaaaatatgttagatggtgtcccacctctgctcaaagccatcatgtcagtactttcctgcctcaacctgagtaacatccaaagtcatcacagttgtctgtaccaccctgcagcctctgctccctcagctctcaggcctcagccactacccttcccctctttacaacggcactctagagactctgaactcctcgccgttctttgaaaatcttggccaagttctgttaaaagataaatktatgcatattaaaatgtcatgagtttatttgagctttaaatgattcaggaatcgggcagcac

SEQ ID NO: 831363 - DNA, 715 bp, Homo sapiens
cccaaaccctaatgtaataatgagttttcctgggacaataataaacacatgcatgataaaaataactttacccaaagaaattttaaatgcttaaattcaagccagtgttgctgaaaataatttttaaaaaaaaatgaacaaaaatcaaggtccagaactatcctgtcacaactggcttgaggtagagttagaatgcctgtcttcacattatatcatcataagtcacttcaaaattcttactatctttcaattacttgggattacccattaacacaaatgtttaagactctgaggaatgaaacacagaaatttaagacctgaagtctcataatgccctttagtcctatcttgaaaatcaaaacacccaacagtaaagaagataatcccttaagggccttggaaaaaccctaacaaactatccattcataacagctaaaggatttgaaattctggagaagagaggctgtaactgcttatgaaatggatcactcaagtgtgtccagagtgcttgctctaactgtcttgctaatctaaaagcatgctccaagcctgtaaactttaaactgctgactgtaatcccatttaaagagctttgttttattgggctcttctgctataattcaaataattatgtcaaaatgttctcacatatataataatcttaaaaagggggtctatgaagycaattaaggatccacttagtaaagaggaaaaa

SEQ ID NO: 831364 - DNA, 504 bp, Homo sapiens
  misc_feature 375: n = A,T,C or G
tcatatagtttatttttactagaatttttcactaacttcgtaaacctctcaaaataatctagaaactcagttacctcattagagtataaaatacatatatggaacaaaatatataatttgtyatgcagattatgttttatcacacaagttcttttactaagaaagtgcaattcctttctagttatttttctcaaacttcagggaaatagcaaatttttcctcagctatctctgaggcatatagcctcttattcatctacataaaaatgacgttataaagatattaaataataatcccaatttcttagatatgaatatggtttttgagtgtctggatttttattcagttatagctgcatattggaaaatgttttanaagggaacacattttgaatgcgtatatgaatctgagcagcagtatctcagaatggaatgtttttccctagagaaatatgttaggaatacgcttcttccaaatttttctctttgattatatagagttttt

SEQ ID NO: 831365 - DNA, 486 bp, Homo sapiens
ggtcataggataattctatttaactttctgaggagccaccaaaccattttccacagtaactgtaccattttacaattttaccagcaatgtacaggattccagtttctccacattctcactaagacttgttattttctgtttcgtttgtttgtttatagccatcctagtgggtggatgtggtatcgcattgtgcattttgatttgcatttacctaatgattaataatgttgagcatcttttcacatgtttattgacataggttttattttatactttttccacccatcagtataccctggaaatcactccatatcaattcgtaaacatctttcttgttcccttttgcagctgcayagtactacactttatggatgtgctatagtttattcaaccactctcctgtgtaggggcatttagattttttccagcatttttcagttacaaacaatgctgcagttaataagttggtgcaaatgcattttttta

SEQ ID NO: 831366 - DNA, 642 bp, Homo sapiens
aacccaccaaaagtgccccatcaattaaattctcacgagggccttgtttgtctcatttgttcattcaaatatatattggccaatggctatataatctaaaaataatatttaacagttaaggcaagtttaagatgtctaatattactcttcccagagactgctttcctcctgctttctgctaaactgagataatggttatctgaaagttccgaattatagaaactaagaaagacaaaacagagatatggctgactagttgctggcttgaatttccttgatatacagacatacagatttatgccctattttaaacattgctttttacttgtgttttgtcttcttgctcttctagaaaaaactatccaagatgactgtcacttactccagtaaagtagcaaatgcaactttttttggatttcataggttactcctcaagtggagaggcagcatctacaaactactgtacagggaatttattgtttttgctgttctttatacagcaataagtttggtrtacaggtacttttctttacatgtctccttaaatggccatcagatattgtgtaagatacagtctcaaaaatctgaaccttttgattgccactgacttcgcattatggaactccttttttgcgtgagcct

SEQ ID NO: 831367 - DNA, 557 bp, Homo sapiens
gtaccactgccttgatttatgctgagaaaccagccattgtacccacttttgcttttatacaatcatggcaagtgtcaataaaaaagcaggcaatgactttgtattactttcacaaatttttaaaatttttcatcagctttctcaggtttaattagtatgattcagaacagtgttggccaggcacagtggctcaggcctgtaatcccagcactttgggaggccgaggcaagcggatcacctgaggttaggagttcaagaccagcctggccaacatggtgaaaccacatctctactaaaaatacaaaaattagccaggagtggtggcaggtgcctgtaatccctgctacttgggaggctggggtaggagaatcacttgaacctgggaggtgaaggttgctgtgagccaagatcacaccattgcactccagyctgggcaacaagagtaaaacttgttttttttttttttaaaaaaagaacagttatgagctcttaggccttctggaaggggtcttcaggatcctgagaggtccacagagcacatttggagaaccactggt

SEQ ID NO: 831368 - DNA, 421 bp, Homo sapiens; identical to SEQ ID NO: 831039

SEQ ID NO: 831369 - DNA, 541 bp, Homo sapiens
aatagaaaacagtggatactaaatgccaagtaaaagattcaagcagctaatgagggaaagaccattgttgcaagagtgagtgtggaagaattactrgaaagagggtggggacctggggtcagctctaaagaaagggtaagacgtgaataaaccaaggggattgggaatgggattctagatagaaggaatggtgtgaacaaagactgggaggtagggacctatacagcattttgaggagcaatgaatggatgaatggatgagtgtgggtcaatcagatttccagtttccataggaaatgaaaggagataagtttgaagaggcagactgagggtgttgaatggctctattgtgaaggcagtgggcagccatcgaaggcgattgagcacaatagtgaagcatacactgtgttctagaagactcatgcgccaggggtgggggtgaggactggagaaggggcgactgagaggaggcctcaactgtgctgttaccagggcagaggacaaggaaggctgtgtaagatggtgtatttgaccctttccat

SEQ ID NO: 831370 - DNA, 554 bp, Homo sapiens
agctgcagatcctccttattctttatatattgctccttggtgggctcacctgttctgtggcttccaccggcatcrcccagttggccccacatgcatcaccaggaggaatctaagcacagatggggacgttaacactgcctacctcattggtggtggccaggagtaaatgagataatactattcaaatccgcaggacttgctttcctaagcacaataaatctgtgagcagctgtcacagtatgattttgggtcctgtgtgactactctctgtcttcctctccacccaatccatcgattgcttaacctgccccctcacctccctcatatggctaattccttccaacactgcccttctctttcttacctcctactctgtgttactggtggtctgcccccttccggttttgaaagctgcattccctaccctgcccattgtattagcctgttctcatgctgctaataaagacatacctgagactgggcaatttataaatgtttagttgactcacagttcagcatagctggggaggccttatgatcatggctgaaggtga

SEQ ID NO: 831371 - DNA, 554 bp, Homo sapiens
agctgcagatcctccttattctttatatattgctccttggtgggctcacctgttctgtggcttccaccggcatcacccagttggccccacatgcatcaccaggaggaatctaagcacagatggggaygttaacactgcctacctcattggtggtggccaggagtaaatgagataatactattcaaatccgcaggacttgctttcctaagcacaataaatctgtgagcagctgtcacagtatgattttgggtcctgtgtgactactctctgtcttcctctccacccaatccatcgattgcttaacctgccccctcacctccctcatatggctaattccttccaacactgcccttctctttcttacctcctactctgtgttactggtggtctgcccccttccggttttgaaagctgcattccctaccctgcccattgtattagcctgttctcatgctgctaataaagacatacctgagactgggcaatttataaatgtttagttgactcacagttcagcatagctggggaggccttatgatcatggctgaaggtga

SEQ ID NO: 831372 - DNA, 565 bp, Homo sapiens
cttaaactccctgttcctgattgatggttgggactgtgactgggagttgcttaaatagctccctcccgtttctcagctaaactcaatttcaccatcagcccccgcagctggggtagatcttgaagttcccttcctgcccctctgagcagaccctggtcctgtcccatctgctctgatgggagtaatcataacaccagggtatcttccctgcctgacagggacaatgggagctgagtggctatcagaagaggtcacggtgaagtgatgctgactgagagggtgctgatggggtgtttttgtgggaaggcagagacagagcatgtatccaggagacagaagcactcagcatcccagtccctccttccactcctgctctgaggttgcagtgaagcagggtttggggattggcacccagcatgatgactgtgtgtctctggatgtacatgtgtctgctctgaytaatgagtagcctctgacattaagcactcactcccattagaggagggtgatggggacatgagaatgaatgactgcaataaagtgttaaggtgtgtcactacacaag

SEQ ID NO: 831373 - DNA, 565 bp, Homo sapiens
cttaaactccctgttcctgattgatggttgggactgtgactgggagttgcttaaatagctccctcccgtttctcagctaaactcaatttcaccatcagcccccgcagctggggtagatcttgaagttcccttcctgcccctctgagcagaccctggtcctgtcccatctgctctgatgggagtaatcataacaccagggtatcttccctgcctgacagggacaatgggagctgagtggctatcagaagaggtcacggtgaagtgatgctgactgagagggtgctgatggggtgtttttgtgggaaggcagagacagagcatgtatccaggagacagaagcactcagcatcccagtccctccttccactcctgctctgaggttgcagtgaagcagggtttggggattggcacccagcatgatgactgtgtgtctctggatgtacatgtgtctgctctgattaatgagtagcctctgacatyaagcactcactcccattagaggagggtgatggggacatgagaatgaatgactgcaataaagtgttaaggtgtgtcactacacaag

SEQ ID NO: 831374 - DNA, 530 bp, Homo sapiens
aatattccattgtatgtataaataatattttgtttatccattcatctgtcaatggacatttgggttgcttccaccttttggctattgtggataatgctgctatgaacrtgggtatatggacttttttgaaaaaaagttgtgattaaacatgtacatgtatattgtagaaaaattaaatatataggcaagtagaaagcaccctcccttcccaatagagatatccactgtgtatattttggcttctttccctgtaactatatttttgcctatacttgtgaaatgagatcattctatacatattcttatggaaactgagccattggtaaagaaatgtttgaaatagatcaagtgatttggtagtttccttccttgagccccagggtggtgggtgcctgtgctgtaccaggctggcctggtactgtgaaggtaaggctggccttatctcctctatggctcctgtatgatcaggacagtgttccccaatggaagtaggggaaatgggctgtgagaagcccaaggtcatctggctc

SEQ ID NO: 831375 - DNA, 530 bp, Homo sapiens
aatattccattgtatgtataaataatattttgtttatccattcatctgtcaatggacatttgggttgcttccaccttttggctattgtggataatgctgctatgaacatgggtatatggacttttttgaaaaaaagttgtgattaaacatgtacatgtatattgtagaaaaattaaatatataggcaagtagaaagcaccctcccttcccaatagagatatccactgtgtatattttggcttctttccctgtaactatatttttgcctatacttgtgaaatgagatcattctatacatattcttatggaaactgagccattggtaaagaaatgtttgaaatagatcaagtgatttggtagtttccttccttgagccccagggtggtgggtgcctgtgctgtaccaggctggcctggtactgtgaaggtaaggctggccttatctcctctatggctcctgtatgatcaggacagtgttccccawtggaagtaggggaaatgggctgtgagaagcccaaggtcatctggctc

SEQ ID NO: 831376 - DNA, 622 bp, Homo sapiens
gtgtccaacatacagcagttatgcaacaaatatctcccaagggaatggatgagggagmagaggagggaggttgaagacatgtgagatactcttgccatccttcatttctccgtttgcattatttttaaatacagcaccttacaaactgatttactgagcaactgccaagtacagggcatcgtgctaagttcgtgaggactatacatataaatcaggtggaatttacccttccaggagattgaaggggagatatgtaactctcaagctgattatagacaagagtaaatgacccaggtgaagtggagataaaatcatataggaatccctataggagaccccatggctgtgcttaggaggaggactgctggcaatcacgaaagattttagggaggggacagtatttgagttggattttgagtgatgtttgggcatgcgggctgaggacattttgggtactgagtacagcatgagcaataccttgtaggtgggaaagtgagatgtctgggctgggctttgtggagaaaatgaagttaaggtggctacagattcagagacttaaggggcgggtgcagagatccaatgagtggaccgtgctcggatcccaactgaaacaaactgactg

SEQ ID NO: 831377 - DNA, 617 bp, Homo sapiens
cttgcatatgtgtgatacaattgttatatttcttttttccttcttttaaaattggtaattggagcatatggctaaaagtcaactatttttaaagtaatggaaattttgcagttcagcatgttgaagcatgctgtttggctgttttagaagaatgtttttcttagatgccatcggtttaccacaccacccttgactgggaaatggggctaagattttaataaattagccaaccaagaaacctgacttacccttgaaataagatgggtgtcatcttctttgtgcagtgtagtcgccctggaaggactattagaagatctcaattctctgttttgagaagtctaggcttgatttttttagctggtaaaaaatgtgcaggtagtggcctgaagccaagtgtgacgatttggaaccacagccggtaagctgtgtgaagtccttcccttttgggaagcagatgtgagtttagtggacctaacagtaataacaagggctatgacgagagctgtaatcccatttaactagatatttacaataatgtacyaggtgggcaacttcatcccccttcttcagataggaaactaaggctctgtgaggccaggtccagtggaaggcccagc

SEQ ID NO: 831378 - DNA, 610 bp, Homo sapiens
acttccactttctgccttatgtttttgtcttctttttcaaatcttccctattccaaagggcactttcctctggtctcttctgcttattcacatggacttccctttcctcggttcagggtgaccaagaattggaagttccagagcttggggatagcaccttatgagcaggcagccctgctcaaagtagaacgtgaatccctggctgcttttccgtattcttttaggtccctgttgatagatttctttgcaaacaagtgggatactcatgctcctttgctcctgagagtgaagaaagttgcaacccagctgtgttccctccaccctcctcatggagagtgggttctgtctgcgtgttcccaggctatgatttatctggagctgcaacagcttatcaggccagagctgcacaggtttagagagggaccttcctgaaaatcagaggcccagatagagagctcaaccttgacatctcctctactgcccgccagggttgttactgaagactttgttttctaagttctctcactggaataaaagctsttttgtgatgagcccctgccagcctggctaagtagcgacgttccccccagacatgtcaggatccgctaaa

SEQ ID NO: 831379 - DNA, 596 bp, Homo sapiens
ctctgcctccaggaaacaggacctaaaagacaccgaggcacagaaaactgtgctgcagatagccggtaagtggctgggcaggattggaaccctggcaggctgtgctcccaaccgtaacatgccactgtctctcggtgccagggcctggccgggtgggcttggggtggctctcaccggtagttgcagggctcagctccgaataggcaggccaggatcatctgctcgccggggtagctcatctctactagctcctgctgtggcacctgtgcaaagatgttggtggcctgcaggatgtaccactctgtcaatgcctgggtagcactggtgaagttccggaaggtacactgggtcctgttgaggctacactgtggaggccaagaggggtttttgtgggtggcgtgggagctgctagcaggaccccagccactgctcgagggccctagcagggcaagagctgtgctttgccagccacctttctggctgcaacttggtggtgggaaacgttcacactcatgctcacacatgctcaagggctactgcctcatacacagctgtgtgctgaycacaagatcccctcatcaggctggtgcacccac

SEQ ID NO: 831380 - DNA, 407 bp, Homo sapiens
gaatatataaagaactcttacaactaaataataagacaaacagttcaacaaaaaatgggccaatgatttgaatagacaccataaaagaggaaatatgaatggcccataagcatgcaaaaaaatgctcaccatcattagtcactggagaaatgcagatcaaaaccacccacaatgagctatcacttcacacccattagaaggactgatagtatctagtattggtgaggatgtgtagcaaccggaattctcctacacagctggttggaatgcaaaatggtacagtcactttggaaggtagtttgatatagtttcttgtaaagttgccaggcgcggtggctcacacctgtaatcccaatactwtgggaggtcaaggtgggtggatcacttgaggtcaggagtttgagact

SEQ ID NO: 831381 - DNA, 625 bp, Homo sapiens
cgtattacttgatatctcaagcaggactccagtaaatatggagtcttatatgaatctgattttctaaaaatcttgggaataatctaaaaakttaaaagtccacaggccgttctttgtgacttttgctatctcttgtattccaaaggggagcacctcagctcacttcatttctgtgtcttaacccaggaccaggcacaccttaggccttttgtaagtaacatgacacttctggactccacagtaagctgggcttggctctcaacaagcggaaatctcttctttggctcagggctcagtgcaaaggaccctctggtctgtacttggggtgtggatgaagtcacaaacagtggctctaggcatcacccctgcgtccccccaccacccaagggccatctccaggtctcccctgttcaggaaaagacttcctgcttactgatgctgatgagtccctaagcattttatttacatcaccccactaatccacctaacagtttggggagggtgccattattatcatgcccattttacagatgtgaaaactacggctcagggaggggaagggaattgcctgaactaggaaggggtgaagctgggattataatgtagtgtctctgattctagcttt

SEQ ID NO: 831382 - DNA, 484 bp, Homo sapiens
tcggatacttatagtaaatcacacacatttcctggtaggccaagttaaaacacatcccataaaaaatggcaggaatggaaatatttgagttcctaataagatccaagagcttgtctttaccatatctccttctgttcaaatttgccaaatccagccatggaagaaatgaacaaagggctgacatctccaaggcactaatcctgcatgtgtccataataagtctattattaatttattgtctataatgtggtcactgggaggaggaccaggatagaggagacacatagtctctgacatcacagagtatatcaattaatggggaggggcatgtaaaaatatgtccatgaataacactaagtctgggtagaatgtgggaaattgataaagaactgtagtagttggaagagggggaagtcactgatggcygagaggccaggggagttttcctggagtagaaggcattcattctagaactttaaggatg

SEQ ID NO: 831383 - DNA, 566 bp, Homo sapiens
aatgaacagcatttcctaaatatgctttttttttttttttttttttttttttatacagagtctgtatctgtcgcccaggctggagtgcaatggtgtgatcttggctcactgcaacctccacctcccaggttcaagcagttctcctgcctcagcctcctgagtagctgggattacaggcacccgccaccacactcagttaatttttgtatttttagtagagacgaggtttcaccatgttggccaggctggtcttgaactcctgacctcaagtgatccacccccctcgacctcccaaagtgctaggattacaggcatgagccatcgtgcatggccgtttttttttttttttaatgaatttataacaaggcaggtgaaaatggcagccacagaggaggacaaggaatgggagggctgcctgttggataatacccagcttgctccccacctgccctgagctctgtctgagcagaacagtgaaatctgtgagtcttggagcaaccttcttagagsccacactttaattaaaacttttctcacataatacattatctataaaagcaattcgg

SEQ ID NO: 831384 - DNA, 618 bp, Homo sapiens
agaaactactcaaatctctccccyaccctcgcagccctgactcctttcagccgagcctcctccagtcccctgtaagaatctgaaatcctctatgccctggggctctgcatctggggtcctgcatctagaagaaaaacacgagttggaaaacatatctgagggtcatcctctccacccccaggcactatgatttcatccaagtccacagatagcaaggccccagggaccccctccccttgggtggatttggtcccaagcccgtgtcaataagccatttgcacaaacgccttttgggatgatgccaggcaaggtgtgaggtaacaggatcagaagggctcatgccagtccggactcagccaacaacattccggcatcacaccctttaaagttcaacatggcaggggggcagcctcacacacccagggcccagggcagctgcagaacatcccctgtgcggcccgcacacatctgcacgccaatcccgtgtgcacgagcaccggcaagtgcatgcgtcccccattgcctgggaagcaacattcacactgaattcacaaagtccaaatgagtagctcaagatccatgcagaattcaagctgcattgttgggttctaaaatgtg

SEQ ID NO: 831385 - DNA, 618 bp, Homo sapiens
agaaactactcaaatctctcccccaccctcgcagccctgactcctttcagccgagcctcctccagtcccctgyaagaatctgaaatcctctatgccctggggctctgcatctggggtcctgcatctagaagaaaaacacgagttggaaaacatatctgagggtcatcctctccacccccaggcactatgatttcatccaagtccacagatagcaaggccccagggaccccctccccttgggtggatttggtcccaagcccgtgtcaataagccatttgcacaaacgccttttgggatgatgccaggcaaggtgtgaggtaacaggatcagaagggctcatgccagtccggactcagccaacaacattccggcatcacaccctttaaagttcaacatggcaggggggcagcctcacacacccagggcccagggcagctgcagaacatcccctgtgcggcccgcacacatctgcacgccaatcccgtgtgcacgagcaccggcaagtgcatgcgtcccccattgcctgggaagcaacattcacactgaattcacaaagtccaaatgagtagctcaagatccatgcagaattcaagctgcattgttgggttctaaaatgtg

SEQ ID NO: 831386 - DNA, 639 bp, Homo sapiens
atatatatataaacaaatgatacagatgaacagccagatggaagacatgcacagggcaargtatgggagaagaggtgcagagcttccaagccctctttagaggtgccaccccggggacccacacatgttcagcaatctagaatctcctagacagcttaacaaatcttttggatttgtatggagggttcgttagttaggcacgattgggtacattattggccattgataccaactcaacatttagcccccctcctcttcctgtatctgggatgggggtgaaactgaaagttccaaccctttaatctcaccattggtttccttggcaaccacccccatcctgaggctatccaggagctggctaagagtcactacattagaataaaagatatttctataaccaagaaagtacaaaggatttcagagttgagtcacacactcctgtcactcaggaaattacaacggtcttagggactatatgtcagcaacttgagtccaagaccaaatatcagaacaaaagattttcctagtgattctattgctcaggaaactctaagggttttaggaactctatgtcaggaactctggtttctttctgacctctgtatctgttaatcatttcaaagaaccaatttttggctt

SEQ ID NO: 831387 - DNA, 603 bp, Homo sapiens
ccacagccacgggaaggggagttaaccgaggcagcccccacccgagacagacctgcacagggccaagaacttgccctgtggtagggctgggggaggagcggctggtggactttctgtgtcaaaggcaggtgtcactttcagctcattaatttcacttctacaggttctcaatccaccaaaatgagctctttacaaaggccaggacctgcccttctagaggacaggctcatacttcccaaagcttcaggacttggggtcctgtggctgcccatccgtcagcagaactgggtgaggccagctgtgacatcagacaagtcccctgcctctggcaattcctcagcggggggcatgacctactgtgcattccagggctggggcacatgtacttaccccttagccttggaccacaagcctcccccagcccaaaatggaatggggacagcctctgccacagggaggggcaggtggtgccgtgtgaggggcggtggcacccagggcttttctcacaaggaaaaggaacctcgaagtgtttctctctgcacactttgcctccctcaaakgcgggctccttcctctcccacccgcatcagcagctgaggcccc

SEQ ID NO: 831388 - DNA, 467 bp, Homo sapiens
aaacacacaaatttggttagctgcccaaattcggggggtccaccaatccttgggaaccctaagaaagccaacaccccaaaaagcaaatttctctctctccctctttcaataacctcatttcctcattttgagaaggtggtacttagagactttacctactgtgtgtttcaaaatgtagacttttttctccagaaaaagaaagaaaatctttctgctgacaaataaggagaaacttaaatcaaaatcttctccctcgtgagctgtctgggttgagtgaggacagccgcagacctctgactgctgaggctacaggcatcactgcaggctctgaagcaacagcagagagtaagatgcagtgatgyggccaattccattcctgccgctgttcaagctggggcctgggaggtttggtccatgtatttatttgatttgttttggttttttgggcaacgatcagcaataagaat

SEQ ID NO: 831389 - DNA, 482 bp, Homo sapiens
ccccaagcttttgttctgtctgccttcaccgccccagggtggagttcagctccccttcagctccccccagmcactgctgcgggaactcatttgcagccgccgtttctgcaggccgggggctgtggaggggcgtttttgctcaggcggggctggagggctgggctggatgcccttggctctccccgtttgccccgcaagcctcaaaggccctaaaactggacccctctttgaggaacagcctcacacccgccttctcagagcccctctcttcttttcataactaccatctcccctgcccccaccagtctttctgtcctcttcaaacctctttccctgtgatgccgaagcattctgtagcttgctttgaccaggaaacctgcggaggcccttgtctgtccaggagttcaaaacggtgccattgtttcttttaataacatacaacgtttatgtcccttttcaaactataacacgactccgagact

SEQ ID NO: 831390 - DNA, 465 bp, Homo sapiens
gtctgccttcaccgccccagggtggagttcagctccccttcagctccccccagccactgctgcgggaactcatttgcagccgccgtttctgcaggccgggggctgtggaggggcgtttttgctcaggcggggctggagggctgggctggatgcccttggctctccccgtttgccccgcaagcctcaaaggccctaaaactggacccctctttgaggaacagcctcacacccgccttctcagagcccctctcttcttttcataactaccatctcccctgcccccaccagtctttctgtcctcttcaaacctctttccctgtgatgccgaagcattctgtagcttgctttgaccaggaaacctgcggaggcccttgtctgtccaggagttcaaaacggtgccattgtttcttttamtaacatacaacgtttatgtcccttttcaaactataacacgactccgagact

SEQ ID NO: 831391 - DNA, 588 bp, Homo sapiens
atcttggcgatgggggagatgagctcgggtgagcctggctgggtctccggccccacaggctcggagcagcatcctccctaccctctcaggagtcctgccctgcagagccctgtgggaccacaggcacatcgtgtgtgccaggcaccctgccaaggccagagttcactttctctctcaaggttcacaaaagcccttggaggtgggtactgtcactgtccgcattgtccatatgcggaaattgaacctcagagaggggaagcaaattgttcaaggtcacactgctactgtaaagcggtgggcctggggtctgagcccccagcggaagcctgcaaccatcaggcattgcccttgctcttagtatagcacggattggattgcagaatgttccagaatgtccctcagcatggggaagggtcttctcaccctcctggtttcgtgccgtgacatgtattcccgcatttctctcctagcccaagtcgtcagatgtgacaccaagatgaaggacaggtgcaaagggtccacgtgtaacaggtgagcctgtgctgggctgtcctgccactgtrgcctctgagtctgtgctgggctgtc

SEQ ID NO: 831392 - DNA, 609 bp, Homo sapiens
gtggatcctgcagaacattgtctgttccctctggttgtccagggtttggggwcatggtgacccagacaatgtgactgtggtcccacttctgctgccagcaggctgtgtgatcttgtcaagctgtttccttgtggcggaacggcccagaaccgggattatcaaatccagggaatcttctagatctaaaattctgtgattagggcagcatcattcatctctagctaatgttttttatttttttattttctgaatagaggcaaggtctcactatgttgcccaggctgatctcgaactcctgggctcgagcgatcctccctccttggcctcccaaagtgctgggattataggggtgagccactgcacccggcctccagatagagctttactcagctgcttgtcatcatcccctcctttacagctctctccccggcttttccccgccatcaatcttttgcctctgtctgccttaatgtgttccagattcctgtaaatatgaggtcactgggctctgtaaggtcagagcaggcttcatgactaagcttatctccccccatcttttttctttcctctttaaatgggtctttttttcttcttgaaagtgattcagct

SEQ ID NO: 831393 - DNA, 644 bp, Homo sapiens
gtggcctccgggctccggggagcctacaagaggcggtacgctgagccccggcacccactcgcatcccagggcgtctccggctgctccyattgagctgtctgctcgctgtgcccgctgtgcctgctgtgcccgcgctgtcgccgctgctaccgcgtctgctggacgcgggagacgccagcgagctggtgattggagccctgcggaggtaagtgtgatttccatgcttctcccttttgcaaactgttacccccccgagaagctggaataactaggacagatgccacctcgcagggctgactgtgtgctggcaccacaccgagtgctctgcttgcatagcggaacacagctttgcgacatgcccttttgcagatggagaaactgaggctcagcgaggacaactcatttgtccaggacctcgcagccaggactccaaggacccaggattcaacgccgatctgagcgcagaatcctgctccttagaggctgtttactctcttgccttcctcgtgcagttcactagcatttgttgcattcctgtgttcgtagtgggtgtcaataactggaaagctgatggcatggatatggcaggcattagaatgtgtcctactcatgtctggaggaccagggtgatctagtggcatgtg

SEQ ID NO: 831394 - DNA, 525 bp, Homo sapiens
atagcaaaatttacatcataacgtatggagagaaaaagtctggtgtgctggagggaaattaaaacagatttaattgccaattaaacataaaattatagaaattataaaggccttttaaatatatacacacacacaaagatcctatagcttttacttcagaaatttagccatgaaagctgggcgcggtggctcacgcctgtaatcccagcaccttgggaggccgaggcgggcagatcacctgaggtcaggagttggagaccagcctgacgaacatggagaaaccccatctctactaaaaatacaaaaaattagccaggcgtggtggtgcatgcctgtaatcccagctactcgggaggctgaggcaagagaatcacttgaaccagggaagcggagactgtggtgacccaagatcacgccattgcactccagcctgggcaacaagagtgaaactctgcctcaaaaaaaaaagaaraaaaaaagagaaagaaaagaaaaaaagaaatttagccatgaaataaatacaaa

SEQ ID NO: 831395 - DNA, 582 bp, Homo sapiens
gaaaccctgtctctactaaaaatacaaaaattagctgggtgtggtggcatgcacctgtagtcccagctactcaggaggctgaagcacgagaatctcttgaacccaggaggcagaggtcgcagtgagctgagatcacgccactgcactccagcctggcgacagagcgagaccccatctcaaaaaaaaaaaaaaaaagcaagtgttgaagtgttgctgagggtgtggagaaattggaaccctcatacactgctggtggaattgcaaaatggtgcagccactttgaaaatcaatttggggagatgaggtggcagcagaaaagaataaaaaaaaaaaagaaaaaaaagaaaaacaatttgacagtttctcagaatgtaaacatagagttgccatatgacccagaaaccctacttctgagcctgtagttaggagaattaaaaacacatgttcacacaaaaacctatcaatgaatattcatagcagtgttattcataatagccaaatagtagaaacaattcaaatgcccttcaacygatgaatggctaaaactaaatctggtatatccatataatgggatattactca

SEQ ID NO: 831396 - DNA, 540 bp, Homo sapiens
aaaaaggtagaaatttttctcctgggtaatgcatctgaaaattcagacagcattgtctactctttctcctgacaatctaggttgaattgcatggatggagatgattcacatcaataktgtcatcccaaagaagctatttcttcttgctatctcatcccataaaaagccctgattcctgtctttgctactgtctgattgtcccattcttccttcgatcctacaagcaagactacatgtttctactaaatttctttttgctaattactcagagaagtagcttgcatctaaaaatctttaacagattcagttaatattgttaacattatgagcagtgtttgtatccctaattgctattattaacattattatgtattctttttatacttagtggtagtagtgttaacatctttcttagtgctgtgaaagtcttaactgggccctaagtttggggttgatagagaatgggattggggcaggcatggtggctcacgtgtgtaatcccagtactttgggaggccaaggcaggcgaatcacttgagg

SEQ ID NO: 831397 - DNA, 614 bp, Homo sapiens
tccagtcagaagagttccacggtactatccaggacctaacccatcactgccttgcccaccccacacagayacagacactgaagtttaaacacaagaggggctgcatggattccttagggactggatggattcccttctttgttttcaaagaatgtgcaaataatggctctgaaatctatttctgatgaaattcacattagggctaattgcttcacagcatcttggttacacatttactaatccttcctctttgctcatttgcaaaggatgcctcacaaacatgcctcatcagatgggacatcatacagcatgatgtaagcccagtgtctccagagatgtaaacaactcaaattggcaagtatcctgggaagtaaatatagacggaaggtatggggacatacatggaacatccagtccagaaaagagggcccatgtttggtttaaaatataaatatagagcttgaatgggagaaaaaccaaaatgttccatttcctcgtatattgtcataaatgtggttaacggtgaacccaaatgtactgagaggcttggctgtgagcagatggtgcagcttccttatcagttcatcagctgggctaacatgaccctgtagaaa

SEQ ID NO: 831398 - DNA, 614 bp, Homo sapiens
tccagtcagaagagttccacggtactatccaggacctaacccatcactgccttgcccaccccacacagacacagacactgaagtttaaacacaagaggggctgcatggattccttagggactggatggattcccttctttgttttcaaagaatgtgcaaataatggctctgaaatctatttctgatgaaattcacattagggctaattgcttcacagcatcttggttacacatttactaatccttcctctttgctcatttgcaaaggatgcctcacaaacatgcctcatcagatgggacatcatacagcatgatgtaagcccagtgtctccagagatgtaaacaactcaaattggcaagtatcctgggaagtaaatatagacggaaggtatggggacatacatggaacatccagtccagaaaagagggcccatgtttggtttaaaatataaatatagagcttgaatgggagaaaaaccaaaatgttccatttcctcgtrtattgtcataaatgtggttaacggtgaacccaaatgtactgagaggcttggctgtgagcagatggtgcagcttccttatcagttcatcagctgggctaacatgaccctgtagaaa

SEQ ID NO: 831399 - DNA, 614 bp, Homo sapiens
tccagtcagaagagttccacggtactatccaggacctaacccatcactgccttgcccaccccacacagacacagacactgaagtttaaacacaagaggggctgcatggattccttagggactggatggattcccttctttgttttcaaagaatgtgcaaataatggctctgaaatctatttctgatgaaattcacattagggctaattgcttcacagcatcttggttacacatttactaatccttcctctttgctcatttgcaaaggatgcctcacaaacatgcctcatcagatgggacatcatacagcatgatgtaagcccagtgtctccagagatgtaaacaactcaaattggcaagtatcctgggaagtaaatatagacggaaggtatggggacatacatggaacatccagtccagaaaagagggcccatgtttggtttaaaatataaatatagagcttgaatgggagaaaaaccaaaatgttccatttcctcgtatattgtcataaatgtggttaacggtgaacccaaatgtactsagaggcttggctgtgagcagatggtgcagcttccttatcagttcatcagctgggctaacatgaccctgtagaaa

SEQ ID NO: 831400 - DNA, 618 bp, Homo sapiens
atttggatgtccctttgtcatggggctactaagctatgataagcagtagcaacatctgcaccatataatrgggaaaggaaatggggactcatgttccatagggtccccaatccttcaatcctccaccaacaccgtaagggggttattactcatccactttaatagataaggaaactggggctcactgataggtgagatcactggctgaggtcacagagcaaggaggcagagccaggatgatgacctaagtctgtcagattcttttttcatctgtattcctcatccatgtgtagacacagaacagtgaagtcaaaagagcatggttttggagtccaggtatgatttgtcttataccttgcaaatgttaggtgcccgataaatacctgttgcctaaatgctttttattctaattaaaattttatgcatgctatcactcacagacctggtgattccacctgctaaatgttacatttggaaggccttatcttttcacaagcactacaatttagaattcagctttacatatgaagggtatcttaactttcattgataatgtagaaccaggaaaatagaagcaagacaaggcatgactatatctcagaaagttccatagtaggg

SEQ ID NO: 831401 - DNA, 591 bp, Homo sapiens
accattctaccataaagacacatgcatgtgaatgtttattgctgcactattcaccatagcaaggacatggaatcaacctaaatgcccatcaatgacagagtggatgaasaaaatgtggtacatatacaccatggaatactatgcaaccataaaaataaacgagatcaggtcttttgcaggaacgtggatggagagcaaggctattatcattagcaaactaacgcaggaggagaaattcaaatcccacgttctcacttataagtgggagctaaatgatgagaactcatgaacacaaagaagggaacaatagacactgaggtctacttgggggtggagggtcggagaagatagaggaacagaaaagataaccattgggtactgggcttaatatctgggtgatgaaataatctgtacaacaaacccttgtgacatgagttcacccacgtgacaaaccttcacttgtacccctgaacctaaaagttttaaaaaaaaatggataaaaacatcatgaaatcttcatacagaaaaattttatgattctactcatgtgaaattttgataatattaatctattactatgagattattaat

SEQ ID NO: 831402 - DNA, 591 bp, Homo sapiens
accattctaccataaagacacatgcatgtgaatgtttattgctgcactattcaccatagcaaggacatggaatcaacctaaatgcccatcaatgacagagtggatgaagaaaatgtggtacatatacaccatggaatactatgcaaccataaaaataaacgagatcaggtcttttgcaggaacgtggatggagagcaaggctattatcattagcaaactaacgcaggaggagaaattcaaatcccacgttctcacttataagtgggagctaaatgatgagaactcatgaacacaaagaagggaacaatagacactgaggtctacttgggggtggagggtcggagaagatagaggaacagaaaagataaccattgggtactgggcttaatatctgggtgatgaaataatctgtacaacaaacccttgtgacatgagttcacccacgtgacaaaccttcacttgtacccctgaacctaaaagtttwaaaaaaaaatggataaaaacatcatgaaatcttcatacagaaaaattttatgattctactcatgtgaaattttgataatattaatctattactatgagattattaat

SEQ ID NO: 831403 - DNA, 619 bp, Homo sapiens
caggtattcgggaggttgaggcgggagaattgcttgaacctgggagggagaggttgcagtgagccacgatcgtgccattgcactccagcctgggtgacagagtgagactctgtcgggaaaaaaaaaaaaaaaaaaaaaaggagaaggagaagggggagtattagcaagcattggagaggtgtttatgacacaatagcaccaatatgagactttctttttgacttaagcagaaagactacaagaggatgaaaatatgaaatcatggtttcacagaggaggaggggcctcgatgttttataaaaatgtccatgtttcacctaaaacccccacccagagaccctccagggcactcatcccacgcctggagaaacactgccagctgtgtgttattgacaagtagccccttcagtgatgctgagcctcagtttcctcacttgtgaaatggcataggcacccagagctcacagcgtgtgaaggattaaaagaaagtgataataggyccggcgaggtggcttatgcctgtaatcccagcactttgggaggccaaggcaggaggactgcttgagctcaggagtttgagaccagcttgggcaacatggttgaaaacccatctctaccc

SEQ ID NO: 831404 - DNA, 619 bp, Homo sapiens
caggtattcgggaggttgaggcgggagaattgcttgaacctgggagggagaggttgcagtgagccacgatcgtgccattgcactccagcctgggtgacagagtgagactctgtcgggaaaaaaaaaaaaaaaaaaaaaaggagaaggagaagggggagtattagcaagcattggagaggtgtttatgacacaatagcaccaatatgagactttctttttgacttaagcagaaagactacaagaggatgaaaatatgaaatcatggtttcacagaggaggaggggcctcgatgttttataaaaatgtccatgtttcacctaaaacccccacccagagaccctccagggcactcatcccacgcctggagaaacactgccagctgtgtgttattgacaagtagccccttcagtgatgctgagcctcagtttcctcacttgtgaaatggcataggcacccagagctcacagcgtgtgaaggattaaaagaaagtgataataggcccggcgaggtggcttatgcctgtaatcccagcactttgggaggccaaggcaggaggaytgcttgagctcaggagtttgagaccagcttgggcaacatggttgaaaacccatctctaccc

SEQ ID NO: 831405 - DNA, 704 bp, Homo sapiens
tggcggcagggccagtactcgaatcagtgtccctactttgcttctgtgcccgggtcccccttgattgacacacgacctgtcatctattctggtctctgaagggcctttgtgcgcctcttctgtgctgcacgaggcgctgatttttacggcctgtcctttgcagaggaagcttctctcatgaatttctcaatttttgtggcaaggagggtccccaaagcctggacatgtcagcaacactcctgtcttttccaaacctctccacgcatcgccaccaggaagcggggcagcaggctgaagctgggaccctcactctgccccttagaatgtgagcaagggaaagtcccagagcagatcccagggcactaccgggcccttccctcatctgtaaaggagctccttcctcccagggccagaggaggcagcgtgtggtaagtgctgagcaggtgtaattatacatttaattactgccctcactaaggaaagtgtgcagctgtgtccaccggtgggtggttctcaaccaggggtggtttggcctttgggacatctggccatgtctggagacatttttggttgccatgatggaaagcaggtgctactggcatctagcgggtcaaggccagggacgccgctcgacaccccatagtgtaaaggttggccytcacctgcccagctagaaggatccaaccccgaatgtcagaagtgct

SEQ ID NO: 831406 - DNA, 669 bp, Homo sapiens
cccacagtgcctgcccggtttggatcctctcaaccacatggattgtttgctttgaattktagtgatttgtgcacctgtcaaaacttccccaccagggaggccactggcttcttcatagctcctgagcacctagcacaccctgtgcacgttcgttttcttttttctttctgaaatggagtcttgctctgttgcccaggctggagtgcggtgttgagatcttggctcactgcaacctctgcctcccaggttcaagtgattgtcctgtctcagcctccccactagctgggattacaggtctcagcctccccagtagctgggattacaggtgcactttgccatgccagggtaatttttatatttttgatagagatagggtttcactatgtcggccaggctggtcttgagctcacgacctcaggtgatccacccgcctgggcctcccaaaatgctgggattacaggcgtgagccaccttgcccggccattttctgaacagccatgtcaacaggttagtcctgcttcaaggaccaagtagaacttcttccatgtcctggatttgccccttggcagtgtctcgtccttgtgtcccaatgtgagtgctacgtaaatggcttcttctcactgtgtgcattgactcttgcctgggactctcctttcctacccacccccc

SEQ ID NO: 831407 - DNA, 707 bp, Homo sapiens
tgcatttgcagtcactcctcattttctttcaaactccctagccctagctaatcactgatgtactttcygtctattgtatgaggggaaataggtattggggaattgggtgattgttgaggcgtgttttgcccaatagtcagcctcccagtaacctgaaagaaagctcctccacctctctgcgtgtctctttccaatgtagcaaccttgggcaccgggcaaagccttgtcctaaacctcggcccctcccaccaaaccatgaccaacttctggtctctggggacgctggacaatggactgccccctacggggacacctcccccgttcaggtgcagctcataatgaagccccctaactaagacaggaggaaatttcttcactgctggcgctgatcaaggaagactgagggtgcccgggattctttgccccacatctagtgagtccactgaacccagggtaattgggacagcatccggtaaaatttttttctttcttttgaataatggggcatgcctatcggtattaactgaatataaaggcccattagaatgattatcggtttctgttgttggcatgaagggcatacaagaaaccccatacaaaacaccacctgtatactgctcatttcagggagttacccacactcactctttcttggtcattcctcactgtcccactcctttattaggaaggacattctacacaaacta

SEQ ID NO: 831408 - DNA, 620 bp, Homo sapiens
ctccttcatccctagggctgggcctgagctgccggttatgtgtcagtgaagttccttccagctccaaastgttcgaacactttggacagcagtcttttaaatggcatcgtgaattcccttgccttcctagcaggctacagagaacaaaatgtaaactttccttgctgcctgcgcttgtcatgatggcgggtgttgttgtaccagctctcatggctatttgattgcttcctttttaatgtgcagtttttattccttaacggattggaaagctggataaccaagcatgttcacattgcacataaattcctaacaggctacaagggagagcataatcggggcctccttaggcaagaacacatggcttttgtatacccatttcagctattgggatgcccttttcttctgtctttggcctcttaactatgcttttcatgggtattacaaggtggacatttgcatgactaaacctcgtgcagcctttgcaaaaggttgtgtgtgagtactgcataaattcttcttcttaataacatagcaataatggaatccttaagagtagcttggctgtcagagaatgaagataacagaatgtaacctacccgaacggccttgctcttctgcac

SEQ ID NO: 831409 - DNA, 531 bp, Homo sapiens
ttgtcactctttctttgaaaacagttgaagcatgctgggttaggcttaggtttattgttattgatgacccctggatggagcgagaaggtcacgtgtaacgtaagctcactgtgtgttttgtatttttcttttttyttttggagacggagttttgctcttgtcacccaggctggagtgcaatggcgcgatctcggctcactgcaacctccatctcccaggttcaagcgattctcctgcctcagcctcccaagtagctgggattacagacgcccaccaccacacccagctaattttagtatttttagtagagacggggtttcaccacattgctctggctggtctcaaactcctgacctcaggtgatccacccacctcggtctcccaaagtgctgggattacaggtgtgagccacatgcctggcctgttttgtatttttcaaatcttgccccaccactgtatttgtcctggaggcaaaatctacagcaaagagcacccagagtaacaatggcccaaccataaaaactttgggat

SEQ ID NO: 831410 - DNA, 569 bp, Homo sapiens
atgaaatgaatactaagagtgttataagatttagagaagagaaccagaaatatgctgttacaaggtaactgcactrcacaaaaagagattattatttgaatgtggacttaggttagttaaaaataggatagtcctatgaatttttttactatgtttactctaatgatatcattctagtactttggtctttacaataaaaagcgccttctctatcagcatgtatgggcatcagcttacagtaccagatataattttgcatcccataggaactgatttttaatataaattatggatcatattaattgtgtacctaatgatttctctttcttttttattgttccccagaaagcactttatgtcatgcctttgggcactaaaccacactatcctgaattcattttatttaaacttagtttccccttgcctcattgtttctttgatttctttttccatttatttttatcatgctatactctatggatctctgtgaactactttaaaacctttttaaaataagataaagtaacacaaataaatgaatcagtatagttccaagtgtactctagagg

SEQ ID NO: 831411 - DNA, 668 bp, Homo sapiens
ttggggtagctaaaaagtatcaggaaaactagcttcaaaatcatcagaggagcttttgtttcagaacaatcacaagaacactcgtcagctagtattgtaaactacaggtgaaataagagagcagtctgaaatacraaagagattaaatgactggctccttccccaataacctaaattctttcatatctcatctttattttcaggcctgcaagcaagtaatctcaatgaatgtcaaaatctatttataagtgtgtcaatgttaatgccaggagcaacaatcacttagactctaaaactgtaatacaattttttttaaatgacagaaagcattaaaataccatcattcatattctctgtcagtaatcaaagctgaaattttaaaacaaatatattctacaataaataaataaatgtatcaggtggaaaacaaacagccaaaatcatactttatgattaactactataaacaaatacaaaagaatttttgcaaaataatagcaactggagcatcaacaacagttctcaaatttttgccaatacattatctagtttccctttaatcctgtatctcatcttaaacaaataacacctaaaatataatatattgtctgtaaaccagaaattggaggagtacatggaactgttttcatatagcatgaacatttaag

SEQ ID NO: 831412 - DNA, 584 bp, Homo sapiens
gtgacctgaatgatgacagtgaaagaaagtcttctcagtgggcagagccttgagcagtacatctagttgtccattcagtccagagctagggccaaaagtatagatttacaggattcttgggaagttgctaataatgcggctgaattgtcagggacatagaaataatagtattagaaaatttgtgacaagaaaatccggggaagaagtatttgaatgggctttacaaaatgagcaaagactgaagatatttgttacccatgtaaatgcccaccaaagtgcatccttagagaaggttcaaattacacctctttggatgtcagttccctttatcagctcagtggctacataaacaaaaatgacatgggtgcagggatgggggctacacaagggcttaacgacatgactttttcttccaaggctgacataaccaacattacagctaagagcctactccaycagcaaaagagaccaacactaagccccattccctagggaacctgcttagccacattatggcagttcatttacattggacctcttgcaccatggatggggcagagagtcttcctcactggaatagacac

SEQ ID NO: 831413 - DNA, 584 bp, Homo sapiens
gtgacctgaatgatgacagtgaaagaaagtcttctcagtgggcagagccttgagcagtacatctagttgtccattcagtccagagctagggccaaaagtatagatttacaggattcttgggaagttgctaataatgcggctgaattgtcagggacatagaaataatagtattagaaaatttgtgacaagaaaatccggggaagaagtatttgaatgggctttacaaaatgagcaaagactgaagatatttgttacccatgtaaatgcccaccaaagtgcatccttagagaaggttcaaattacacctctttggatgtcagttccctttatcagctcagtggctacataaacaaaaatgacatgggtgcagggatgggggctacacaagggcttaacgacatgactttttcttccaaggctgacataaccaacattacagctaagagcctactccatcagcaaaagagaccaacactaagccccattccctagggaacctgcttagccacattatggcagttcrtttacattggacctcttgcaccatggatggggcagagagtcttcctcactggaatagacac

SEQ ID NO: 831414 - DNA, 652 bp, Homo sapiens
aatagtattaaaaatgtctccaaaggatcatacggaygtcttgacaagttcacatatcttagtattctgtctatctttagggaaatggaaaaataaatagaatggggttaagcaagctagtgaatagtcaaggatttatttaaaaagttctaatttggacctcattcaagttatgaaggaatattaattatagtttacattctcaatcttaagaactaaattaaaactgaacttgcaagtttttagtgagtttatttctgcattgtgtctgaaaacatgttctttattcaattagttaggcatttactacacgcttttggatataattataaaagtaaagaataaataatcactattctcctagtggtgtctagcataggagatggatatgactgttaaagtctggagggttaaaaagaagaaatatatgcaatttaaaatatttttattcctgaatagtaaatagtatgtgcctgttttgtttcagaaaaggaatatttgagtccatccatggttgttttgtttctgttaatgaaaatcattgtaaatgaaaggaagaaacacgcccttttgaattaggcactaataattttgttttattatgtaaaatctttgaccaattagtcagaatatgaagtagtatttttttaat

SEQ ID NO: 831415 - DNA, 662 bp, Homo sapiens
aaactttggaaagctgtctagacttcaatatgtttgactgaaaaagacttaatgaaattcttcagatgattccccaaactgactttattttgtgtaattttaaactaaccactaaaataatgtayatattgagacaaaaggctaaaaaaattaactgaaatgtcacagaaaaaattacacaaaaactggtacaaactaaaatgtgccagtctttagacaaacccacgactatctcatcatttctctctccatttttctcaatccctgtcttcccttctcagtctcagagtattccctcctttatataatttgttttctatatgtgaaattactgatttcttttagattagtaatagaaactcaaaaccagaatatacagatcagacgtccatgggagttggcattttaacagttttccctaaattattactatgaatcgcaaaattaccacagttaatttttcacatttttaaattatattcaagatatttcctcagcatcatgataacattttacaatcttattatgttaaaacatataagatatctttatttgaataaatgtatttattttctaacaataaaaagtgactccaactaatgctatatttagcttggtttgtcataatttacttaggcattttgcaagggagaatacaactg

SEQ ID NO: 831416 - DNA, 695 bp, Homo sapiens
ttaataaagcaatagaacgcacrcacacacacacacacacacacacaaaccaacaacaacaacaacaacaaaaaaccagaaatcctgaagccagagaaaacagtgagagaactgaaaaaattcaatagatcttcaatagcaaattcaatcatgtggaagaaagaatcagtgagctcaaagacaagtcatttgaaattagccatgtagaggaaccaaaagaaaaaagaattaaaaagagtgagaaacgtatacaggacctatgggacaccatcaagcaaataaatgtaaaaattatgggagtctcagaagaagaaagcttatttaaataaataatggctgaaaacttaccaatctaaggagaaatgtggatatccagatttataaagttcatacatccccaagaaagatcaacccacagaaacattatttcaaaacacattttaatcaagttgctaaaagtcaaagacaaagagaaaatcttgaaagcagcatgaaaaaaggagaattctcacatacaaaggaactttcatatgactgaaagtagatttctcaacagaaaccttgcagacaagagcagaatgaaatgacatattcaaagtactgaaagaaaaaaattgcgaggtaagatagtatggccagcaacactgtccttcagaaatgaagaacagttagatagacagtccccaaaaaatgtt

SEQ ID NO: 831417 - DNA, 539 bp, Homo sapiens
agcctgcgtgtcagctggggtgacagagggctattgggccgtgggtctttcatcctccaactggcagyccaggcttgttaagagaaagaggggaggcatccaagatctcctgagccccaggcttgacaacgcacagtgctgctccagtgccatctgattggctacagcatgtcacaaggcctaaacagattcaacaagtggggaataggctgctctctttaggggaagagctgcaaagcccccattgcaaaggggcatggatctaaagggaataattgcaaccatctttgcagacaaattcccacagcctcccagaggaggtgacatttaagctgagaattggttggcaagaaaggacagcaaagggagaaggggaatgcaggaagtgacaacagctagtgacaggcccctgggtgagactgagtgtgtctgggctaagagaaggtcggtgcggcaggtacaccctgagtgggaaaagaataagagattacaccaggaaggaaggcaggagcaaggcttataagacaaggtaaggagtt

SEQ ID NO: 831418 - DNA, 593 bp, Homo sapiens
aacatttgctgggaatttgaatgggattgtattgaatctatagataaatttggggagaattaacrtctttgcaatacagtagtgtcccccttatccacagggggtacgttccaagacccccagtggatacctgaaaccatggataatactgtattagtgcattctcacactgctataaatatactacccaagactgggtaacttataaaggaaaaaggtttaattgactcgcagttccacatggctgggaaggccttaggaaacttacaattgtggcagaaggggaggcaggcgcatcttacatggtggcgggcaagagaaagcatgtgcgagaagcaaagcgggaagacccccttatataaccatcatatctcgtgagaattcactatcatgagaacagcatgggggagaccacccccaaaatccaatcacttccctctctcaatatgggattacaggtccttcctctgacacttggagattagaattggagatgagatttgggtgggaacacatagccgaaccatatcattgtatttactactacatttttttactgtacatacatacctatgataaaatttaacttataa

SEQ ID NO: 831419 - DNA, 634 bp, Homo sapiens
taatatcccagtaatgtttatccatcaaaaatatgagacaacggggactagaccttagagtaaaacatacgaattttaatttcakactatgtaacggagaactgttgaatagttcatgagatgtatgttagttttgataagctactgcaatttacattgtattttatttgggacttctcagtattcaaaaatgactccttactgaagctttctgtatgagtgacatcttttctggaacattcactccataacctttaattaatgtgtccttttgtcacttaaaatataatctaaatggttttttttgtttgtttgtttgtttgcttttttggtggggggatagtttaaaccaaagaggaacaaaaataaacactggactcatttttatcatcttgccaagagacacaactatagataagcatccatgggtatgataagcaagaactgaatctcaaatcccattcagggtgctgaaaattccacccttaatatatttgtaaacacattgtcataaaatcaaacggcttgcctgatgttgatgctacaccacttggaaattgtgcaggggacctgaatctaggaaatgtaatttccctgttgcttaccttgtgaaaaaccctatttttaatatcat

SEQ ID NO: 831420 - DNA, 587 bp, Homo sapiens
attgccatgtgtctgttaacctcacttggatttctagagtgaaaaccatttctggagccttactgagtgtggacatgcatgtgttagcattmtgttaaaaaagaagaaagcagtttttatatgcaacacaatcaagttatcattagaattatgatttaggaattcaaaggtttaatgaccaaggcctaggccctaaatcaggactctgtccctatactgccccttagtagaaccttgcctccaactgggtacctttaacaagtccacagttttagttgaatagttataattagcaatgcaatgcatactatttccgaactgactttgactaaggaggtctagttcctttttgccatgtttataaactctctctggtcctcctatatcctcactttctaagatgtagtaatcaaggattttaaaacaacagaatgggaatgtgtttttctttcctagaatgagtgccaatatgtattaatacataatatttggatatcattttcactgaacacttccaaatgactcccacatacagatgttggtttactttcacacacagcctccctcttcttgaatgtgtttctctt

SEQ ID NO: 831421 - DNA, 657 bp, Homo sapiens
tctccagagtctttgtggaaaatattaagcaaaaattgtttaacattgtagctgcctaaggctgcagttatyggtttagataaataagagcttgactaaaaattttaaaagatctggggaacaagatgtccgtaggggctttgcaaagttctgatagatgcctggagttcgagaagtctatgcagagatgcaggtctggatggttgctcaggaaaggagggagtctctatctctcaccactggctgattttgaggcccttcccaagcaaaaagtaaagaataaagaggttgtaaaacccttgagcattgatgacagggttcaataaacagaattcctcaacaaaaggtgaaagactattggttcaaggcaactaagaaaatctgaccaataattacttgatcgctaagatgactgagtagagactaaagtgaatgcacactacagggaacccaaactatatacagttactccaagaatgtcaataactaaaaaatagcagcactaacaacaacaaaacagccacagcatcaaaccctggttggcagggaaggttatgatttctagagttatcacatcaaaatatctcaaatatttaaaatatatagtttttaagcaaaaaatataaaactcattaagaaataagaatgtatggccca

SEQ ID NO: 831422 - DNA, 531 bp, Homo sapiens
ccagaaaaagtttgccaactcctgatacagactttacattactttatatttatagaaagtatccgaaatgagataccaagctgttaataatggtattgcacgggatgatggtatttgggggcatgctaagtctttaagagtatatcttatatgcttatatattgtttgaatttttccaacaaacatgcattcctttaaaaggaggcagaatataagatagttctaatttgcatttaagaagaatgacccataacagcagcaggtggtgggaataggggtggtagcaggtgtggccgtagcttccaggcccacagtgttactttcaagggcttgaaagagaaaatacatgctctttaggaccttccattaaaaatcgattcactttggtctttcctgtgttctttcagatactctaacacacacttyaaactctttcctctgaaacgcccctggcccccactctggcacagagggcttctacttaacctttagggctctgtctaaatggatcctgctcagagaggccttcac

SEQ ID NO: 831423 - DNA, 563 bp, Homo sapiens
tattgcagctgaaatcactctgtggtgaggttagagctcgggattccactccctggctcaggtctgccttcaccacagcaagctgtgtggccttagacaaattgcccaacttccctgtgccttaatttcctcaccagtaaaatagtgaaaatggtagtacttaccatctagcattgttttgaggattaaaaaagaaaatactataaagcaataagaactgtgcctggctcatagttagcactgtgtatgttagaagccattatcatcattattcttttactttcgagatgaggaaatagaggctcagaggggtggacagctggcccaaactcacacagccaatgagtggcattgtcagaatttgtgctcaggattgtatgacttccaaatcaatgccctttccacaactctcaccctcagtccaacctgcccacttcttggctgtctagaaggatstgcagcttgcacccactcccatctgggcaaccatggtttagtaagctcaaaaggacccctcgactaaccctgagcagtaggagccttcctgttggcgaggcagccca

SEQ ID NO: 831424 - DNA, 573 bp, Homo sapiens
cgagttctggcttctgcatttactcaggacaggctgcatggaactctgtwaaccttagtcttcctaaggatacagtggggatgaccatccttgccacaatcacactggaatgttgtgacactcaaatgtgatggcggatttgacagcattttacaaaatgtgaagaagagtgcaaattaaatattgtgtgtgtgttcctttcctcaatgaaattgcaaattctttaaggatgggagacttgtctttacagatatggcccccatagaatctgttgaacgaactgccaccctccctccctgctctgctcagttatgttccctaccttaaccctccaccagcccctcactgtacaactcgacaccccgcaaccacgggctccatctctccctacccaatccacttggtgtaatgcggctagatctgtttcctatactgcaactcggattatactacttcccagttcaaacacttatgtgtccctattacctactggagcatgtgcaaatgcaatgtgtaactcttaaattccactcccttcttccatgctgaacacttttttgtcttggatttcat

SEQ ID NO: 831425 - DNA, 587 bp, Homo sapiens
ccggggtcttaggctcaaccaaagcatagggcctcccagggagcaagcccaccatcccactggtacccaacccctgaagactggctggtgggaagggagaagatgaggccctgatgacctcagtcaggtgagaagatggaagaggcaggctcaggggcagaggagtcagattccagtcagtgtctaaaaatctggagctgaaaacctaacgtcctccttatacagaagggaaaatgagttgccaactctggacaccaagctgtcaaccaaagtaggtccaaaacccaactctcttacctgacactaatgtccttatactgtgctcttctgaacctcattttctaagagagaatgagccaactatggtgccattctcagggaggaagggacctgttaccatgaaggaccctagctttgtgccttcatcccaagccagtgctccagctctcctcagggtctgctattgccccacgcctagcacccacaaatgtsctaacccttagctattctgaccctggtatgagagaaaaatccattttaaaaacttagttgagcaaattgaatattagagttcatgaatgtaattt

SEQ ID NO: 831426 - DNA, 480 bp, Homo sapiens
agcctcaaactcttgggttcaagggatcctcctgcctcagtctcccaagcacctaggaccacaggcatgtgttaccatgccccatctaatttttaaacattttgtagagatgtgctcttgccatgttttccaggctggtcttgagctcttgggctcaagtaatcctcctacctcggcctcccaaagtgctggaattacacatgtaaaccaccgtgcccactcctggagtgcattttcttttttttttttagacagagtcttgctctgtcaccaggctggtgtgcagtggcatgatctcagctcactgcaacctccgcctcccgggttcaagcaattctcctgcctcagcctcctgagtagctgggactacaggtgtgcatcaccacgcccagctaatttttgtattttttagtagagatgggatttcaccatgttgcccaggatgctctcaatstcttgacctcgtgatccaccctcctc

SEQ ID NO: 831427 - DNA, 457 bp, Homo sapiens
attttgcaggcttttcctcgggttcttgttctgattgcaacgctcaagtttggagctgaagtgctcctgcaatggcattaggtctccccttcagagtgctttcacagcaagagaaattcacaccagaaagagcacttttcagccactttctgggccatgtgaataactttcagttaacccttctctcaacaggtaccaatcaccacattttaaaagtagagacagggtctcaccatgttgccccaactggtcttgaactcctgggctcaagcaatctgctggccttagcttcctgagtagctgggactacagtcatgtgccaccatgccgggccatcgytgcattttaatttatattatttgttttggctatttcaatgtgattattaggacaaaacaagaaatttaaattaaaaggcaacttttctaaaaattcttttttttcttttcgaatctgc

SEQ ID NO: 831428 - DNA, 577 bp, Homo sapiens
aattgggtcatctcatgacttcttgttggtcctgtagctggcagtgtgtgtttacttgtatgcttgaaggccccagggtttgtccagtgccagatcacaaagggtttgaayttgtagcctgaaatattgcccccaagcaagacttttatcctgttcttaaaaggcttgagacctgacattgacttggcctccttatggatgaatatctttttcagcatccatttccagaatagggagcgttcatacacattgaagatttgctttggcaagtaaatttcctccacaattagcttatctagggtttctaaattctccagctgccttaacattagcactcacagactcagcactcactttcacattatgtaatgaataatggttctgaattgtttaaaccacccagagctagcagtaaatttaacatctgacatcatagtcagatccagccttttttttcaacatcacaaactttatactttggccatgatactcagcgtgctgacagggatacatttctgtgtctggtattcaatccaggtcattagaagtttccctatatctgatagaggcccttttc

SEQ ID NO: 831429 - DNA, 614 bp, Homo sapiens
gtgattactttctctcgttctgtaggttgtctctacactgttgattgtttcttgctgttcaggagcattttagtttcatataataccatttttctatttttgtttgctttgcctgtgcttttgagggtttaatccaaaaaatcaatatcaattgacttgtttattgctaccacgtaggaaagaaatagacttttgtatatttaccttttattcagaaaacctggtatgtttacttattagtttgaggtgttttttagtgttgattcttcaggattttcttcaaagatgattatgtcatctgtgaacaaagacacttttaatttttttctttccagtttgtataccttttacttctgtcttgtcttgctgtgctagctaggaattccagcataatattgaaaagcagtggtgagagggaacatccttccctttatctcatcttcttgggaaagcttcaagtttgtcaccattgagtatgatgttagctgtggaattttgtagaaatgctttgttwagttgaggaagttcacttctatttctataatactgagaatttttatcatggatagatattggactttgatctgaattatataaaaatataattcacttat

SEQ ID NO: 831430 - DNA, 548 bp, Homo sapiens
actttaatatactgagtttgaatttgggattccagaccaactagttaggtaaatttggacgggtmcctaagattcagaatcagttggtataaactaggaataccagggatgtaaaggctgtgttctaaaaccttgaataggtatatggatggtgggtgggaagtacgtgggaggaatcttcggtcttctcatttcattgctgtactcttgtttcaactgcaccttcatttctgtttattgggatttgaaaatttgagcttccccattaaattttatttgaagaagttgatctgattaaaataacacagcaactgatctttaagtttcagtttagttctgacaaataagttttttaattaaatggatttagctcaagatattctgggatctccaactggtagggtcagttgggattttaagggtaggagctgatccaaagtagatgagatcccctaaaatattcaatgccccaaatcacagtgtcctaagaggtgttgctaacctagactcaattagtataaatatatgggggattcagtctagtgtgt

SEQ ID NO: 831431 - DNA, 568 bp, Homo sapiens
tttctttcatgctccattctccctaaggcagactgaatcattatgtgtgtatccctagatccaaggagacagaacttggatggagattacacaggcattcacagtacaagacaaagtaaggtagcattctggtataatacaaataaaagggaggtagatggcatgccaagttctggctctctccatgccaccatgttctggtgtggaactccaaccagagaattctaagttcaacctggccttccaggtcattatgaagatatgttcatccaggaagaaagaaaatacatattttatttagcattttattaggatgaattattactttaaatatttagacacatagtataaggacatgctaatagtgggttattttttgttttttgttttttgggtatttttgctctgggccctatgaatatatgaggccaagccactaaacaccccccatagctaagatggccacaacaccaayatcaccagggatcttgaatgtcaccacaagatcttgagctttcagaagattcaaatacgtaccctaataactgaagtgcaaagcagagttggc

SEQ ID NO: 831432 - DNA, 638 bp, Homo sapiens
ctgtaccttggcctctttaagccatggctggagctggagctgctgggacacaagatatcatgtcctgaagctgaacagagcagtgggccccgcccaaaaaaacatttttccctcctaggcttctaggcctgtgataagaggagctgctgtgaagatctctaaaatgccctggaaacattttccccattgtcttggctattaacatttggctcctcattacttatgcaaatttatgcagccctccttagaaaatgggtttttcttttctaccacaaagtcaggttgcaaattttccacaattttatgctctgttttccttttaaacataagttccaatttcatatcttactttcagaaaaagccacgtcatatctggaatgctttgctccttagaaatttcttctgtcagataccctaaatcatctttctcaagttcaaagttccacagatctctagggcaggggcaaatgctctcagtctcgttactaaagtatagcaagagtaacctttgctacagttcccaataagttcttcatctccatctgagaccacctcagcctagactttattgtccatatcactrtcagcattttggtcaaaaccatttaacgagtctctcggaactttctcacatcttc

SEQ ID NO: 831433 - DNA, 429 bp, Homo sapiens
aagctgaatctaagtcagtaggaaaagaacaaaacaaatcaatttataccacaaactcccaaaaggctcagacagtagtagtgccacgtatctttggatataagggtgaaagtgaggattaaaaataggatgcctggatgaaaaactatttcagagaaaataaggtgacacccaagatttctctccttcactctatacaactgggtgattgcccttccccagctctggtagaggactaaagtttcattctcttgagaatgtaaaatagaggacttctggaccaggagacactatgctcgctgagggaaagsgtactgtactaaaataagggaaattaggtgaatatatacataccaatgttaaggccctcagacgttttcctctgcttggttgccagaatgctcccagccagatacatatacaaacata

SEQ ID NO: 831434 - DNA, 630 bp, Homo sapiens
atttgcagtaggaaattaatatttaattcttattttcaggctgcaataacaaaatataataagatgggtagtttataaacaacagaaatttatttctcacagttctggaggctgagaaggccaagatcagggcactggcaaattcagggtatggtaagggcttgcttcctgattcatagaaggtctttttccctctataatctcacatggtaggaggggtgagggatctctttggggcctcatttaaaaggcacaaattttattcatgagggttctatccttatgacctaattacctcccaaagaccctacctcaaaataacatcacactggggatgtcaacaaataaattctggggggaggagggagtagaaatttagcctatggcagttcctttcccagttgctttaggaacacaggggagtgatgatctagcacatccttggggagcttactttctagattaatttagcatctctgctatatcctaaagggtagwtcagtgttaatgatgaagggattggggcttaaggagaaggagtacagagcaaaggctgaggaagaccatttgggagatccgtggctggctggtggaaggtgtgcttagatcatgcatttaccataatggaaa

SEQ ID NO: 831435 - DNA, 514 bp, Homo sapiens
gttacccaaactccatgccaaggaggtggcagaactagtgtcacacattttatctgccctaaacctcattctctcctcaggtttcaaatmcattagtatctccatataagtaaatgaaaaggacatgctattttttgagcactcatgcactaaatttatataatgttcaatattttctttctcaattctacataatgtttttgattcactttaaatgcttagaaaaataggaaatacaacaaagatagcttttagcaactgaattactgtttatccagaaattagctgctcagaataagtgaaattgtatttacaactgccaagattatacccaaaatgcttttaagaagcccaaaatgcttttaatcagtcactctaaatttattcatgtgttgaaataagcactgaaacaccaacaggaataaaagagtataccaagattaaattcagaggcttcttaaaataacaatcgacaaggcagtcacagacactaacaagtcctggtttctttggg

SEQ ID NO: 831436 - DNA, 577 bp, Homo sapiens
atcccagataaagtctacttgatcatagtgaattagctttttgctatgttgctagatttagtttgttagtattttgttaaagatttttatatgtctgttcatcagggatattgacctgaagttttcttttttcacttggctctgccaggttctgttatcagaattattctggcctcatagaatgagttagagaggagaccctcctcaatgatttttttgaaatagtttcagtaggattggtaccagctcgtctttatacatgtagtaaaattcggtagtgaatctgtctgctacagggatttttctgattggtaggtttttttgttattcattcagtttcagaactcgttgttgacctgttcagggtttcaatttcttcctggttcgatcttgggaggttgtatgtttccagaaatgtatctatttcttttaggttttctagtttgtgtgsatagaggtgctcataatagtttctgagggtttttgtacttccgtggggtcagtggtaatgcacactttgtcacttctgattgtgtttatttggatcttctctttttctgtattattagcctagcaa

SEQ ID NO: 831437 - DNA, 577 bp, Homo sapiens
atcccagataaagtctacttgatcatagtgaattagctttttgctatgttgctagatttagtttgttagtattttgttaaagatttttatatgtctgttcatcagggatattgacctgaagttttcttttttcacttggctctgccaggttctgttatcagaattattctggcctcatagaatgagttagagaggagaccctcctcaatgatttttttgaaatagtttcagtaggattggtaccagctcgtctttatacatgtagtaaaattcggtagtgaatctgtctgctacagggatttttctgattggtaggtttttttgttattcattcagtttcagaactcgttgttgacctgttcagggtttcaatttcttcctggttcgatcttgggaggttgtatgtttccagaaatgtatctatttcttttaggttttctagtttgtgtgcatagaggtgctcataatagtttctgagggtttttgtacttccgtggggtcagtggtaatgcacmctttgtcacttctgattgtgtttatttggatcttctctttttctgtattattagcctagcaa

SEQ ID NO: 831438 - DNA, 624 bp, Homo sapiens
tgggattgcactcttgatttggctgttagtcagcytgaacattattggtgtatagaaatgctactgatttttgtacattgattttgtatactgaaactttcctgaagccgtttatcagttctaggcacctttttgtagcgtctttagggtgttctaggtatagaaccatatcatcagtgaacatagctaacttgacttgttcttttcctatttggataccttttctttctttctcttgactgattgctcttgccaagactttcagtactattttcaacaggagtggtgaaagtggccatccttgtcttgttcctcttcttaggggaatgtttccagcatttgcccattcagtatgatgttggctgtgcaatttcacttttaaatgtaaagaattctcagcttttaaatggggatactaaaaatccatttgtaagctgtttaatcagaatttacaacactttttcctatgaaaccaatgttataaatatggttaagttcacattttagtctctctagaaaatttagcaaacacaactattacttttacactatgcattatgtagaattaagtgctttacattgagaaatgtaaacatctgcatcagcatgacagagatactaggt

SEQ ID NO: 831439 - DNA, 570 bp, Homo sapiens
tccaaatagggaaaagaatagctccaccgcactttactaaagagaaaaagggacaaaaataggctattttgtaatagttttctataatgcatgttatattagatttgcgggcaactcggacccctcaagttattttcataggaagtatcctcacaagtcaagtcttcctcatcctgcacttacttgtacaggatgggataattttttttttttttttttgagacagagtctcactctgttgcccaggctggagtgcagtggtgtgatctcggctcactgcaagctccgcctcctgggttcatgccattctcctgcctcagcctcctgagtagctgggactacaggcactcgccaccatgcctggctaactttttgtatttttagtagagatggggtttcaccatgttagtcaggatggtctccatctcctgacttcgtgatctgcccaccttggcctcccaaagtgctgggattacaggcgtgagccaccatgcccggccaggatgggataaaattttaaaataaccattttttatctctmtcttcacctttagtacttctcagtgggga

SEQ ID NO: 831440 - DNA, 592 bp, Homo sapiens
gtgtgcggctgatgttaatcagcatggccaatgatttgaaagaagtttggatctcagaacaacctttcttgttagtaacatatttgtggcaatacatgccaacctgggcctggtggataaccaacaagatggggaagaaaaggattgagaactttaagagtggtgtggtaagaccaatttctaagtttcttaataatatgtaccaatcttgcaggaaggtacagaattttccagtgtttaaaaaactttctggctgggtgcagtggctcatgtctgtaatcccagcactttgggaggccaaggcagatcacttgaggccaggaattcaagaccaacctggccaacatagtgaaaccccatctctactaaaaatacaaaaagtagctgggcatggtggtgcatgcctgtaatcccagctactcgggaggctgaggcatgagaattgcttgaaccgaggaggcggaggttgcagtgagccaggatggtgccactgcactccagcccgggtgatagagygagactctatttcaaaatcaaaaaacctttctaaccctccaccaatctcatgatataaagaaaaataaataaaaaa

SEQ ID NO: 831441 - DNA, 578 bp, Homo sapiens
gacatgaatatttggaagaaaatttcaggcagcagaaaaaaaacaagcgcagagttcctgcgcagacatggctggaggcsgtgaaacaatgtagctggagtggagtaagggatgaggagtaggagatgaggtcaaggagacagcagaagccaagttctataggggcagacagattactgtaaggccattggcttttaagtaaaatgggaagtcttcagagatctgagcagaaagaataacatgacatttacttccctttagcacaattattgtgattactgtgttgagaataatatgtcggagggcaaccatgtccagttagaaggatgctaaaacatattagatgagaaatgccaaggactgccatggtggtgacaatacaggtggtagttgttagattttggatgtagtttaaaaataaagacaatgagatgaactgacaaattctgtgtggaatgcaaaaaaaatccaatgttttttgactaaacaactagaagattagaattagcttttagcaagatgggaataactgaggggaagaacagatttgaagcaataatgggagttggggggcaggg

SEQ ID NO: 831442 - DNA, 581 bp, Homo sapiens
tgctattccactccagaagctggatttgcctagtttcctgtaggcttcaactttttcagacacattaggagtagtcagtaacttctctgaatgttttctaggttttctttctccagcacttcctatattttaaaattaattcctatgataaattatacattcgattatatagttctgatatactgattgaatacaaactgacctatacatatattttattttgtaaattcaaagtgtctatttaggagtatttcctgtccctgttaaccaggaaacacaaaggatctatttgcattttggaattccactgcagcacacttgtaataagactgaattcaactcaaatacctatcaaatataaaacaaataatgacatacattttaacgaagaaaattaacatagctgccaaatcaacatggtaaaatcctaggaaacattgacataagaagacaatttatttagtgattcaatttrtaagaagttaattgtctttaaaatgtaaataatagcttttttggctgcatctacatagtcagtaaaatggtaagaaaaataagtataatggcgatcattaaattca

SEQ ID NO: 831443 - DNA, 754 bp, Homo sapiens
atgctatttcttcactccttttttcacccccagagttttctctgttgcttgtcactggttgcctttacaccctttagagattccccaggcctctcttgaacctcggaggtggaggctgcagtgggctgaggtgagtttgcaccattgcactccagcctgggcaacagagtgagactgagtcacaaaaaaaaaaaaaaaaaaaaatcccttaatactgcccatgtctctctaagtagtaccttcattaaatctcatttgaaccatccggaataaattctgttgccttccagaacacaaacgatagatgcatcaattatgactgttttttttctgaaatgacccagattcagcatcagaattttgttaaatataaagcccctggcagcttctacaattgtatgaaatttggtatgcaggataaattacctttagaatccatactctggagtatgggacggtggccgttacactaatcactaagcataaagccctttttaaaagttatatattttctttttcacactgactaattgaaagttaaaaagccaaatatttagctttgggctactggtgatcttcttaggccaggtacatgtaacattgtcttttttttttttttttcaaatcacaatgtttttcactttacttgaraaactttgtagataatactctgcttaatgtactgctaaatagctcacctcctgacatttcattaagggcaggaaaaagggggggttattttatttttaaaaaa

SEQ ID NO: 831444 - DNA, 634 bp, Homo sapiens
ctgagaatgatggtttccagcttcatccacgtccctgtaaaggacatraactcattcttttttatggctgcatagtattccatggtgcatatgtgccacattttctttatccagtctgtcgttgatgggcatttgggttggttccaagtctttgctattgtaaagacaacaaaaaacacaaatgctgcacatgggtgtccatgagttgagtttctaaagagcccatcagcctcaactccacagtgaaaaagagcaggcaccttctggaatcagatctcaaagctctaacttcaaagaagcctctttaaaatgtatatcatggtcacgcttctctgttacctggcatgaaggaccaaatggtactctgttgcttctttgcaaatgaccttgacgccttgaatccataacacattttccacatgagaagctgtggcctgtgagcaaaatacagggaggagggaggggcacagcagccgggacaggcgggcacctccaggtggctgccagcctctcggctcatgaagcaaatgcagagttgcagtactgcatctcctctgttaggattttttttttttttttttggaaattcaaactaatatgtaaaattagaaatatttcaagtccttggttttaa

SEQ ID NO: 831445 - DNA, 596 bp, Homo sapiens
cctatctctgagtgaggtcacattctgagatacaggaagtaagaatgtggggaggaacaaaattcaacacacaacaaatacatatgtgataaaaccattgaaaagggcaagtagataataaacrtacaattcagagtccagctccaaggggctggcaggagagtgggtatgagatggaggacagagactaaggtaagttctagcccttgggaaggtgatgggtttacaagtgttcatgacagtcatgctttacaacttcagtgtgtcatgaattttggtttatgtatgctgggtctatattttaaaatataacaaaaaagaaagcagaagaaagtgagagagtgatttgcacactttttgaaaacaagagaattgaagtccctcaatcataaacagaactcccctccagctcagacgctacaaaggtggcagcgagtctttataaaaactaacaaataattaaggtcaatggtaaatagagttccatctgtgaaacagttccctttttctaattatttataactatcatggttagcactatagtaaaacacatatccttgacttgatttaaaggatctgggaaatatgtcatcctt

SEQ ID NO: 831446 - DNA, 550 bp, Homo sapiens
aacacagagcaggtgaggagaacaaaacaaagaaatatgctcatctcttggaaaccgtaagccttagaattattcgattttctcattatcctggctgtcatcccataagctgtttctctgagaacaaatactcttagaagtggtgggtcttgggtgagctaaggtgagccgacgcatcagttttagcaatcctgaaactattgctagtatggacagcagaggcctaaagggcatggaggcttggaaacggaggcatttgaactctctaggaaggcaattagacaattgctaagaggcctgtagagaaatcagaatcccttgcatttttctggatggggaagaaagaacagcagtggctcccacttccatcaatcctgtagaggtgaggtgataccatcaaaggtaatttaagctagaacttcaaaatctgttgctggatgctgatgggtgacataaagaaagcagaactcctcagcatctatgtagtttmtgaattctgtctcagaagatgatcttttgactgaaaatgatgaataaccattcacaggtg

SEQ ID NO: 831447 - DNA, 603 bp, Homo sapiens
aaattggattatttggctctggtttctcttaagttggttgaatttcatgtattttctagatattaatcytttgttggatgaatagtttgcaaatattttttctcattctgcaggttgtcttttcactctattgattgtttgctgtgcagaagattcttagttttatataatcccatttgtttatgttttgctcttattttctgtgctattgaggtcttttccatgagatctttgcccagaccagtgttcagtgtcttgtgtgttacctatgttttcttctagtagttttgtagttttgggtctttcatttaagtcttttatccattttgagttaattcttatatatggtgagagttagtggcttatttttgttcttttgcatatcgatatccaatattctcagtaccatttattgaagttattgttctttcccccagcgtgtcttgttggaatatttgttgaaaatctgttggctgtaaatatgtgaatttatttctcagtgctctattttgttcaattggtctgtgtgtctgcttttatgccagtaccatgctgtttggggtgctataatttgtgtctgtttttatgccagtaccatgctgt

SEQ ID NO: 831448 - DNA, 603 bp, Homo sapiens
aaattggattatttggctctggtttctcttaagttggttgaatttcatgtattttctagatattaatcttttgttggatgaatagtttgcaaatattttttctcattctgcaggttgtcttttcactctattgattgtttgctgtgcagaagattcttagttttatataatcccatttgtttatgttttgctcttattttctgtgctattgaggtcttttccatgagatctttgcccagaccagtgttcagtgtcttgtgtgttacctatgttttcttctagtagttttgtagttttgggtctttcatttaagtcttttatccattttgagttaattcttatatatggtgagagttagtggcttatttttgttcttttgcatatcgatatccaatattctcagtaccatttattgaagttattgttctttcccccagcgtgtcttgttggaatatttgttgaaaatctgttggctgtaaatatgtgaatttatttctcagtgctctattttgttcaattggtctgtgtgtctgcttttatgccagtaccatgctgtttkgggtgctataatttgtgtctgtttttatgccagtaccatgctgt

SEQ ID NO: 831449 - DNA, 369 bp, Homo sapiens
tccaccatggtgctccctgattctgactccaaaacaaaagtgacttatttcacagtccgaacaaaactcagcaaattggctgcttaggctcagttatcctcgagctgtctcggccaagacactataaagaatcgccttgtaggctttggctgggaagagcaggctctgatctgttcctgcaacctcacagtatttgaactttatgtttccctgggcactgcagaaaagccttttgctcctgttgctcttgaaataaaaggcagtgttctctatgaatttttaataccacacaccctytcctcccggagctggcaggcgagtcacgtcggaggccgcctctcgcgtttgaacctcaaaacagcgcagctt

SEQ ID NO: 831450 - DNA, 529 bp, Homo sapiens
agaattcaggtactggtagtaaaacatagtctcagtgcaaagaacaaatcaagggtttggctatcaacaccctttggtaacacctatgaattcagatattaacaaacttcatgttttctaagtctggtagttgctttcacctgtatacaaggtttcccagaaagcttaaggaacagtcccacgtaaatttgatgcactacaataccatttttaagactagagaaagagatatgtctcccaaagaattgtgagtgtggcttttagcatttgaattgacttgaaccgaacataaggaaaatcaatgaggtttttgagagaactcttggcaaccacattaccagcatggactggacaaaaagagtttgaatctgtttgagagggtcaaaaacacctctgggcacccaattttytacattctgaaagtgaatgagtacgttgctcagtggctaagaaaggcatatccttcaaagccttcttctgaaatcgcaaaggaggatgaccttacagcaagagtggattcagcagctac

SEQ ID NO: 831451 - DNA, 612 bp, Homo sapiens
gtatatatgagttgagcctgtaaagttatgagatgggatttttcttgtggtttgtggaatcagttttagaagctgaggaaacaacggaggtgatttaggctgcccagatggataagttgtaaragaatttatgtgatgctgagatatgtgatagagttgagatgatgtaaatgaagagattttggaaagtagaaagcactacataaagatattccaactcagagtggttaataatcactatgttattcagcacattgactaggaattaaattattttatataagccttgtatttcaggttaaatgttatccaagagagcattttaggaagtgatttctatttcatctggagtagtcttctggttttcattatgattttaatattattgacaatgcatatttgttttagctgaggaggatgtacacagtgtaacttgtacctttttccagagctgttgcaatgttctacaggcaagcattaattcaactttgctaatggatataaaggcacagaaaagttgagagtgcttcttgatgtcacacagcaaggcagcagcaggataaggttaggacacagaagccttgaccttcagttatgtgctcacaactcttg

SEQ ID NO: 831452 - DNA, 644 bp, Homo sapiens
ccaccaagtgtttcaggtaaatcacacaggaaacactctattagaayattaatcctaacatcctgtgtcttgccagtgcttctaattgttgagtcctaatatatacctctatctttttcatgcttaaattaggcaaggatacttattgacattctctgagaaaaattgttgactggcccctttatgatgcatttcaactcccttttgcctttcctttatctcccaaaaactttgtattcctttaccaactgccaagctcccttgcagctaagcaccgacagtgacagagtccttgcagaaaaccaaagtttcaagttaggaaaactcacaacttgagtgaaaatacaaggccttactagaagaaagcttctatctctctgcctgccctcttcttcctgcctagaagacatctagcatggctggaggggtagaagggatctgcgttcatgaggtgataggtgtagagaactgtgccctgaccagtgctagctcaaggccgaacaccattcatttatggcaccactggaattgtggagtgtggcagtctcagccccaagatcatcaagcctctgaaccaattgtagcaatttcttacctctgaatttgttttaaatgagaaatactggtctttgcagaaattggag

SEQ ID NO: 831453 - DNA, 605 bp, Homo sapiens
tctggaattgttctccctatgtatctgctactttttatcttctgacctagtcttgccatttccttcccaccwacacacatcgcctacccctacacctggtaatcaccatgtattctctattgcctttttaaaagaaaaaaaaaaaagacagggtattgctctgttgcccaggctggagtgcagtggcacaatcatagcttactgtgacctcaaacgcctgagctcaagtgatccctccaccttggcctcctaaagtgattataggtgtgagccactgcaccatgcctattctctatttttgtatatttaaatttattttgaagaatccacatataaatgagatcatattgtatttttctttctgtgtctgttttattttacttagcataatgtcctgcagcctcatccacgttgtgacaaatagcaagatctcattcttttttgaggctgcataatattccattgtataccacagtttctttatccatccaactgtcaacagacgctcagattgttaccatattttggatactattaataatgctgcaatgaacttgagaatgccatcatcagtatgagatggtgatttaatttcctttgagcat

SEQ ID NO: 831454 - DNA, 478 bp, Homo sapiens
ttcatgatcctttgctaggatgaacaaactttcatttctgaagggtctaaagcattagaagtcctgcctgaattagrttcagtttcacagtaacttttatttatttacagctttactgaagtataatttatacattataagatacatcctccagtcaaggtggctcacatctgtagtcctagctactcaggaagctgaggtgcaaggatctcttgagctcaggaatttaagactacagtgagctatgatcacactgctgtactccagtctgggtgagaatgagaccctgtctctaagaaaaaaaaaatacattcattgtgagtgtagtgttcaactatgtgggttttcttggttttattttattttattccaattattataaagtaaagatgccttttggtacatgggtctttgaattttaacatatgtaatcatcattgtaatcaagatataagacaattttaattcctcaaaccct

SEQ ID NO: 831455 - DNA, 606 bp, Homo sapiens
atctataaggaatttaaacaaatttacatgaaaaaaaactmattaaaaactgggcaaagaacacagataagacacttttctaaagaaggcatacatgtggccaacaatcatatgaaaaaatgctcaacatcactggtcatcggagaaatgcaaataaaaaccacaatgaaataccatttcataccagtcagaatggctattattaaaatgtccaaaaataacagatgttggtgaggttgtggagaaaaaggaacacttatacactgttggtgggagtgttaattattcaataattgtggaagatagtgtggtgattcctcaaagacctaaagacagaaataccatttgaaccagcaatcccattacttggtatatacccagaggaatataaattgttctattataaagacacaagcacgcatatattcaatgcagcactattcacaatagcaaagacatagaatcaacccaaatgcccatcaatgataaaccagataaagaaagtgtggtacatatacaccatggagcactatgcagccataaaaaagaacaaaaaattcctttgcaggaaaatggatggggctggcggccattatctttagcaaa

SEQ ID NO: 831456 - DNA, 646 bp, Homo sapiens
aggcacacctttgggtgctytgtcattgcttactggatactcactgtgcactggtgtgtgtgcctgccattggggtacctgccatgtctggcccatcttatgcccctcctgccccacccaagggctgagcaggtagctcagaccactgtacactccatggatcaccccactgactgaggcaatagagagcttctcccagtaaacaaaagtcaaatgtgtatatctagttacattggctgcaactggctcttacctataagtgcaatctactggcttatagattgaattgcacagcctaatataaaacctgctcaaagatgttcatagggctatagaagcaatgccaaaataccctacccagtattttctacagtcacaccacctggagaggggatggtgaaagggaaagtaaaagaaaaaataataatattataaaaaaagaaaaattaaaaatcctatccaaacaaaaattattacaaaaatcagaagtaccagtgtctccagatgagaggaaaccggcacaagaattctggcaccataaaaagtatgattgtagtgatatctccaaaggatcacactagctctccagcaatggtccctaaccaaaagagaaattcagaaataacagataaagaactcaaaccat

SEQ ID NO: 831457 - DNA, 632 bp, Homo sapiens
atgattcagtgtttgtttttctcctgctaagaggaaattcaaccaatcactaagtgaacaaatgcataatatacctcaaacatcttgcccacttactatgtgtaagatatgatattggactctggcaaaatcaaagataaataacatcaaatggaactcaataagcttacagccttttgaaaatgaaagacatctaatcaacctagttccaaacaatattagaagccaaaaaacaaaaatattctacttagtcgtgccaaaatgaagggtttatctagttctcaaagaagggaagatgcctaatatttctcaaaaaggataattacaaatgttctatgttgaaaagtatgacaggaataacacaatattacaagattcatctgggttctagacttggttttattatattttagttctagggcttcagggagtgagttactctctcgaagatttgttgcctttatctgtaaaataaagagatcggagcagactatatctaaagtcaatataaccatatatgaccaacccacacctagtacattgaacagaaaaaaatggaaagccttttctctaagatctgaaataagacaaggatgctgctcaytttcaccatctttattcaacatagttct

SEQ ID NO: 831458 - DNA, 566 bp, Homo sapiens
tacactcctctttccaaatgctctaccatggaaacacaggctccacctttgtacaaaaccctattaatttgaaatacaagagactggaatgaaaaacagtctctgtattaatctgctttttatttttccatggttttgttttgtttttcttttttgtttcgttttgtttttttgagatggagtctcactctatcacccaggctggagtgcagtggcgcaatcttggctcactgcaagctccacctctcaggttcccgccattctcctgcctcagcctcccgagtagctgggactacaggtgcctgccaccatgcctggctaatttttcttttttttttttttagtagagacggggtttcaccatgttagccaggatagtctcgatctcctgacctcgtgatcctcccgccttggcctcccaaagtgctggcattataggcatgagccaccacacccggctccaagtttgtttttaaaaataatagagcatctcattatgggagaagagtaagggctttggatttcacgttggtttggacaakccagcagcagctagagaagattat

SEQ ID NO: 831459 - DNA, 600 bp, Homo sapiens
agatacaatgagttctttggggggcggggcctgatccaatctgattgatgtccttataagaagaggaaattgagacataagatatgtgtgtgtatggaggaaaaaccaagtgaggatgcagcaagacagtcatctgcaagccaaggagagaagcctcaggagaaaccaacctgcagccaccttgatcttggacttccagcctccaggacagtaagacaataaatttctgtggtttaagtcagcagtcccagcctttctggtaccagggactggtttcatggaagacagttttttttttgttttttttttttaatggatgggggtgggaggggcggggttggatggtttcaggatgaaactgttccacctcagatcatcaggcattagattctcataaggagcatgcaacctagatccttgcatatgcaattcacaatagggtttgtgctcctgtgagaatcttatgaggccactgatatgacaggaggtggagctcaggcagtaatgcttgctcgcctgccactcacctcttgctgtggggcctggttcctaaaaggccagggactggtaygggtctgtggccaggggcattagggaccc

SEQ ID NO: 831460 - DNA, 618 bp, Homo sapiens
acatagttagtaataagatagtrttattattattatttactaattcactaatccactgatctagctatcccaaatgaatactccagggaaatggggcagttttaaaacatgggcacaaatactttaacgtagctcacactaaaagatgagggatatatcttctctctttgaatcaaggagttgtaactgctccaattaatggagaatgttgcaagagtcactacatgatttctctgagtaggtcatacaaaggccatgcaacatcacctttgatcatttgaacacttgttcttaaagcctctaatgactcatcatgtggaaatactaagctcaaacagacacacatagaaagtccctggcaggcccagtttttaaccatcttagctaagttcccagatgagaggaaaatcatcttgacccatgtagagcaccccacggactatacaaatatcactgagtggtctctataagtgctacatagaaaagaagcattactcaagcaaatcctcaccaaattgtgatgaataattttttaaaaggtactgttttaagtgagtaagatttggaggtggtttgtttcacagcaatcaataactgtaacacaggtcttctagtata

SEQ ID NO: 831461 - DNA, 618 bp, Homo sapiens
acatagttagtaataagatagtgttattattattatttactaattcactaatccactgatctagctatcccaaatgaatactccagggaaatggggcagttttaaaacatggscacaaatactttaacgtagctcacactaaaagatgagggatatatcttctctctttgaatcaaggagttgtaactgctccaattaatggagaatgttgcaagagtcactacatgatttctctgagtaggtcatacaaaggccatgcaacatcacctttgatcatttgaacacttgttcttaaagcctctaatgactcatcatgtggaaatactaagctcaaacagacacacatagaaagtccctggcaggcccagtttttaaccatcttagctaagttcccagatgagaggaaaatcatcttgacccatgtagagcaccccacggactatacaaatatcactgagtggtctctataagtgctacatagaaaagaagcattactcaagcaaatcctcaccaaattgtgatgaataattttttaaaaggtactgttttaagtgagtaagatttggaggtggtttgtttcacagcaatcaataactgtaacacaggtcttctagtata

SEQ ID NO: 831462 - DNA, 533 bp, Homo sapiens
agccatatatggtagcttgtgccattaattcctaagaattttcaggattcagaagacaattttgtttacttgttgttggcatgaaagtttacagacattagttttaatgttctctctgcttctaggttattaaatactttttttgccaattttccttccaaaaatgtgttatttctcattatttttaatctattatcttgtctttttgaaaatctggattaatatgtttttatggctgtcatttttggaaattagatttaaccactttacctagcaataagaccctttagtattacacgttacctgtggctcaagtacaaccctgattatggggcctctgtattatcacacttaatgcaaacaatgacccacttatggatttgttacacctattcttttgcattcttttattctaagsaggtgtaaggttttgtgttcttccctctctctttacctccaagaaatgtaaactacgatacaactgttgtcaggtgtggtacttcacatggaaggaataaggaattttaattaaa

SEQ ID NO: 831463 - DNA, 622 bp, Homo sapiens
ctatgtaacaaatctgcatgttttgcacatgtatctcagaacttaaaatataataaaaaattaaataaataaataagacatttattggtcatttactattcatagagatcattttgggtgttaggtatattaagaattttaaaaatgcctatttttgaggaaatattaatcttgttgaagagataactcttacacatagaaaagtaagtaacaatttaatattaacaattgttcctcagcatccaccagctattagttccagaacaactgtggataccaaaatcccctgatgctaaggtccttatttaaaatagggtagtatttgcatatagctcatgcacattctgccacctaccttaagtcatctctagattagttataatttctaatcaaatgtaaatactatgtaaatacctgttatactgtattgatttaaaatttgtattagttttaatgttgtattgtgtttttatcgtatttttaaacatattttccatctgcatttcgttgaatctgcagatgcrgaacccacagacagagagggtcgcctgcacttgctgactataccaagagaagtagactggatatgcaccatgtaggacttagagaaaattgtgatcat

SEQ ID NO: 831464 - DNA, 622 bp, Homo sapiens
ctatgtaacaaatctgcatgttttgcacatgtatctcagaacttaaaatataataaaaaattaaataaataaataagacatttattggtcatttactattcatagagatcattttgggtgttaggtatattaagaattttaaaaatgcctatttttgaggaaatattaatcttgttgaagagataactcttacacatagaaaagtaagtaacaatttaatattaacaattgttcctcagcatccaccagctattagttccagaacaactgtggataccaaaatcccctgatgctaaggtccttatttaaaatagggtagtatttgcatatagctcatgcacattctgccacctaccttaagtcatctctagattagttataatttctaatcaaatgtaaatactatgtaaatacctgttatactgtattgatttaaaatttgtattagttttaatgttgtattgtgtttttatcgtatttttaaacatattttccatctgcatttcgttgaatctgcagatgcggaacccacagacagagagggtcgcctgcacttgctgactataccragagaagtagactggatatgcaccatgtaggacttagagaaaattgtgatcat

SEQ ID NO: 831465 - DNA, 553 bp, Homo sapiens
atgtgtaaaacactaatatacatacagatacatatatgcattaaaaatatctggcaggacacttaaaaaaatataattactggccagccacggtggctcacrcctgtaatcccaacactttgggaggccaaggcaggcagatcacctgaggtcaggagtttgagaccagccgggccaacatggtgaaaccccatctctactaaaaatacaaaaaattagccaggcgtgatggtgggcgcctgtaatcccagctatcgggaggctgaggcaagagaatcacttgaatctgggaggcagaggttccagtgagctgagatggcaccactgcattccagcttgggtgacaagagcgagtactccatgtcaaaaaaaaaaaaaagaaaaagaaaatataattcttttttaaaagtagggctggtactgcaatagtcttgtccaagaaaagaaaaaaaaaaaagagacagtagggttggaagtcagggttaagatcaaatgttgtgttttagtttatttctttcaattctgttcaagttatatatttacgcatttttaa

SEQ ID NO: 831466 - DNA, 634 bp, Homo sapiens
tcagttgggtagttctggcttggggttcatgaggttgcatttagatgttgtctggggttctggtcatctgacggtttgactgaagctggagaatacacttccagggtggttcacatggctggcaaatttgttctggatgttgttaagtggccttagtttctctgcacatgggccttttcatgtggctctttgtcctcaaatcttggtggctggttttcccaagagcgagcaatccagaagacccaggcagaacctgcagtgcctttttgatctttccctggaagacatgtagtgtcacttctcattttcttggttgcccaagtcagccctgatagtgagaggaccacacaagattaacatataccagggttattacgtgctgtcatagaagctggctacaacaggtggcattaatttgtagtgtcatatttaatctgtagtagtcaggctgctgctgaggttttttcttttcatgtgttttgaatgactaaaggtaagtttattgtgatttagaacagctaaaaataggaaatacatacagtggtagtctgtaccttggactctagtaattagcagtgggtttttgaaagaggtrtggataagaactattaatacatatttttgtgaatgtgct

SEQ ID NO: 831467 - DNA, 632 bp, Homo sapiens
tgaggaaagtgggattctatttccagagtactaaaatgtatgaaatatggacatgtgaaactcctagtcatggttgatgtgggcactgtctccctttaacacttagagcccttcgtgttgatgagaaaatttcaytgatctactaacgccctagccaagactatagccaggtagtcccataactaaatctccagatgggctttctaaatacctgaaatgtgaagatgaaacttcttccctcaaccaccactaccaccacagaaatggtgcagggcatgggatagtcactcctttcactcacatgagaaccctcaagagcactgatagggcaaactgcgaacctcaggcatttgactgctagtgtagttgcctgactccacagcataaagaggtgaaggtagggggctataggctcagacagcaacattacaaatgtccagttttaaaaaacacatatttccccttcacccataattactacgatagaaacccaattttcaccattcagataataacctgaaaacctcactcttcagataatgtgtgtaaaagcattctggatatgaaaggctgtaaagttatactaatacaaaatgtaagaaacttcaggtaaaccagtagtcaaaaatcat

SEQ ID NO: 831468 - DNA, 557 bp, Homo sapiens
acagtatttaataaaccttatacgattccttgagtaagtgtgcatttttactcaaggaatcatagtatagcactaacagccactgcatccttcatagtttataaggaaaaacctctgaaaattataacctgacttttcttaaattgctgaaaagtatattaaatagaaaaatctatcagaaaggaataaaattaaagaatgcaaacagcaaatacaatcaatgatagcaagatctaatacaatgtgctttataaaccagttacatgattactttttattttagttaataagccatatttaaagagagttgattaaaaatgaaaattaggtgaattggttacttgacaaagtgacagcctgatgtaaatgaaaatttttccatttattccttgttgaagaaatctaaggcagacactgctttgtctttgttatgctgctttgytaaggttcctaaaaataaatgtagataaagaaacataagagaataacagaaaataatttgctccatgctcaacatgctgattaactttaacccatgttgtgagtacatgtataag

SEQ ID NO: 831469 - DNA, 569 bp, Homo sapiens
taaataaaaggacattgagaaacagagagaaccgactataaagtatgaattttagttttcatctcaacaaaaatcagaacctaaaggaatattccatctgccagacttcagtttctttcggtttattcagttgcaaagtcttggagattttgaagagatcttaaacaaattttatgcgaagggctcgtggataatgactatgctttgaatataaacctgtcccattctccctcatcacatgcataagcatgagaccttctttctcaaaaacaggtagttataagaataacttttataaattaggttttcttgagctatggttctatgctcaaatttcttctacttcataaagcttttaagtgacactcagaaaccattataattagaaaaaaatagatttttttaatacactaaaaacaaatcgttggcaccaacgtctatggtaactatggttcacaaacaatgactatttttcttaaatgtgttaattacctattagwgtactattgtgcttttccaaaaattatccaaatacacatccttaagaagcattgctgcctagtaaacat

SEQ ID NO: 831470 - DNA, 622 bp, Homo sapiens
aatcctccctgcacatttaaaaaaaaaaaaaaggttttcatgacctcgactctttgaagaaagagaagttgtcttgtagaatgttctacattcyaaatttgcccatgtgctcattcaggtcgaaggagcatttttaaaaactctacaataaagaggaaggatataatctcagactaagcgaacccgtctattttaatggagaagttctctccatagtctgtctcctaactccctgtgaagcctcaataacttagtcgcagaatggcactttccacaggccagcattaggcaaccttcatcctacagaataaaaatgattccaccacagtccatctaccagttcagtgatatccctagaataagcccccaggtcttcaaaggaccggcctgagttctgccaaagtttacttagacaggcacttgggcagttgctccttccaatcaatctagtagactaagatgattttatcttaccctagatgttgtctgtgcgcaaaggaaaatgttctggggctcagggtctactgaacagttaattaaagacactagaattctgcatctgctgacttgcccacgagccccatgctttaaagaggtgcaaggcacccggggtactgctgag

SEQ ID NO: 831471 - DNA, 515 bp, Homo sapiens
ggaactaatacagggtgtattagtgcacaggtgtctgctatgggctatcccattggggactttggggtgactgtgtagactatgccttggagttgtcccaccctggggacagggaagccggrtatttatccactaaatcccatccatcattggttaaatgctgctccttgtggtgttaatgatggaaactctctattgcctataactgacaccacaattctttaccctggcatttacaatttccccttgccctgcctcattttcctctgtgacccctgccatggtcaccctccactgcagccttagactagcgatggccctgaatttcctccctgttcactgagatcttcctgatcctcatccagccttccatggcctcagaccactgagctctctcccgttgcagaaatcctgcagaacatttttcctggaccccttactgggtgtaggggaccccagaataactcatgtccaggctcttttttttgaggatcctctgggatgggtggaggagt

SEQ ID NO: 831472 - DNA, 629 bp, Homo sapiens
ctggtggtccatggcatgatctggcaatagagagatgcagatatcaccactgtatactcctaattaactatctataagaagcaaagatcttgtcactgtgtatttgatacttytgagaagttttgaaaatcgaatgaatataatgagattggctggctcctcctaatgtcactggatagagtgctgagagaagaggatgaacttagggatttgaattcccagctcaagcactgcataagtaacctgacatcttctatgtgtgccctaaaggacatccttatctcctgtagcctcagggctgagagtggtgaaaagcaaacacagaatcttattctgtgattggccggatttcagggcaagttggactcccagcttccaaggatgtctactgataaactgagggcattgattagtatcaatggtatcctgtaagaatagtatcctggaaactggaattgggatatgtgggaagacaaggatgaagttgaggacatggagcacctaaattctgagtcttgtttgccgctggaaaggcctctaccttcccctccttggttctgtttctctggagaaccctgactaacatgactggcttgaatctggatccaaatgtaatcccagcactttgg

SEQ ID NO: 831473 - DNA, 553 bp, Homo sapiens
tgtgtatttgatacttttgagaagttttgaaaatcgaatgaatataatgagattggctggctcctcctaatgtcactggatagagtgctgagagaagaggatgaacttagggatttgaattcccagctcaagcactgcataagtaacctgacatcttctatgtgtgccctaaaggacatccttatctcctgtagcctcagggctgagagtggtgaaaagcaaacacagaatcttattctgtgattggccggatttcagggcaagttggactcccagcttccaaggatgtctactgataaactgagggcattgattagtatcaatggtatcctgtaagaatagtatcctggaaactggaattgggatatgtgggaagacaaggatgaagttgaggacatggagcacctaaattctgagtcttgtttgcygctggaaaggcctctaccttcccctccttggttctgtttctctggagaaccctgactaacatgactggcttgaatctggatccaaatgtaatcccagcactttgggaggctggcatggtggctca

SEQ ID NO: 831474 - DNA, 568 bp, Homo sapiens
tctttgatatactgatttcctttcctttgtataaatactcagtggtcagattacagcattattgtatggtaatcctgttatttaggagcattattgtatggtaatcctattatttatatttttgagaaatctttatagtgttttccataatggctgtactatttacattcctaataacagtatatgaaagttcccttttctccacatctttgccagcattttgtctttttgataatagctattctaactggcataagatgccagtaagatacctcactgtggtcttgatttgtatttccctggtgattaatgatgttgagcacattttcatatatcttggccatttgtttgtcttcttttgagaaatgtctacttaaattatttgtctactctttaatgtgattatttgttttgttgctattgtttgggtttcttgtattttttggatattagtccattgttggatagtttgcagatattttttcccattcaacagattgtctctttactctgttaattgttccyttttctatgcggaagcgttttagtttaatataatctcacttac

SEQ ID NO: 831475 - DNA, 663 bp, Homo sapiens
tacaggcaatatgtctgatgaatattgatgcaaaaatcctcagcaaaataacagcaaaccgaattcaacaatacattagaaaaatcattcaccacgaccaagtgggattcatcctggggatgcaaggatggttcaacatgtgcaaatcaatgtgatgtaacatatcaacagaataaaggataaaagccttattatttcaattgatgctgaataggcatttgataaaattcaacatcccttcatgataaaaacccacaaaaaactagagacagaaggaacatacttcaacacaataagagctattatatgacagaccaacagctagcatcatactgaaaatggggaaaaactaagagcttctcctctaagatctgtaacacaactaggatgcccgctttcaccactgttattcaacataatactggaagccctagctagagcaattaaataacagaaagaaataaaggacctccaaattggaaaggaagaagtcaaattagcctcatttgcagttaatataattttatatttggaaaaayctaatgactcaatcaaaaaactataagagctgacaagttcagtaaagttgcaggacacaaaatcaacagacaaaaatcagaggcatttctatatgccaatggcaaaaaatctgaaaaataagtc

SEQ ID NO: 831476 - DNA, 620 bp, Homo sapiens
catcattttaatctcagctccatagtcttctccccaccccacattctagttatcatcgcaacaccattttaaatatcatttacagtattacctctatgaaaatttatttttgtaatttagttgtttactgtcttctgcgctaaaacataagctcttatgacaggattcttgcctgccttgttcaccactatatcctcagatcttaagacagtgcttaagtaagcattcaatacatatttcctgaatgaatgaatggatggatggttgggtggatggatggatagagaataaacaaaagggtagatgagtgatgagtttcaacatgctgaagattctaagcttagttttgcttcagaatattatagttctgagactttcagttgtaatatattcagagatgctgaatatagaacaggtaaactgagacactgtatggtatgctgaggacagctcaaaggtattttatattgggcatctcatggacacagaataatctactgagaaaatgttggytccctttttctaattgattccctacaggattagtctaattgggacatatggttatggccgaggtactccttgtggacaagtgagccagcccatcactttgtggctca

SEQ ID NO: 831477 - DNA, 689 bp, Homo sapiens
tcctttcccccaaccccctcaacaggccccagtgtgtgatgttctgctcccagtgtccatgtgttctcattgttcaactcccacttatgagtgagaacatgtggtgtttggttttctgttcttatgttagtgtgctgaggatgatggtttccaggttcatccatgtccccgcaaaggacatgaactcattcttttttatggctgcaacattttttttcaattgaagcttttaccccaaatcctgctggaaagtctaataggacaaaatagataaaattgcagctcttacccccaacatccagagagttccccatgttattccagcttctacttaaatcaagcttttcaaacccagcccagatggctttaaatgtggcccaacacaaattagtagactttcttaaaatattatgagatttgtttgtgattttttttttttagctcatcagctattgttagtgttcatgtattttatttgtggcctaagacaattcttcttcttccagtgtggcccagggaagtcaaaagattggatacccctgattggaaaactgactccaaaaataagtgcttcaaaattcaaggtgaaagggcactgggtgtgctaccattagactcatrtatctttttgcaaaactcataaaatttctaagcatgcaatcctactcttcccccatatttgatttatt

SEQ ID NO: 831478 - DNA, 544 bp, Homo sapiens
tatgtaagattctcctgaaacttaaaaaaggcacatagaaatcatgattattgaaaaagaaattctgaattaggaattagtagtagcataactgaacaaggtctaatcaaccatctttttcatgagcactaagcactgactagagagttcaagaatgaaagatcctctgagtcctcgggtcttcctggctcctcctgtgccctgctgactcctccataagatgtctatccctttactttcatcctttctcttgtttctctcagaccctggccctacccaccatcataccctctcaacacacaatatgttcacaaatgctaagctcacccagtactccattcacagggaattggaatttgggttttctagaactccctgttcttgttgtttcatgcccttttagagctccagaagtcacagacttcagtccagactccgttccccagaaatgccaatgacagcaaaggcttccaagttcccaggtcagcttccctgcctccctakgaaaccatcaaaggctctgactccccaccctggagactta

SEQ ID NO: 831479 - DNA, 570 bp, Homo sapiens
gttaaatttagcagtcatttgtgtgcttgctggtatatttattattctgtgcactttcctcttgtacagtgaggtgtgtggttatgatctctgcattgttatgtgcccatattgaatttttgattttcaacttctagggagtaggagctctgtctacttgacttcctgttaaaatgtttttagctacactgtgtgtatttgggcaattgactcttttggctattagaaccaatgtaacataatttaaggaaaaataagatgatattaatttttggaccgcttttatgaagttcatttatttttctttctgtattttggctagcatgtgtgatttttatggtagagtcatacatattctaaataattaaatagaatagtctgaagtgatgaaaatgttagattacattcatttttaaatgaaaacagttgtatcactttcaagcatgtatagtgmtatgactcatttacaaagtattaacaatatttcttcaaggaggcttataatattaacataacagtcaggaggccatatattatattgagcacagaaagaccttgatgtggatccca

SEQ ID NO: 831480 - DNA, 528 bp, Homo sapiens
ataatcacatgtactacatttataatcagaacaatacaayatataacaccctaaaaacaaaaatgctaaaatgtttcatatttagtccatattgttacttaaatcttaaatgacttactggtagtttcttatgtctaatgtttaggccctctaaaaactagtaactaaaaactaataactgctcccttcagactgaatcggacaacttatgtctcactctcctagacttacaatagttgccagaagaatgccatgcttagactaaaaagtctaagccccttatattgggggtggagccacttttcccagtggcatatggggatggaggtaaatacatgaataaaataacccagggttttgatcagaaggaggaagggaagaaatggatgttggatatacaaccaacagtgttcactacaaaaatctttggtgccaatttctgtcttttattccattaaatttcaccttgtgtggttagtcccacttacctgctacagggattaagatttggctccatcacccctttta

SEQ ID NO: 831481 - DNA, 620 bp, Homo sapiens
agaaaacaaacaaacaaacaaaaaaacacacacacacacacamaaaaaaaccctggatatttgtttatttatatttactgtcaatcatttcccaggtaacctacttaaaagagtattttcctaggctttttcaaatatattacctgaggctgaagaatgagcctggggacgtgaatacctagaaggcaaatgatgatgagactgtgtaaatgtagctccttccccactgcaatggaaaataaatttaaaatgttatattttagctgtttaatataaatttaggtagaatgtcttaagttagaaacaacactaccacctctcattctacaacctaaattttaaaaatatggaaacatattgtttaaaccaaagaatggctgtgattacagtatgtatctatatatattttatgtcttttagccaaacaacttgaagtactttcatatacatctcaatgtctttgtgagatatgaattattttcatttttataaacataaaaactgatatataaaaaagtaaaatgaaactcaccaatttgaaatactttggtcaaatctaatctctaaaaactataggtataataaaccctagtaaaataccttgacagcctctctgctca

SEQ ID NO: 831482 - DNA, 521 bp, Homo sapiens
ctggtgaggttgtggagaaaagggagcactyatacactgttggtgggagtgtaaattagttcacccattgtggaaagcagtatggcaattcctcaaagagccaaaagcagaactaccattcaacccagcattcccattacttggaatatacccagaggagtataaatcattctaccataaagacacgtgcacacaaatgtccactgcagcactgttcacaatagcaaaaacatggaatcaacccaaatgcccatcagtgacagatcagataaagaaaatgtggtatgcataaaccatggaatactatgtagccataaaaaatgagatcatatattttgtgggaatatggatagggctagagactattatccttagcaaaccaatgcaggtacagaaaaccaaatactgcatgttctcgcttacaagtggtagctaaatgatgagaactaaagaacacaaagaaggatacaacagacacgggggtctacttgagtgtggagaatgggaagcgggagagacag

SEQ ID NO: 831483 - DNA, 521 bp, Homo sapiens
ctggtgaggttgtggagaaaagggagcacttatacactgttggtgggagtgtaaattagttcacccattgtggaaagcagtatggcaattcctcaaagagccaaaagcagaactaccattcaacccagcattcccattacttggaatatacccagaggagtataaatcattctaccataaagacacgtgcacacaaatgtccactgcagcactgttcacaatagcaaaaacatggaatcaacccaaatgcccatcagtgacagatcagataaagaaaatgtggtatgcataaaccatggaatactatgtagccataaaaaatgagatcatatattttgtgggaatatggatagggctagagactattatccttagcaaaccaatgcaggtacagaaaaccaaatactgcatgttctcrcttacaagtggtagctaaatgatgagaactaaagaacacaaagaaggatacaacagacacgggggtctacttgagtgtggagaatgggaagcgggagagacag

SEQ ID NO: 831484 - DNA, 406 bp, Homo sapiens
tgattcttctttattttcttctttattagtctagctagsattctctctattttcttagtttttcaaaaaaccagctcctgaattcattgatgttttggagggtttttcatgtctctatctcttttagttctgctctaatctcagttatttcttgtcttctgctagcttttggatttgtttgctgttgcttctctagttcttttagttgtgatgttagggtgtcgatttgagatctttccagctttctcatgtgggcatttagtgctataaatttttctctgaacactcctttagctgtgtcccagagattctggtattttgtctctttgttctcattgttttcaaataacttcttttctgcgttagttttgttatttacccaagagtcattcaggagcaggttgtt

SEQ ID NO: 831485 - DNA, 628 bp, Homo sapiens
cttcctcatcctcagtctactcaacatgatgacgttgagaatgaagacctttatgacgatccatttccacttctacttaatgaatactaaatatattttctcttccttattattttcttaatacattttcttttctctagcttactttactgtcaagaatacaatatataatgtatataacatacaaaatatatgtgaatcaactgtttatgttattggtaaggtttctggccaacagtatcctattagtagttaagttcagggagagtaaaaagatatacgcagattttcgactacatgcggggttggtgcctctatacctcagggggttcaagggtcaactgtagttatgtttctctccaaaaatggcatatttcattcttaatacacaaacttcttagatataggctaacaaaaacatacaagataatcagtctctcatcctagtcttatatgactggaatatgcccaggattaagtttcaacatgcagaagttgatttttttaaggttrtttagtcaatactggtctagcagccgtagtgcaaaaaagtgttttctatttactacaagaacaaattatatactaaatgaagctgatgagtaaaacacattgcatgaaaaaggag

SEQ ID NO: 831486 - DNA, 577 bp, Homo sapiens
atggagaaaatataaaaattgcattcttaaatagaaaggttttcaacaagaggctaatgtaaaatttcttttcagctttggatgcctgatggccttgcacagatttgcccaacagagttgaactgtctggacagtgttttatgtgggtgctttcaagttagcacctgccagcttctttaaagtcctgtctttcacaataataaccacaatacagttaaaaataatggatgcaggaattctgtattccattcatattcacttgctttcagcaggatgaagcacttgaagggaaggcggtgcatctctcctctcgctttccacccacctttatcctggaaattcagactgccctgttgctattcacatgaagcctcagtacaagccttgctcatagcaaaagaaggcacaggccttacttgacattatacgcagaaaccctgatatcctacaggacctcctaatggctgaagcctagaataccrttatgagtgcaatctctgcagcttccttccttctctgtgaaattgcaagaatttggggaaaggataatactttaagctgtaaattatatcttaat

SEQ ID NO: 831487 - DNA, 537 bp, Homo sapiens
tcttttgcatttctcacataatcttatatggatcctcgtaagattttacttaattgtaccatttgagttttcttattatattaatagttgktttctgagttacctttcattaacaactctttattttctaattttaacctttgatcaaagaaaagacaatgttaaaaattgactgtctaaaatgtgaacaatgttaaaaacactaggatttttaactgctgagtccaagtatagtgtctgccccagaggctcagtccgatggacgtgccttccctttgatatttgtttgccagtctgtttgggtttgttagtatatccatgttgtttgttttttgaacttggccttttatgattttgtaaataagtaaaaaaagaaacaagtatgctactttaaaataaaatctggcttactaacttaattttctaaaaattaaagaaaaaccacacagatgctttaaactaaatagtagttgatataccctgtctaatgaagggtgtgtaagtaaatctttgtgtcaaaccagccttttaatatgg

SEQ ID NO: 831488 - DNA, 626 bp, Homo sapiens
acaggctatttgaaaatatttatgacaaaatttatgacaaaatttatgacaaaaattaatgacaaaattaagawtaaaaaacaatgaagcatgcctacaggatctagaaaacagtctttaaaagggcaaatctaaagttattgtcctgaaagatgtaaagaaaaatatatggatagaaaattgattcaaagtgataataacggagaacttcccaaacctgaagatatcaatatccaagtacaagaaggttatagaacaccaagcagacttaatctaaagacgactacctcaaggtacgtaatagtcaaactcccaaaggtcaaggataaagaaaggatcctaaaagcagtgagagaaaagaaacaagtaacatacaatggatctccagtacatctggcagcagactcttcagtggaaacattacaggccaggagagtgtggcatgacatctaaagtgctgaaagaaaaaaacttttaccctggaatactatatccaatgaaaacatctttcaaacatgaagaaaaaaagactttcacagataaacaaaagccgagggatttcatcaacaccagaactgccctacaagaaatgctaaagggagtacttctaccagaaagtaaaggat

SEQ ID NO: 831489 - DNA, 611 bp, Homo sapiens
cttgtataactttcaatatgaagccctactgatgatcagacctccatttcttctctgacttaagctgctattttttttacccttagctcactctgttccagctacactcacctcctggatgctgttctcraacacggcaggtactggctgtttattctccctagaagattcttccttcagatattctcttggctcactctcaccctcttcaagcctcttctcaaatgtttcaatgaagcttattcttactatggcagtctacatctgctgagcttctacttaccgttttacttttttaaaaagcactttaaccttttaacttatgtaattttagtttgtttatttacctacaagaatcccacaaagaagattcttaggacaggaatctttgttttgttcacagatacatctccagtctctagaacagtgtctacagaataaagcacatagtaagtgttaaataaataagctgcagtaataaagacagtgtagtattagtggaggagatacacacatcaatgagacagaaactgcataaatattttccttgatttttggacttattttgcctctttcactcccatattttactagttctgaaacgaaggtgt

SEQ ID NO: 831490 - DNA, 508 bp, Homo sapiens
atggctcaatgcagcctcaacttcctgggcccaagtgattctmctacttcagcctccggagtagctggggctacaggcatgcaccaccacacctggataatttttgcatttttttttttgtggagaaagggttttgccatattgacccgaattcctggtcttgaactccagggctcgagcagtcctcccacctcatcctcccaaagtgcttggattatagccatgagtcaccatgcccagctgagaaactagtgcattttaaaaaaacagttactagtttatgtgttttggacacacaatatgtatacttttatgataccaataactgaaaggggtgaggatggacatgtaaaggagaagaatttttgtatgttattaaaattaaactagtataaattcaaattagagtgttacaactttagaatgttaaatgtaatctccatggtaaccacaaaaaaaagctagaaaaatgtgcacaaagggaaatgataagcgaattaaaacatta

SEQ ID NO: 831491 - DNA, 496 bp, Homo sapiens
ctgtttggaaaaataacatagcaataygtattgggagctataaaaatggtttttatcttttagccagtaatccaaactcctaggaatttatcttaagaaaacatcaaaaggaaaaagtgttcacacagcattatttacaaaagtgtaactaaatgttgaagtggacaaacaggcagtaagtttcccccaacagttttaacagctttattaaagcataattgatgggcaataaggtacacataaagtgtttaatttgttaagttttgacctatgtgtacatccaagaaaccgtcaccacaatcaaatgaacataatcatcctccaacatttttaattgagcagaaaacagttagggccagatacttgctaaatgaggctgccccagccatcacccacacccactcccaggcaccagcagaccacccagagacaggaattggaatcattgggagtacagtgttcctgctgaggaggtttgccctcccctctttcttat

SEQ ID NO: 831492 - DNA, 517 bp, Homo sapiens
ccagtcaatcctcagagccatgaaaataaaataataaattattttaagccacctggttggggagagtttgttatgcagygataaataactggtgcaccttccacagtcactttatttaaacatacactttatgtaaatgtgcctagcagagtgtatgctttggaaaaataatttttgttaaatcattgaaaatgttagttggtcaaaatagttctgaaacttatctgctctgaattctgacccatatctacaacgtattccgtctcagacacaaagggaccaccagctacatttattttttaaaccaagtgttttccacaatgtgatcacatttaatgcagctttgattcaagaaaccaccagttccaccaacaatttgtcactgcccactttatccccaccatacctcttccaaacttccatccatcgttcttctgttgccaggagttgaggacaggcttccattgttttacgttttagtggataccattcattatctctgattgcaggttatgta

SEQ ID NO: 831493 - DNA, 632 bp, Homo sapiens
gaggtaggtgcttattattaagcccattttacagctgaggaaactgaggcccagaccacctcaataacttgcctaagctcacatgctagtaagcagcagagtgatactgaagcctggcagcatggctcagagtcacgagggctgcactgtgtatgagatctcccctctgcagcactttgcactggccactgtgccttctgggcagaggcacatttcctgattttcctttttgactgcaagctcctccagggcatagacccagagtgtctggctctcactgagtccccagagaagtcagttcttgacttgtagtacggtcttgcaaggcagaggtactgtctggttcgaacttctgggcactgattctgctttatcctctcagaggaggaaggatccttgccgacgctgagtttacacaagaatcagaaagagtaacatttgtaatagtcactgaaatgaaagcaaatagactgctagtgtgagttatttgcagtgaggcyacaagggcagagacatggcaaggaaaaaggtctctagatcagttcagaccgtggcaaacagagtgttccattactgactctggggccagaggatgctctactgagacctgctgcttctgctccccactgcat

SEQ ID NO: 831494 - DNA, 611 bp, Homo sapiens
tgctttgtcttaaagttgggattagcaagggcacgtgtcactctgtaaaagcctagttttcctagaaggcacaagaagtatagaggattggaaaacatgcaaggatgtggcattccacatgctccaaagggcytatattagagccttaaactctcttccaattcttagccagcaatgtcgattagatgggtaacttgaagacagccaaaaccacacaatttccatcaaaaggcaattcactgctttcataacagtggggatggctaccggtagttaaaaaggcagaagtggctcatccatctctgggaataatttatatgacttggatgacatttaatttaacacaggtcacccaaaaggatggtgatttaatgccccagctttttttttttttcagtgctgcgttgctgtcattaggtgagtttcacctcatacttctttgtttttatttgaagagaaatctgtttgaaagacataattgtaaactatcacttttccagctgtaggcagggaataaaacccccaaggtgaaacatctgaccttgaaactcagagtgaataagcctctgtgctcctagcaaggggaatgaaggtagatttgtgaattaaaa

SEQ ID NO: 831495 - DNA, 579 bp, Homo sapiens
aaaagaaaaagtgcaggctttggaacaaaayagatgtgggttggagtcctgggagcctcggtcggaatcttgactccatcatctagaaacaaattcccaccaaacatgtctgaacctcagccacattaaatgaaaacaataatattcatctgatagggtggtggttagggccaaaagagcaaaggtttgtaaagttcttagtgcagtgcctagcatatagaattgcccgaaataaaaagaggcacattcataataggatttttaggagtaacacagctatggtatagttaataaaagactttctggagagggcaggaaggaggaagcagtgaggaaggagaatccgcagcgttctggcaggaaagtacttcttccttcaccgtgtcttgtctaaatcaagtgaacccaggcttccacctctgcccagacctggagcctaatagcctaggagtggatgagctgggcactagagcggccccaggacttcccttggatgtccctgtcaaagaagccatgttgtctgtgtccctctgggacatagacccatcattagagcatctttgagaaaatctgtgctct

SEQ ID NO: 831496 - DNA, 579 bp, Homo sapiens
aaaagaaaaagtgcaggctttggaacaaaatagatgtgggttggagtcctgggagcctcggtcggaatcttgactccatcatctagaaacaaattcccaccaaacatgtctgaacctcagccayattaaatgaaaacaataatattcatctgatagggtggtggttagggccaaaagagcaaaggtttgtaaagttcttagtgcagtgcctagcatatagaattgcccgaaataaaaagaggcacattcataataggatttttaggagtaacacagctatggtatagttaataaaagactttctggagagggcaggaaggaggaagcagtgaggaaggagaatccgcagcgttctggcaggaaagtacttcttccttcaccgtgtcttgtctaaatcaagtgaacccaggcttccacctctgcccagacctggagcctaatagcctaggagtggatgagctgggcactagagcggccccaggacttcccttggatgtccctgtcaaagaagccatgttgtctgtgtccctctgggacatagacccatcattagagcatctttgagaaaatctgtgctct

SEQ ID NO: 831497 - DNA, 560 bp, Homo sapiens
aattatggccaaggtttttttttttttttgccattttgactttaaacttgtatactaaagggttgaratattcacatggcaccattacatcaggggagcattctgaatttgatttataaaatttacctctattagtatgtttaatactttcttgtcttttcatgatagaaattattattctttcatttccagctgtagcactcttttaagcaactcctgtaaggccagtttagtggtgataaattccctcagcttttgcttatctcagaagttctttattttctgcttcatttctgaaggatacatttgctaattataatattcttggttgacagttttttgtttccttttaccacttcaagtatatcatccccttctctcctggtctgcaatgtttctgctgagaaatctggcaatagtctcatgagaatttctttatattaggggcacttttctcttgcagctttaaaagttctcttttttctttgacttttgacagtttgattataatatgcctcagagaggatctttttgggtggaatctaatggagacctttgaa

SEQ ID NO: 831498 - DNA, 508 bp, Homo sapiens
tagtgttattgtatgttatttgtggcccaagactattcttcttcttctaatgtggcccagggaaaccaaaacactggacacccctagtctagagggagatcatctcaggctgagagaggagcaaatatttcctgaggtgggaatcaggctactgtgttaaaggaacaggaagaaagcgtgtgtactggagcatagagtgtgttaaggagaaggcagatggtgagagatgccattcaaatggtaaagagatggattgtattccaattgtggtggaaagtagggaagcagcggtgtgacctgatactctaaaaagatcctgttgtgtagaaaatggactaggggaaacagaagcaagagactagttcttctcttgcagtggcccagatgaaggaagaagcggtttgactgtgtagccgtagagggtggtagaaaattggcagttctrggagatacagtgaaggtatagctgacaggatttgtgggtggattgggtatggaggataattaa

SEQ ID NO: 831499 - DNA, 598 bp, Homo sapiens; identical to SEQ ID NO: 830503

SEQ ID NO: 831500 - DNA, 462 bp, Homo sapiens
tgggctggctgcagctataacacacaccagacactctcatcacctccacgctttgtgcttgtgcattcgtgccagtgmtatccattctgagcagctgtgactgtgcccacattgaagctgtgtgcctgggtcagtgctgtggtgcacacgttgttgcttggtgtgtatggatttgaatctgcagatccaattgtttgtgagtactcccaaggtctacagcacatagctccgtgcactcattctgaagcttggtgttcaccagtcactgagctgtgcctgagccagcacactgctcagtcccacccgtctgccagtcttgctgagaggtgaggccagctagacttcctgggtggagtggggacttggagaaattttcttacaagaggattgtaaaatgcaccaatcagcactctgtaaaaatgtaccaatcagcactctgtagctagcaaaaggattgtaaaa

SEQ ID NO: 831501 - DNA, 462 bp, Homo sapiens
tgggctggctgcagctataacacacaccagacactctcatcacctccacgctttgtgcttgtgcattcgtgccagtgctatccattctgagcagctgtgactgtgcccacattgaagctgtgtgcctgggtcagtgctgtggtgcacacgttgttgcttggtgtgtatggatttgaatctgcagatccaattgtttgtgagtactcccaaggtctacagcacatagctccgtgcactcattctgaagcttggtgttcaccagtcactgagctgtgcctgagccagcacactgctcagtcccacccgtctgccagtcttgctgagaggtgaggccagctagacttcctgggtggagtggggacttggagaaattttcttacaagagrattgtaaaatgcaccaatcagcactctgtaaaaatgtaccaatcagcactctgtagctagcaaaaggattgtaaaa

SEQ ID NO: 831502 - DNA, 580 bp, Homo sapiens
ttggttaaatgatttgggacagacggctgcagtgatcagcctagatggtaaatgagtcatgagaaygcacattaggtggcagacaaccatcagttcagggtgggcttccttccttccttccttcctacctggcattctttctctattctccctagtggccctttaaaaatgcataagcatttagcacaaacatcattacctggtttacctccagagacacccgatgacttcttgatttccgactttagcttagatgccagaataaatctcctaaaccattcctctttttctcggccagttctcccaaagagatagagtatctgatctcgctggctagatcttgttccctcctgagggcggggtggcttcttagggtcctcacttccctcagctggcggcttctcttctgaagtctccttatcagtctgagctttagacataaagtcatcttgctgaccaagctcgatacaaatggggtactttttattccagattcgctttcgagccaaagttttaggtacaagataaatctacagagaaagaaaaatgatgatttatatattaaagattggctacacta

SEQ ID NO: 831503 - DNA, 650 bp, Homo sapiens
ttcacaatttccccttctcatgtttccattgcacttctgaagacagatctccaactcttccagagtcccacacrctgcctaaagcaggacagaaaaaccaactgccaaaggccatgcaaaactcaagatcagaaaccagaaccggaaactgtcatgactatgatacaagcaacaaatgattcatcctgagaaggcagtcaagtcccatttgtttctcaggactcccaaaagacgtccaggcagaagagttctgggacccgagtcagcatcaagtgccttggacatttactgagcatcctggctgcccagagccccagtaaggaggtagaaatccactaggaagcaaatgagaacaaaaatttacaacacaagccagaagtgccacaacagagggttcagaaaagcacctccagaacccagagaaaaaatgggctcaccctgcttgagaagccagggaggtaaatggggtcttcacagatgaacaggagcttgtctaacattgcaggctgctggtagagagggagcatgagcaaaggccagaggtctccaaggcctggtaaggagttacatggctgcaagtagggcacctgctgggcaggggagggagcccagggagttggggcgggggggcggcggtgagagaccacgaa

SEQ ID NO: 831504 - DNA, 650 bp, Homo sapiens
ttcacaatttccccttctcatgtttccattgcacttctgaagacagatctccaactcttccagagtcccacacactgcctaaagcaggacagaaaaaccaactgycaaaggccatgcaaaactcaagatcagaaaccagaaccggaaactgtcatgactatgatacaagcaacaaatgattcatcctgagaaggcagtcaagtcccatttgtttctcaggactcccaaaagacgtccaggcagaagagttctgggacccgagtcagcatcaagtgccttggacatttactgagcatcctggctgcccagagccccagtaaggaggtagaaatccactaggaagcaaatgagaacaaaaatttacaacacaagccagaagtgccacaacagagggttcagaaaagcacctccagaacccagagaaaaaatgggctcaccctgcttgagaagccagggaggtaaatggggtcttcacagatgaacaggagcttgtctaacattgcaggctgctggtagagagggagcatgagcaaaggccagaggtctccaaggcctggtaaggagttacatggctgcaagtagggcacctgctgggcaggggagggagcccagggagttggggcgggggggcggcggtgagagaccacgaa

SEQ ID NO: 831505 - DNA, 530 bp, Homo sapiens
atttacagaacattctacccaaaaacagcagaatatacattctattcaacagcacatggaacttcctccaagatacaccatatgataggccacaaaatgggcctcaataaattcaagaaaagtcaaattatgtcaagcactctctcagaccacagtggaataaaactgtacatcaactccaaaaggaaacttcaaaccatgcaaatacatgcaaattaaataatcttctcctgaatgatcattggatcaaaaatgaaatcacgatggaaattaaaaaattattcgaactgaacaatagtgacaaaacctatcaaaatctctgggatatagcaaaggtggtatcaagaggaaagttcatatccctaaatgcctacatcaaaaagtctgaaagagcacaaacagacaaactaaggtcacacttcaagtaactagaraaacatgaacaagccaaacccaaacctagcagaagaaaataaccaacatcagagcagtattaaatgaaattaaaatgacaacaaaaaaattcaaaa

SEQ ID NO: 831506 - DNA, 694 bp, Homo sapiens
aggtaacaggcatgtcaaatcctatattgatatccacrtaaaaaaccattgatacttacctcctgaatatggaacaggttattctgcataagaaacctacaggaagatgacagctttggaaaaccgaggcactttgagtctagtgtttctcctattcaactcaaaattttctccacagtatttcaagcgggatgctggccaagtaaaagaaagttaggatcctttttctatgtagttttcatatcacttagcaatttaaatacaaaacactaaatatactctatcaaaacacaagggttagaaatatctgaaattcatgaaatagggctaagaaattcaaatgctgacaagagccaagtcagtctctcttcataggaaatttcaacaaaataccaaaacaaactaagaagaaaggaaatttcaactttagacatatcaggatcagaattcttggtttgttccctgccttagttatacttttcttctctttccaattctaatttagtttaattaatattccaaaaaaagttatgaaattataatttaattccataatgtcggttggtttgcaaaaattagtggcataaaaagggtttattagatttcatgatgtttttcagattgtctagggtcagctggacccctcagttccagagagcattacttgaggaaatttaggcaaacatatttagct

SEQ ID NO: 831507 - DNA, 525 bp, Homo sapiens
aaatcatatgaacacattgaaaacatttgtttcttgatagtttaccacaaaataaagacattgataaagaaatatgcaagttataatataatgatrtcataaaaaattggatactattgtccactaaaagaatacaggtatttaaaagttgtcactcacaagagtaagattttataactcatatgtgaaaaaaactaatattgccccaatttgacaacagtctttaaaaatacacatgacattaccaatattgaagttgaaataaaattctctaaaattttaacaataaattcaaaatcaataatactaaaagaatgactggattaccattctattccactctaatctatttaaattattctaaaatttattcttggcatatgcaaaggcaaccaacaagtatgcaacaaaatatagaagaaaaaaagcattatagaaacatactaggctattaataaaaatatatttttgttaatttaaagattcttatagaattttccaattttttttatatttcaagcatgt

SEQ ID NO: 831508 - DNA, 525 bp, Homo sapiens
aaatcatatgaacacattgaaaacatttgtttcttgatagtttaccacaaaataaagacattgataaagaaatatgcaagttataatataatgatgtcataaaaaattggatactrttgtccactaaaagaatacaggtatttaaaagttgtcactcacaagagtaagattttataactcatatgtgaaaaaaactaatattgccccaatttgacaacagtctttaaaaatacacatgacattaccaatattgaagttgaaataaaattctctaaaattttaacaataaattcaaaatcaataatactaaaagaatgactggattaccattctattccactctaatctatttaaattattctaaaatttattcttggcatatgcaaaggcaaccaacaagtatgcaacaaaatatagaagaaaaaaagcattatagaaacatactaggctattaataaaaatatatttttgttaatttaaagattcttatagaattttccaattttttttatatttcaagcatgt

SEQ ID NO: 831509 - DNA, 623 bp, Homo sapiens
caatgctatagcaatatttgcaatttaagaggaagttrcaaataatatttcaagcaaatgtgtagatgggctatatagcctatactaagatggtcttagcttatgaaaagggattaaatacaagctttggaagatgcttcattttaagcactgtatttacagggtaaagttgtaggatatcatgagcacattggtggactgatatttttacttcaaattcttgtttcacagtgacacttcagcttaagcttctattatcaagagtttacttattatcttattccacttagagaatagtggtgtggctacttggagaagagaagacttgcaggcaactcttaagcagaactcaaggacttcagaaaggatgagcataagtgctgaagaaggttcagtccacactcggagctcttcaccaaagatttctgtgttatttagagattgctattcagacaacttcctttggcttgtatatgcccactcccaatgtcaaatgcactgttacccttcctggatgcagccaggaagcaactctcagaccacagatgcttctaaaaggcccaggatgaggctgggtccttgtaatacagtagagaggtcaaaagaaaatgtggaataggggc

SEQ ID NO: 831510 - DNA, 613 bp, Homo sapiens
ctacttcacaccatgcacaacaattaattcaaagtgtatcatagacctaaatgtgagagctgacactacaaaactcttataggaaaacacaggagtaaatctttgtgatctttggttaggttattatttcttagatacaacactaacagcaccggtgataaaagaaaagactggtaagttggatttcatcaaagtgaaaaacttttatgctttaaaggacaccattaacaaagtgaaaagacaacccataaactaaaagaaaatatttgtaaatcttatatctaataggggacttgtatgcagaatacaaaaataactctgacaacataataatagaaagttgaatagacatttcttgaaagaagatatatggatagctaataaacacaggaaaagatcaccatcattatttagcagagaaatcaaaatcaaaatcttgataaaacatcacttcataccaattagcatggctataaaaaagacagacaataacaagtgttggaaaaaaagaatagaaatggaaattctcrtacattcctcgtggaaatttaaaatagtacatccactgtggaaaacatttttcagtaccttaaattgttaaacactgagttac

SEQ ID NO: 831511 - DNA, 585 bp, Homo sapiens
actggcaggcctgccccagcttaactgacctagtttggtgaaagttctgcagcctgaatttgatatgccactgctaaaataaaatttcaaatgtaagttaaaatgccttttcaatgaatgtttttgaattttaatattggttaacacgagtgtttttagagtcagaaaaagcataggtaaaatgagtacaaatgaggcctgtgctccagaaatagtaatgtgaggggaaagacacatgaaaatgcattgtattttatttttattttattttttgagacagagtctccctttgtcacccagtctggagtgcagtggcgtgatctcggctcactgcaacctccacctcctgggttcaagccattctcctgcctcagcctcccaagtagctgggactacaggcacctgccaccatgcctggctaatttttgtatttttagtagaggcagggtttcaccacgttggctaggctggtcttgaactcctgagctcaagtgatccactcacctcggcctcccaaagtgcygggattacaggtctgagccaccgtgcccggcctggaaatgcattttaagtacacgttagtat

SEQ ID NO: 831512 - DNA, 582 bp, Homo sapiens
ttgaaagttatttaatgtactgttgacctttgaacaatgtgacagttggggcactggcccccacatgtagtcaaaaatttatgtataacttttgactccccaaaaacttaacaactatagcctactgttgactggaagccttacaaataacataaacagttgattaagacatattttgcacattatatgtattatatatggtatcttacaataaagtaagctagagaaaataaaatgttattaagaaaatcccaagcaagagggaatacatttactattcattaaatggaagtgaatcatcataaacgtctttatcctcgtcttcacattgagtaggcggaagaggaggagcaaaaagaggggttggttttgctgtctcaggagtagcagaggcagaagaaaatctgcatttcagtgaacccaggaagttccaagttgtgttgttcaagggtcaattgcatataaatatgtaaatgtgtgactatatacttccagaaaagtgaaacttctagttkttttttttttttttttttttgagacagagcctggctctgtcacacaggctggagtgcagtggcacga

SEQ ID NO: 831513 - DNA, 609 bp, Homo sapiens
cttattttaaaagagcatttgacccctctgactgttagtagagtaaatgatgcagtaacttatggaaaagttttgtggtacaatttaaatggaacatgaatgtgtcacaggtgagtaaagtaaatgcacgcttagatacaaattttattataaagatgatgagtgagggccaagtgcggtggctcaagtctgtaatcccagcactttgggaggccgaggtgggtagatcacctgaggtcaggagtttgagaccagactggccaacatggcaaaaccctgtctctgctaaaaatacaaaaattagctgggcatggtggcgggtgcctgaaatcccagccactcaggaggctgaggcaggagaatcgcttgaacatagaagggagaggttgcagtgagccaagaccatatcattgcactccagcctgggtgacaagagcaaaactccatctcaaaaaacaaaacaaaaaccaaaaataaaaatgatgagtgagttgcaygttgggataaaatagagtgacatattggcataaagcattatgaatagtgacaagatactctactattatttcataattttatctagaaacatttatttagcaatgttaacat

SEQ ID NO: 831514 - DNA, 559 bp, Homo sapiens
agtcacttgttgtgggtcaccattaataccctaattgcagaaactactttgaaattttttagtctagtatcttaatcatgtttgaccactctctgctcttgtaagctcccatccagggcacaatctcctaatttctcatgtatcacagactagtcttacatgtctcctaggcaagcttctcctttgaccaatcccatctgtttcttagacgtaaatccttaggttctctccccgttctcacctaattttttccctttcctgggtggttttatcaatggcctcatctaccaacaacatgactcattaatttcaagtctccagcccagctctccctcctgagcttgtgtattctacggccagctgcttatgcagggaatatttataactaaatgtgccattgtaactgcagcatccttaaactcgaataaccttcccagacagatgctccagaaagtagtatctttgtgataatatgattaaatgataggtatcatggtacaagcagctggatgagtaaaaccagaggattatrtttatgataaaataggaaaataagaga

SEQ ID NO: 831515 - DNA, 581 bp, Homo sapiens
aacatgaaccaactatacactgtttaraaaaaactcaccctactggtaaaaatatttatagactgaaggtaaaggggtgtaaaaagatattccacacttcatgtctgtagcaacattgggaaccaaaaatgagcagggtaactctgcttatatcaaaaaaaacaaacttttttattttaatgtttgtgggtacagagtaggtgtatatatttatgggttacacgaaatattttgatacaggcatgcaaagtgcaaaaatcacatcaaagaaaatggggtatccatccactcaagcattttcttttctcttacaagcaatcaaattatactctttcagttacttcaacatgtaaaattaaattattttgactataatcattttgttgtggtatcaaatgctacatattatttattctttcaaactattgcttttgtacccattaaccatcccaattcccatgacttcttactacccttcccagcatctggtaaccatccttctattctctatctccatgtgttcatgtgttttgatttttacatgtcacaaataagaagatgcaatgtttgtctttctgtgc

SEQ ID NO: 831516 - DNA, 581 bp, Homo sapiens
aacatgaaccaactatacactgtttaaaaraaactcaccctactggtaaaaatatttatagactgaaggtaaaggggtgtaaaaagatattccacacttcatgtctgtagcaacattgggaaccaaaaatgagcagggtaactctgcttatatcaaaaaaaacaaacttttttattttaatgtttgtgggtacagagtaggtgtatatatttatgggttacacgaaatattttgatacaggcatgcaaagtgcaaaaatcacatcaaagaaaatggggtatccatccactcaagcattttcttttctcttacaagcaatcaaattatactctttcagttacttcaacatgtaaaattaaattattttgactataatcattttgttgtggtatcaaatgctacatattatttattctttcaaactattgcttttgtacccattaaccatcccaattcccatgacttcttactacccttcccagcatctggtaaccatccttctattctctatctccatgtgttcatgtgttttgatttttacatgtcacaaataagaagatgcaatgtttgtctttctgtgc

SEQ ID NO: 831517 - DNA, 581 bp, Homo sapiens
aacatgaaccaactatacactgtttaaaaaaaactcaccctactggtaaaaatatttatagactgaaggtaaaggggtgtaaaaagatattccacacttcatgtctgtagcaacattgggaaccaaaaatgagcagggtaactctgcttatatcaaaaaaaacaaacttttttattttaatgtttgtgggtacagagtaggtgtatatatttatgggttacacgaaatattttgatacaggcatgcaaagtgcaaaaatcacatcaaagaaaatggggtatccatccactcaagcattttcttttctcttacaagcaatcaaattatactctttcagttacttcaacatgtaaaattaaattattttgactataatcattttgttgtggtatcaaatgctacatattatttattctttcaaactattgcttttgtacccattaaccatcccaattcccaygacttcttactacccttcccagcatctggtaaccatccttctattctctatctccatgtgttcatgtgttttgatttttacatgtcacaaataagaagatgcaatgtttgtctttctgtgc

SEQ ID NO: 831518 - DNA, 614 bp, Homo sapiens
tctataaggaagaaacacccaatacagcctaggatcctagtttgtagaacagagatatatttctagtgaattcctaatattttctaaacccttatcttaaattaaaaccaaattaagcagctcactacctaaaaatcaaaggacaacgtgctagacttggagcttttaagtttttcaaaattaccaaatatgaaaaattgtatttgcaaaaacatcaaacagaactcaagttctagaagcacaaaccattgagcaaagaaaatggaaatcagagtaggtttaagtaggacaaatattgttctttggaatagaaacttgttgctgaatctcaccatggagcaaaagacttacaaacttttgaaaaaacagggttcacatggaaacagaaacataacaggaactatgatatcaagactgacagatgccatgtgtcttcctaattcttttaaaagccattcttggctattaaaatgtcaatgtaggaataataaaataccattgattctagttttccagggggaatgtttatgcagaggttttaaaactttasatgtataaaaatttactagcacagaaggcagatatgttgataactccagctactaagaactgca

SEQ ID NO: 831519 - DNA, 634 bp, Homo sapiens
caggttcttacccttgagcaagaacccaagcctttaggtggccaaagggctacagagcagccgattctgactctaaagaaccttagaaatgttcctaggttacatgatggagagttttgaaatcttgactcaaggggaaaataaatcagtgtgaatagatatttctcaaagtagattggcacaaaagggattctaatggtttaattacgaaacttccatttaacttccttcctcacagccttattttgttgtttggctctgtctgattttctcaattaatcctgaaaatgtcactgacttagggagaaaagggctgaaattatttccacctgcttccttctacattttgcgaacgaaagatttttaatttacacgcgtgtgactgcacaagccgttagctggctttgtgatacgagcattgtttcaaccattgccttaagatgttttcgtctgtgctcatcacctcggggggatctgggttgcggaaagaattctaacccacttttggaacaccctcatctgaggcgcactccgtaggagcaagactatctggctttcccagaagctgtatcacttataaggttarcaatttggaggtagaaagggagacctcttcaaagattctcacagggaa

SEQ ID NO: 831520 - DNA, 619 bp, Homo sapiens
agtgcctggcccttggcagactgtcaaatggagctatggagcagcagcgggagtaatattattatctagaccttatckgtccttttaaactcagttcagattccttctcctttttaaattactgcaacctgattttacctgcccctgcctccaagttgctgtatcagttagcctctgaacaattcatttagcaattttaattatatattgcttcttgacactgctttgtgatcttaaaaactctgcttcaaatacgtacttggttgcttttcctgagtgctgttaattcctgctctaacggactaaagtaatttgaaggcaggactaggttttatgcatggcacacagtctggtgccttacatgtaactactcacaaacttttttgatccaaaatttagaaacttcacacgcattcataagaaatcaataaaaataagctaagttggtttcagatacagagggttcccaggaaggtgtgtacattggcaattagcccaaatgtctttgttcataatttttttttttttttttaagtagagacagggtttcaccatattggccaggccggtcttgaactcctggcctcaagtgatctgcctgcctcagcctcccaaagtg

SEQ ID NO: 831521 - DNA, 657 bp, Homo sapiens
tgaaattataaactcattggtttacctcatattgaatttcctgactagatgatgcttttttctttttttaaaaaagtacatttgcatttttcatcatttctcatgagrgaatcattgtctaaagatttctttaaatgtcttctatatagattctttaagcattatttttctgaatatgatctattttcagactgtcttcattttaatttgtttgtgactcatcatttctgccactggataaaaaccagtgctttttaaataatttgttttaaatgatcttaacctttactatttctaataggttttaaaaagatatttcttttatggtatctttctaggtattcaacctcgtcacctgctgatggggataatttggctgtttattttctttcactgttgcacagtgagactttcattcctgacttttaataaaaatgtctattgatttcaggtcttcttaaaaatcatggcaaactatcctatttctccatacactgagagatgaccatatgtaggtgctgagtttaccccatgccattttgtcatctttgaagataagaataagtgttgatcttttgtgacctattgatagggcataatggatctatttatataatatttatagaataaaccttatttatggagatgtgttgtata

SEQ ID NO: 831522 - DNA, 528 bp, Homo sapiens
tgagggaaaccagatgtggaaacagctagctctgaggaatattcgaatcgaggggtgaacaaagtgctgttgaggacgtatttacgtaagggagggctggttagttcmgcctgcctagaacacttgaagattttcaatggcagtttaaaaaggcatttattgccctcaacactctctgagcggggccccagagtggggatggcttgcagaggcacgtctccacgggcataaaccatcacttctaggttgctcgtgttaatgcacgatggatgatttcactgggctcttccagtggtttcagcaacagttttaaggagaaagctggtgatgatccaaaataacataacaagcgtaagccaagtggaagggtgtgcggggcaggagccagagggccaaagccagataacatttgacatgggaagatactggaggatagatttaagcagcaccattctctgctaggaatacaatatgtctccccaaggactgatattttgtccaaattgagacacttagctttagttattt

SEQ ID NO: 831523 - DNA, 647 bp, Homo sapiens
attgcttcagtttattgccagtgtatctttgatcttttctgtttggttgcttcttcagttgggattaaggattaaggtctcctggaaaccagggaaagaaaattaagcattttttggggmaaaaactttagaggtagaaattatacaaatctatgtgtggatttatcttctttttaaagtgaatcattcgagtagatctcatttcttctctcatccccaattttaggtattattttagccaaagatttttttgtttgctgtaggccagtgggggtcatgatttttttgaaattctaataataaaagctattgactttctctgcagacaaaagctcacatttccacatacaaaacttgcagagagttggtggactcataatttccctcttcctcctcctcaagttaagagttcctattttagagaatatcataattcagtcccctgtggagataatttcttgaaagaacagaaagtctgaagatgacagtgaaaaaaaacacaggaagtggtatagatagtaggtgggtttaaaaatgcattccaaattaattcaattatagagcgtacggagtatctgaaatttaagtaatgctttgttttcactgtaactgggaaaagtggttacaaaagagacttttttttaaat

SEQ ID NO: 831524 - DNA, 617 bp, Homo sapiens
attaggacttttcaagagagacttagatctgatagaactgatattttagcatttccagctctggtttcttttttctttttttttttgagacagagtctcgctctgtcactaggctggagtgcagtggcgtgatctcggctcactgcaacctccgcctcctgggttcaagtgattctcctgtctcagcctcccaagtaactgggactacaggcgcctgccaccatgcccagctaattttttttttttttttgcatttttagtagagatggggtttcaccatgttggccaagatggtctcaatctcctgaccttgtgatccacctgcctcggcgtcccaaagtgctgggattacaggcatgagccaccgtgcccgaccccacttatggtttctttaagtgtgagtgaagctatgctgggtcacccagatttctgggcaattcaagctgatttttttttttttttacttgccatgaagtctaaaaagacaagaaatgtagactggaaagcttcttttctcatgttttctcatgaaatccatacccataattcattaaatgaacaaacattgcaatataatttctgcaactcctawttttaccctgaacctttctcttgct

SEQ ID NO: 831525 - DNA, 575 bp, Homo sapiens
agcctcatagagtttagagtgttgtggtgtgctgtggttgatacaagtgatgactgaacgcactgtgagaagaatctgaatgttaagttattttttgctcatccactgacacatcctctcctgcaaaatgggtttcttttaaaaacgagagtctcacctggtgatggtgattattaacttcatttgggagctctaataaaaaagtgagataaacacctttttctcttgaggtagactctattctctgcttgtctagttctaaaaagcaattcatcaggaaagagaacatcatgagtaatatcaaaagacaaaattacaacaagtttagttatagagtgaattggtttttatttaccattggggcagcttctgttctacaaaaaagagtaagagcttccactgggcattgggttttgtaaggtgggaacaagaaacagaacaatggaaaaaaaaactgattggttaacatcgggtttcagattacttttttagtaagagttaaagcagaggggacttccttatcgcactgactcagatagactggartctcctgttttcaggaaaaactggtctgt

SEQ ID NO: 831526 - DNA, 496 bp, Homo sapiens
ttttccttgaccagactagctcttctcctctaagccctcttcttggtaaggtatcagtcttggcctataaagacttgtacaaaaactaacatactttcttttttttttttttttaagaactttctctcctccrccatttcaaggccacatcactaggttgacattagctccttttaaagtgcctcactaagaaagctcaagaatgccaaataacttactatttgtttgagccaacacctggcagtatgccctgaccaccctttcttagaacatttactaaaaagggcttgcaactgtgactccttcctctgtctctttgagatgtacatgtatctcctacaactcaggggtgtctttctcaaggacccaaaagccatttatttgaaatacaatcaagaagaatagggcccctgtctcccagtctgtaggaagatagaatcctagtgtttgtaactatcacctaccagaaacagctggcgttaccactttgtgatgt

SEQ ID NO: 831527 - DNA, 410 bp, Homo sapiens
ttttaaattttttgtagagatggggtctgtcttctgtctcttactgcatccattataattaaggtagaygaagtagaaataaagtggattcccacctaaatagtgggaattgagagaaacaggaagccttcttatcaacttgctccctcatcaagaactgataccaacattttagcttagaagtttatccattagtttacattaacctacatgaatgccccttggtaaggagaatacaaagattactcccagttatcaaagtttccaaattttatttattcatctcttcagattgactccccaaaccctgaaaactcttgctccaacccacctgttcagctgtccccaaccagtctatcccttgtcctgcattgctcactgccccttcacacttctgtgcatttgtcctt

SEQ ID NO: 831528 - DNA, 581 bp, Homo sapiens
tagggcatctaccatcagtggagcttgtaggactggaagttgctccgggtgcgtcagtgggtgagtgtgaaggcctgggacgttactttgcactgctgtaagctttttctattcaggcacstgtaggctatgctaaatttatagaaataaatgttctttcttcaaaaataaattaacctgagcttactgcagctcttttccttagaaacttttaaattttaaaaacctttttgactcttgtaataacactcagcttaaaacacaaatatattgtacagctgtacaaaaatttctttctttctttctgtctgtctgtctgtcttttacttggcaggggtctcactatattgccgaggttggtctcaaactcctgggctcaggcgaccctcctgcctcagcctcccaaagtgccaggattacaggcatgagcctccacacccagccaaaagtaaatactttttctttttatccttattctgtaagcttttttccattttgtaagtttttaattttttaaaacttttttgttaaaaacaagccaaacacatacatcagcctaggcctgcacagggtcaggatcc

SEQ ID NO: 831529 - DNA, 488 bp, Homo sapiens
tttgtaataataacaactgctgcttaatgaatgtgtgtcatgcgccaagcactgtkctaagcacttattttctttctttttttttttttggagaccgagtctcagtctgttgcccaggctggaatgcagtggtgcgatcttggctcactgcagccttgacctcccaggctcaagtgatcctcctgcctcagcctcccgagtagtcgggactataggcgcgcactgccatgcctggctaatttctttatttgtaaagatggggtttcgccatgttgcccaggctggagcattggaatgtttaattatcccaactccataaagccaatactatttctatccccattttagaagtgaggaagctgaggcacagaaaggcaaaagctcatggccagcatgtcacagctgtaaatgtggaggtgggcttcaggccttagcggtgtggatcacatgctatccttgtcctctgggtattgcaggctggcactgag

SEQ ID NO: 831530 - DNA, 558 bp, Homo sapiens
aattcttttttttgagatggagtttcgctcttgttgcccaggctggagtgtagtggcaccatcgtggctcactgcaacttctgcctcccgggctcaagcaattctcttgccacagcctcctaagtagctaggattacaggtgcccgccaccactcccaactaattttttgtatttttagtagagacggggtttcgccatgttggccaggctggtctcgaactcctgacctcaggtgatccacctgcctcgtcctcctaaagtgctgggattacaggcgtgagccactgccccagcctcaacttccataaattcttgaggctcctcagaacaattcagaacaacagactagaccagactattgatggctagtcctgactgcatcagaattacctgaagatatctttcaaaaatacagatttctgggcctgrgactggacttaccaaagttgcctctctggggtaaggcccaagaatttgcattttgtagttctctctggcaattatctgaggatccagaaatgtagaaattcctgggataaatgatttctaaaatgcca

SEQ ID NO: 831531 - DNA, 539 bp, Homo sapiens
gagattttcatggtgagggtgggagacatggtaagggtgagactgggggagggcaaaatgtcacagacactttgggtgtgatgagtaattttatgtcagcttgactggaccaaggatgccctgacatttgatcaaacattatcctgggtttgtctgtgaggttgtttctggataaggctggcatttgaattggtagactgagtaatgcagattgcctttcctaatatgggtgggcctcatctaatcagttgaaggcttggctagaactgaagactgagaaagaggaaaattcttctgccggactatttgagcaggaacatcggtctttttctacctttggatttgaactaaaacatcagctcttcctgggctttgagcctgccacctttcggactggaatttacgccatcagctctcctgkttcttaggtgtttggactcagattggaatgacacttcggctctcctgggtcttcaagttgctgactactgaccttgagacttcttggccagcccccataatcctgtgagccaattagt

SEQ ID NO: 831532 - DNA, 639 bp, Homo sapiens
agttctattctgccagatctgaaagaagagataagtctggagcatagatttcatcataaccaagttaccccaacctagtctgcaayactaaaagccagcaccttgaattcacaggtaaaacatgagtatgtggtagagggatcagtgtagaagcctggagccccgattccccaaaagagctatagagccccgaacaaccaacagcaacgggtaagtggagcccaaaacaacagaaaaaaatatcatttctcaattacaaactggcctggggagcaggaaggactgaaaagtgagggaaagcaggaactctactactgagtgtgggaggagaaaaacagcaggaattgggcagggaataacaccctggacaataataaacttaagggattcctttctccaacagttcatcatttgtgcagaagaaataaaggactggcttcagtaagggtttagagagataaaactgatcaactcacatatggctgctaaggagagcagagatttccaaggtcagggaggacaagcacgccctcccagcaactgcaccaggcaccgaatgccagcattctgccaggtggactttaaacactcaatgcttagggtgctcaagccaagtgttcacaagtatactaagagctt

SEQ ID NO: 831533 - DNA, 639 bp, Homo sapiens
agttctattctgccagatctgaaagaagagataagtctggagcatagatttcatcataaccaagttaccccaacctagtctgcaacactaaaagccagcaccttgaattcacaggtaaaacatgagtatgtggtagagggatcagtgtagaagcctggagccccgattccccaaaagagctatagagccccgaacaaccaacagcaacgggtaagtggagcccaaaacaacagaaaaaaatatcatttctcaattacaaactggcctggggagcaggaaggactgaaaagtgagggaaagcaggaactctactactgagtgtgggaggagaaaaacagcaggaattgggcagggaataacaccctggacaataataaacttaagggattcctttctccaacagttcatcatttgtgcagaagaaataaaggactggcttcagtaagggtttagagagataaaactgatcaactcacatatggctgctaaggagagcagagatttccaaggtcagggaggacaagcacgccctcccagcaactgcaccaggcaccgaatgccagcattctgccaggtggactttaaacactcaatgcttagsgtgctcaagccaagtgttcacaagtatactaagagctt

SEQ ID NO: 831534 - DNA, 633 bp, Homo sapiens
atgggtacaaacaagatcagactgtgaagactacartaaaaacctaagtcttcaattcccagatactgacaaacatccctgagcaatcaagactatccaggaaaacatgacctcactaaacgaactaaatagggcaccagggatcaatcctggagagacagagatatgtgacctttcagacagaggattcaaaatagctgttttgtggaaactcaatgaaattcaagattacaaagagaacgaattcaatatccaatcagataaatttaacaaagagattgaaataattaaaaattcaagcagaaattccagagttgaaaaatgcaactgacataccaaagaatgcatcagagtctcttaatagcagaattgagcaagcagaagggagaattagtgacttgaagacaggctatttgaaaatacacagaggaaacaaaagaaaagagattaaaaaggaatgaagcacacctacaagatttacaaaacagcctcgaaaaggcaaatgtaacagttattggcctcaaagaggaggtagagagaaagataggagtagaaagtttgttcaaaggaataataacagagaatttccaatcctagagaaagatatcaatattcatgtacaagaaggttata

SEQ ID NO: 831535 - DNA, 633 bp, Homo sapiens
atgggtacaaacaagatcagactgtgaagactacaataaaaacctaagtcttcaattcccagmtactgacaaacatccctgagcaatcaagactatccaggaaaacatgacctcactaaacgaactaaatagggcaccagggatcaatcctggagagacagagatatgtgacctttcagacagaggattcaaaatagctgttttgtggaaactcaatgaaattcaagattacaaagagaacgaattcaatatccaatcagataaatttaacaaagagattgaaataattaaaaattcaagcagaaattccagagttgaaaaatgcaactgacataccaaagaatgcatcagagtctcttaatagcagaattgagcaagcagaagggagaattagtgacttgaagacaggctatttgaaaatacacagaggaaacaaaagaaaagagattaaaaaggaatgaagcacacctacaagatttacaaaacagcctcgaaaaggcaaatgtaacagttattggcctcaaagaggaggtagagagaaagataggagtagaaagtttgttcaaaggaataataacagagaatttccaatcctagagaaagatatcaatattcatgtacaagaaggttata

SEQ ID NO: 831536 - DNA, 633 bp, Homo sapiens
atgggtacaaacaagatcagactgtgaagactacaataaaaacctaagtcttcaattcccagatactgacaaacatccctgagcaatcaagactatccaggaaaacatgacctcacyaaacgaactaaatagggcaccagggatcaatcctggagagacagagatatgtgacctttcagacagaggattcaaaatagctgttttgtggaaactcaatgaaattcaagattacaaagagaacgaattcaatatccaatcagataaatttaacaaagagattgaaataattaaaaattcaagcagaaattccagagttgaaaaatgcaactgacataccaaagaatgcatcagagtctcttaatagcagaattgagcaagcagaagggagaattagtgacttgaagacaggctatttgaaaatacacagaggaaacaaaagaaaagagattaaaaaggaatgaagcacacctacaagatttacaaaacagcctcgaaaaggcaaatgtaacagttattggcctcaaagaggaggtagagagaaagataggagtagaaagtttgttcaaaggaataataacagagaatttccaatcctagagaaagatatcaatattcatgtacaagaaggttata

SEQ ID NO: 831537 - DNA, 514 bp, Homo sapiens
tctcccacctcagcctcccaagtagctgggactacaggcgcccgccaccacgcctggataatttttgtgtttttagaagaggcagggtttcaccaggttggccagactgctccgaactcctgaccccaagtgatccgccgtctcggcctcccaaagtgctgggattagaggcatgagccaccgcgcccggcttttttttttttctgttttcttgagacggagcctcgctctgtcaccaggctggagtgtagtggcgcgatctcggctcactgcaacctccgcctcccgggttcaagcgattctcccgcctcagcctcctgagtagcggtactacaggcacgcgccaccatgcccagctaatttttgtatattaagtagagatggggtttcaccatgttggccaggatggtctcaatctattgmccttgtgatccacctgcctcggcctcccaaagtgctgggattacaggcatgagccactacgcccagcccctgatgtgattattatgcattg

SEQ ID NO: 831538 - DNA, 514 bp, Homo sapiens
tctttaagcaaggccagaactgccgtggttttcatggtagtgttgactcaggagattggcccccccaacatggagacacatggaaggccttaataccaaacccagttttaaccacccagagagagtgagagccgctcctaaggtgaatggctgttcatcaacgagaatatctagacacactgatgtgtgatacggcaaacttgcaactatgttcaagtaaagtatcgggcagttccacacagcactccttccatttagctgagcagagggtctcagtagactcatctctgaagcttttgaaaaccccaagccaggcttctcaacccatggagactcagaagcagagtatgggtgacacctgggcatgtccctgaggcaccacaggtcgttytaaggggtgccccaagttgagcaccactgatccagagcttgctgaagtgaggccaccggtgcctagtctggcacagccctcctcaggatctctcccctccccctagttggtgaggagacggga

SEQ ID NO: 831539 - DNA, 658 bp, Homo sapiens
ctgatttcctttaattttatcttcttctttccctacatgtatagttgtgaaagcaagattttttaaaagaggaaatcttaatttagatcggaaacagcgtcccctggaaaaggttgcttctttaagcaaggccagaactgccgtggttttcatggtagtgttgactcaggagattggcccccccaacatggagacacatggaaggccttaataccaaacccagttttaaccacccagagagagtgagagccgctcctaaggtgaatggctgttcatcaacgagaatatctagacacactgatgtgtgatacggcaaacttgcaactatgttcaagtaaagtatcgggcagttccacacagcactccttccatttagctgagcagagggtctcagtagactcatctctgaagcttttgaaaaccccaagccaggcttctcaacccatggagactcagaagcagagtatgggtgacacctgggcatgtccctgaggcaccacaggtcgttctaaggggtgccccaagttgagcaccactgatccagagcttgctgaagtgaggccaccggtgcctagtctggcacagccctcctcaggatctctcccctccccctagttggtgaggagaygggaagagaagagagtaggagggggcaagg

SEQ ID NO: 831540 - DNA, 603 bp, Homo sapiens
cgtgggtgccagggactgggtatcgtggaagaaattgattgttgagtggcatgaaaaagctttttagggaaatagaaatgttctrtatcttgattgtggtggcgattgtcgaaattcatagatttatacacttaaaaggataaattttactgtatctaaattatatacctcaattttgttaagatatatatatatttttttttttttaagcactcctttgaaaggattaaggacgcctaacttgaaggaaaagcatttctgcacaggtgtcagtgtattgcactgtggaacctgtgtggtaaaggcaaagggggtagtgcttatctcttgatcctaaatatgtgagaccagattaaagtgaaatctgggaggcaatgaatgttaaatgagttgttatgtaatttgcatagaggtgatgctgagagatttagaaaggatcactgtgggttgcttgctcactttcttgctctcctattccgtagctttccaaatggctgtactcaacggtggcttggtgtttaggggatttaaggggggcaaaaagaaagattaataatctcctcctctccctctaaccctactgccctaagatatccttagcaa

SEQ ID NO: 831541 - DNA, 612 bp, Homo sapiens
aaatttttttttttttttttaagagacaggggtctcgctatgttgcctgggggattactatgttgcccaggctggtcttgaactcctggcctcaagtgatctcccaccttarctcctcaagttgctgggattacaggtgtgagccacaatggctggctctaagaagtcaatttagagaaaaatattaattaatagtccaagtaatacctggatgtggcacaaatcatgtggtgattcatgaatgaccaaaatctaggaaatgctgccttagaaacagcttctgtttgacgggtccatatgtttgcaagactggccacatcttcagcaaaactaacccttccttggaacaatgtcagggtctggcacttgtcttcattctctgtttctcatcccaaaggttcgtttaccaagcaaaagttgggggtcgctggttcccagccgtctgcgcacacagcaagaagcaaggcaagcaggaagcagcagatgcggctctccgtgtcttgattggggagaacgagaaggcagaacgcatgggtttcacagaggtaaccccagtgacaggggccagtctcagaagaactatgctcctcctctcaaggtccccagaagcac

SEQ ID NO: 831542 - DNA, 597 bp, Homo sapiens
aatattattttggccataaaaagaagtgaagtgytgatacatgcttacaatatggatgcacttgaaaacttgatgccaaatgaaaaaagccagtcacaaaagatcacatattgtatgattccatttatatgaaatgtccagaatagacaaatccatagagacagaaagtagatgagtggttgccagggccaggagtgggagagttggagagatgaggagtgactgcgccagtgggtagaaggtttctttttggagcgatgaaatgttctaaaattgactgtggtgacagttgcagaactctgtgaatatactaaaaatgactgaattgtatgctttaaatgggtgaactgtatggcatatgaactatatctcagtaaagcatttttttttgtttttttttaaacccgatagtggtttcccactgcactgcatatacaagcaaaacctgctgtgatcacccggcctcctctcatgccactttccccatccctcgcatatgctctgtccacactggctctctgtcaggcgcctgaacagccaatccgctggctgccttggggcctttgcttttgtcctgtgtgcctgaaacacttactc

SEQ ID NO: 831543 - DNA, 334 bp, Homo sapiens
atatataataaatgtaacaaaattaataatatattaatactttctaagtaaaaactataacaaaacaagtccaagatctctacactaaaaactacaaaacattgctgagggaaattagaaaagatctaactaaatggagaaaattcctatgttcatagattggaaaattcaacattgttaagatgtcaattttccccaacttgggtctatacatttaaggcaatcccaatcaaaatcccaatagacattttttttttggtaaaaattaacaagctgatattaaaakttttgcagaaattgctaaataattttttaaaaagaacaaaattggagg

SEQ ID NO: 831544 - DNA, 575 bp, Homo sapiens
cttcatgattctctgggaccgttacattttgaaatatgcaaagaaagactttttttttaaggaaaggaaaaccttataatgacgattcatgagtgttagctttttggcgtgttctgaatgccaactgcctatatttgctgcatttttttcattgtttattttccttttctcatggtggacatacaattttactgtttcattgcataacatggtagcatctgtgacttgaatgagcagcactttgcaacttcaaaacagatgcagtgaactgtggctgtatatgcatgctcattgtgtgaaggctagcctaacagaacaggaggtatcaaactagctgctatgtgcaaacagcgtccattttttcatattagaggtggaacctcaagaatgactttattcttgtatctcatctcaaaatattaataatttttttcccaaaagatggtatataccaagttaaagacagggtattataaatttagagtgattgrtggtatattacggaaatacggaacctttagggatagttccgtgtaagggctttgatgccagcatccttggatcagtactgaact

SEQ ID NO: 831545 - DNA, 654 bp, Homo sapiens
ctgtgattgtgtgtatgtgtgttgaaactgtaaagcttttatgactctaatattaatctcttaaatgaaattaaaaggcaaaagaacatgattgagcttaaatgatcatttcttcctgcagtgattcttggattgttttctcatgtatttgaaaaaaaaaaaatgaagaaaaataatggaaaatggaagtaattactccagctaaaaaaagcttggacttaagatttctttttatgataccaaatgagaaataaaccaggcaaatcagaaggaagttaaagaagtaaatataaattcaacaagtgtcctaattatcctggatattggaatatttgattttccttacaatcccgttctagaatgcctgccacctttcaacactttcaagagaatttcaacacttacagagtatttatattgttaacagtaattttgctaccaaaaccttcagaataactttaataataaaatgacactgaaataatagactatacaaactctatattttttcagttggtgttaaaataagtcacattttgataccagtacaagatgtcttttaaataaggatgtcatcagtctgatttwtatagcattaatgttttatgaagaaaaagttcaaaatgaaagcattaattgctgtgattattagaa

SEQ ID NO: 831546 - DNA, 383 bp, Homo sapiens
caaacccatatactctcctatcctcaatacctccctctactacccattattctgttctggatctcaaacatgctttctttactattcctttgcaccttcatcccagcctcaattcgctttcasttagactaaccctgacacccattaggctcagcaaattacctgggctgtactgccgcaaggcttcacagacagcccccattacttcagtcaagcccaaatttcatcctcatctgttacctatctcggcataattctcataaaaacacacgtgctctccctgctgattgtgtctgattcatctcccaaatctcaatcccttacaaaacaacaactcctttccttcctaggcatggttagtggggtcagaattcttacacaag

SEQ ID NO: 831547 - DNA, 625 bp, Homo sapiens
ccctctctaatcatattgggaaaaaaccctttgcgattttgccaataccaggcctgtatctgctyctagcactgttctatctccctcctatgctcaagccaattcttggaggtgcagatcccctctcagccctggcatcttactctccccgtgcccaagcttccaaaattaccccattcactctcttctcttcccaaccccagcccatattttcctaagcagaaagaaatgagatctaatttattccacagtattgatagtggcacaatgatttcatttggggagagggagagatttctggtagttcaggggacaggagtgctgcctgatgcccctttatggacccctgaaacttctcctttttcctccgtacccaacctcctggctgtgaccaggaggaaagccaggagaaagaaacagaatgctagtgcccagagcctccagcctgccctagccttggaacaaagacgtggtcgcctgcaggaagcagcacacattctccacaggcccgtcaacctgccctcagcctccgtcctggaaaacgcccgccgcgctccacctctcacaacagctggcccgcgtgtcacagccaattaggctttggagggagtgagagggaaagcag

SEQ ID NO: 831548 - DNA, 625 bp, Homo sapiens
ccctctctaatcatattgggaaaaaaccctttgcgattttgccaataccaggcctgtatctgctcctagcactgttctatctccctcctatgctcaagccaattcttggaggtgcagatcccctmtcagccctggcatcttactctccccgtgcccaagcttccaaaattaccccattcactctcttctcttcccaaccccagcccatattttcctaagcagaaagaaatgagatctaatttattccacagtattgatagtggcacaatgatttcatttggggagagggagagatttctggtagttcaggggacaggagtgctgcctgatgcccctttatggacccctgaaacttctcctttttcctccgtacccaacctcctggctgtgaccaggaggaaagccaggagaaagaaacagaatgctagtgcccagagcctccagcctgccctagccttggaacaaagacgtggtcgcctgcaggaagcagcacacattctccacaggcccgtcaacctgccctcagcctccgtcctggaaaacgcccgccgcgctccacctctcacaacagctggcccgcgtgtcacagccaattaggctttggagggagtgagagggaaagcag

SEQ ID NO: 831549 - DNA, 624 bp, Homo sapiens
tttggaactggataaataaaaaataaatgcctgactcaaaaacatggatggtagaaatgttctgtatcttgtctgggtgtgcattatatgagtagtatatacatttgtcaaaagtatcaaactgtacacatgctatttttcaatttttctgtatgtaaattacatattcattagaaagaaagacataactactagagaataacaagataatgataattataactaagaaggattcctggctaggattgagcatagagggctttgctttgccatctacttcactgttcgtgtgctgatactgtactgttttaataaccaaatatttaaaaattgctgacaagtcagtgtagccaccataatatagaattggcatatgaatagacaaatcagaaaaatagacaaatgggtccagaaatgtatctgaatacattggaattttatcacttgaataccataagcaggttatttcattaaaggtagtatttcttttgtatgggagaatttagtattggaygatttaaatgtatactggaagctaagtaatgttgtactccttatctgagaccatgttcagaaatcaaaattgaattcagtatttaaatggtaaaataaattgtagtggaa

SEQ ID NO: 831550 - DNA, 624 bp, Homo sapiens
tttggaactggataaataaaaaataaatgcctgactcaaaaacatggatggtagaaatgttctgtatcttgtctgggtgtgcattatatgagtagtatatacatttgtcaaaagtatcaaactgtacacatgctatttttcaatttttctgtatgtaaattacatattcattagaaagaaagacataactactagagaataacaagataatgataattataactaagaaggattcctggctaggattgagcatagagggctttgctttgccatctacttcactgttcgtgtgctgatactgtactgttttaataaccaaatatttaaaaattgctgacaagtcagtgtagccaccataatatagaattggcatatgaatagacaaatcagaaaaatagacaaatgggtccagaaatgtatctgaatacattggaattttatcacttgaataccataagcaggttatttcattaaaggtagtatttcttttgtatgggagaatttagtattggacgatttaaatgtatactggaagctaagtaatgttgtactccttatctgagacyatgttcagaaatcaaaattgaattcagtatttaaatggtaaaataaattgtagtggaa

SEQ ID NO: 831551 - DNA, 604 bp, Homo sapiens
ttgtaaggaatgctgggagattcagtttaggggtttttgtttttgtttttgtttgtttgtttttaggatctaggcaaattgacacctcaaaatagtcaaatttctattartaaggaaaagaaatatgaatgttctctcagtgtctcctctactgtcctatcgatcaccgccattattaacatcataattttcttccgtgtccactgtccaagttggtctcaacctgagcttgagccttaatcttaaccagcctgagtggtctgctttgctgggttctataaacatttgctaaatgatctaagatagtactttcattgatgtacttttaaaaagagtataggaagtaccatgatggttattagtaattatcactggggtgggctggagggaattaaacaactctcagttgttagtctgagagtatttgagacattgccgagagtatttcaatttctgagatatttttgattgttataactggaggggctgctactggcatctgataggtagaattctgaggtgctgtgaaatactctatatacacaggacttctactacaaaagataaatattataccctaaatgtcagtattgctggggttgag

SEQ ID NO: 831552 - DNA, 498 bp, Homo sapiens
ataaatgtggttcagcatttgaacctaccrgatgccaaagccagtgtcctttgctgtacatcatactgtcttccattcgtgctcaactgatgtttttcaggagtttataaactgaaatatttaaaaccctaccaatgtgacatgtttttctttattgctgattgcttgctgaagcaagcaaattgttctattgtacataggcaaaagacgtatttttctaactacatttataaatatttataacagaatgccttcttgcaagttgtttccttaatgtaatttacaaattgcatattacaatgagtgaagccagaaatatttttcaatcaaactgtatttcctaatgtgaaaatgtttatcatcttgatccatttaaactatttgaataaaagaatatgcatgttaaagaattttcagttaaaagcctttctttgaaagattagtatcatatacatcatcaagtcccaatttctggctcacaagtggaatctgaggtaa

SEQ ID NO: 831553 - DNA, 615 bp, Homo sapiens
atgagataacaatgcctgcaaattttcaccccttctattcaatgtagtactggaagtcctagccaaacaattaggcaaaaataaataaataaatttttaaaaagtatttacattagaaagaaggaagtcaaaytgtccctgtttacagacaatatcatcttatatagaaaatcctaaatatttcactataaaaaaactgttagaactaaaaaaaattcaggtaagctttaggatgcaaaatcaatacacaaaaaatcattagcaatcactgcaaactatctgaaaaagaattcagaaaaaggattgtatttacatgagctacaaaaaacaccaagatttctagcaataaatttaacaaggaggtaaaaatctgtatactgaaagctataaaataactgatgaaagaaattgaagaggacacaaatacatggaaaaatgttccatgttcatgaactggaaaaattaatattttcaaaacatccatactgtcaaaagtgatctatagaactaatgcaatccttattaaaataacaatgaagtttttaacagaaatagaaaaaagtcctaaagtttgtatgaaaccacaaaaatccctgtattaggccattcttacat

SEQ ID NO: 831554 - DNA, 590 bp, Homo sapiens
tccaacatatttctcccatttgtgtctgtctccatccactaccatgcacactccttgaggatggaggtttggtctgttttgctctctgctgagcctctggtaagttggtgctcaataggcgtttcttgaattattattgaatgcataagtacaggaatgtttaaatctcgaattaattaactaaacaaaaaatagacctctcttggccaattatgaccttctcatctttttatatactgggaaagaaacaatggatgtggagaaatccagagtctcctgggaatcttgaaggagcctaaggttcagccctcttcaagaagactaaatacttatatttctagagatgaacagagagatcttgtgcagggaaatcattcctgcatcattcctagtattcagggtgcttgagcttccaaatagcagagcaataacattgcagtctattttaagatgcatggwaacaccagcaaatagctatttatatttgtcatgctatgcatatacatacacatgaaataaagctaaatctcaaaatattttctgtagctttgattttcctatttactccaaactattaccaacacaaaaca

SEQ ID NO: 831555 - DNA, 516 bp, Homo sapiens
attgctaatactcttttccaaagacatagagaagtaattttcagtatgcaaacatttaaattttacctttgctgttctgaattatagataccaaatggcataccaccataaacagatgatggcrcagctcttccagctagcatgctggtgatttcatagtgaaaatattgtttgtttcactaaagcctgcttgaaaattttgaaagcaaaacaactcttatccactgaggactatgcctaagtatagctaatggttttaatctaccctccaaaaaagaagaaaaaaaaaaccccactcctctgtaatttaagcacatattcagaaaaaaatgctaagaatgaaataaagcacccataatctttgaacctcatatattagtttaagaatgatacttgtgagatagagttaaaacctacaagattcctgtaagcatttacaaatatgctataagtgaatgaaacagaaaataatcaaaccaatacataccgacagattaataggtacaaagcttgcac

SEQ ID NO: 831556 - DNA, 501 bp, Homo sapiens
aatctgggaatagtaacagtttttccttcctttacttcttttttcccataagaaaatgaaggaaaaactgtttctcttctttttcttgctttaccacactggccagggccttcagtgggcatcactgttttgttcccagaaagggaaaactgtcagtatttcaccatttaaaaaaataacagctatctcgagatataatttacgtaccataaaacgcatactttaaaatatacaattccatggtttttagtatattcctagttagggccatcactactatttttagaacattttagtcactccataaagaaaccctgtacccattaacagtcattccctatcttcttacccccttcatttcaggcaaccactaatgtactttctcaatggattcgtctattttggacatttcataygaatgaaatcattcaatatgtggtcttttgtgactggcttcttttactgcacgtaatgtttttgaggttcatccatgtggtgaca

SEQ ID NO: 831557 - DNA, 619 bp, Homo sapiens
tcgttagacagcatctccatcaccgatcttcaggggtgctaaaccctgcacccagtatttgcggaatgttccacattcttctaacatgtgttcctgggtcaagatgaccttggttgctggctgccagccactcactttcccggtgcttttgaactaaacagttcccaggattcctgttccctggcaggcacagaattgtttactttccaatatgaaatactgaggaacattatagggctaactgaagtagaaaaaaggttgttctatttagttgaaaactcctgttatcccctaaggaaatacctacagggctaagttatgaggaattccttaactggattaagctggtggtgttcgatgagagaaaacccacgaagataccactgttcagcagccccccgaccaaggatgcagctgggcaatggaaatgtgcttggatgcagggtgcccttaggtgggctgtgaaaggccgctgaaggacagayatgttactcacctcgtctagcacctgggaatctcttagtgcctggtcagtgatgtcaaattggaaagccagcatgcggggaaagctgaaggcccgggtccttacgaccagctgctcagcagaaacgacactagg

SEQ ID NO: 831558 - DNA, 644 bp, Homo sapiens
ttgacacgtacctccaaggcctcaaagtgcccacagtgtgtgctcccacagcattaaaatgcacccccttaacattttatttatcaccccccaccactattccaggcctgaaacagtcttatgaactgtccgtgaggcacttgtttgctgaaacagtaactgagctgaattcttgtggtggttcctatgaacacccgggaagaaacagccagcagaggccgcctgagcctgaaccgagtttctcttccaggtgctgcggtgtgtcgcggggtgcccaggcctggaggaactctaccttgagtctaacaacattttcatttccgaaaggtaactagcacttacttaaatgcatctatccccatttaatcatcattctgagtaaataaatggtctcaattatatctaaccttaatttttagaaggatttgcaaacaagaattaggaaaaatgcttattattcattgccttcacaaattagaatttcactaattggttctaatcaaaggaaactcatcagaattaaatatttgtgaagacatgagttatattagttttgcatcagtgtattaacttgctgtttcttttttttctttttytttttttgagacagagtctcactctgtcgcccaggctggagtgcagtg

SEQ ID NO: 831559 - DNA, 635 bp, Homo sapiens
agttgcctgtttcatgagattcctgtagttcttttcaatgatgtcataagcctacaaagctggcttttgggcaattgccgcgataaaacrcaagtatttatgtacatctatcatgcatcaatagaaatatttgttttataaaaaagcaagtatctcttaaatcagtgtggaactggaaatggaattggtggcgtccagtctgattccagggtttgggaagttgggcagtgcccagcagacactgagttgacaggacataagtaatgattaagttgtttggccctaactacgtacttaattggaactgtgaggtatttattttggcctaagtaccatgaaaaaaattactgaaaccctaaggaccgtgtggcctgagaaagtttgggaccctctaaccttgaattctgctgctgccttttgtaccctggtttttctttcttttttttgttgttgtttcttgttttttgttttgagacagagtttcactcttgttacccaggctggagcgcaatggtgtgatctcggctcactgcaacctccaccctcccgggttcaagcgattcccctgtctcagcctcctgagtagtcgggattacaggtgccccccactatgccaggctaatttttgttatttt

SEQ ID NO: 831560 - DNA, 531 bp, Homo sapiens
aaagcaagttaagattgtaaaaagccatgggtctttaagccatgatactcaaaagaaaataataatttattttctcttcaaatacctagtrttttattatagcaaattttattcagagaaggaaaaaatattgttgaagtttaagtgtaggtctcttttcaggatggtttaaacatataaagaataagagaatgttaatggcatgagaaagacagactcttcctgtaaaatataaataggctcatgagacttcctgcatccccctcagcacccgcccacttaccggacattcatccactaaattgttaccaaacattaaggaaggtgcggcaaggcattcctttcataggcatgagaggtcctcccacctgaccctggggctagaaactgaaaaagaattgaaaattctgaagccaagtggattttagctttttatttttatgttctcctttttcctctaaagcagccagaagctgaatttttaccttttaaacagattttagtttgtggattaatcttttgtttaaattt

SEQ ID NO: 831561 - DNA, 595 bp, Homo sapiens
tctttatcctcctccgtagactcctcaacatgaaggcaaggaggatgaagccctttatgatgatccacttccacttaatgaagagtaaaatatattttctcttccttatgattttcttaataacattttcttttctctagcttactttattgtaaggagacagtatataatacatataacataaaaactatgtacctaatgactgtattatcagtaaggcttccagtcaatagcaggctattagttaagtttctggggtggggagggtcaaaagttttcatgggttttcagctgtacaagggacagcaccccaacctctgtgttgttcaaggtcaactgtacttagaaactttttagaatgtactacatactgtgagccaataaaaatgttcatgtaggctgggcatggtggttcttccctgtaatcctagtactttgggaggctgaggtgggaggatagcttgaggccaagagttcgagaccagccagggcaacatagcgagacttcatctctaccaaaaacwcccagccaaccaaacataaccaggcatggtggtgcacaccataaggctgagacaggaggatcccttgaacc

SEQ ID NO: 831562 - DNA, 604 bp, Homo sapiens
  misc_feature 573: n = A,T,C or G
catatctaaacaagcaaagtacaggaaaaatacggtacaaaaaataaaaaatggttcacctgaccaggrcacttattatgactggaagttgctctgggtgcatcagtgagtgagcggtgagtaaatgcgaaggcctagggcattactgtacactacagaaacactgtacagcttaggttgcactaaatcaaaaaattatttttcttcgataataaattaaccttagcttactgtaatttttttactttataaacttttacattttttaacattctgactcgtttgtaatacttagcttaaaacacattgtacagctatataacaatatttttctctttctttcctgtcatactaaaatcactttttttttttttttttttttttaaaaagagatgagatcttgctctgttccccaggctggtcttgaattcctgggctcaagtgatccttccacctcagcctcccaagcagctaggacaactggtgtatgccgccatgcctggataatgttttcttcattaaatctttaatcaagaaactttatttaaaaatattatttagtatttgtttgtntaactttttgttcctctggctacccatattt

SEQ ID NO: 831563 - DNA, 395 bp, Homo sapiens
tgaaaatagttcaatcctttcaggtcttgcttttatggtttgttcagtggatccagagctggaggacacgaggatgagtgaggcattagctgaagtgggcagacaagtccaggcactaaccacagcagcatggatcaggaggcagtcaaaactcgagcatggtagcacaatgtagcctcaaccccaccctagcctcccgcttcctgaaacggtagctgcatgaagagggaaggcagagctgcagttttcccggctatacttggaggtactctcatcagatatgaagcctgaacacagcaagacaccaggcctcaaatgtagctctggggcmgctgtcagcagagagctgtccaagaagagaggcccacctgtcatctcatcccaccctgccctta

SEQ ID NO: 831564 - DNA, 547 bp, Homo sapiens
gtaactgcaaataggaaaccagagagggagccccaggctgggacaaatcatggctacccctccccaacagaacagggggaggaggtggcccctacaccctttatggtcgattygggcccccttgctcactctgctgcagcatcctaggggcagggccccaccttccctgggactggggtagtcggtcacccagcctgccatgccccagcccctcttccccacaaagagtatcttgggggaggggatcgtgggcagaacaggaggcaatgaggatgaacatttggcgctggtagcagcagcaatgacggatgtcgaagaatggaacattgaacaaaaaacaacacaactgtccagaggtagtttgtgaacagaggaaaaatggaaccagaaccttggggggcagggaggagcaggaggggggttgggagcgggcagggtgagctccttgttattggtgccccatctgaggagggggaaatggctgagtggcggaagcaaagtagggttaggggagcagccccagcccacctcaggtggcggccacagg

SEQ ID NO: 831565 - DNA, 408 bp, Homo sapiens
cctgtttgctctcttttacaaaagaaagaaaagatacacagtatttctgcatgataaaatgtagtatattcacataaaagtttccagaaaataacttaaatgtgaaatgcttttgattccctgaagaaaccaaatatattcttcagtgtacctcacaactgcagctttttatcagattgctttaataatggcacctctgttcaatttgttatatttcatcagacatgcgtggcagtcagcacaaaggacaagttagactttaaaatgaactgtgcaaatcttctgataataaaaygagagtgacagatataattatgaggtacagacagataaatgaaagattctcaaggacgttggtggcctactgtttagagcttatagaacaaacaccactgagaaaattccttt

SEQ ID NO: 831566 - DNA, 405 bp, Homo sapiens
atagtacagaaattaacaatgatttgagtattatttaaaattagtaccttccttataaatgaatcacttcatggcagtttgtgtctacagacgcctatttaaygctgtgggattccctctccatgtggggtcaatactagcttagggaccaacaatgtcttttcagcgacatctttacttccagctgtttttagccacagaaattaagtttctgcacctacaccttctttgctgtaaattataatccccagttgattatcttgggaaaagtctgtgtttcattagtaatgtaaaaccacttgaactcacacacacatgcacatacacagcctgtgctcttcccatggaaagcatcagtgctagactgcaaaacaactgggcttatcctataaacaacagatcttg

SEQ ID NO: 831567 - DNA, 617 bp, Homo sapiens
ttaggggttttgtttgctttttggtgtctggagtttttgttttgttttttaaatttccctccacacataamatgtggttacataatccaaaagtctaggtttgaatcttgattctattgctcacaaacgaactgcccttgacaaaatcacctaattcattgagccttaggtcctcatgtataaagtggtcataataataatacctaactgaaatgaataaggtatgcttatttaataatttaatgatgacaattaaatccgctacattttagaagtgcttctaaggatggtttctgacacataacatgttttacatatgtatttttaaatgaaaatataaatgtaaattgatacatttgttttatatgactaaaataggacacatttcttagatattattcttactgacatttcaaggcaaaaagtagtttagaatgtcttaaaaaaaagaatgtcttataattaatttggaatataaataagtataaagatttaaactgtaaaagtcccatcaattgaagtcaagtaatgttaccgctataattgggaatacaggcaaaagagaaaagaaagaagaaacgaagggaaagagattaacagagaaaagagggaaagat

SEQ ID NO: 831568 - DNA, 532 bp, Homo sapiens
cagaataatgattgaatgttgtgaatgtaaatacattcgaattgcagattttacgacgtggctaattttcactgccaaagtgcattttgctgggctattgccaagcactaatgtagaatttttgcaagtctgtacttcaaatagtagagtccagtgcctttgaatctttttttttttttttttttaacttttaagttcaggggtacatgtgcaggttttttacataggtaaacttgtgtcatggggattgttgtacagatttcattgcccaggtattaaacctagtacctattagttatttttcctgatcctctccctgctcccaccgtccactctctgaaaggacccagtaggtgttgttcccctttatgtgtccatgtgttctcatcattgagctcccacttayaagtgagaacatgcggtatttggttttctgtttctgtgttagtttgctaaggataatggcctccaggtccatctatgtccctgcaaaggatataatctcatccttttttatggctgcagagtatta

SEQ ID NO: 831569 - DNA, 647 bp, Homo sapiens
gataccacagaaaaatgaaaatgaaagtcaatgattgaaaaaaaaatagaaccactgctctcttcaaagctgtcagacagggacatttaagtctgcaaaggttactgctgtctttttgtttgtctgtgscctgcccccagaggtggagcctacagaggcaggcaggcctccttgagctgtgctgggctccacccagttcgagtttcctggctgctttgtttacgtaagcgagcctcagcaatggcgggcgcccctcccccagcctcgctgccgccttgcagtttgctctcagactgctgtgctagcaatcagcgagactccgtgagcataggactctcctagccaggtgcgggatataattctcctggtgcgccgtttcctaagcccgtcagaaaagcgcagtattcgggtgggagtgacccgattttccaggtgctgtcacccctttccttgaccaggaaagggaactccctgacctcttgcacgtcccgagtgaggcaatgcctcgcgctgctttggctcatgcacggtgcgctgcacccactgtcctgcgcccactgtctggcactccccagtgagatgaacccggtacctcagatggaaatgcagaaatcacccatcttctgcgtcactcacgctgggagctg

SEQ ID NO: 831570 - DNA, 542 bp, Homo sapiens
aagcacacacagcccgatgtggtattttctagggatcgcccccttctttgagtgtgcgtgcgtgcgcgtgcatgcattgcttctggttcataaatctgagccaagtcttacatgcagtacagacctgtgcattagaattcacagggtcactgggctagttcaaatatctaggttctgatcttaagtcggggctgggacgaagagacagacctgaactggaagaaaactttggcctggagtgctctggtcaaagtctccgagtcctcctcttacttcccaaaccgagctttgaaccggaaccaacagcagcggaaaagtaaagttagcagctcttccccaagtgggagtagctcctcatcactcactgcctttaaaatcctggtttgttttacatcagggcagaacgatgtaaaaacaacagaattcaaatgaaatcatgaacacgtttgccctttgtacctgtgtactgctctggcacagygcgcgctgaggagggaggggtcgttcccaggaggaatccacctgggccccggctgccacag

SEQ ID NO: 831571 - DNA, 535 bp, Homo sapiens
gtaggatgtcgagcagcatcccagcctttacacatcggatgccaggagcacccccaccccagcagtcgtgacataaatatatctccagctgttgctgaatgtctcctggcggggggtggggggtrcagactcaccctggatggaataccgctgaactaaccccatcttctatagctaataaaagacaaataacaggattcaggcactaaccagagtacgactcagtttctactccttcagataagcagaccctaatctgagggagtcgggccagctgaagacacggctcagaatatccgaagtcttgagcaagttcctttcctcttactgactctgtggcggacccactgcgccccaggccacctgccaaggacagcaagccttctgaagcctttctctaacgggtcgggacggggaggactgctggaggaccacaaagaaatgagcctactcctctggggccctgggcagacctcccagttcctgttctacaggagtcaacgtgggcctccagcccggttcaacaactaaccca

SEQ ID NO: 831572 - DNA, 632 bp, Homo sapiens
tagaaaatcccggaatgagaagaggagaggctaggaatgccttgtgtgtagatgagggaagtaaatgcgcgttgctaggaaacattcaaaagttgtaaaagtgagtgaaaggacttaaggtgattaaaaatatctaactagtaaaccttaaaaaacatagttatttataaagtagctggggccaggtgcggtggctcacgcctgtaatcccagcactttgggaggcagaggctggcagatcacaaggtcagacattggagaccagcctggccaatatggtgaaaccccatctctactaaaaatacaaaagttagctgggcatggtggcaggcacctatagtcccagctactctggaggctgaggcaggagaatcgcttgaacccgggaggcagaggttgtagagagccaagatctcgccactgcactccagcctgggtgacagagtgagactccgtctcaaaaataaataaataaataaataaataaagtagctggatatttgaaatacccaayaataaccacgttggagcaattacagcatgccgttctggctcgcaagtgtgctgattatgtcaataaccatattgagcctgttttatgaattcctattcccattagggactaatatttc

SEQ ID NO: 831573 - DNA, 611 bp, Homo sapiens
gaaaataatagcatgttatcaggtaaataacmatgtcttaagggtattttaccttgtcactgggctaatttttgtgtaagattcatttttttaaaccttaagaaaaaaccagactattttaaatttttacttgaaatgcatttaattgattgtttataagagtgcattttaatatcattgatacatgttcacttgaaaatatttgagcaacagtaaaaaatacaaatatgagcgaaacatattacctttaattctaccagcatcaacatttgaagaaccactttctggagcactttgctctcactgtgcatgcatcatagggacgttataaataaataattttacaccatagggagagacagattgcaatgcaataatagtagggggcttcagcaccccactttcaatcatggaaagatcatccagacataaaattaataagcaaacactggacgtgaaaatactttaggccaaatggacctaatagccatatactgaacattctatctaatggcaacagaatacacattttattaagtacacacataatattctacagaaaagatcatgttagcctacgagacaagtcttagcaagtttaagaacactga

SEQ ID NO: 831574 - DNA, 474 bp, Homo sapiens
aatcctgggctgaagcgatccttccacctcagcttcccaaagtgttgggattacaggcatgagccactgtggccagcatagtacttttaagtagtttcacattttatctctgttcaaraagggggaaattttcatttaatgcaaccaaattatgtggtatggaaaaatcttatttcaaattctggctgacaagaaaaggaattataaaacattgttttgttaaaaaataaactttattatcctcaacttacagtaatcttaaaaataaataaggaaacaaacaccacaataagaaagccaaggcaaaagatattaaacatatcacagaatcatctaaaaacaatatgaatgttcttaaggcttggggtaaaaataaacaatttaaaataaaaatgattaaaatgtaaaaatgaagcataacaaaaaaatgagaaaaattaaaaaattaaataaagcattatttaacagagttga

SEQ ID NO: 831575 - DNA, 638 bp, Homo sapiens
aaaaagataaatgccacttattctcttaaaatactctccacatgggaattagatgagcaaagagaatctactttgagacttaggaagagtcgagctaacctgtagaatgaaaggagaaatttggagagtagayaaaaggttttgttcccacccaattcaactgggctctcttttgctccttaaaaatacacttcaggccaggggcagtggctcccacctgtaattccagcactttgggaggccaaggcaggcagatcacctgaggtcaggagtttgagaccagcctggccaacatggtgaaaccccgtctctactaaaaatacaaaaattagctggacgtggtggcacatgcctgtaattccagctactcgggaggctgaggcagaagaattgcttgaacccgggaggtgggggttgcagtgaacttagatcataccattgcactccagcctgggagacaagagcgaaactccatctcaaaacaaaacaaaacaaaaatgcattcagaaatccaggcctttcccaacacacacacacacacacacacaccttctataagacaacagaaattgcctcactgactttattctcagaacttggcatcttggtcctaaggaggatcccagataacttcacag

SEQ ID NO: 831576 - DNA, 475 bp, Homo sapiens
gggaaaaaatttaagaaataaaaatttaaatttaaatttaagttaaaaaaaaaaaaaaaaagtccaggcatggtgcctcacacctgcaatcccagcactttgggaggccaaggtgggcggwtggcttgagcccaggagtttgagaccagcctgggcaacatgacaaaaccccatctctacaagaaaatataaaaattagccacgtgtggtggtacgcacctgtagtcccagctacttgggaagccaaggcaggaggatttcctgtgcccaggaaatcgaggctgcggtaaggcatgatcacaccactgtactccagcctggggaacagagcaagaccctgtcttgaaaaaatataaatataataacgataaaagaaaaaagaatatacttccagtttttattgtaatcttaactgacatcttacactttttcaatctcacatctcacatgttaagacggtaacatgatccttccc

SEQ ID NO: 831577 - DNA, 634 bp, Homo sapiens
atctccaacacaatagtattaagaggtagggcctttttaggaggtgacctactggggaggccctccctcatgaatgggattaaggcctttataagagrgtcttcacactaggctcagcccctgttggcattccaccttccaccatgtgaggacaaagtgttcctcccctctgaaggatgcaatcagacaccatcttggaagcaaagggaccaggccctcaccaaacatcaaacctgcaagtaccttgatcttggacttcccagcctccagaactgttaagaaataaagttcgttctttttaagttactcagaatctgtggtactgttatagcagcacaaacagactaagaaagatatctagggaaatctcttagaacaaggtattatctgaaaaacaaagagaagaccacgtacctgttttttgaacttgaagttgaattcccacattggttcctgtctgttcccaacaatctttctgcaccagaaaagtaagcactataagaaagtaaaaataaaataaaccaagaaaaagaaaaagaaaaaaatcaaaatacactacaaccaaaataatcaccaaaaacctttctgtttgacagctctaaagccagccacggtcccaatgctgagattttac

SEQ ID NO: 831578 - DNA, 634 bp, Homo sapiens
atctccaacacaatagtattaagaggtagggcctttttaggaggtgacctactggggaggccctccctcatgaatgggattaaggcctttataagagagtcttcacactaggctcagcccctkttggcattccaccttccaccatgtgaggacaaagtgttcctcccctctgaaggatgcaatcagacaccatcttggaagcaaagggaccaggccctcaccaaacatcaaacctgcaagtaccttgatcttggacttcccagcctccagaactgttaagaaataaagttcgttctttttaagttactcagaatctgtggtactgttatagcagcacaaacagactaagaaagatatctagggaaatctcttagaacaaggtattatctgaaaaacaaagagaagaccacgtacctgttttttgaacttgaagttgaattcccacattggttcctgtctgttcccaacaatctttctgcaccagaaaagtaagcactataagaaagtaaaaataaaataaaccaagaaaaagaaaaagaaaaaaatcaaaatacactacaaccaaaataatcaccaaaaacctttctgtttgacagctctaaagccagccacggtcccaatgctgagattttac

SEQ ID NO: 831579 - DNA, 594 bp, Homo sapiens
caagtagctgggattacagtcgtgcaccaccatgcccatctaatttttgtatttttagtagagacgcatttcaccatgctggccaagatggtcttgaactcctgacctcaaatgatctgcctgcctcgggctcccaaagtgttgggattacaggcatgagccaccgcgcccagcctcaacttttattttaatagattaaggggtacatgtgcaggtttgttacacagtaaagcatttttcataacaataaataatcagaaacaattgaagtagccagtgatataagaatgcataaataaaatatgatattcaaatattcatttattcaaaaatttttccggcatgcctgctctgtgccaggcatggggaaatgggggtatgtaagcagatgtgtccctggcctttgggaacttaccaagcccagaaagagcgacattgactagaaagctacccaggtgatgagtggtggacttggaaggagaaggagatccaacytgagtgtctaccagaggaaactggtccaggtggggtggggctcagggaaggcccccctaaggagagcccattttagctgagacccaaaagatgagtaat

SEQ ID NO: 831580 - DNA, 608 bp, Homo sapiens
tcaagacacgtaaagatggccttcagggcatttgcactctgtggataagggctctccagtggacgggtggcagcaggctgtcacactccacccacctttctggcaccccagggctgagctatagcccgcaggcgggctgggctgaagaaagattgaaaattttgcaataaatggaattttagttacccaaggagataagacaaggagtttactgacaacgcagtgtgaaactcagtaattacgaatcgtgctagggatatgagattgtgaaaagcagtactagatacacccctggcatcaccaagacacaaacactgaaggtgaaaatacagcttagaatctccagttgttaagaatctctgctgtactgtttgtgcctcgcgtctttagataaactagcgttcctgggctcctagtgttggctcggttgtgctgttccatgttcgccttttgaatgggatgggggtgcttttggagtcgtaaggaagtgcttgtcacttaaacgtgtttwcttctttggtgctcagaattccagctacagcggtgacagcagattctctactttgtcatcatccagggaggagaagttggttggtttccatttaaat

SEQ ID NO: 831581 - DNA, 524 bp, Homo sapiens
tgtctcacagccctgagaagatggcgttttccctatcagtggctctgaggaagtcaagccttcagtctctacctctcccaccaattcttttggaaacagcaaaccaatgttacacacacttcctaatccagaggaagctagaacacgatttttaaatttatttagtaaaataaaactttttttgcagatgtaacgaatggaaattggttgctggcttctttcatccctgcaacctagcgtttctcagcctcagcacgacggtcgtctggagctgggtcgttcttggtggctggggtggctgtcccctgcaccgtgggatgttgagcagcaacactgaactctaccaactcattgccagtagaccccactcccggtcatgacacacaaaaacatcaccagacattgccaaatgtccactgcggggstgaggggcgtgtaaaagcgcctcccattgagaaccactgctgtaacctgaattagaagatttggaaaagaaatggttgaaaacccagaccaggatccct

SEQ ID NO: 831582 - DNA, 469 bp, Homo sapiens
ggaagggcaagtttgaaaacaaaatttgtgagaaaccctgacttaaatctgctaaatcttatctcagaaaaggcagttgcctcactcaacatgaacacctgaagcagctgagtcaggggaagatacaacttcagaacaggttcctaatacccaggaatctcgttgtgttagaagcagatgtcttgtctttactgtgatttttaaaatatattatttttgttcttatcctaaatacctctgcgtgtgtctgtttccatgattttatcaagagtgacttttcagatttcctgcaagttggcctctctagagtttattagaataactctctaaatattgatcaagtacttactcaagcactaggggttcaacagttctrttccagtggggaatgcagacaataaacctgaacgtgagtgagtaagattttggataatgaaaggtactatgaaaaaagttgaaagcaggtagt

SEQ ID NO: 831583 - DNA, 510 bp, Homo sapiens
  misc_feature 1, 2, 3, 4, 5, 6, 7, 8, 9, 10, 11, 12, 13, 14, 15, 16, 17,18, 19, 20, 21, 22, 23, 24, 25, 26, 27, 28, 29, 30: n = A,T,C or G
nnnnnnnnnnnnnnnnnnnnnnnnnnnnnntgtgttgactccgtgctttgcttgtttgcttttttatctctccagtgggacagcttgcctctttaaatatgtgtctctctaaccctgacaggyttgaagtatgctgttgtcactagaaagacacagagattgtgggggtgtgggggtctgtctggtggcagagcctatgtgtggcctagttaacaggttacagttcttccctgcccttcaggatgtcagcagagcccctctcaaggtcacagccagtgtactgagactgaacagaacatatggtccttccttgggagcctttgatattctgggctggagttgactgatgaggaccaaattattcaattgtgccatctatttcctgctgggacttaactaatacaatattgacagggttcaggacacactacccaaaaatatggcatcttgcatagctaatattttaagctgaaggaatttaagaaaactgcagaagcagaaaggccactc

SEQ ID NO: 831584 - DNA, 574 bp, Homo sapiens
cctatcatatttctccatgactctactcttcataaaatctakcataaaaacatacatgtttagccatttgatatgattaggctttttgtcctcacccaaaactcatcttgaattgtaatctccaggtgttgagggagagacctggtgggaggtgattggatcacggcgtggaggagggaggggcaattcccccattatgttttcatgatagtgagagttctcacgagatctgatggttttatcagtgtttggtagttcctctcttgcttggttcttctctctcctgctgcactgtgaagaggtgccttccaccatgattgtaagtttcctgagccctccccagccatgctgaactgtgagtcaattaaacctcttttctttataaattacccagtcttgggcagttctttatagcagtgtgagaatgtgctagcacaccatttatctgggtcttcattttcttataaaggttcccatgtcaaataaaatttatactatttaataaataagtttgtatgcttttctcttgttaatgtcttctattataggggcctgagccatgaacctagtgaga

SEQ ID NO: 831585 - DNA, 608 bp, Homo sapiens
attatcaacaaatagactttgtattcagacagttcttctacccatgtaccattgggttttttttaacctccctrattcagatttattgatagtgatgatacctcctcataccattgctgtggtgaagaaaagagagtatatatgaaaatattgtcatagggcctgtagcataaatgcccattaaatggtaattattgattgtattgttttaattccaactgtaaggttagcatttttttaagtacattcaaaagatatgatgagtataactattcaagataaactttgatgctgtagagataagctgttgcaggagatttgatggtatggaaaactcagaataggtaaaaatttgcacccattaactcataacttttatatgtagcactatgtaagatttttctataaaattagcctgtctaatgaattatacgagatattccagcacacctcctttccattgctgagaataagattgtgtgtgtgtgagggagagagagagagaacatggggtccataccaaagattaaaattctgttaggaaaaaagtgacaggatatacataagtgtagttttatggtcctgtgtgtattacacaattgcaccga

SEQ ID NO: 831586 - DNA, 524 bp, Homo sapiens
gacccattttcaagagaaaatctagttaacttyttcccagtgttaaaagagtttgtaaataaaatgaacggaaatagtttctgagaattttgcacgcctgatcttaaaatgatactacaaagctaaatacttttaaagagtaaattgtttcctagattacataaacacccacttctctttaagtgtatataataggaccaggaatccctctgaaaagagacagggatataaagctttccactcagtaattttcttttatacatcaatcccttcctctcttgacccttccaccgtgaagttccagaaatattaataaatgccttaacaataatgatttaataatttggtgttttttaaaaaacacataactatagagcagtggtctcaaactgtggttctctaataggaaacttgttcaaaatgcaaattctcaggcccaacaccagatttaatcagtcagaagctttggtggcggggcccagcaatctgtgtgtaaacagccttctaggtgactgtgatgtatt

SEQ ID NO: 831587 - DNA, 553 bp, Homo sapiens
atgtggccacctcctttgatgggacattacccacatccctggcacccaagatctgcttctcctggtcaggatgcaggtgacaagaatcactagtcagagggtgcttgacccaactgtagggttagacattttcaaggcctgcctctatagagagcattttagaccagatggatgaatttggaatttcacatacataatagttgatatgaacctctacctagtaagtttcattgaaataaatattccaagtaattatctttaagaacattcagataaatacataattatgacagagcaataaatgcttctacttcatcaagcgttcagattgaatacaataaatcattttcaacaattatttcaaaactcatcgcctcaggagtgagtctataagaggctgataagaggcatgtggaaaaatactgatttgagttgatattatagctaagctttctgcaattaattcccyatactaaattcttggtaattaaatgtatttttatgaaatgacctatttcattttccctatagttcagttgttttagtaaatgat

SEQ ID NO: 831588 - DNA, 501 bp, Homo sapiens
ggttagaagttaccattaccacaatagaatctttctgggtaagaaaaaataaagcagctttcatggaaaagaactatgcttttaaggttracacatgtgcaggcacatgcatgcctactttctacaaagtgtagagctgatagacacatagatagaaactggaaaattgccaacagcacttggaccataaagtattcgttgctctcataaaacagagttttgtatgaatgtgacctctaacgccaaatctaacttttgggacgcatccataaagtcagcagttagtacattcttgactgacagcctgataacttagcttctaaaaggagcattaaccactccagtatgtgaacatgcagtgactaagagcatctgcagcaaagttaagaaagcagaataaaagaacgacaatctaaacaagcaatgtgtataccattgcatctatcagcatcaggcaaatgtgatcacaaataaatccttataataccctgaagttttcct

SEQ ID NO: 831589 - DNA, 586 bp, Homo sapiens
gatctctgatggtagcctatgtagcaaagttattttagggctagatggctcctttaaagctaatacagtccaacctccatctctgaatgaagaaacagaggcccatggttggttggactgctgttagtaaatttaaaagtcagtagtagaattctggtctctctgtgactgttacttccattaccccatggtctctgtgtaaaaagcaagtcatctttcccaaccgacttggcctttttctggtatccatgccttttcattgacctccttggttcttctttccgcagtcagttctaatgtaagatatgatacacctttccatctttggaaccccactatatacccttatttctacatgttctgtactttcctgggaaggggaagtagaaaagggaagaggttaatgttctttctggaatgtccatccacaatgtggtgattctattggagaggtaaacaagactcctgtaatcagaagggacagctgatggatctggataagaaattcgaaatctcgaagcttatgaatgtgcaatasatgttatttaatgctcattgtaaattcagattttgggcttctttatac

SEQ ID NO: 831590 - DNA, 514 bp, Homo sapiens
cactgagagtaaacaagccagtgggacagcactttaacatgaggtgacttgggtgctgtctccatttcagccaatcagaaagggaaaatgaaatgaargagtgtctgtgggagattttatggggtagatctgaaagtgatatgcacaaatctaccattgaaattttttttttttttttgagacaaaatctcactctgttgcccaggctggagtgcagtggtgtgatctcggctcactgcaacctccttcccctctgggttcaagagattctcatgtctcagcctcccaagtagtttacaggcacctgccaccatgcctggctaattttttttttttttttttagtagagatgaaggtttcaccacgttggccagactggtctcgaactctggacctcaagtgatccacccaccttggcctctcaaagtgttgggatctcaggcatgagccactgcgcccggcctatcattcacattctaatgacgagaactctgagagctcaattgcaaggaaa

SEQ ID NO: 831591 - DNA, 438 bp, Homo sapiens
atattttgttgtttggtttccctgacttgaaggtaaccttcatgagggcaatgtttttttaaattttttttattttgttttgtttgattcactgccatttccctaccactcggtacagtgctggacatatactagttgctgaataagtaattgctgaattaatgacttttctttcagaagtgctctctgaacctctaaggcaaactggcattccctctcttggtgtctataaaaattattacatatataaaatgtatttgttttcatatctggctgcatgacgggactcaaagtttaacgacagggacagggccagctacttacaaagctacttacatgggcctcttctaaacgcaggttgcatgcccmtaaagtcagccctgtatatcttttcatcttcatatcccaataattagcagtgtcactggtgaatgtatt

SEQ ID NO: 831592 - DNA, 580 bp, Homo sapiens
gtgtaaaagcacaaagagagctgttaaggacccacttgaagctcatgtggccagcatccaaaaggtgcttagtttctgttcttaatccctgaacgtgtgtatctgacggtaacactgtggttacagcagtatctacatttgagatgtgataactgccattagtcctgattcctcctttcagtttgtgtgtttagaacacccctttctctaagaatgcaaagtaagaaagtaagatgtaaaaaaaaaaacaaaagaaaaccttaaagtgaaattactcaaaacacacacacacacacacacacacacacacacacacacacacacacacacacactctatatcaaataccaacatgcatttgggttaagggaaggagactaagtcaaatttagtcaaatcttcctgtttggagctaggcttggtcctgtagtcccagctacttgggaggyttacacaggagaatcacttgaacccaggagtttgaggctgtactgcactatgatcgcacctgtgaacagccactgcactccagcctgggcaacacagcaagagtctgtctctttaaaacaaacaaacaaca

SEQ ID NO: 831593 - DNA, 501 bp, Homo sapiens
tattgacagtaaggttaatattagagatgcaaaatcaaacaaataagtttttttcacaacccatttaattagcaagaggttaagtagatccattgtcttgtaaacatttaaaaatttatttactttcatcatctaaaatttaaatgtatagtttataatatttaggatattgatgattaaaagtccttgtggattttaattctcaaaatctctgtaatccttcttatagtaagaactttattggacataattagtattctgcttacaatacagaggacctgctaacctctttaagccaggtatgatagaacactgtacagttatatttgaagttatctctgagtaaagactctaaataattttcaaccaaatagatggtgaataatatgaatcagtagctcataayaaacggtcaactttcaaggcaaatatatatttcttgagtgcctgctttgtgcaaagttgcattttagattgtaaagctgtttctactaaaatgaa

SEQ ID NO: 831594 - DNA, 608 bp, Homo sapiens
taaatcagctctcataagatgggattgtacagttacatgacaaaggatgtgagtagaaaggcattagttgaagatattaatcaagtctacatcagatgacaaaggggaatgctgatgacagtggacaatggtttcccaccagacagtagtttacagatagtacaagggcaaaggaggtatttaaattcctttagcccaagaatttagatattatatccagacagaagttagagaagaccaggctgaattgaaagagttaaacttgaaaactaaaaataatatgttttcctgaaaattactaaaattttccctacaagtataatgaagttacaagatagagacaatgataatttatagtgaaaaaaataatgattttcaatactagggtaaatgatctgaaaagtctgagtagtacatcgtttccacatgtgtctgatttcattgtaaaaccaaagatttaaatttttctgttaattttaattgacctgtgtgtactttacacagtactttcacaaaaccaatggagttctgtgtaaataagttgaagawaagctggtttttaatgctctgaattattttatagttatctgattttacttttcagcatt

SEQ ID NO: 831595 - DNA, 581 bp, Homo sapiens
ggccaaggcttttctctctgtttcctcctttagtcataagtaagcagatgaaattaagtatcatctatttttagagtttccaaagtacgtcaaagccttctacagaaatgacataaaagtctccaactactatctcaagtatctataatcgaaactggttttcctgatgtcagcatctaaaacagcctctaaatcaatcagttacttttgagccagttaactaataataacaaaattaaaataataatttttaagtgcacaataggctgctacactatgggttaaatagcacttaaagggtggcctgggaactaactcctatgggtagcactgtttttatgggaaaatacactccaaattccagacaactcatttatccactaacttttggaatatgaccctttagtaagttggagactgactaaaaatacctaatattttggtgaattttttatcaatgcattaaaaatacattcttatgttttatcttaataaattgaagcaaattctagcctacttttccrtaagaattgctttcctgacctcagaagcataattgaaagagggcttgtggattttct

SEQ ID NO: 831596 - DNA, 634 bp, Homo sapiens
ctttaggcttttgttgtatgtgacttcccagcataaccttttgtgcctcattgaagttttaatttgcctaaagtaatatcaaaaagtgtattacttttattactaccttcctttttatggtgatgaagatgtttttgatgattccttgatttagtaattggaagcataatttcatgtgaaatgtaaattgctactctcacataaatatacatatatcagatttatccaggattcatatcacttcagagaagaaagagacagcacagggtaaatgaatgaggagaaatggtaatttaccaatcaattaacttgggcacatttttttcatacttatgtgagctcattttattccataaatagtttatcagtaatgcattttcttaattcatttttgcaatggaatataatataattccattgtggaaaatttggaaatcaaaaataagcacaaggaaaaaaataaaaataatctaccatgttaacatttagatatatccactataaaaattggtttattgccaactcacatatgtatgtgtattttgaaagtaattccatcagtataaggagaagaaaataraatcccaagatctttggtgtcatgtggtggcacacatcagaataggaagaagct

SEQ ID NO: 831597 - DNA, 600 bp, Homo sapiens
accagaaagccactgataggcaatttctgtttcaataccygagcaattctgattcaattgcatattttcttataaatttcctgagtaaatgagatacaattccattaaactttgttgtaattttggtacttaggacttttaaaatatgttgaaaaaaatcatcacagtgatttactatagggcatagggatactttatttctttcccaacatactctaatgaattgccaatttctctttatttatatattaatttatattgaggtagatattttatcattttcactggatgtgcaactaatgatagagatgatatatgtttgtggatatcagtaaaattttcctggtgaattctcaggttctatgacaacatttaacagtaaacatttagattagacatttaggtacattacgattcttaggttttataagatttatttatttaataaataacttgaatcttaatccaaatatgtggcacttaaaggtgtaacagtcctcatagaatttagctagtaataaaataaaacaacacaacagaagactgcaaaattgaactataatattaaaagttggaccaaggggaaggaaacaatactaa

SEQ ID NO: 831598 - DNA, 331 bp, Homo sapiens
atgtatttctaattgtgctacgtagcaagaagcctaggtagagaactttatatttataagaaaatatgtcagtggaaaagcactaaaaccatgctttataggcaatctcaatgaggattactaaatcatgacatactggaaaacttttgtgatataaaaacacctaagcttttggattgcgtatttaacacatcttacaaactaagataaaaagaatgatcagaaaacttcggaggccataagtgtcaggaaagatgtaatccayatgggtgcaagagacacgtagctggtgaaatcccagtgtacaccctggtggcctagagcttctgtt

SEQ ID NO: 831599 - DNA, 610 bp, Homo sapiens
ctgatcactggtcttaagtagccctcccttggcctccatctccctacccagtcaaacattctcacgtcacctattttattctttttcctaaactgattttcttgtgtgtgtgttgcccccaaatttgaatgttagtatcacataaccaaggactttgtattatgtaccactgaaacctaagtactcagagctgtgcttggcacatagtaggtattcaatgtttttttccttttagtagaaacctgtgttgttcaaaggtattctatttttttattgaatggataaagaatagaggcctagaccacaagttgaggaccttattccacttaaatcattttcatctgtattagtaacatatatgttgaggagatgagctccaaaggcagtttttgacagaatgagttactatgaggaataatacctcaagcaactttactgtttctagccgagctattgaccagtgcagagaagagagcagaaatgcagaaacagattgaagagatggagaagaagctaaaagaaatccaaactactcagcaagaaagaacaggtgatcaggtaatttttcttttttcatacacraaactagaatttattgaaacaaatttaa

SEQ ID NO: 831600 - DNA, 638 bp, Homo sapiens
aattgtaaaattaaatgtctttagtgtaagtacacagctattcaaccatcatcacaatcaattttagaacattttcatcaccccataaaaaactgcatatgccttaggtgtcaaccctcagtccttcttctccaagccgtaagcaaccactaatctgttttttgtctttatagatttgcctattctggaatttcttataaatgagatgatataatatgtggccttttgtatctggcctctttcacttcttgtgttttcaaggttcatccatgttgttgcatgcatcagcacttcacttcttttttattgtagtaaaatataaataacctaatgtttatcatttttaaccatttgtaagtgtacaattcagtagcattaaatacattcacaatgttttatgactgttactgctatctatactcaaaacttttttcttgtcctccccaaaaactctgtagccattttataagtctctcttcccctaccctccagccatataagttgattcatatagtatttgtttttctgtgtttggtttatttaactaagcatartgttttcaaggtccctccatgttgtagcatatgtcaacatttcattcctctttatagctgaataatagtccattgtatgtatgt

SEQ ID NO: 831601 - DNA, 503 bp, Homo sapiens
aagaaatcaacttttgactgattgcagrcttttaaaaactcaacactttcgactcttggtaggaaatctaatgaatgtctattggatcttgggggagaagaaaatttcttacacaagatacagaaagccattgactagaaaagtttgataaaattcagtataaaatcaacctataaaattaagaacttctggtcataaaacacatattaaaaaagtgaaaaataagttacaacctgggaaatgatatatgcaatacatacagtgtattaaggattagtatcatgactgaagaacttcgataagttgatgagaaaagcataaagaatccaacagcaatttggcataggacccaaacagatatttcacagaagagaaaacaaatacggctaatatacacaataaaaatcattttatacctattcaatcttcacaaaaacttaaaagaattggcaatatcaaatgttagtaacgttatggatccacaggatctctgaaacattgct

SEQ ID NO: 831602 - DNA, 601 bp, Homo sapiens
aagtatactttaatatgtgtatattttttggttttcctacagcttctccccatctttcaaaagaatcacgaaatttcttctgcaccttgrctattctgtttaaatctgataatcagttgatctcaggtttttcactgtacattactttgcagatatggacagcctttacaaaaataatttttaaatgcttaattattttaatttgttctttaaggtaaccttcagttattttgaattaatttaacttctcaattatgccaaagttgcacttgcatgaaataaatattattttgtccttgtatagactggaacagtaataaatttatctgaattaaaattgttttatgctgtgatcagtaagcccagtaagctaggtaaagttgtatggatataactatagtacacctctattttacttttggcagaatatgagcaactgaagaacttgctttataatctaacatttatttttaaatctcaagtatcatcctactggagttaaattacttgcacttttccttgaattactcttgttttctaaacgtgtaatgaaataaaaaggaaaattgactgttattcttgaaacatattttttagcatt

SEQ ID NO: 831603 - DNA, 676 bp, Homo sapiens
cactttggaagacagtttggcagtttgatacaaaacaaaatatactcttaccatgttatctagcactcatgttccttagtatttgcccaaaggagttgaaaatttatgttcacacaaaaacttgcacagrgacgtttatagcagttcattcataattgccaaaacgtggaagcaaccaagatgtcgtttagtaggtgaatagataaacaaactgcagttcattcaacccatagaatactattcagcatcaaaaagaaatgacctaacaacccatgaaaagacattgaggaaatctaaatggatattactaagtgaaagaagccaatctgaaaagactacatactgtgtgatttcaactacatggtgctctagaaaaagcaaaactgtggagacagtaaaaaaatccacttgcattgggttctaggggagggagggaggtataaataagtggagcacaggggatttttagagcagtgaaactactttgtatgatattataaaggtgaatacacataattttaaatttgtccaaagccatagaatatacagcaccaagaatgggccctaatgtaaactatggactccaggttataatgacgtgccaatgtagattcatcagctgtagcaaatgaaccactctggtggaggatgttgataatgggtgaggctgtgcttg

SEQ ID NO: 831604 - DNA, 416 bp, Homo sapiens
tagaaatggaataagaaactgaaaatgagtacccgggtattgaccatattttacagggacaaaaacaacaaagcaatattttgtaagcataaacatacatttaaagacacatattaaacatataggctaagtatrtaaatagagaaacaggagtgctgaaagttaggggaaaatgaagtaataaaataaggggattcctgcacagaccaaagttgataatgtactctaaactaagaaatacaattaaccatctgcatctgggattaaaaagaaaaagaatgtgttacttccaaacaagtggaataaaaaagaaagaaaacttaatccagtaaaaagcaggaaagtagagaaaaagccccagaagattgaaattacaaaacagtattagaaaaataaatccaaatttatcagtaatc

SEQ ID NO: 831605 - DNA, 561 bp, Homo sapiens
agcactgccaccctccccacccctggtccctgccctttcaaatatcccagcacgtctgaaggccacattttcacattaaagacctgagcccagaatggaggggaggaagagtggctcctccagtagccctgttttcagagcacctgcagggagaccttgggaggtggtggtttttctcctaaccagcaaataaatacgtaatgctatcaaaataggatcattaaattggattaggagtgagcgcagctgaatcattttccagaagtcctgttggaatgtgcttcccacggttggggttttggccactttgtgcctggcactggcacacttccttcatgagggagaccataaagctgagacatatcataggctatgggctctctccgttaatctcccttccccttctatctctagctgccaaacaggaagcccaaacgaagtgagatgagattgtggggacttttcttcctaccccagctaacttattcatctccaagaggctcagaaatgagcaagaaggtggcaggcrgtctgcagaaacagcaagtggttcccagcttg

SEQ ID NO: 831606 - DNA, 599 bp, Homo sapiens
gttattgctattatttaaaagaattctcttcttttggtgacttctccatgctaagcctcattcccaagccacttcggtgatttttctaatataacccaacaatggctaataccaaagktgagtaagctaaaagctttccatggctacactgggatggaggagcaggaaagctctttgctcatctgtcagctcttcaacctttgagggaagctgcctccaagttctaattgcctgctccaaactccacagcgtcgggggaagggggcacgtgatcaacggcagccccgccactgtgctgtgttgctatagtaaggatgccctttattgatcagactggcctggagtcatgtaactccccagcttactgctgagctccccaaggggcagttggcaggcagtggtatctctctggactaacgccgatccccagctctgccctctctcctcccctggacacacaaaggatgcctgcagaaacacctaatgtttctttgtagtgtcttgtcattcacacactaatttgaagtcacagatcaaaactggtgagagacatcaggggaaagatatttgaagactccccccttccctaaagcaatgct

SEQ ID NO: 831607 - DNA, 549 bp, Homo sapiens
tgttttgaaaaactggattagattyttttattactcttcacaaaattgaaaacagatggtatgtgctatagacttaagaaaacacagcaaaagtggaaaaaggtcagcttcagtgtaacttggaggtgagaggacctgaaacctgaccccttggccatgaagacccctattcagatctgatttgtgacgctggctcacagttgcataccctgaagtggtggggtgtgacctggaagtcggcgactagacagcagagagctgggcccctacaggcgcttcgatgtgccctcttcacctctccacgctaatcctgtgcatccttccaaagaaagttcctacaataagctctcctatccagcccacagagtcatctgcctgctctgaactccctccttgctaactggaccatcattgtgtcacatatcttgccttctctgagtgggagctccttgagggacagttgagtggcagccattcagagcatacatagtcccctttcctgactccaaaactatttcttgcttcatcgatgagcctgaggttggttta

SEQ ID NO: 831608 - DNA, 337 bp, Homo sapiens
acagccaagaatggaaacggttcctttcaaacagttgcacagtggaaggatgaccctgggactcatacagtgtttctgracgcttttatagatactgcgagatgctgttttactgaagttgagattgtgttataagtatttctgactcatttagtgttgttttggggtttttagtctctttgcgtgccacaaagatgtctagcataaatctcataccatgaactcaggtgtgcaaaaaatataaatttcttttccatctatgtaacgtaagccaaaaacctgggagttatccctgagcttccctctttcctgtattcccaccgttcctggccaccgc

SEQ ID NO: 831609 - DNA, 637 bp, Homo sapiens
catctgagtgttttataggcattgctcatttaatcttcaccatgggtcttgtgaagtgggtgctgttattatctgcatttttaaatctgtagataaagagacagagtctctattttgcagatgagggaatagaggctcagagaggtgagaagcttgcagtcctgaagcggtggaggcaggttcaaaccagggagcctggctgcagaatgtgttgccactcagctccatagtccccttgcatccagtgccccctactcctgctgtgctgaaacccgttctctattagcagtgctctgtaactccaacaacaaaggggggcagtgcttacaaggcagatcagattataaacaagctttcttcctgccacctaattgttgccatgaatgacaggactttaagggtttcatttcattctctttcagtagaagccatcaattattagtttattttcccagcaaccatttaaaaaagagtcaaattaaatctgcttttattttaactatccagctttgtcaaatataacataggattcaaagaaatttgactaagccatayatgtcaccaatgtttattttatttatgtattttttttggcatttctgttcttttgtgagtgtgagtggtgagaacacttggg

SEQ ID NO: 831610 - DNA, 605 bp, Homo sapiens
catagcgacattggtcgattgctctgattcactttctgcctttctctttcttgcatatggagaatgtgggaaagaatcccctatacacacccacaggagttagaacatccttcttatcctccataatcgtgccttcaaattaataattatggcttgctgtgtgttgggccctgagcttaacctgcattatgtcacttgatctcacaacaaccttctgagggagaaactgtcattattccccttttatggattggggaactgagactcagagaggttgagtaactcagccaagaacacacagcaaaccatatgatagagtcaggatttgagctcatgattccaaagtctgaacttgaaccttctatgactataattctaattagatataagcttccagatcatcagactctgtcgatgccataatctctttcttacatggcagagatggtcaggatacctgccacgtggtaaagacgtggatgcagaagttaacctccatttgattagcttcggtgcaccaagctgcacccaggtttctctcgaaatcctgctcctgagtggrtgagtgccccgggaagagcaggtggttggcgtttgctcagttt

SEQ ID NO: 831611 - DNA, 309 bp, Homo sapiens
gatgatttataattctgaatctgaagatcttttttccacaggaaaatgttttaatgtttatagctataattgccatgtttcttatggtgtttctaaagttttctttttctttcctatttcattctttttttttcatctccttctaaacagataactattatcttaaatcagtgttatattactttttttaaaaaaaactttctgttattattaataatcacatttggtcttattacaaaaaaaaasaaaaaacaaaaaacaaaaaaactaatgctttggaatcagacttccgggttagaatttctactg

SEQ ID NO: 831612 - DNA, 309 bp, Homo sapiens
gatgatttataattctgaatctgaagatcttttttccacaggaaaatgttttaatgtttatagctataattgccatgtttcttatggtgtttctaaagttttctttttctttcctatttcattctttttttttcatctccttctaaacagataactattatcttaaatcagtgttatattactttttttaaaaaaaactttctgttattattaataatcacatttggtcttattacaaaaaaaaacmaaaaacaaaaaacaaaaaaactaatgctttggaatcagacttccgggttagaatttctactg

SEQ ID NO: 831613 - DNA, 550 bp, Homo sapiens
ccagcccccttataagccaaaagctgtaagtagcccattctctctgactgccgggtattcacacacaaggtattcttgcctgtgcctcrtgttttccaaatgctccctgaggggtagacgtcaatgtgtctactggaacatgggtgtatgtattcacacatatgcacaaaatcactggttactaagatggacattttccattggcccagcttagtctctataaagatggaaacgacgatgcctattgaatttttgtttcatcgattcaattattgtaactgtcttagctgacaactttctgagaatggttcttgggtgagcagagttcagatccatttttggactgtgataaaggatctaattttgccctcattctttctcttggttcaactgtgtcattttttcttcatactgacattgaaaaggtcatgttgtttatctcaacagtatttaaatttaattctgaaacatacactatgtctgagtcagtaaataagatggcagttcagcagccagctcccacccaaggcaaaacagagtgaagcagaga

SEQ ID NO: 831614 - DNA, 624 bp, Homo sapiens
cacaaatgctgtttttctcaaacttaagcccctgacacccagagatagtgtcacagagaggagggctggaagagcagtaggagaagccctgccagaacccaagcattaaagttctagataaagacaccctctttagaaagaaacatgtcagacctgtgggcacagtttcccctggtaaatatgtgaatcaaaaatcaatatacagtgtgttgtgtttgaccatgcatggaaaatgaatcctgactttagggggaaacccactgaatcaaaagtttgacccttagagaatctgttgagtcattgtatggaaaaatactattaagtttgcttctttggttccaaagcattctgaaatttttgagcaacatgaatatgtaaaatatcactattttcaatattcctgtctttttttttgttttactatttcttatgtgatgatcaaatttagccattgtactaatagtaaaccatgtgccaggcactggattaacatcagtaaataaggagaaataaggatgaaaaatgtgtacggagttcaggtwtaatcctgtgtttataaaagtgtgatctatggaccatgtgcatccaaatcacctgaaaaaatattaaaatgtagattcctgg

SEQ ID NO: 831615 - DNA, 594 bp, Homo sapiens
tgctttggctctgtaacaaaatatcataaactaggtagattataaacaacataaatttatttctcatagttttggaggctgggaagtccaaaatcaaggtgctgacagactgtaggtctggtgaaggcctgctttctggttccttaatggtgccttttcactgtgtcattacctagaggaaagggcaaggcagctgtattagtcatgagcctctagaaggacagaactaataggatagatgtacatagaaggggagtttattaggagaattgactcacaaagtgaggtcccacggtaagccatcttcaagccgagtagcaagcaagccagtctgagtcccaaaacctcaaaggcagggaagctcacagtgcagccttcagtctgtggccaaaggcccaagagcccctggcataccatgggtgtaactccaagggtccaaaagctggagaacatggagtctgatgttcaagggcaggaagtatccagcatggragaaagggagaaaaatgaaggctggaatactcagcaagtcaacagctctttccaccttcttctgcctgttttttctagctgtgctggtagccaattttatga

SEQ ID NO: 831616 - DNA, 625 bp, Homo sapiens
atcgaagagactttaaaagactcatgatttagcttgtcccatcattacaattatttgacaataacgaagtaasaaaaaaaggaggtgggacatttgtaccagtctctggatcctccttttcagttttaagacagactccgtctgcaccagttataatgccacactttggagtataggctcaaggaatacttcggagcaagaatccaactgaaggggacatattccatcttctccatttgtcagggccttctctgggcatttcaaaacccttccaagccaaataaagagtgacaattttgtgcatcgataataatttatgccctcatttctaatcttgttttgaaagcttggttagaaaattgtaagcctgattcacaaaaattggtatgttttgtacactgagctaaataccctttcaagaaagctataattacagattcccatgaattaagctaatgttcaaggagaaatcccaaattatatctatctaccaatgcaaatctcctaaactgctaacagattgtcacttcatgggtgagtaactgggttatgtctctttaaattctcttgtttatcatttaagtggactatcattttgattgtatctctttcctttagttgtgaa

SEQ ID NO: 831617 - DNA, 660 bp, Homo sapiens
gttccaaggtaaaagctattggatctttggttcatgtgcatgtatacatatctagatgtgtttatgtgtgtgtatatttattttgttatatattgtgtctaccaaattggcttawaaataaaagagtgctcataaatcaaataaataaatccaagcagttttcaaattcatgttctttactaaacaagttgtctttaaaattattggtaaaataaaaatagaaatgtcttcagaattgtcagcatacatctttgtctggattttatgtttgtctttgctagatattttgagatatcaaggtttgccacagaagattgtaaaactgtaaacccagccaaagcaaaatgatctttgtgtgactcttttgataactaagtctaattaatgttgttggcttaatgaaaacagctgaatattctgagttattggtgaaaatgtccatgtagttaactttaaggttcttatttaggtgaatacctgatattgacaggttatcaaatggttaacacaaataaatgatgtgtaaataatctagataaactgataaaacaaataaaatgtaaatgagtaaatgctataggtgaactttttgtgtaatttaaaatcttaaaattatttttgatgctcattagatgcctgagtcttttccaattaagaaag

SEQ ID NO: 831618 - DNA, 635 bp, Homo sapiens
gctcagtagtgaaaatgaacaaagattactattattgggacagataaattaagagggaatcacaggaaatgacaataattatgtgagtaaaaacctactaaatgcttttaagcatggaagtaacaagataagaattagggctcgaaaagacttgcatgcagtaaaaaaaatgaattggagggtgtagagcaagagtgattgcatggagattcattagggggcttttgcagtctagttttgagatgaaggtggctagaaattagattggagtggataatgtacagagaagaagtcagattctacatggtaaaattagtaggacatagtagtaagtatgatagaggaactggggaaaaggaagtgaagcaaaagtaaatatgaagaatattctcagatttttaacttatgcaaatgaataattatgttacttaccaaactgaggaatactggaggagggcagatttagggggaagatcatgagatacgttttggacccattgcattagaggtgtttttgagaaaactgagtcaagatattraagacatggttggattaaaaggtcaaacattaggtgatgatacacattttagagtcattggcatatggttggataggaaagccatgcatgtgtgat

SEQ ID NO: 831619 - DNA, 578 bp, Homo sapiens
tgagcttcatcaaataaaaatgtatggaatacctatattatgctgaaaactgctaatacrttaagggccagagaggataccaagaggtagaagggccaggcacggtggctcaggcctgtaatcccagcactttgggaagctgaggtgggcagattgtgaggtcaggagatcaagaccatcctggctaatatggtgaaaccccacctctactaaacatacaaaaaagtagctggtactaaacatacaaaaagtagccgggcatggtggcacgcacccgtagtcccagctacttgggaggctgaggcagagcttgaacccagaaggaggaggttgcagtaagccgagatcgcaccactgaactccagcctgggtgacagagcaagactccgtctcaaataataataataataataataataataaacaaaaaatttaaaaagaggtagaaggcagagtccttttcctcataaggcttatgacttaattatagagacaagatacacaaccataaaatatgtatgaactgttacaggacagtgcatgattaaatgtcaaaagatgggccttgatgagcagtg

SEQ ID NO: 831620 - DNA, 628 bp, Homo sapiens
aatatatcatattctggaatattggctgctaagccccaacaggatgtttgtgagacctcaagtacttggagacatctcaaatatagggcatatggagggcggcaagtgggaacaggggagatgagaaatgaagctagaaataaagccaagaactagatcttgaggagctttctagaccatgcaatggaaatctaattttatcctacagacattttaatgaaggattttaagcaggacagtactgtggtaaaatctacattttggaataatcacacaagtggtttgctggagaataaaattgagctgggaataaaattaagatgggaagtagggaagcctgctagaaggttcttaaagccacctaggcacagaatgggattaagacccttcatcaaaccacacatgcaactcaaaattcaagcaaagctaaccatataagactaacaaaaacaaaattcggatttttcttaggatgattacctagatgcattgagaaatatatatatkgaatataaaagtattttaagacttttatttccgcctctcttggatgcgcctggtctgctggtgccttaaagcatgtgcatctctacctactgtgggatcccaggatggaaatgtaaaagga

SEQ ID NO: 831621 - DNA, 530 bp, Homo sapiens
attaggttttaaagaatattttattatacaaacttttcccatagttttctcccctacttaatgattccttactacatcgttccataaataacctttccacatctgtaatttgaactaactttttgtttttkgttttttgtttttgagacggagtctggatctgttgcccaggctggagagcggtggcgcgatttcggctcactgcaagctccgcctgccgggttcacgccattctcctgcctcagcctcccgactagcagggactacaggcgcccaccaccaggcctggctacttttttaaaattttttttgtagagacggggtttcaccgtgttagccaggatggtctccatctcctgatctcgcgatccgcccgcctcggcctcccaaagtgctgggattacaggcatgagccaccccgcccggcctgaactaatttttggataacttctgaattagacaaaattattctttttctcactaataacataaccctttctggcacattttgtaaacagaattatatgtta

SEQ ID NO: 831622 - DNA, 502 bp, Homo sapiens
caattgaaactttatgcccactgattagtaactgcccatttcctcctccctcccagcccctagcaacccgtattccactctttcaatctatttgagatagctcatatgagtggaagtgactattttagattcctcatataaatagaaatatgcagtttatgtctgtgactggcttacttcacttagcataatgtcctcaaggttcatccatgtggttgcatatgcagaatatccttgttcttaagagctgaatagtattccattggatacatatactacattttctttatccattaatctgttgacgaatatttatttcctctcgtggctactgtaaatagtgctgcaatgaagcataggagtgctaaaacttcaagatcctgatttcagttcttttggataaatgttcagcaagkgggattgctgaattgtatggtattttaattttttaaggaacattcatactgttttccataatggctgcacctattcctgccaacat

SEQ ID NO: 831623 - DNA, 598 bp, Homo sapiens
attttttaacatctgtaagacctctagataaaaacatatctttatatctatgtttatatctatacctagatataccagtcwgtgtctatgtctatatacctacatctatatctataaccaataaataatcaaaattcagattgggccaagacttttcttctcagaaacatttgcaagaaaatctagggcaatatttacatagtttgagggtggggaggatataaccaaacattgtctcaggccaaattgattatcatgtataaaggcaataaaaattcacgcttatatttggaaggactcataaagtacatcacccatttatttatcattcttcagcaacttgaagaaacacatccaatgatatagcaataaaaggaaattaagcttatgagcaaagaaataatgtttttgaagtaagggcatagtacacgaaagctaattttaaaaaatgaattattttaatgtggatgcacagctcaatcaaaattgcaaaagtattaatgaagaagacagcaattgctccataagtaacatatccaaactatacaagtatatatttgtacaaacatcactaaaagaatgtacatttggctgggcg

SEQ ID NO: 831624 - DNA, 639 bp, Homo sapiens
actatttttatttaagatgcatatatgcctttttcctcaccttttatgaaaattaaagtggatcatagacttaaatgtaactcatagcactataaaactttgaggaaaaaaatgggagaaaatctttgggttctatgactaggcaacaagttcttagacttgacaccaaaagcatgatccataaaaggaaaacttgacaaattggacttcattaaaattaaaaatttttgctctgcaaaagacaaaactttataagttggacttcctcaaaattaaaactttttgctttgaaaaagatgaaaggatgtatagaataggagaagatatttcaaactgcctatcccacaaaagactaatatctagaatatatgaagtattctcaaaattcaacaataaaaaataagccagttcaaaaataggcaaaagatatgaaaagacatttcactgaagaggatatttagatgacaaatacacaagtaaaaaaattcacccttgttagtcattagaraatttcaaattgaaatcacaatgatatatcattacacacctataagaatggttaaaatttttaaaaaaatgaaaacaccaaatactggcaaggatctggagaaaaccactattcattactgctgagaaagg

SEQ ID NO: 831625 - DNA, 639 bp, Homo sapiens
actatttttatttaagatgcatatatgcctttttcctcaccttttatgaaaattaaagtggatcatagacttaaatgtaactcatagcactataaaactttgaggaaaaaaatgggagaaaatctttgggttctatgactaggcaacaagttcttagacttgacaccaaaagcatgatccataaaaggaaaacttgacaaattggacttcattaaaattaaaaatttttgctctgcaaaagacaaaactttataagttggacttcctcaaaattaaaactttttgctttgaaaaagatgaaaggatgtatagaataggagaagatatttcaaactgcctatcccacaaaagactaatatctagaatatatgaagtattctcaaaattcaacaataaaaaataagccagttcaaaaataggcaaaagatatgaaaagacatttcactgaagaggatatttagatgacaaatacacaagtaaaaaaattcacccttgttagtcattagaaaatttcaaattgaaatcacaatgatatatcattacacacctataagaatggttaaaattttwaaaaaaatgaaaacaccaaatactggcaaggatctggagaaaaccactattcattactgctgagaaagg

SEQ ID NO: 831626 - DNA, 636 bp, Homo sapiens
ttttaaaaatttgtttcaaaaagtattttcttatctgcagtgttctcatatcagaaattctggcaccaaaccagacaagccattcatagcacttaccaaagttgacaacttatattctgagtaagtgtgttttgtcagataatgggtatgaaaagaatactgatgaaagaaaagcaagaacacagggatatacttatttatatatgacatagcgtaattatagaaatattgtcaaaagtggcctaaacaaacttttcttacttcaagttatttaaataaataactccacttgtagacttaatctgttactaagggccactttgtcatattaatcaagagttaagaattaaaaatataatatgggcatttatttataagccaaaaatgtgacttgctcatttcttaatgatagtgtagtaatatttataaatcacacatcatctatttgactgaaatgaaaaaaatgtctttcaaattagtggtcaaatttggccaataatttttaaactaggraagagttcccctccagaaaatggttaggaaatgagctaaatcatacacaagaaaaagacacataccttcctcaaaaaaaaaaaaaaaatctaactgacttaaggcaatccagactagcagaag

SEQ ID NO: 831627 - DNA, 526 bp, Homo sapiens
tcccccagcagtgccggcccaccggcggtgcgctccatttctcgcccggccttaactgcctgcccacggggcagggctcaggacctgcagcccgccatgcctgagccccccctccccctgcgtgggctcctgtgcggcctgagcctccccgaggagcaccgccccctgctccatggcacccagtcccatcgaccacccaagggctgaggagtgcgggcacacggcgcaggactggcaggcagctccacctgcagccccagtgcaggatccactgggtgaagccagctgggctcctgagtctagtagaaccttacagaacctttatgtctagctcagggattgtaaatacaccaattggcactctgtatgtagctcaaggtttgtaaacacaccaatcagcaccctgtgtctagctcaaggtttgtgagtgcaccaatggracactctgttatctagctactctagtagggccttggagaacctttatgtctagctcagggattgtaaatacaccagtcggcagtct

SEQ ID NO: 831628 - DNA, 492 bp, Homo sapiens
aagcaaatccattgcttctcctcaggagaatcctcatgattccgttttctttctctccacatgagcatttgaacccagacctgtctgacagtagagcctgagttagccatgacattatactgcatcacctgtattacactaaaaccaagaatagcccaactataaacaagtccagcacaccatgcaactgctgataagaccagggtagttaaaacttcattaactactattaattcaaaagcagctgtacgattgggttttagagggaagatgaaatgtaaatgaactaattttggaaagtccttttttatttaaataaattggtcataactacatatatttgaaataacacttaaatggaacttcaacaaatggaacgtaaggaaattttaaaaattactytcccactgagcagatgaatcatttttaatgagcctctaggcttcgcttgcttcctctgatgttggcaatatatacttctcctcaactagt

SEQ ID NO: 831629 - DNA, 557 bp, Homo sapiens
ctcagcactgctgaaggtactgggatacagtgccacatgagtcagaggaggttcctgcttccaaggaggctgagcctcagcttttggggtacatggtgtaacagacctgggatgaagggattggatatggcaaagaggaatgttccaggaaacaaacatcaaaattgttttaaggggaatgttggctgtagaacctatacctcttaaaatgtcagagatgccatagaacaaatattagtttttctatcatgcttctacctatagtttttcactacagcattgaaatatgcagagctcctatttaagtcaaaagctattgtataatcttttctgaatgaaggcagtaattactccttataatatggtttattataagaaactgataaaatgttagatctcaaaacaatatgcacaataaaatcctgatacaacatagttmatctatactttgggggtttctttcaattatcattataaaaaggtttcactctaacaagaagagcagattaatttgtaaaagaattagatatgctggtttagttcaataaagaaaaaca

SEQ ID NO: 831630 - DNA, 625 bp, Homo sapiens
ataaccacatcaagttaaatgacrtatttgtctctgcatgtatttatcctttgtgttacaaacaattcaattatactcctttagttattttaaaatgtgcaattaagtttattattaactatggtcaccccgttgtgctagcaaatgctaagtcttattcattccttctattttattgtgccattaaccatgcttactggtccccacctcctccaacacacacacctccattattcttcccagccttggtaaatatccctatactctctatctccatgaattcaattattttaatgtttagcttccacaaataatatctaaagggcatatagtatgtaagtgtgagaacatgtgaagtttttcttctgatgcttggcttatttcacttaacataatgacctctagttctatctatattgttgcacatgacaggatctcatttttttatgagcgaatagtagaattccattgtgtatatgtatcacagtttctttatccatttgtctgttgatgaacactagggttgctccaaatcttggctactgtgaaaagtgctgaaataaacatgggggtgcacatacgtcttctatattatgattttctttatcttacctagcagtgggat

SEQ ID NO: 831631 - DNA, 625 bp, Homo sapiens
ataaccacatcaagttaaatgacatatttgtctctgcatgtatttatcctttgtgttacaaacaattcaattatactcytttagttattttaaaatgtgcaattaagtttattattaactatggtcaccccgttgtgctagcaaatgctaagtcttattcattccttctattttattgtgccattaaccatgcttactggtccccacctcctccaacacacacacctccattattcttcccagccttggtaaatatccctatactctctatctccatgaattcaattattttaatgtttagcttccacaaataatatctaaagggcatatagtatgtaagtgtgagaacatgtgaagtttttcttctgatgcttggcttatttcacttaacataatgacctctagttctatctatattgttgcacatgacaggatctcatttttttatgagcgaatagtagaattccattgtgtatatgtatcacagtttctttatccatttgtctgttgatgaacactagggttgctccaaatcttggctactgtgaaaagtgctgaaataaacatgggggtgcacatacgtcttctatattatgattttctttatcttacctagcagtgggat

SEQ ID NO: 831632 - DNA, 583 bp, Homo sapiens
cacaaatagacaaatgggattatatcaaacttaaagcattctgcacagcaaaggaagcagccaacagaatgaagagacaatctgcagaataggagaagatatttgtaaattattattcctctgacaatggatttctgttcagaatatactaggaactcaaacaactcaacatcaaaaaaaattgattacaaaatgggcaaagaatataaatagacatttctcatagaaagacatacaaatgaccaataaacagatgaagaaaaaattcaacatcactaatcatcagggaaatgcaaatcaaaatcaaaatgagattctacctctcatcccagttagaatgattattaagaacatgaaaactagcaaatgctggcaaggatgtggagtaaaggtggttgttatacattgttagtggacatagaaattaatacattcattatagaaacagtatggagttytctcaaactaaaaatagaactgccgaaagactcaggttcccactattttgtatttattcaaaagaaaagaaatcagtatatcaaatatatgcctgtaccctccatatttattgcggcactattca

SEQ ID NO: 831633 - DNA, 616 bp, Homo sapiens
gctaggatcatgatgaggacagcattgaattgacagattgctttggagagaattgacatttcaactatgatgggtcttttgatgtacgaacacaatacagcaatcttctattttagatctgccttaattttactcagcaacatttcctctttttttgtttgccttttgagtatacactaattatgcttatttttagacagacttatccttaagtatatacatattatatataaagtatatatatataaagtacatatatatatatatatatagagagagagagagagagagagagagagagagagagagagtcttgttctattgtctaggctgacctcaaattcctgggctcaagcaatcctcccacgtcaacctccaaagtagctgagactacaaacgtgcagagcaccatccaagctaaatagaacataattttactagtatttctaattatgtattttatttccatttttgaatgttctttgcaataaattttagttttatyttgatcttgtgccctataaacatgataaacaacattatatttattggcatttttgtatatttgaccaaagtttctatttagtttatataaatactctgaattaagttggta

SEQ ID NO: 831634 - DNA, 621 bp, Homo sapiens
ttagaatatcaaaggagaaaaaataactaaaaatcatcaagtagtagaacagcctgaaggagaaaaawctatacagtggaaaaatcaccaaaggataagcatttggtcaaaagaatattacagtcacttaaagaatattttaacattttgattattccaatacccgggccagatctgggacctgcctccatcttttttgcagttcagatagcataaagtgtgagtcaatgcctgataacataataatggtaccatctggtcaggttctacctgactcttgggcacattcttgaaattataatacttcaatttccagttataagttaccatgtgtcatttggttacacaacacaccatactctttttttatggacccacacgtgcattgtcactcatcattcactgaagatgtttacatattttacaattttatttatgttaattattttttccaactcaaatgttattcaatcatcaaataatcttcatccatttcttgttttttcttcccctcttatacctcttgtgaatcttattcactttaaaatcccctaaatcacagctcctagattggtaaaggcatccattgctgggaaggtggtgcaccccacctccatgaga

SEQ ID NO: 831635 - DNA, 624 bp, Homo sapiens
atttggagttttgtttgcgaacgaattggtcttgtaaaacttattgacttactttcagcctattttctcattttattgatctattaaaatattgtcagtgccataacaagcttacttaaataacttctcattagaatcaaagatttcctacccttcttatataatagtaaaaaaaattaggtgcaaagacttactgaatatagacattgttatcctaggcattaaaataaaaattgtaaaaattaaaaatacaagcacagaaattttcattattgccttcctgttatttggtagactaaactatttatataaaacatatgttctcctagtcagaatatgaatgatactgacattataataaagacaatataatagaatttatttatactgaagtaagccatttggtttattttgtttatttagttgttttgtgtacctctcatatagattcagtagttattcttggacaatattattttccttctaggataccttmtacatgttacttttttcttctagggcacatatagagaaatttaaaaaaacccattttttttctgaaatagaaaaaatattatatagtactctgaattaaaattaccaaatataatttaactctattta

SEQ ID NO: 831636 - DNA, 612 bp, Homo sapiens
ggccaggccgaggtccctgtgctgtgtgcagccaagagacttggtgccctgcattccggctgctccagtcgtggctgaaaggggccaacataaagcttaggctatggctttaatacagaagttattaagaaattattttcggacagctagaaagggtaagagttctcggtggaattttcccctaataaaaagcagcctcaaaccattacttctctaacagaaagcagccggaagagtaaggcatagaaatgcaaactagatgcttatatatgtaaatgctggcagctgtacctgtaaaccaggtatattcaatatggtagttcttgctctctttactttgtcaccacgtgtactggtatcatggcagccgccaggtaaaaccacgtgtgcaggcatcatggtgactgccagaaagaggccacatttgcataataaaagaccaagatgggagggccagtcatttcatgggctatgtaaatggcacacctggtcaaaccaacccctggaccctatgtaaatcawccaccacctcaagcctctgtacaaaattgattgcctcccactgcaaactggaaaccctctcgggcaaccggctttctcagcatgaggacg

SEQ ID NO: 831637 - DNA, 327 bp, Homo sapiens
aggtttttaatttcattacattttcttctctctctctctatgtctcactcactctctctctctctctctstgtgtgtgtgtgtgtgtgtgtgtgtgtgtgtgtataggtagaccttgaagatattgtggattcagttccagaccacagcaataaaagtgaatattgcaataaagtcacacaatatttttgttttcccagtacaaataaaagtcatgtttacactgtagactattaggtgtgcaataggatcaactcttaaaaacgtatatactgtaattaaaaaatatttgctaaattgctaaataaattgctaaaaatactaatga

SEQ ID NO: 831638 - DNA, 614 bp, Homo sapiens
gtgagaatacaagaggcgttagacatgtactctgctctaggaagagtttctagtatagaatatagattttttaataagcacacacataatttatagtacaatgtagaaaataacaagggtcataaamaagattcaagtaagatcagaagagggacaaattaaataggaaaggccagaaggaaagcagggaatatttcctacaggaagtggcagttttcagccttaaagagtatgaaagatttgggcatgggagtgaaggaaataatcactgttactgccaactcactttctttaaggtaactgttccaaattaattttctgcccctgcacatgagaaataaaacacattcccttagtaataatgactcattaaaactgattctcaaagggagaaaggtgataagtgggatgccatctcagaatgtgatgactgtcacttaggaaaaagctctccagatgctatgacctccctactacatcctccatatgagaaattgctatcaaggggatacaccttactaactgaccaatttctagcgggtttctacagatttctgcagtcttcattcatacaatgctagtctagatatttttttaaatgatcttttttcctc

SEQ ID NO: 831639 - DNA, 666 bp, Homo sapiens
tacaagggatgtgaaggaccttttcaagttgaactacataaccactgctcaacgaaataaaagaggacacaaacaaatggaagaacattccatgcccatggataggaagaatcaataycatgaaaatggccatactgcccaaggtaatttatagattcaatggcatccccattaagctaccaatgactttctttacagagttggaaaaaactactttaaagttcatatggaaccaaaaaagggcccgcatttccaagacaatcctaagccaaaagaacaaagctggaggcatcacgctacctgacttcaaactatactacaaggctacagtaaccaaaacagcatggtactggtgccaaaacagagatatagaccagtggaacagaacagagccctcagaaataataccacacatctacaaccatctgatctttgacaaacctgacaaaaacaagaaatggggaaaagattctctatttaataaatggtgcttcccagtaacttctatacactaattcttgttattttgtgtgagatttcacaaaataaaaggggtttatttttcatttgtcaaacattcaaatatttgaagacaggtattatggaagttgtcatctcaattttgccttcccaggatccatttccctttctttctattgtaagtca

SEQ ID NO: 831640 - DNA, 580 bp, Homo sapiens
tctagctcttgaggctatagtggtgaacaaaacagttgaaaaaagtccctacctttaagaaacttatttgttagcagggatagaaattatgggcaaggtaaataacatattagatactgaccaagagttagaagaaaaataaagctgggaagcactgggaaaaggtttgtagtttacataatatgatcagggaacgccaactggagaaggtgacttttgcacaaagacttgatgtgagaaataaggtacatggatagttcatggagggttattcctggcagagggaatagcaagtaacaaagctctgaggcaggagcagtactggtatgtttgaggaacagtgaagatgaggccaggggtgctggaactgaacgtataaacaaaagtaggagctgaggtaatgacaggggctgggaacagattaggtagagccttataggccatgkttaaatctcccttttcaactcaagagaaaaattatcgagggccaacaagaagttcaatttctactttgcaaaatattactgatgccaggcatgttttctgagtaccaaaacatacttcttcccattagcactgt

SEQ ID NO: 831641 - DNA, 647 bp, Homo sapiens
ccaggacatgtcacttatcatgcttatttaatcctcacaacaaccccacaaggtaagtaatgttataatccacatattacagatgaagaaattaaaacttaaagaagaaaagggaacttaattaaactaaagagcttctgcacagcaaaggaaataatcaatagagtaaacagacaacctacaggatgggagaaagtagggttcatttgaaaaagggctcatatccagaatctacaaggaactcaaacaactcaacaagaataaaacaaataaccccatcaaaaagtgggcaaaggacatgaacagacatttttcaaaagaagacacagaagcagccaataaacatgaaaaaatgctccatatcactaataatcagagaaatgcaaattaaaaccacaatgagatgccatcacacaccatcagaatggctattattaaaaagtcaaaaaccaacagatgttggcaaggatgcagagaaaagggaacacttatacattgttggtgggaatataaattagtataacctctatggaaaacaatatggagatttctcaaagaactaaaaatagaactaccctttgatccagcaatcccactactgaatakcttctaaaaggaaaataagttattataaaaaacttaatcat

SEQ ID NO: 831642 - DNA, 246 bp, Homo sapiens
gggaaataggctccacctttgaagacagaagtatcaagaaatttgtggtcctattttaaaatgaccacaattagtatttacatggaatatattttttcatttctttacttctagactgttccttatattttaggtttggcccatattaagaagaatacacgtatattgtatgccagtctgtcaatttttatcttttaattgtagcatttagcccattttcacytaatgtacttattgatgtacttg

SEQ ID NO: 831643 - DNA, 524 bp, Homo sapiens
ttgctctgttgtgcccattctctttaggttaacatgtctgtgagatccatcaatgctgttgtgtgttcagcagccttttccttgttattgaataatgaatgtaccacagtgggtgtgttartccattctcacactgctagtagacatacctgagactgggtaatttataaagaaagaggtctaattgactcacagttcagcatgactggggaggcctcagaaaacttacaatcacgacagaagaggaagcaaacatgtccttcttcatatggcagcaacaaggagaagcgcagagcagagggggtggggaaacctcttataaaaccataagatctcctgagaactcactcactatcatcagaacagcgtggaggtaactgcccccatgattcaattacctcccacctggtccctcccacgacatgtggggatgatgggaaatacaattcaagatgagatctgggtgaggacatagtcaaatcatatcagtagggttattctttctctaatgattccacaattgg

SEQ ID NO: 831644 - DNA, 650 bp, Homo sapiens
gccaattcacagtctgcattttaacagctgctttgggggttgggggatccatgccagagtctgaaaagcccagccctggtaaatcaaggaaaagstctgtccaggagccccacgccaagtctccctgtaataagtagctgctgatgaatgaatgcacattttacaggttagtaagaagaagaggaggcttcattttgtatcatttggagagtgatgagtttcagacagtgagtcctgaaaatgccatggaattcaaggctgactgcagattgtacactggacacagcctcaagacatctagggtaagaaaacctgcaaactgcatagccaggcagcaagagtgactgcagatgtggggatactcatcacataaataaacaagtcaggggtgtggatctttatctgggtggaggcattgggcagggtggtaaagttggttttagatattctgagtttgagaaactcatggcacttccaagttgcaatgctgattgttccatgattcatgagatagcatgtgaccttggcaaatttcttaactcctcaggaattctcatcctcatctgtgcaatgtgaacattcacatcagaaggtatctacaactattaagtgagacaaagtacaggcatttttcaagcctggcacaaaac

SEQ ID NO: 831645 - DNA, 599 bp, Homo sapiens
attgagctggcttatttttaatgctctctgatgtgatgggggtgcggtattttggatgcattgagatgcatgttaatgsgcagtgaggttaagaatgcagacgcatgaaatggggtgtcctggggcttgcattcagagcccgacgtgccacaggtgatcctcgagcaggtgaagatgtgatcagaagcagagtccatcccgaagattccttgggtcaatatgcgtgttggcggggtcctatcagagaaacagaaatacatgatgatcagctgggggaggctgccgaaagccctgacttgcaaaggtgtgtcactccttagttcaccggcatcgtctcagaggcacagcacgtggcttggccgcctgtcacattccggcagattcccaggacaagggtgagtcctaactgagagagccgaacttgcactgctggtcccgcctcacgctggaagcggtgagagatttcacttgggttccacgttaacaaggttaagcttgcagtgccgctgattacttcagaatcccgaacgggcagaaatcaataatttccctggaagggtcttggccattgctcccttcttgacagtgccatcgacagt

SEQ ID NO: 831646 - DNA, 611 bp, Homo sapiens
tttttctagtctagggtcttgcagactttgagaattgcatttcctgttggaacccgggagtgcagaaaccaccttcctcccttcactcctcagcactcccgttcacaggctgtttacatttttggccatgcactggccaaggccacctgtggtctctccaagatacagttgaccaatgttggcccttacaaaataagaggacagattgtcttctatgtgtgtcctgagaatcagaaatatatctatgatgctagatcacacacactatgttttgttggttttgctttttttttttgagggttcatatatcacatcgatgtatgcaaatattttgtatttctgacaattcgcagctctgtgttggtacacatgaaaacatcctcccacttgaagcccactgctcagctgcagatgcctgcttagaacctggtgccccagtgataacacagagcacccagtgagagcccattctcccagyagaagctcctgtaaattttaattttaccttaaaaatgctgaactcttatttaatcttctttgtttaactttcccttggacaggcagagcccatgttgtggtaaagtagagccttgtgaggcttctattgggga

SEQ ID NO: 831647 - DNA, 572 bp, Homo sapiens
cccatttgtcccctatagtaatacattctccctgtttttttggtcatagtctgttcattttgcttgcaccccatgaaacttgagcatggactttkttgtgcactttctaagctctggagacccctggaagcacaggagaagggaaggcctggtcctgctgctgagtgaagccgggatgggcgtcgcttgcattgtctgagcttgactcttggctccttcacaccagatcacttggggaaaaatcacttactctttcttaatctcagtttctcatccacaaagtagggttaataatgttactttttaaaaaaggctttaaggattaaatgacatagtatgtgcaatgtccttagcaggatgcctggttactgtcatttctctttcctttcctgcagtctaagggagaagaaagccaccgaacaagcaactgcaatattgtaccataagaacaagggcagcgggcttatcactgctaccgagaaagcctgtgtcatggtgcgtctgttccatatttcagcgatcccagaaatcttcatgaaagaaggggcagccatcttgggaaccaaaagatg

SEQ ID NO: 831648 - DNA, 572 bp, Homo sapiens
cccatttgtcccctatagtaatacattctccctgtttttttggtcatagtctgttcattttgcttgcaccccatgaaacttgagcatggactttgttgtgcactttctaagctctggagacccctggaagcacaggagaagggaaggcctggtcctgctgctgagtgaagccgggatgggcgtcgcttgcattgtctgagcttgactcttggctccttcacaccagatcacttggggaaaaatcacttactctttcttaatctcagtttctcatccacaaagtagggttaataatgttactttttaaaaaaggctttaaggattaaatgacatagtatgtgcaatgtccttagcaggatgcctggttactgtcatttctctttcctttcctgcagtctaagggagaagaaagccaccgaacaagcaactgcaatattrtaccataagaacaagggcagcgggcttatcactgctaccgagaaagcctgtgtcatggtgcgtctgttccatatttcagcgatcccagaaatcttcatgaaagaaggggcagccatcttgggaaccaaaagatg

SEQ ID NO: 831649 - DNA, 730 bp, Homo sapiens
tctgcacccccagaggacggcggatccttccstcttaagacaattcaggtggtcctggcgctcacgcccaggcggaaaggtcagtgagagcagtgacctgcagcagcagcagccaggctcctccgcctggattttcttttctactttggagagtccgctcccatgcagcccctgcagaaggtgcctggggaagcgcagggaatgggcgtgggctgctttgaaaaggaaaggccaatattgtgtgtgtgtgaatgtgtgtgtgtgtatgtgtgtgtttcacaaccaaatcctcagattttgaaaagccacacattttagcaaatgaccttgtttggaaatacaaactaaatagtctaaaaatatttagtgaccttcactgtgtggagggaaaattggaaagtgggatgtcatccgtagcatggagaggattttataaatgttttaactgtaaaagttcctctcaaataacttctttccccaatagtgcctgatctttcctcagttcctgatgaagtaggattcaagttaatgttctccagtatcttcctctctcccgcctaattcacactggctttaccctcggagctatatgaataaacaattaaataaaaactgatgatttaaacattttttattatgtcttctttcttttgattacatagaaacagactcaataatcattgctcatcttttccagccaaattaataaaaccatcaacaaattaagaga

SEQ ID NO: 831650 - DNA, 626 bp, Homo sapiens
attaattaaggcagagtggggaggccaggcagacatcacagtagtgggatggatggatgaacaccrtgagaccctcgatccactgcactgaggacacagctccatttccatgctattcttgccagaaattcataatgccattctaataatgaaaaaatactagacaagctcacattgaggaacatgctacaaataattgaccagctacgttaagaacacaaaagaaaagagggttagtttgctgggactgtcaaaactaagtaccacagactggatggcttacacagaagaaatttattttctcacagttctggaggctggaagtccaagatctgggtactggcagggctggtttctggtgaagcctctcaacatggcttgcagacagctgccttcttgctgtgtcatcatctggcctttgttctgtgcctgtacattcctggcttctctttatgtgttcaaattccctctttttgtaagaataccagtcttatcagattaagacccattccaacaacctcagctggacctgtaacctcagctggtacttctgtaaagatcctattccaaataagatcacattctgaagtacttggggttagacttcaacagaggagttttgtggg

SEQ ID NO: 831651 - DNA, 525 bp, Homo sapiens
ctggtcctgcagctccttgttggggatccactttcctctctgagcaggctcrgcaccccaggacaagttagaggggggaggggtgtgtgtgtgtgaacatgcaggtgtgtacacatgtgtgtgactgtgtgtgttcccttcaaagcagagaaacctctgcaccagcctagatcaagatgagagtgctggctttgaacagaatggaggggcttcttctggagccccaaagggctcagaggatgtgggaattcaaggttttcaagtgcgttgacccaaatatcccctcctgagtcttggcgcctgatttcgtcgaccaggccctgttgtggagtgttcagccttttctgaaactctgattctgctacgtcctgaacctacacctgaacctccatttttctgcctgctgagcataggggaggagagtcccttcgtatgagctggagcccctctggccttcacacttggctgccaactgtgcagcctgtccctgtctttctcccaagcgttgaagcccctggggaatct

SEQ ID NO: 831652 - DNA, 580 bp, Homo sapiens
atatacatatatgagtatataaatattayatatacatatatgtacaaatacacatacatttcatacatattatatatcaatgaagacatgtaatgtactatgcatataaaatattgacaaatattacaataattatataattggtcatttaactcaaataactaaaaaactgacaaattattcccaactctttgtgttgctgttgtcttacatataaaacggagattatttatcttaatgtgttttgtcagtgctttaaacacttataaaagtgaagtgcttagatcagtgcctggtatcttaaaacgcttaataaaaactcggtatcattttgtcatcattattatgttttacacgtttgttttctggcctcggtacaaggctaggctaacgtaataaaatggcatgaacttcattttgtatgattttaaaaaatatctactctatcttacaatctatttcataatacaagtattatgtgaacatgattttttttccttacaaccatttaggttgtttgtacattttatgagtctttaactaaaatgctttttatacatgctctctctcttttatattt

SEQ ID NO: 831653 - DNA, 555 bp, Homo sapiens
aagagaatcatttaaaatagaaacaatattcatagaaacaccagatctgtacatttttgcttacgagatttggcaaaacctcaagtaagagatgmgaatgatactgtagttggacatgcattttaggtttaaaattattcctacagtatatatcacactacacaatgctttccagattttatagttgctgaaaaactagttattgtcattttgaaagtcttatgtcttttatttgtttgtgttaaagctttcctcttggtgtcttctgtttttgaggtgtagactttttaaaaattgtttttctaagtgtttatgtgctttcaaattggagatttatgtattcctttaattctagcattttttaaatgtagactctcttaaaaaaatcttctttctcatttaaaaatatttactacttctactttttgtcttttttattatagtcttcaatctctcaatctttatttcctatactctatttatttctttttctgggctaccttgtgagtaattttcttccctgtctttcagtttagtaattcttacttatctata

SEQ ID NO: 831654 - DNA, 646 bp, Homo sapiens
cgcaggcctttccgtaaccagcctggcccaggagggccctcccatgggatcctgccgtctctgggratgccctttcttttggaagtggtgtttctcaaatctgccagtctgtggcttctggtatcttctgcaccttttcattctgccttccccaggactgtgccctgtcccttcttagtctggctcatggcagctcctcctcaggacagggccctctccttcaggggatgaacacttgccgattaatttggaatcatgctgttccccatgcaagggtgctgggcaggaagcgagggggccaccatccagcttacactgtgctctcccagccactgtacctgccagaggaagcggctccttgggatgaccccatgagggtgcagtttgctcataagcccaacaccaaagagaggattcttccccaatccacccaggggctgaataggtgatcagcagcctgtctaggactctgtcatgttttctcttctctgccacttctatcacactaccatcacgtctggagctggctttgctgattccaggttctcagggtcacagtttaagtaatttgaggtttgtagcattgtttgtttttgttgctattctcatatggtttctaggaacataagtggaagaatttcaaact

SEQ ID NO: 831655 - DNA, 728 bp, Homo sapiens
acagcaggacagggcccccaggtgggatggactaagagggcaccaaaggcaccagcacagcccaagcagcggagtctaagaccaggcctgagtgtacccgtctccatgggccagctacagagcagagagtccgaagcctggaggagattcaagatggacctaaaggaccaagccctcagaaggtcaggatgcagagcccaggtgccagcaaaggccccactgcctcctgctgagacgccaggccctcggcctgcatgcagcctggaaggggagaaggtcccaggggcaaggtgggaggggttttggtgagcaacattaggaagggcttgggtgagcgacatccatggcatgccagctgtgtgagggcaacacagtggaaaagggaagggaagagggagcccagcacggaagatcacaggagccagggatcagaaaggaagcccaggatgccctgctccacagaaacaccgagtaaggacacatcgagaaagcacagggtggatggcgacaaggagtggaacaagagcgaagaagcaactgcactagggtggtgagctggggatcaaggtaggcagagcccatgtactaagagagctaaggtctctrggaggctgggccaagcaagacagacactcccacccacaggaagatgggaccggtaacaaagtatccaagactcaagagaaaaccccccgccacgctaaggccgacctcagtctatatccgga

SEQ ID NO: 831656 - DNA, 646 bp, Homo sapiens
tccagtggctaaagagacaggctacggagtgagactacctggactccaatgcctgctttacacctaccagctgtgtgaccccaggccagctgtgccgagaacagcctctcccaggagggtggcaggagacactgtataaagggtgagggctcagtcaggccagtggtgattactactgtggctaggactgtacaccactcacctgatggcagcagaggaaaagctgaggtccccacctattaagggaggctctgtgaacagcaagtcatcttccccaaccacaggccttgttattttattctaaaaccaatcctaaaacgcgctttttactcaacgagtctgcaagcttcagttcattccatgctttcatctccctgaatagttcccatagattcctaccctttagagtgtggtctcggtgctctatccttccacctgtcacactcgtccttcagcatgaacatcagtctcttgtgagtcagaaccacaaactctagatagattcaccttttgctttcttccatgaggtaactcataatgacactttagaattcctttgcatttcacaggacatgcaaggtatccttttctatatttttggccatcatttcatcgttgtccwtccattttttaataatgttttaca

SEQ ID NO: 831657 - DNA, 543 bp, Homo sapiens
tctgatcccagggtgcttgggttcttgggtgcaggggcggcagcgtctcactggggccctagtcatgtagagcatggagtggcgtctggcatggtggcagcccctggaggcaggtgccttccccagcctcctggcaggcctccctagggccttccgaagcctgtgcctactcctatcacctttgccctctgctctgtggttacagtgacgccccgctgcatttaccctgttccctggccctctattttgtctccctgggctggtgctgtaacccaggtcctcatcatctgtgttggttcttgctgggcttcttcactcttccccactggtctttctctaccctcgtttgtaaatcctgctttgctagacacagcaaaagtctcccggagtcaagggcattagctctgaactgtgtcggagtcgctggggggctttgcagactgtgcctgacctcakgctctttctctccacccacgcagctttgttcagtattccctgaacccaggctgctttgctcatggattttccttccccactatcagc

SEQ ID NO: 831658 - DNA, 622 bp, Homo sapiens
cagggacatgaatgaagctggaagccatcatactcagcaaactaacacaggaacagaaaaccaaacactgcatgttctcactcataagtgggagttgaacgctgagaacacatggacacaaggagaacaacacacaccagggcctgtcagaagggtggctggtgagggaagggagagcatcaggacaaatagctgatgcatatggggcttaaaacataggtgacgggttgataggtgcagcaaaccatcatggcagatgtatacctatgtgacagacctgcacattgtgcacatgtatcccagaacttaaagtaaaaaaaaaattaaattaaaaaataaaagaacaaagctggaggcattatactacttgacttcaaaatactggcataaaaagaaacatacagatcaatggaacataatagaaagccaagaaatctatgcatttatggtatatctttgacaaagtttgcaaggacacacaatgggaaaaacacactttcttccataaatggtgctattaaaactggatatccacatccaaaagaatgaaaytgaacctatacctcacaccatatacagaaatcagctcaaaatggattaaagccttaaatctagggcctga

SEQ ID NO: 831659 - DNA, 431 bp, Homo sapiens
cccagcccatggtgggagcggtggttgttcaggagtgaggcagactagctctgggttctagtcctgggtgggtgacccagaatcagttcttgctctgggcagggggtggggaggccactccccacacacatggaggagcacagtggggttgggccagtgctcactgtcctggtaagggagcagttcctctcagactttggtgagtggcagcacagctgcaggtgggcctgggtgacagcgactgtgtgagcctgaacagagggtcagtgctgtctaaggtgggaggaagaaagtcttaatgaggaccctgacaaagcrgcatgcaacatgggcactgaaaccaactctaacagggatactggatttccaagtgattttatcgatggttgaaggctcaacatcgtggctagcttatcgtagagaccagacct

SEQ ID NO: 831660 - DNA, 526 bp, Homo sapiens
attttgagcctatgtgtgtctttgcacgtgagatgggtctcctgaacacagcacaccgatggatctcaactcrttatccaatttaccagtctgtgtcttttaattgaggcatttagcctatttccacttaaggttaatattgttacgtgtaaatttgatcctgtcattatgatgctagccagttgttttgcctgttagttgatgcagtttattcatagtgttgatggtcttaagggcttgaactcagctctggaccaaggggacctaagagacctctgcagaaccctccaccccaaatcaccagaatatacattcttctcaggaccacataacacttattctaaaatttaccacataattggaagtaaaacactcttcagcaaatgcaaaataacggaaataataagaaacagtctctcagaccacagtgcaatcaaattagaactcaggattaagaaacacactcaaaaccacacaactacttggaaactgaacaatgtgctcctgaatgactactgggtaaata

SEQ ID NO: 831661 - DNA, 442 bp, Homo sapiens
gaaacactgtatgtgtagtatacatgaaaggacatttctgaacccattgaggcctatactgcaaaaccgaatatcccrtgataaaaaatggaaacaaactatctgtgaaaatgctgtgtgatgtatggattcacctcacagagttaaacctgtgtttcatttaccagcttgaaagggcttattttgtagcatgtatgaagggacatttctgagcccattgaagcctacagtgaaaaaccgaatatcctgcaatgaaatgtagaaacaagctatcaatgaaaatgctctgtgctttgtggattcatctcacagactggaaactgttttgattcaccaggttggaaacactcttttggtcaaactacgaagggataattctgagcttattgaggccaataatgaaaaactgtatatcacgtgcaaagaactagaaacaagctat

SEQ ID NO: 831662 - DNA, 492 bp, Homo sapiens
tgtcagctttgtcaaagatcagatggtcatagatgtacagccttatttctgggctctctattctgttccattggtttatgtgcctgtttttgtaccastaccacactgttttttttctatggccttgtagtatagtttgaagtcaggtaacatgattcctctatctttgttctttttgcgttggattgttttgggtattggggacatattttggttccatatgaattttaaaacagttttttttctagttccatgaagaatgttgttggtagtttgacaggaatagcactaatttgtaaattgcttcagacagtatagctattataatgatattgattctccctatccatgagcacattttttttcccattccataggttgtgtgtttacttcgttagtttttttttgttgttgttgttgtttttttgttttttttggttgtgcagaagctcttaagtttcattagatcccacttgtcattttggctttagt

SEQ ID NO: 831663 - DNA, 492 bp, Homo sapiens
tgtcagctttgtcaaagatcagatggtcatagatgtacagccttatttctgggctctctattctgttccattggtttatgtgcctgtttttgtaccagtaccacactgytttttttctatggccttgtagtatagtttgaagtcaggtaacatgattcctctatctttgttctttttgcgttggattgttttgggtattggggacatattttggttccatatgaattttaaaacagttttttttctagttccatgaagaatgttgttggtagtttgacaggaatagcactaatttgtaaattgcttcagacagtatagctattataatgatattgattctccctatccatgagcacattttttttcccattccataggttgtgtgtttacttcgttagtttttttttgttgttgttgttgtttttttgttttttttggttgtgcagaagctcttaagtttcattagatcccacttgtcattttggctttagt

SEQ ID NO: 831664 - DNA, 527 bp, Homo sapiens
gctactaataatataataacaataatgagataaccacaccacaaaatgaagaactaaagaagctacaggccgggcamggtggctcacgtctgtaatcccagcactttgggaggccgaggcaggcggatcacaaggtcaggagatcgagaccatcctggctaacatggtgaaaccctgtctctactaaaaatacaaaaaaattagccaggcatggtggcatgtgcctgtagtcccagctactcaggaggctgaggcaggagaatagcttcaacccgggaggcagaggttgcagtgagctgagattgtgccactgcactccagcctaggagacagagaaaactccgtctcaaaaaacaaaaacaaaaacaaacaaacaaaaagctgcagaagctgacagaaatacagttagacaatataaggaaataattccaaagatgacagaactgaggaaaaagatgaaagtgtaaaataaaaacatcagtaatgaaggctacatttaaagcagtgtaggagaatagacactgttg

SEQ ID NO: 831665 - DNA, 624 bp, Homo sapiens
taaatatattttatacttttcagtgactgtcaaatgtggaggtaaattctgaaaatataagccatcaataatgtaattaaatgttgagattatttgatgttaaartattgtgtattttaactaatattacaacttgaacatttccatatgctaaattatacaaattatgcatattatttaagtttattttcaaatactaataccaacattagttaacatttacactactaaattgagtttaagatttctttgcagtttattttttttcctgtagaatatattctaaatactgatgtgtatgctaaatattgtgctttaaaaccatttgaaatgatttttttaagttgagatatgtcaccaacttgaaaaaaattaggtttatttgttttggcttgtttttaaattccagtttttgccttttttaaattaattttacccttcaaatgtgtattttgaaaatatgtcttcaaatcagtttagaaaatcacactttcatgtctgtcatttccatgtgttttctattactgtcacctttttttttctttcttgtatgtgttttcctgttacaaaaataagcaagggggcttatgtatgcatttgtatgtacatgtatatataaatact

SEQ ID NO: 831666 - DNA, 608 bp, Homo sapiens
aagttgccaagaacatacgatggaaaaaggactgtcttttcaataaatgtgctgggtaaactagataagtatatgcaaaagaatgaaactagatccctttctctcagcatacacaaaaatcaaataaaaattaaagactcaaatctaaaacctggaattatgaagttcctagaagaaaacactggggaaacatgtcaagacattagtctaggcaaagatttcctaagacagacgtcaaaagcacaggcaaccaaagcaaaaatggacaaatgggattatatcagctaaaaaccttctgtacagcaatagaaacaatcaacaaagtgaagagacagcctatagaatggcagaagatatttgcaaactctccatgtgacaagagattaataactagaaataatatataaggacctcaaacaactcaatagaaaagcaaagtgattccattttaaaccggacaaggctagacacagtgrctcactcctgcaatctcagcactttgagaggctgaggctggaagagcacttgaggccaggagttcaagactagctctggcaacatagtgaggccctgtctctacgaaataattataaataagttagccaggc

SEQ ID NO: 831667 - DNA, 485 bp, Homo sapiens
tataatgaaaaactactgccaaatgatgtgtgtctcttaggacatttcagattacacctgcatatcaggatactcagagatgacacatagccatgggaatcaggaggaartaaggcactttctccagatccaaccaaaagtatctgcatcactaactgtgggtcagcttacccttgggagtccccactaggctggtcaaacagtgcctagaaatacccattagaagccagactgggaagtcatgtgagaaggtgggaaaaggcaggaaagagtcttccttgtcttgcataatttaacgttctgctgcctgttcaaaaaatgtttttgtaaatcttcaaaccaaaccatgcagtttactgaagagccagccctgtgcttaggagagccctggatgggaggcacaaggatggggtctctctcccgcctcagcctctagggctcagtgagcctgggagagtcacacctttcccagaacttgttttctc

SEQ ID NO: 831668 - DNA, 485 bp, Homo sapiens
tataatgaaaaactactgccaaatgatgtgtgtctcttaggacatttcagattacacctgcatatcaggatactcagagatgacacatagccatgggaatcaggaggaaayaaggcactttctccagatccaaccaaaagtatctgcatcactaactgtgggtcagcttacccttgggagtccccactaggctggtcaaacagtgcctagaaatacccattagaagccagactgggaagtcatgtgagaaggtgggaaaaggcaggaaagagtcttccttgtcttgcataatttaacgttctgctgcctgttcaaaaaatgtttttgtaaatcttcaaaccaaaccatgcagtttactgaagagccagccctgtgcttaggagagccctggatgggaggcacaaggatggggtctctctcccgcctcagcctctagggctcagtgagcctgggagagtcacacctttcccagaacttgttttctc

SEQ ID NO: 831669 - DNA, 645 bp, Homo sapiens
tcaattattgaggctaaataagaatccatctttccagtgcttaaaaaagcaacccctcaaaagctgtagcagaaatgtaaggagtgaaattcattgacataatgacaccaaggccctggatgcattgtctaaggaagaaattattttctgcagaagcttcaaaccagatggttataaatgagacttagtgcatgggcattacttaatgactaaatttctttaactaaaaatctaattttattatagtataaatcacactttcttgaagcagggaattaattttagatttttcattcactgctcataacctttctacgagtttgacagccaaatcatttaaaatgtcatttaaccaatacaatacaacagctttattcctcattgtgcccttcctgaatccgttatctctcactataatgtagaagaacttaaataaaaaattaccattctataaagctgtattttactatgcagttaaactacacaatccttatttttgaatcaatataatatgagtgctgagcaatatttttcataatccaaaagccgattacagwttctcagctaccaaaaaacagtttgaaggctgctgaaagagtataaatgagcactctcaaattctacccctaggtccatcccatgtcc

SEQ ID NO: 831670 - DNA, 640 bp, Homo sapiens
cactttgcacaactgataaacatttaaataagccttttcaaaaaagaatagcacgtaaaattattaacccattgatggagttagctaccgctcagtaattcatctttcctcaaaacaggtcaatcgcaaaatgcatttgacttggcgacattgaggcattctcattcctgcaaccgtggttaccaggcattatccagaaccgtgtgtccatttgagtacacgcacgccacacgaattttttaaatgtataattaaaagtgtcccgcactatctatgctaagtacatacaatttgagagccaggaaaaggcctagagattgtatgccatggggccttgtaataaatgataacataattcaaaaccagtgatcattccaaaggaatgaaagttaaaaaagccattcaactaaccacggtcatgcaatatctattatttataccacatcggaaagggtattcgcagagcagttggaaagatacacaaataagtgtttatgttattagtagaagggaataacaatttgtttccagcatcaatttatcagggatatgaggtaatacctctgcctctccacatcmtatctgtcttccagagagctaccctctgaattttctccagttgaacaggacctcatgtacc

SEQ ID NO: 831671 - DNA, 572 bp, Homo sapiens
catgacagaggcgctggcccagagcgggcacagccagggtgcagcatcctgccctgccatcttcaccgtagcctctgggytcctcatggccagatgccaccttgttgatgagacctctgtctgctccctccagccccgaccttggcagaattggctgcgatcttggttttgctgggtaataacaataacgatggcaatgtgagactgctgtgcctggcacttctgaagtcccctcatatagttgtcatgtaattctccttcaaggtgctgttccactcacacttacaaccctgcagtccctcggtgaggtcacagagaaagccaccaggggcttccaaaagacggaaggacttttcgtttttgctttatccattcttgtgtcatgtcaggcatatgataggaacttaatgagtattcattacattagcatggcgatcaaatgaatgctatatgtggagagagtaggggtttcagtaagagcagattccagaatttctacacaggcatggcttagttcatgtgacccacacctcagtcaagaaaaggagcatttccatcacccagaaatgtct

SEQ ID NO: 831672 - DNA, 572 bp, Homo sapiens
catgacagaggcgctggcccagagcgggcacagccagggtgcagcatcctgccctgccatcttcaccgtagcctctgggctcctcatggccagatgccaccttgttgatgagacctctgtctgctccctccagccccgaccttggcagaattggctgcgatcttggttttgctgggtaataacaataacgatggcaatgtgagactgctgtgcctggcacttctgaagtcccctcatatagttgtcatgtaattctccttcaaggtgctgttccactcacacttacaaccctgcagtccctcggtgaggtcacagagaaagccaccaggggcttccaaaagacggaaggacttttcgtttttgctttatccattcttgtgtcatgtcaggcatatgataggaacttaatgagtattcattacattagcatggcgatcaaatgaatgctatatgtggagagagtaggggtttcagtaagagcagattccagaatttctacacaggcatggcttagttcatgtgacycacacctcagtcaagaaaaggagcatttccatcacccagaaatgtct

SEQ ID NO: 831673 - DNA, 518 bp, Homo sapiens
tgttgtgcccattctctttaggttaacatgtctgtgagatccatcaatgctgttgtgtgttcagcagccttttccttgttattgaataatgaatgtaccacagtgggtgtgttartccattctcacactgctagtagacatacctgagactgggtaatttataaagaaagaggtctaattgactcacagttcagcatgactggggaggcctcagaaaacttacaatcacgacagaagaggaagcaaacatgtccttcttcatatggcagcaacaaggagaagcgcagagcagagggggtggggaaacctcttataaaaccataagatctcctgagaactcactcactatcatcagaacagcgtggaggtaactgcccccatgattcaattacctcccacctggtccctcccacgacatgtggggatgatgggaaatacaattcaagatgagatctgggtgaggacatagtcaaatcatatcagtagggttattctttctctaatgattccacaattgg

SEQ ID NO: 831674 - DNA, 668 bp, Homo sapiens
ccaattcacagtctgcattttaacagctgctttgggggttgggggatccatgccagagtctgaaaagcccagcccctggtaaatcaaggaaaagstctgtccaggagccccacgccaagtctccctgtaataagtagctgctgatgaatgaatgcacattttacaggttagtaagaagaagaggaggcttcattttgtatcatttggagagtgatgagtttcagacagtgagtcctgaaaatgccatggaattcaaggctgactgcagattgtacactggacacagcctcaagacatctagggtaagaaaacctgcaaactgcatagccaggcagcaagagtgactgcagatgtggggatactcatcacataaataaacaagtcaggggtgtggatctttatctgggtggaggcattgggcagggtggtaaagttggttttagatattctgagtttgagaaactcatggcacttccaagttgcaatgctgattgttccatgattcatgagatagcatgtgaccttggcaaatttcttaactcctcaggaattctcatcctcatctgtgcaatgtgaacattcacatcagaaggtatctacaactattaagtgagacaaagtacaggcatttttcaagcctggcacaaaacaagaacttgacaaatatt

SEQ ID NO: 831675 - DNA, 527 bp, Homo sapiens
aatgtcccagtggagaggcgggggttgcactgttctgcagaggatgatcaggtgtacctgttaccacacagaggagacgggtgctcctactgtcatatagtggaagtgggtgagcytgttatcaggcagaggtgtgcctgcgcccattgttctatagacaaagagcaggtgctgtgtttcctacagaagctcacctatcagaggagtggggtctaactccccatgagcgaggcagggctgcagcagatgtcctgtaactgagggtgtgtgcctagagtcctctgaggaggcatgggcgtccccaaaaccatgcagaagtgttgttccatagaagtgtgtctgcctgatatgggggacagtttcgccccctgccatgtggtggaggggaggccaaactgaggaggctgggtcccttccccgcagagtcccaagtcagacttgccacagcctctgaaactctcaataacctgtccgagaaaggacaccaaagaaatgaagccactcagagaagtggctcgaggtgcccc

SEQ ID NO: 831676 - DNA, 564 bp, Homo sapiens
aagagaatcatttaaaatagaaacaatattcatagaaacaccagatctgtacatttttgcttacgagatttggcaaaacctcaagtaagagatgmgaatgatactgtagttggacatgcattttaggtttaaaattattcctacagtatatatcacactacacaatgctttccagattttatagttgctgaaaaactagttattgtcattttgaaagtcttatgtcttttatttgtttgtgttaaagctttcctcttggtgtcttctgtttttgaggtgtagactttttaaaaattgtttttctaagtgtttatgtgctttcaaattggagatttatgtattcctttaattctagcattttttaaatgtagactctcttaaaaaaatcttctttctcatttaaaaatatttactacttctactttttgtcttttttattatagtcttcaatctctcaatctttatttcctatactctatttatttctttttctgggctaccttgtgagtaattttcttccctgtctttcagtttagtaattcttacttatctatatctaattgc

SEQ ID NO: 831677 - DNA, 712 bp, Homo sapiens
tctgcacccccagaggacggcggatccttccstcttaagacaattcaggtggtcctggcgctcacgcccaggcagaaaggtcagtgagagcagtgacctgcagcagcagcagccaggctcctccgcctggattttcttttctactttggagaggccgctcccatgcagcccctgcagaaggtgcctggggaagcgcagggaatgggcgtgggctgctttgaaaaggaaaggccaatattgtgtgtgtgtgaatgtgtgtgtgtgtatgtgtgtgtttcacaaccaaatcctcagattttgaaaagccacacattttagcaaatgaccttgtttggaaatacaaactaaatagtctaaaaatatttagtgaccttcactgtgtggagggaaaattggaaagtgggatgtcatccgtagcatggagaggattttataaatgttttaactgtaaaagttcctctcaaataacttctttccccaatagtgcctgatctttgctcagttcctgatgaagtaggattcaagttaatgttctccagtatcttcctctctcccgcctaattcacactggctttaccctcggagctatatgaataaacaattaaataaaaactgatgatttaaacattttttattatgtcttctttcttttgattacatagaaacagactcaataatcattgctcatcttttccagccaaattaataaaac

SEQ ID NO: 831678 - DNA, 374 bp, Homo sapiens
agatatgttggttttataagaggaaatcccttttgcttgattctcttttctctcttgtgtgcctttcaccttccgccatgattgtgaggcctccccagccacgtggaactgtgagtccattaaacctctttttctttataaattacccactctcggatatgtctttataagcagtgtgaaaacagactaatacagagacccagcgggtggagacctccagctcctcatccctcaagatacaggaagtgagctgttcargccgcctgttccccgacgaggtgcgtggttttggagattaatgttagcggtctttgtgggaggcactaggagggctccctttaagaagcccagagtgcggaaacactgattgtgac

SEQ ID NO: 831679 - DNA, 535 bp, Homo sapiens
gtccggtggcttcccttcccttcccttggttgggtctagcgccacagtggagaaagggctctggaagagcagcgagcccggggcctgaggatgtaaagcactggggaggcagaacatgacgtttgggagcagccgggtcccatccggctttggaacaaagggcgtcagccctggggacagggagctggtggcagaagggatgccggcgtgaggtagcttggcttgtttcaaggcgtccagagacagaccttggcttccagctttctggctgagcaaaaccacagctgcagaaagctgctgggacatgtggctgcccaaggtcttcagggtgtcggccccgccccgctggagtgcaggcgcgagaggctaatgtgttcaccgggatgcggatctgcttggtgagctgggtctgctgtagctgcttctgctgctacagacrcagtatcggctcgaggatgctgttggcgccaggcacaggggcaggcagggcatctgcgctccgccgattcacagccaccttggtgccccatagtgc

SEQ ID NO: 831680 - DNA, 605 bp, Homo sapiens
gaacccagaaattaatcacatatttacagccaagtgacttttctaaaggtgctaagaacacttattggggagtggacagtctcttcaatagataatgctatagataatgctagaaaaactgaatrtccatatgcagaagaatgaaactagacccacacctctcactctgtataaaaatcaaatcaaagtcaaacaaagacataagtgtaagacctgaaactttaaaaccactagaagggccgggagcagtggctcacgcctgtaatcccagcactttaggaggccgaggtgggtggatcatttgaggtcaggagtttgagaccagcctgaccaacacggtgaaacctcatctctactaaaactgcaaaaattagcagggcgtggtggtgcatgcctgtaatcccagctacttgggaggctgaggcaggagaatcgcttgaactcaggaggcagaggtttcagtgatccaagatcataccaatgcactccagcctgggcaacaaaagtgaaactccgtattaaaaaaataaaaaaataaaaactactagaaggaaacataggggaaacactttaggacattggtgtgaaaaaagatttaaagtcta

SEQ ID NO: 831681 - DNA, 591 bp, Homo sapiens
atttgctgatgaatgaaaataattcccgtaggcatattcggaatcatcagaggccaccctgtatgaatgaagcatgctctattttgtttgtaagccggattggaagagctgcagggctgaggcctctggatacatcctggctgttcacaaatgaggtgtttgtgtgtgtgtttgtttgttgtctttaaagagggatatttcttcattttgaaaacactattttagcaaagctgagcaacaccaacgtagcaagtaatatattaattaaccctctccattcatttgacaaatatttcctgaacatttatgaggtgtctggcattgcactgggtttagggatagggatatataacagagacatttcctcccagaacacacatcctaacaggagaagacggacaataatgataaacataacaaataagttagaacatgacaaatcctatgaagaattcaatagcacttgaagataaacaagaatgctggcttggggtgagggtgtggttctaagtgcagttttraacggtgtggttagagtcacctcacagagagagcagcacttgggcactactgaaagagcctggggatggc

SEQ ID NO: 831682 - DNA, 594 bp, Homo sapiens
ttgtcttgaaaatcttctataattgatacttttttcatcattagactaatattttcttatgaaaccaagtttttcttatagaaaattgtttcatgagccccagttaaaatragcataagatgatccctttaggatactgagataatatgatacaaattattactagtgagaggttattttaaaatataggcattgttcagcaagcgaaactttcttcagccccttggcccctgtcatatttttacaagaagtctccaaagcaggccttgccttgctgtctcctgctgagaatagaaggcttcctcctaccaggttgcttcccctagtgcccctgtgtattgcgccctgtgacgattcccttgtgtacacacacacacacacacacacacacacacactactctacctttgtggtttggatattatctcacaggcatagcctgatctaccctcacttgatcactgattcaggagcagagaaagaagggatggaaacatttctgggtatgggatgtggaaagaattactatagcagtaaaactaacttgttcttagagactgataaatgactctgaaggtaattcagaaaaaaaaa

SEQ ID NO: 831683 - DNA, 632 bp, Homo sapiens
attaacatgcatttgtttttagcagaagatcacattagatttagacgacgctagagactgaaaagtgaagacagaagamtgaggacgattatgaagaggagtcatgaagaaataagagaataaaggtaactcctttgtggataaaccacacaataaaacacaaaatgttattaaatagtacagaatttaactaacatccaggacggtacaatattgctaaggtaaacttttaattttaaaagacatttttcgttattcataattctctatagtgcctatattttgattcttgttcatggaagaaaatgttgccaagcagctgttctttaatttgaagtcatagctctagggctcaatagattcgttgtaagatctaactattaaacacacttgcacctgcgaaagctagaaaattccagtcaaacttttccggtttatacgtgaagaagccagaatttataccaagtccaaaatatacctggaatatactttacagctaatacataggggcaaaatatttaaaatatcttatctcttgaataagaaaaatatttgttaacaattttctttatgtatttttcttaaaaacaaagtaaattttcatgaagaataccatttatgtatgaaatttt

SEQ ID NO: 831684 - DNA, 604 bp, Homo sapiens
cccactttcaggctcagagatgtctgctcccattgcctgacttcttccagctcctggcaccaatcttgaagggaggttggtcctgaatccaggtgttttcacagccyggccgggtgtacacatgtttggggtagcgctgacacgcaagctccccgctatgtcgcccccgccggactttgggtgctgatgagcatgtgagggaagctgaggggaggtgaagggcagctcagtgctgtactgcaggtgccgcttcacgtaaacagcctgggctccatgaacagcggcaagagacagacaggctcctaggtggaaggggacgtgtccctaataaagctccaccttcaagctgggaggacttgaatcccagggcaggctgcgggtcctgcggactagaatggggacttgtggggttttttcagggcccaccatggccacccatggaccaatcggcatgcacttcctcccctctgaggtccataaaagccctgaactgagccatacttgaggacatgacaggatggcaagctgtggagatgaaccacccactccagggtctcttctttgctcagagttgaacattctttgggtcaccctgacagcaaag

SEQ ID NO: 831685 - DNA, 538 bp, Homo sapiens
acttaaagctataaactccccttttagtactgcttttgctatatcccataggttttggtatgttatgtttccattatcatttttttcaagacattttttaatttacttcttaatctcttcattgacccactgrtcactcaggagaatattatttcatttttttttttccctgagacagagtcttgctctgtcacccaagctggagtgcagtggcacgatctgggctcactgcaacctctgcctcctgggctcaagtgattctcctgcctcagactcccaagcagctgggattacaggtgcatgccaccatgcccggctaattttttgtatttttgatagagatggggtttcaccatgttggccaggctggtcccgaattcctgacctcaagtgatctacccgcctcggcctcccaaagtgctgagattataggcatgagccaccatgccaggccaatattgtttaatttttatgtgtttatatagtttctcaaattcttcctgctcttgatttctaattttattccattgtggtcagg

SEQ ID NO: 831686 - DNA, 429 bp, Homo sapiens
atgctgagttagagtgcctgcaatgttgggatgtcattctacccaatgtggcaactgccataaatcagcaactgatataaattatctgtttcayaatcagaatgcatagggctgggaaccaagagttgaaggtgatatagtcagttatgtaattacccctaaatatgtagcttgtaaaatattttaacttcacaattttagaggtatttggttttgtgatctttgagcccaaaatcaaatgctttcactaaagaatgtagtcagaattttatttaattacaggtctgtgactgtcctctgatcaaggtgggtttctcttgttgttgaacaaatgaagagaaagagaatatgttctagccaactagattgttcccaatcaccaggagaaaactggtttctagttcactatgaaaagtaagaggcaaatgt

SEQ ID NO: 831687 - DNA, 682 bp, Homo sapiens
tttcatccttccaattgaattagattttwaaaaaacattttgctaagcctttctatgcaaacagcattttgctctttgcttggagtaggagaaatcaagaaaagtgagaaaagatacctggcataaaaggacctcttttgtggttaagcatggtgacattatgaccgtgatcttgaagaatctgagaaacccggtccatcagtagataatggcttccacctaggaacaatgcacaacttcagttctggaatgatgagaatacagtgtctgaagtcagtagtgatcaatccaggagaggaaaggtaaggaaacagaagtggatagtgattggaggaagatgagttttgccagtctcctcatgtccctctgggtaaaacccagcccactcacccagagcatggccgcccatatttttacctgtggctctggtccgtgagaggttgcctcttgtgaatcacggtatccatgtcagtgtaatgagctactatgtgcttagccatgggagttcctcatcctgaggtacatgtatattttaactaaggccttatggagacacagagtccaaaagaaatcacggcattggtggaaatacaggtatggtgttgtacatatgagtgtgaatagttcctaaaaaacaatgagagctgtttctgggatcctgctctttggacatttctgctgc

SEQ ID NO: 831688 - DNA, 611 bp, Homo sapiens
atcaagagaaaaaccctggcaactctttagttatttttaaaacattgtgcaggccaaaaagaaaacctgtgtaggcttcagacagcccatttgcaatctcgagtcaatgggtctaaaagccttgtaagcagcaaagctctaatttttttttaaatcaaaaatacagaaaatcccgataaattactatgaatctgctttgggttagataacagaagttaaccctgttggccactgcttttcatcagcaagaggacccaggacaccttcacatcacctgcaaacaacagccttacccaacttaaagccagtactcacagtactttaactaaacgttgtgggggaaaaaaaagccagtgaggctcatttgcattgcacacaggaggccagacacctgtcttctcctttacaattaccattctttacatacagttgccaggaggaatctaattgcacctccagtcactctttccattatttttatttatgtcaataacgatcctttgygctgaatactcaagttaaaattttagaaccatttacccaattggaagaaaacgtttggtttgctgagctcgtttacattttaagttttattgttcttgtgttttgta

SEQ ID NO: 831689 - DNA, 683 bp, Homo sapiens
cagagaaaagtcacggatcagcttcctgaggaactggcaagaatggccaagttggagcttgtaggaaaatctggtaatccaggcgtgtccaattgccaaastgtgatagtgaaatgggctggagaagctttttcttgtgtgtgaatgatatctctaggatcaataaccaagcatctagatgagaagagagtgaggataaactgcaatatgctggtatgtctgtatctacccatcacggcatttgacttcagagaggctgggccactgcttcacttctgccagagtgtggagccaagggccacagagaatactggattaggaaaccacccgagagggcaaatcagatcctatttaatatgtgaagtatgtgcccagcgggatttcagaactgctgtaagacagtgattaccctctgcctcctattctttcgtgagagtgtctgcagaaattatcctggcctgcatgactattgtatgttgtgtgcgacatctgataacttgtgtttttagtttaggggtctctggaccaagaacataactgaacagtcttgtctgcctatagacaagacacagaccacgatattctggacttcaagcctaattctataatgagataagattttggaaggtcctcatatgggaatgaggatattttgtggatgagaggaatatgaattttgatca

SEQ ID NO: 831690 - DNA, 632 bp, Homo sapiens
tttttgatgtaggtgtttaaggctataaattttcctcttagcaccgcctttgccgtatcccagaggttttgataggttgtgtcattactgccattcaattcaaataatttgtaaatttccatcttgatttcgtttttgatacactgctcactcattcaggagcagattatttaatttccatgtatttgcatagttttgaaagttccttttggagttgatttccagttttattccactgtggtctgagagaatgattgatataatttcaattttcttaaatttattgaggcatttttttatggcctgttgtatggtctatttggagaaagttccatgtgctattgaatagaatgtgtattttgcagttgctggatgaaatgttctgttctgtatatatctgttaagtccatttgttgcaaggtatagtttaaattcattgtttctctgttgactttcatgccctcccacgagttctgggcaggaggcttctcatcccgttcaaactgttacaaagttcagatggagatttccttctccctgtgggagtgttctcacccccgcccccctccsctcctctggccaccctccttatggatccctgtggtgccaggaatggcctgcttggggaccca

SEQ ID NO: 831691 - DNA, 618 bp, Homo sapiens
ttcttttcaggggagatggagatttaaggaataaagaagctttagtcttaggaggctgctcttttctgttaattctgcttacctgtagaatccttttatttagaaaagaattccatattattacaggaaaggggcccaatccagaccctaagagagtgttcttggatctcatgcaagaaagaattcagggcaagttcatagagtaaagtgaaagcaagtttgttgagaaagtaaagaaataaaagaatgggtactccatagaaagagtagccctgagggctgctggttgcccacttttatggttgtttcttgattttatgctaaacaagggtgcacgcctcccctttttagaccatatagggtaacttcctgatgtcaccatggcatttgtaaactgtcgtgatgctggtgggtgggtagcagtgaggacaaacagaggtcactcttgtggccatcatggttttggtgggttttagctggcttctttatggcaacctattttatcagcaaggtctttatgacctgtatttgtagygacgttctatttcaccctgtgaccccttcgaatgccttaaccatctgggaatgcagcccagtaggtctcaactttattttacc

SEQ ID NO: 831692 - DNA, 573 bp, Homo sapiens
agaacagaaaatttttatgtkatttaaagaaactcaggctatgaaagaagatggaaagtatgtcagtttgctttatggagcaagcataactttttaactttaaaactaacaaggatagttcaaataattaaaaagatagaaatatattagatatatcattaatagtctgttgtcataatcaaatatattagtaagtttagcaagatctattatatcatatccccacattttgaaaatatattttctaaattcagtggaataagaaaaataaatcagctatatgtgataaataatgtttactaaaaatggtagcaaatacatcccaaagagaaaaatattcagacaacttcaaaatcaaatcatgaacttcacggcgatatttgtcatcaccattattaccttttctctcttgaatgttttagcatatgcaatatgacaagaaaattaagtgctattataaatattgaagaatgagaggtataacataactttcattgaaaagtagtttaaaatacaagagaataaaaaacagaattattgaacaggttttataatgtgaaaaatgaaaggaaa

SEQ ID NO: 831693 - DNA, 638 bp, Homo sapiens; identical to SEQ ID NO: 830671

SEQ ID NO: 831694 - DNA, 545 bp, Homo sapiens
ctccacatgtttgccagcacaccttgttgtctgcgttttttgtgttttttttaaaaaccatcctagtggtggtrcagtgggacctaattgtggttttgatttgtatttccgtaaagactgatgatgttgagcattttttcatgtgcctattggccatttgtacgtcttctttagagaaatgtctattcagatcctttgcacatttttttgtaaattgcgttatttgcctttttatcgttgagttgtaaaagctctttatatattttgtacactagacccatatcagatagatgatttgcaagtattttctcccatcccgtgggttgctttttcactttcttgatagcatccttggcttttaattttgatgaagtccagtttgtctatttttttttctgttgcttgtgctttaagtgtcatatctaagaaaccactgggcaatctgaggtcctgaagatatacacataggttttcttctaagagttttacttttagattttacatttaggcctttgatctattttgagtaacttttgtgtaaaacg

SEQ ID NO: 831695 - DNA, 504 bp, Homo sapiens
tgaatcttcatgtcttcatgttgatactcatttgttcaataagatttccagaatatttgaggggttatctgaagtttcaktttattgccgctgccacacagaccctaaatttaacttcgcctgtgtacagttgtccgtgttgtacatttcttccctgagtgtaggtacctgctaacgtagtacagctcacctttcttctggtgctgttccctggcagccctggtgttaggggccgcaaggctgctgctgagaggtgggggagagcccagccgtgtctgataagggacatctttcctttgctggagaaacatctcctccatgccagataccagcaggagagggctcaggtcagccagcagaggaagcattggggaaaagtaagagttcggaaacttgagagtaggatctgttggttagatgggaccggcagtttatcgagagatccgatcacttttgctgggatggactgccatttacccttacacagaggtgctgggtgctggc

SEQ ID NO: 831696 - DNA, 630 bp, Homo sapiens
gcataaataaaatgagtcttacacatttgaaaattgttttggaacttgtgaattaatgaataccacaaatgtttatgatgcgactgatccatgccaagtggcaggacacacactggtgcttctaggactgttaacaacagcctgggtttcctgaggctgcaagaccagcaagaagggggtatacttatcaatgagttcagaaaatattacattaaaaaaagcaaaaccagcctgtggtaaactcatcatagctattaccaaatgaagaaagaaaagaaaatctaaaccttacttaatccagatgctggcttttttaaaataaagaagtgtgtcattctaatttgaagaccagttaatctgcttattaaagaaaagctagggtaatgaattagattaaagtctcaaacagtgcaactcctaggcacctgaagaaatcaacaaaaatggggaaaagagtctttggaatggcttttcattctgactattcccatgtaaaaactgaaaaacccagaaatcagggttttggtagcaaaacaaatgaagatataactcctctatattttccattagaytctttttctccccaaagttcaaagttaccactgcatggaatattacttattggggacc

SEQ ID NO: 831697 - DNA, 505 bp, Homo sapiens
ttctacagatggagaaaatgaggcatggaggttgaatatctttgcctaagactactgggaatacatagcaacacttgaattaaggtttagggattcagtcctttctgcataaaagatcaggggaccagcattatttgaattaaaacaatgaaggtttaatactaaatattatcccttttgaaaagaagataaactcatcattcagttaacattgattttcttataaattgaaattatacctgccttcagaaaacaacaataacctgttccgagtttatttctctcattcattctcagtctccacaattatccccatagaatgcctttactgaatgatgagatgatgaggggctttacagtcagtgtcatctcaaagcattgagattcgcttttgctttatattaaagttgcaaatcatatcaataggcttcayttcatattatgacaagcttctcatttctgatcagtaataattgttagcaatttcaaaatcctatattatgtg

SEQ ID NO: 831698 - DNA, 539 bp, Homo sapiens
gattatactctcctactcatatataataattgtcccgaccttttcaagtttgttttgtctctacacgcctttatttttattttcaatggttttattatttttctcttttttaactacatttaaatgttaacttttgttgtctttcaatatgtgcagattagtattccataacaactacctggataaattctaattgttcttctgtaatacaggtagttttgagttttgatgaacaaacttataaaattgaattgatttaaatgtaaatttcacacagctgttttatcaatatgaatcctggtaaatttttttaaaaactttttcacccaattacgcacacaacagaatatcaagactgtcattcaatccttaactgttacactgattaactgatcctctttacacctacaaaagtttatttgtattaaataaaacacaaatatcactgaagggagaattactttacattaaattgagaaatgattrtttagtatgggaataagacattgtaattcaggtctttgtattttctctttatt

SEQ ID NO: 831699 - DNA, 596 bp, Homo sapiens
aatcattgcctatctgaaaagccaaaataattctttatctctttctcacacgtcatgttttatctctcataatagatttatattttagttaaatgtaaacttgagaatccaaaataattttctcttggaaatgaaaagacaatacttgccaggcacagtggcttatacctgtaatctcagctattcaggaggttgaggcaagaggatcacttgagcccaggaatttcaggctgcagtgagccatagttatgccactgcactccaacctggacagcagggtgagaccccatctttacaaataaataaataaatagacggtgcttaattattttctactttacagatgtgccagtctaatgaccacctgctacttgttttatggaacaagttcatagatattttcaaccagaagactgatgactatcatcagttaacaaaaagtttcttctattgttttggatgatttatttcyttccacttttttctttcctataccactggacattttattataaagatgtgggtatggctctttcatctgatattttctgttttcgtacattgtgctttacattctagaagatctccgcagcctt

SEQ ID NO: 831700 - DNA, 612 bp, Homo sapiens
atgcatgagctatattccaaaaataggatttatttattaaagtatttattaaatattttcatttgtaagtcaaatgaagtttttatatctctgcttgagttatcaatkttcctttaatttaccatgtaaacttgtcaaatcattttatgtctccgtgtctcaattttctaatctgtgaaaaagaaagtcaaactagaatattttaaattatctacaaacactaaaattatcttataccaatttcctctgcatgggtgaaagcacctagagatggcaaaatatgtaaattagagaaatgctacaaaattactactgtattttccctttattgacattacaagtacctgagggaaaaaagcatatacagtaatcttgaaaagaataaatatttatcttaatttttcaaaaatatttaaaatgatttaaatatttatttaaagaaagccataaataacaattgactttgatagtaaacataacacaactatactgtgaatatgaaaaatgaattgacgttttcacaaatttgctattctttattctattaacaacaatagcactgagataaaaacagcacattcaaataaccctcaaaaaagcttataatcttaa

SEQ ID NO: 831701 - DNA, 512 bp, Homo sapiens
ctgtaagttcctaaaaaggaattttatcatggcgagtgacatacctcatagcttgtcactttgcttctacattactcttttgtctccttctgtttcccaccctgtagccagaatgatttttagaaattaatgtcagattatggcactcttctgattaagatttttgcctggcttctcattgttttaatcataacattcaactctgttatttgatctacagaaccctacattgtaagacactggcaagctcttattctaacacttttcccctgcacattgtcttctagattggccttctaattttctttaagcttccaaaggtgttctcatcttagcactttacacattttgtcccttctctcctgcttttggagtattctttgttgctacaacycaaggcatgcttctctccctttttgtggctaccctctaagtgttacctctaagagaggcttttactggccagactatgatggagcctctaggattttctctattttctgtgcttattt

SEQ ID NO: 831702 - DNA, 482 bp, Homo sapiens
tcatgacagaattatcaacagtgtccaaaacttattagccacccaaatatctattcatcataaaatgaagacatcatctgtggtttatcaatcaacagaatattacatagcaatggaattacctaagaactgctacattaaagaaaaagacactaatgagtacatattatataattcaattacataaacaagcaaaactaatgttgttattcgaagtcaggctaatccttagttggaggccaaaagtagtcactaaatggttcagaaaaagagagtcattctaggcaggttgtgatagcctataccatgacctgaacagtagttaaattggtatcttcacctcaagatgatgttcaagatgaacttccatttttgaactattcacttagtgtatgtatatttatcttttgtattttatatttaaatatatattttgmgagatatataaatcatttacaaaattctaggaaacaaatagaaaa

SEQ ID NO: 831703 - DNA, 615 bp, Homo sapiens
gtttcagtgaaccgtgattgtacccctgcattccagcttggttgagaacctatytccaaaaaaaaaaaaaaaaaaaaaaaaaaaagatgtagtactttcaaaagataccttgagaaaagtttcccgagaaacttccaaagcacaaaaatgcaagtaacgaaaaaatgttggataaggttaaagtgtaggaaagttatttcctactcgatttctaaatctaagagttatttctacttttttttcaatgaactatcagcatcttctcttttttaaaaaaatacatccactctaaatcggcttaatatttttggctttcaatatcctcattatggtagccaaattaacccccaaaatgttaaatgtatttcatgaaaccgaacttgtttatacacacacacacacacacacatatatatgtaaacttaaatgtgaatttaaaaccacccaacatcaaaatatctatcaacaagtacataaacaatgtgtagcatataatggaatattgttcagcaataaaaataaatgagctaatatgtcaatttttaaaaaataacaaataaaaaagctattaatacacacaacaaattatgcagaaagaaaccagaccaaaatgag

SEQ ID NO: 831704 - DNA, 615 bp, Homo sapiens
gtttcagtgaaccgtgattgtacccctgcattccagcttggttgagaacctatttcmaaaaaaaaaaaaaaaaaaaaaaaaaaaagatgtagtactttcaaaagataccttgagaaaagtttcccgagaaacttccaaagcacaaaaatgcaagtaacgaaaaaatgttggataaggttaaagtgtaggaaagttatttcctactcgatttctaaatctaagagttatttctacttttttttcaatgaactatcagcatcttctcttttttaaaaaaatacatccactctaaatcggcttaatatttttggctttcaatatcctcattatggtagccaaattaacccccaaaatgttaaatgtatttcatgaaaccgaacttgtttatacacacacacacacacacacatatatatgtaaacttaaatgtgaatttaaaaccacccaacatcaaaatatctatcaacaagtacataaacaatgtgtagcatataatggaatattgttcagcaataaaaataaatgagctaatatgtcaatttttaaaaaataacaaataaaaaagctattaatacacacaacaaattatgcagaaagaaaccagaccaaaatgag

SEQ ID NO: 831705 - DNA, 492 bp, Homo sapiens
cacagccctcaggagtcctgagaacatgcgcccaagggggtcaggctacaggttggttttatgtaatttaggaagatataagctatcagtcaatacatgttaagatgtgtattggttcagtctggaaaggtggaacaactggaagtggtgggtaggagggtgctttcgggtcatgggtgggttcaaagattttgcgattggcatttggttattatctaaagacttggaaccaataaaaatgaacgtccaggttgaggtaagggattgtggagaccaggcttttatcattcaggtgaagactccaggtagcaaggcttcagggagaaaagaatgtaaatgtttcttatcagacttaattaatctgttccatcagtaattctgaaagggaggaggtataatcaggcatgtccaacaccaycttcccatcaaggcctgaactcgtttttcaggttaactttggaatgcccttggttgagataagggatccattca

SEQ ID NO: 831706 - DNA, 492 bp, Homo sapiens
cacagccctcaggagtcctgagaacatgcgcccaagggggtcaggctacaggttggttttatgtaatttaggaagatataagctatcagtcaatacatgttaagatgtgtattggttcagtctggaaaggtggaacaactggaagtggtgggtaggagggtgctttcgggtcatgggtgggttcaaagattttgcgattggcatttggttattatctaaagacttggaaccaataaaaatgaacgtccaggttgaggtaagggattgtggagaccaggcttttatcattcaggtgaagactccaggtagcaaggcttcagggagaaaagaatgtaaatgtttcttatcagacttaattaatctgttccatcagtaattctgaaagggaggaggtataatcaggcatgtccaacaccaccttcccatcaaggcctgaactmgtttttcaggttaactttggaatgcccttggttgagataagggatccattca

SEQ ID NO: 831707 - DNA, 640 bp, Homo sapiens
gcttgctttaccctgaaaagtaggaatttcagactcttgtggaagatattgggagcagagagaacaaaygcagcttgatcacaaagtatgtgccagacactttgccttctctgattacatttgcaccacaaccttacaccatgaaccatctcccaggtaggggccttggggctccagctgacaaagtgaggtacctaaagccacccagccagtagggcgagaagctaagaattccaacccaggactcactctccacatgcctggagtctctccttcaagaggcaggcagtcccagagagcagcatctttgtcatctccttgtccctgtccccgcaggctcaacagcagagctcccctcagatcctagggcaatgacattgacagaagctcatgttttatgaggaaagatgggccctgtctcattggaagaatttaatctcagagcagcatgcccttgtctaagacattgtccgggcagcttgcaacccaataagactctgacggaatgagcctctcagggctgcagccctgatgtgagatttgggaccaggctggcagctgtggcgccagaatcccagccagaaaaaggaaaagatgagaaagaaaaacaaatagccccatgcgaagaattatggtggaa

SEQ ID NO: 831708 - DNA, 640 bp, Homo sapiens
gcttgctttaccctgaaaagtaggaatttcagactcttgtggaagatattgggagcagagagaacaaatgcagcttgatcacaaagtatgtgccagacactttgccttctctgattacatttgcaccrcaaccttacaccatgaaccatctcccaggtaggggccttggggctccagctgacaaagtgaggtacctaaagccacccagccagtagggcgagaagctaagaattccaacccaggactcactctccacatgcctggagtctctccttcaagaggcaggcagtcccagagagcagcatctttgtcatctccttgtccctgtccccgcaggctcaacagcagagctcccctcagatcctagggcaatgacattgacagaagctcatgttttatgaggaaagatgggccctgtctcattggaagaatttaatctcagagcagcatgcccttgtctaagacattgtccgggcagcttgcaacccaataagactctgacggaatgagcctctcagggctgcagccctgatgtgagatttgggaccaggctggcagctgtggcgccagaatcccagccagaaaaaggaaaagatgagaaagaaaaacaaatagccccatgcgaagaattatggtggaa

SEQ ID NO: 831709 - DNA, 557 bp, Homo sapiens
ttatataaaccggtatgaggatcaattggcatcccatttactaactactgagccaaattgaaaaaaaaaaaccccaccaaattgagattactgaaaggtgaagaggttataagaaggtctggaacctgtacttggtacaatagaagatttacttagaaaatattagagttgacaaaccacattatttgctctataaattgtaaatcctctagaaatgagaactcttagtcattaactaaaagtgaacagcttttgaaggatcaatcaagaactagtattaaaaatctatttatagcttagaactagggtgatgacatcatttatcctctacataaagacacctttaaagtaaaaatgagagttaattacagtaagagtgcgggaataaaacaagattgtcaggggcaaaccagaaatatacactttgatggtagatgttgtttgccctcagtgcatacccaatttaatgcagcccacttgagaactaataaacatagaggatgtgcaaacaggacactggacaatttaaatcaattmagtagataattgtatataag

SEQ ID NO: 831710 - DNA, 552 bp, Homo sapiens
tttaaaaaaaacttttatttaagttccgggatagatgtgtaggtttgctacatagataaacatgtatcatggggktttgttgtacagatatttcatcatccaggtattaagcctagtacccattggttgtttttcctgatcctcttcttcctcctaccctccacccttcaatgggccccagtgtgtgttgttctcctcagtgtgtctatgcgttcattttttagcttcaacttataagtgagaacagggtgtattctctgttttctgttcctgtgttagtttgccaaggataatggcctccagctccatccatgtttcctgcaaaggatatgacctctttcttttttatggctgtatagtattccatggtatatatgtaccacattttcttcagtctaatgttgacgggcatttaggtttattccatgtctttgttattgtgaatagggctgcaatgaatatacatgtgcatgtgttgttgtaatagaatgatttatattcctttaggtgtataccaagtaatgagattgctgggtcgaatggtatttctgt

SEQ ID NO: 831711 - DNA, 370 bp, Homo sapiens
ccatttcctttcacccttttcctactccacagtgagtcaccggtagaaggttttcatagaatacacatgcrttaagaagtaaaatgtaaacagatgaatttattttgtgcagaatatccactattgtggtgagaataaaatatgtatgtatatatgagctacaaaatataaattatataattttggtgagtctgtatattaaatgcttttatatttgcatctaaaactgacatttttcataatgatgaatgataattatgctaataatttaaaattttaattttcctatatgtagaataatagataataaccataactacttaaatcttatttatattctttcatttatatgtttgaaattatagaaaac

SEQ ID NO: 831712 - DNA, 614 bp, Homo sapiens
cttccccaagtctccaggctctccctgcattctggcctgtgtatacaccattctttctgagtgtaacatgcctttccctccttctttggcagtttaattcctcttcattcttagctgtaagcatggaaktagcttccttagaagagtgttctttgtcctctcaagtccgggttaattgagtcaccttggtctttcaggccccttttgtacccacttgggttatggtactaatctcattaaactggaactgcccatgtgtctttatagttggcccctctatacttagcacctagcacagggccacagacattatagataagatgggaaagaatcgttgattgaatgaatgaatagtctttgttttgtagtgtactatagtgctacacacgtgagcagataatgtcctttcgctctatcattataacaaaatacattctcatttccatccacttcttaatttgatgcgttatctaaaagtattttgaagccatggttatgggaggtcacaccctagtctatgctgagcgttgatttaaaaatacacttaataaaatgtgttcagaaacacatagtaatatttttggaaaggtttttcttctcctcttttatccaat

SEQ ID NO: 831713 - DNA, 695 bp, Homo sapiens
cttcaacaaccagagtgatctggaaaaggagatgcagaaagtgaatccatacaagattgatataggtgcagtatattcccacagacccaatcaacacaatacagtgargctgggagctttccaggctcaggaaaaagaactggtgtttgacactgacatgacagacatgacaatgtgaggagatgctgtagttctgcagatacatgttctacgtgctggaccctcatgacaagggccatacgcatcactaacacagcactgaaggaggactttggatttaagcattgtctctgggtatattctggaaggaggggtgtacattgtttggtctgtgataaatcagttagaaaactgtcttcggtggtatattctgggatagttgagtatttgagccttgtaaagcatggtcaagatgttaaaaagaaagttcacctaactgaaaaaattcacccttttgtcagaaaatctataaacataataaaaaaaactttgaagaatatgccttggttaatcaagatattctcaaaaataacaaaagctgggataagattttagcccttgttcctgaaacaattcaggatgaacttcaacaaagcttccaaaagtctcacaattcacttcagcattgggagcaccagcagatgtcagaataacatcaaaaatcaaaatgtggatcctggctgcagtgggagatt

SEQ ID NO: 831714 - DNA, 657 bp, Homo sapiens
atttctaaaaattagcatttcatacaatartctctatgaattcttccatctgtttatctttaaacagagatatctgaaatattcacaaaacattagtgccgtttatttttgtgtgatgcaaatttgtgatttgctcatttcagtatggcttggatttcttataaaatcaataattaaagaattttaaaacatatatatataaaataaaaatgcaactttaaaaatacagtacatatttatgtagccttaggatgggaacaaggcaaaaatcaacctaacgttctttcttgtcattcttattctctccacatcttagtcccctcccccaaaaaaatttatgtgaaaaaaacatttcaaagattcactcaaaaaattaaaatatatgagttatcattttctgttcaggctataaatgctatctcctagacaaaaacttgatggactgcctcaaaaacttaatcacatatgtcaccattaagtcacaaaacctaaaaagttatgtttgagatttccaagtcatcaaaagtagaagtttgctttttattatccaaaacagatccaaaagtctaacctaatataaagggtgtgtgcatcaataggaagctatgaccattagcctccaatacaaaaccctcatgagggtcctatactcaagcc

SEQ ID NO: 831715 - DNA, 490 bp, Homo sapiens
caagcaaaatcagccagaagatgtctgaaaagcttgcgttcagacaatcatctctaactccaaaacctgatttgcatatcctagcatctaatctccaatttcagtgttttacccaaacagactcttcacccaattcagagtcacattcctttgggtggaattcccgcaccacctcatttagatactccctctctcaatagtcctgtgccagtcctcagtgcccagagccactgccagcaccagaaaagctcttaatagggctattttggcaaggaagccattccaaatcctttccaccatgcactagctattagcatattcttaactttttcttaacttattcttaaatttttctttctcaatgctgccactaatcagatactacataggccaagtgtgtatggtcaccgtgttctgtagcttgcrtgttttatcagaacccctgcctgaagagcctgtgctacaagacccagaaattctcagaattgat

SEQ ID NO: 831716 - DNA, 534 bp, Homo sapiens
aatctttgtttgcagtcacaatggtaatctacctagaagagccaacagaatcaacatagcaactattagaaattttaagagaatttcatgaatttccaggtataaaatttcaaaattaacagcttttttttttttacaaagagcaatattaagataaaaataaaatggtattcacaatcattagcaagataaaaataaaatagtactcacaatcattagcaaactataagttatttatatatttacaatgaatatataagatttcattgaagaaaattttagacatctattaaaagaaaacaaagaagtctgtcatggagtgacattcccttgttttagactttctagtgtacagagggtaattctctctccaaatcatctttaaattcattaaaatgttaatcaaaatttcaactggatatttttaggaacktgataaatcatattttaaaatttgcatgggaaagtggtagtccataaacagctgtcatttaaaaacaaagaaacaaaaacaataaaggatttttggcttac

SEQ ID NO: 831717 - DNA, 362 bp, Homo sapiens
acggacaatgataataaccacaaaacccaaaaacaacagcaatgacaaaaaatgccaaataaatattctcctaatgtcagatcagtagcaccttctttatgtaggtagaacagattgtattatttatttaaacggacaagtcataacttttaagcctgagtgatcatagtctccttaggacttcccagcctatgcgtacattttttttttaatgttactacctccaggccctacccacgtaccatagacacacctcacctcttctcaaagtccctcaactcaaaaggaattgcttgaggtctctaaatgcatgtcttccctcrggccccatgttggtgtacacacaggtgcagtccatgatg

SEQ ID NO: 831718 - DNA, 637 bp, Homo sapiens
aacaaatatatgaaaaaatgctcaacattgctaatcatcagagaaatgcaaattaaaagcaccatgagatattatctcacaccaatcagaatggccattattaaaaaggcaaaaaaacaacagatgttggtaaggatgcagagaaagaggaatgcttatccactattgataggaatgtaaattagtataaaccctatggaaaacagtatgaagatttctaaaagaactaaaatagagctgccatttgattcagcaatttctctactggttatatatcaaaaggaaaataaatcattatatcaaaaagacaacctgcacttgtatgtttatcacagcaccattcacaatagcaaagatataggccaacttaagtgtccatcaaccgatgattgaataaagaaaatgtggcatatacatataactcactgtaacttttgaactcctgggctcagttgatcttcctgcctcagcctcccgagcagctaggactacaggtgcatgcaaacacactctgacagattttaaaattttttggtagagacaagatttayataaatatatatatactcccaggctcaagtatatatatatattcttttttatggctgagtagaattctatggtatatagacataga

SEQ ID NO: 831719 - DNA, 633 bp, Homo sapiens
ccattaccatagcctttgcatttattattgcttctacctacaacatcaatatctattctgctgcctctctcaggtttctgctcaaacatctacttcccagagaggccttccctgaccactctayctatagcagcacttcctaatgtaagcattttagaaatctggctcactgttgtattctaggcttccagcaacagaactgggtgtgtaataagtgcttcataaatattagttgaatgagaatgctgtgattctgctgtggaggttttacaatggagttagagggaatgagtcatgcactcactctattagttagggattttgtttcaaagtaagaaacaaattagagccaatctacatagaaagggggaatttattacagaatgtaggaatatattattgaagccaatgataaaagtgcaaatgcgtctctgagagagagagagagactgagtctaggggtcgagggactcgagagctgtcccattctctccatctctcatctctgcccttatctctgtgtctgcctcacccactctgtccctattgaacaattcccaccagtgggtggacgatgttcagccttcagtttccaagcaagtctaatcacttgtagagagactgacttctgaa

SEQ ID NO: 831720 - DNA, 660 bp, Homo sapiens
attgtgccattgcactccagcctgggcaacaaaagcaaaactcagtctccaaaaaaaaaaaagggctggggggcggtggctcacatctgtaatcccagcactttgggaggtcgaggcgggcagatcgcaaggtcaggatatcgagaccattctggctaacaaggtgaaaccccgtctctactaaaaatacaaaaattagctggtcgtggtggcgggtgcctgtagtcccagctactcgggaggctgaggcaggagaaaggcgtgaacccgggaggtggagcttgcagtgagccgagatcgcgtcactgcactgcagactgggcaacagagcaagactccttctcgaaaagaaaaaaaaaaaaggtgaataagagctcactaggtgtatagcagggaggaggaaatgggaagaggtgctccaagtagagggagcagtatatgaaaagggttggaagcatgtagcagcttagcatgtctaggaaattgaatgattttgttgtggctgaggcaaatggtatgaaaaggaagggcaagagaaagcagctggcatttattgagtgcgccagatgctgttctmagtgattaagtactgaatttcttttaagccacacaacaaccctaggcattgtgaaaagaaattaaattttgggaccccagatg

SEQ ID NO: 831721 - DNA, 658 bp, Homo sapiens
tgcttttttcttattaatctgtcttttattataagaataaccttgcttggtatggtggctcacgcctgtaatcccagcactttgggaggctgaggcgggtgaatcacctgaggtcaggggttcaagactagcctgaccaacatggagaaaccccgtctctactaaaaatacaaaattagccaggtgtggtggtgcatgcctgtaatcccagctacttgggaggctgaggcaggagaatcgcttgagcctgggggacggagtttgcggtgagccgagatcgtaccattgcactccagcctgggtgacagagtgagactccgtctcaaaaaaaaaaaaaaaaaagaataaccttatgatggatgaggaaaggtatcatacctttcctgtatacatagtggtgatgtgaataaacacaatctttctggagaactatttagcagttctaataaaaaccacacacttaagtacaacccctgaccaagagaaaccggtttggggagtatattccaagtatctaatgcaaaggtgaaaaaaaaaaaaaacttgctgtrtaaagatattttgagctgactatgtgtcatgaagaagagtggaaaaataatggtgcaatgaatttgtaaactgcaaatgatggcagcttgtgacaattcagcacagt

SEQ ID NO: 831722 - DNA, 634 bp, Homo sapiens
ccttttcatatattacttcatctcatgattggtattttaaaatttcttggccrggcacagtggctcatgcctgtaatcccagcacttcgggagcccaaagtgggcagatcacttgaggtcaggagttcaaggccagcctggccaacatgatgaagcccaatctctactaaaaatacaaaaattagctgggcgtggtggcgggtgcctgtaatcccagctgctcagggggctgaggcaggagaatctcttgaacctgggaggtggaggttgcagtgagccgagatcataccactgcactccagcctaggtgacaaagcaagactccatctcaaaaaacaacaaaaacaaaaacaaaaaaaaattctttggttgtgggtaacaaaattaaactcaaaccaacttaggaaaaaattaaaaagatgtatagcacctaattgaaagttccatgaatcagtgtagctttaggcttgtctggaaccaggcactcaaacactgtttcaaggagcctttttctccatcttttggcttggctttcttctgtactgactttgttttcagaaagatgatccttgtacttagcaaccccagcagaaaaacagcatcttttcttcaacacatccagcgaggggtccat

SEQ ID NO: 831723 - DNA, 647 bp, Homo sapiens
ccttattgcttaaaaaaagctctttcatatcaacagccctgatacaattattgctggtatatatagcaaaactattgacttcaatactttattttattttattttatttttttgagacagggtctcactctgtcacccagacgggagtgcagtggtgcaaccatggctcactgcagcctagacctcctggactcaagcaatcttcctgccttggcctcccaaagtgccaggattacagctgtgagctaccatgacaggctttatatgttatttttatatcaggccatctcactaaacactccgtttcaatgcttgtcctgaattttgaatgttaattctaatagttttctccattgattaccctgcctcagaatttctggctattcagattatctgcaaacaatctataagagaaaattttgtctcttattttcttaaatttgtgcctcttgcttcttgctcttgtattgagtaagacatccagaaaaatactgaatagaggagtgacagaatgagatttgctgtagtttttagttttggatacatataaggcttacttatatttctagattactaagyatttttaaaagaagtcagtgttgaattttatggaatgtcttttcagcaacaattaagttgatcatggt

SEQ ID NO: 831724 - DNA, 623 bp, Homo sapiens
ggaaacaaacctaagtccccatctatctacagcagggaccttgtgccctatgtgtgattctcaggggttgyactcacttgaatgcagggcagatcgacaagacttaccctccagagaacacattagatgtgttccactcttcactctcctcttcattctctgtcactggccctgcagtttgctctgtggctacagaccaagttccgtggagaagccagtctcaaacgtagagaacctcatgcaggctggctgaccaggcatgagaggaaaggagcaaactgtcaaaaaaaaggaaatctctggcatctgaagaggattgcccagacgggaatggagacaaaatagaaatagtatcaaggtaaccaggatctggtcatggaaaaggggtcctgtcacttaccaaggctgaaggtgggtttgctgttgtcttgcattccgtgtgtccaccaggccaagctgctgggaatccacagtcctggcaattctgaactgccccagaactgtcccagcatgagggaaaccatctctccaggatgagagctgtgaattgtcatggttggttgggggtggctcgattgggagtgggagctagagtacaggggattagaaacaagggctaggag

SEQ ID NO: 831725 - DNA, 561 bp, Homo sapiens
atagtatgacacaataaaactacgtatgtgtgcgtgtgttcatgggtatgaagtagcttacggaagttaatttggggaggggatagtagaattttgaaatatgttatttttctgaatcatatcctttataattacatttatgtaattaaagtatcatagaaaaggttattacaatatgtatttgtgacctacttaagtttactcaaaaaagtgccacttcattaacattgtaaaattaagctcttttgattttaacaggcaagaataaaggcatctatccaatctaaaactttttcatatttgagtgcatgaattatacccctgatttaataatgttgaacctgctataaccttcaacatacaccttcatttagccatctccgtatcctttgttttcacatgttcaatagtgttgcttttccttcactcaaattgtaaggggaaaaaactaaataaaatattgtctgtgtaataaagcattgttttaaaagctttgatcagtgccaagtcctagcacctgaagctatgctgaccmtcttggcctcatttgctctttgccac

SEQ ID NO: 831726 - DNA, 618 bp, Homo sapiens
ttgttatgatccctattttgcagatgagaaaactgaggcttagggagacacagtcacttgccgaggtcacactgttagcaaatgtcctcaratcccaaatcagcttgacctgaagcccagaatcttaaccacatgctccactgccttacagcaatcagcaaagagtttgaagaggatgcctagggagcttggatggaggacaggctggcagaggagactggaggcagaggatgggagtaggaggcgggcgccacactggcagagaggagggatcctaagacatagagctgtggtgtgctaaagcccggctctcaacgcactgtcagcttcacttttgttgttgtttccttatatagataagatatctgataaaatatctaatcagcaaagtacatacacacacacacacacacatatatatatacaaacatactaattattatgcctactggtttctgcttggggtgatcttggcaggaggaggtgagggatgagggtcctgagcctggaagttggagttatacttgggctgcgggcatctggggcatttccgggggagttaccccaggaagtggtcaaagggagttggccgcccacctggctcagggccagggcgga

SEQ ID NO: 831727 - DNA, 658 bp, Homo sapiens
agaagatgatgtcaccatatttaggaagcattgcttacatgaagcccagaaactgaagtttacagtatcatctaatctaaactgctttaraatcctatattgtatggtcctattaaatggagtagaaagatcttaagccttagagtttaactccagttctattacttccaagatatatggccttaaagagtttaaatcacagtttatttatttgttaaatgagtaattaggcctactttgttatagtatgaggattaaataaaataatgtataaaaaggccctaatacaaagccttacacatttaatcctggcagaatggggtcattaaaacatacctttaggaattagaaccaaaaaaaacaaatgttctgaatagtaagcaaaatttaaaatacaacaccatcttggggtcacttacattccacagttctttttcaaagactgcattgtatattcttaatccccagtgtgacagtttctctaattatgagtctacacgtttgtacacacatcccatcattatatttaggactcgcccactggactgtaactaagtctttaatgagttactaatgaacatcttaagcttagatcagcattcaaagaaaaatgttaaagggtgttgaaaagctattcaaagtgcaattctgtcacttt

SEQ ID NO: 831728 - DNA, 658 bp, Homo sapiens
agaagatgatgtcaccatatttaggaagcattgcttacatgaagcccagaaactgaagtttacagtatcatctaatctaaactgctttagaatcctatattgtatggtcctattaaatggagtaraaagatcttaagccttagagtttaactccagttctattacttccaagatatatggccttaaagagtttaaatcacagtttatttatttgttaaatgagtaattaggcctactttgttatagtatgaggattaaataaaataatgtataaaaaggccctaatacaaagccttacacatttaatcctggcagaatggggtcattaaaacatacctttaggaattagaaccaaaaaaaacaaatgttctgaatagtaagcaaaatttaaaatacaacaccatcttggggtcacttacattccacagttctttttcaaagactgcattgtatattcttaatccccagtgtgacagtttctctaattatgagtctacacgtttgtacacacatcccatcattatatttaggactcgcccactggactgtaactaagtctttaatgagttactaatgaacatcttaagcttagatcagcattcaaagaaaaatgttaaagggtgttgaaaagctattcaaagtgcaattctgtcacttt

SEQ ID NO: 831729 - DNA, 597 bp, Homo sapiens
tcttttctttgtgcacaatataaaccttcaacrtcaatctgtgttacatgttaagcataagaacataaacagtgttatgtattttaggacacttcaaaatagtttttccatatctgactattccttgtatcaccaaaatgctaattgcaaacagcatttggaaagtattacaatttattggattatctattacatttcatggtctgcatgacattgcatgctgttattttgatagtgttctttagaactgagttcattacatgagagaagaataaatgtatttttcacaatttgcaaaaataagattttctccaaatatggcagaaaaattattttactgctaacaataactttctaacaatgtagggaaaaaaagaagtaaaaattaataggtaatttataatcattaatcaaaatgtagtaagagtattgattaaggattagttggccttggaaaataattttaaaagtattcttttgctattcagcatatgaaattaatttaaatatttgagcaatctaaatatggccatattaacatcatataaatgaatgtatcatataatatcagtgggtaagaaatatttttgattctaa

SEQ ID NO: 831730 - DNA, 644 bp, Homo sapiens
tccctagccactagaggaatgatagggttgggaaatggagtggccatgctgctttcttgccactacggaaggtaatgtcacctttagtggtgggcaatctaagctactgggtggggaatgtttatgtcactcattcctgagcccgggtggcacttgcccttgagtccatactgcagtagctggcaccttagctttgatgacagtaactcacactttggttgtgctttacccctagtgtggtagcctgtggttgctcacaattaagctctggagaaactgagcttctcttgtaagactgtgtttaattccaattttattgaatattccagttttccttctgttattattttctaaattcatcctgttgtagtcaaagaagatattctgaatgacagctatcttttaaaatccactgagacacaattggtggcctaatatagagtctatctggaaaaattgccttgtgtctaatgtgcactcaaaaaatgtgcattctcttgcttgatagagtgttttttgtaaygtctcttggttctagttggtttattgtgttgttcaagtattctacttctcttcttaccttttatctgagtgttctgttcattattgagagtgagatattgaagtctcaaaccttatggtag

SEQ ID NO: 831731 - DNA, 551 bp, Homo sapiens
gaatgtatgtaaacacctggatgcccaggcagaagtctgctgcaggggagaagcactaatggataacctctgctagggcagtgcagaagggaagtgtggggtcagggcacccacactggkgcactacctggtggagctgtgagaagacggccatcatccaccagaccccagaatggtaggtccaccaacagcttgcacccgtgcacctggaaaagccacaggcactcaataccagcccatgaaagcagctgggagggtgtctataccctgcaaagccacaggggtggagctgcccagtgccgtgggaacccacctcttgcatgagtgtgacctggatgtgagacatggagtcaaaggagattatttcagagctttaagatttaattactgccttgttgactttgagatttgtgtgggccctgtagcccctttgatttggccaatttttcccatttggaatggatgtatttgcccagtgccagtacccccattgcatctaggaaataactagcttgcttttgattttactggctcataggtggaagggactt

SEQ ID NO: 831732 - DNA, 469 bp, Homo sapiens
catagcaatgtgagaactggctaacacagaatgtgtgtgtgtgtgtgtgtgtgtgtgtgtgtgtgtgtgtgtggtgtgtacttgctttctttttttttttgaggcagagtttcactcttgttgcccaggctggagtgcaatggagcaatctcggctcactgcaacctccatctcccaggttcaagcgattctcctgcctcagcctccctagtagctgggattacaggcatgtgccaccacgcccagctaattttgtatttttagtagagacagggtttctccatgttggtcaggctggtctcgaactcccagcctcaggtgatccacccgcctcggcctcccgaagtgctgggattacaggcatgagccaccgcgccyggcggtgtgtacttgctttctaaaaaacattttacttttttactgaggtaaaatttgtgtaaaaaaaattatcattttttaagggcagggg

SEQ ID NO: 831733 - DNA, 621 bp, Homo sapiens
cattcagctgtcctctattaagccagacattgaaagaggtttgcaaaatgtaaaacaaccccactcctcccaccactatttcttatttggggaaaaaagtgttttttctttaaaatatatatataaacatrtaagtttgtttttaaagaaatatttttaaattgcctaagtttaaatttctcatatagtaaatactggaagatgtagcccacataaaaactctctggggtcctcaataagcatataaagggttctgagagcaaaaagtttgagaactattactacaatccaatgagcactacaaaagtagaaaaaagggtgctcaattccaaaagaaagtagtcttcacagaagaaaacatactgactgggaatctacatgatggatatatttttgtttgagttttccttgttgggggggcagggtgagagaggcagaatccaagaaaatggaaatggagtatttccatgtgtcctgaaaaaaggtgagtagagactaatgtaatggaaattcgtgtaacaaatataatttactggagaggctgaatatgtacaggaaaggggttggcctgcagattgcaaactacagtttactttacagaaaatgtggagccatccaaga

SEQ ID NO: 831734 - DNA, 649 bp, Homo sapiens
tttgtatactgctttaaaccttaaaaaagtaaagaaacttcatagatttgtagagttctgtgccatttttttctcttattagcttttctattaccaatcaacacatttaatctctttcctgctacccaygctaatgtgttaaaacacttcatacttcctgcaaatattcttttctttttaaaaattttttaaaaatatttaaaaagttgtttgctcactctacattttggattatttacttcagtagattcccaaaatttgcaaagatgatttcaactgcaaataaatcattccattctctttttcaccttttaaaacgtttattcaatattaacagccaattctgcattcttttctaagtaataacatcaatggttaaatgcttcaaaattaagttctttatgattttggtagtgttttccattttgatgaaatacaaatgtgaaatttttcaggtttatcatatttaggtaccatatgtgatcctttacaaagctgctttattaatgaagaaaaaggactcatttctgcttttactatagcccatgagcttgggcacacgtaagtaccttctgtcacctccttaatgtgcattctatttatctttgcacagaatgcctgaaattctatcttcagttgagtaattagt

SEQ ID NO: 831735 - DNA, 556 bp, Homo sapiens
tgattttttgatatggaaggtaaagttgaaaaaaattacatggcacaaacgtgtgcttacattcttccacattctgaaaaatgtgtaagaaaagagatacgaaagctgaatctaagaggcctcaaccctgcctaagtgaaattataaaagcaaggaacagagataatgggaagaaaaagaaataacagaaaaaaaattactcaaagaagaaaggcataaagcttagattaaaagcatccacccaagtgctaagccctatgaatgaaaagtagtactgttgggattgtaaaatcaaacttcctgggttcaaacactggctttaaaactcatttgttggaaaatgagttgggaaaaagttatgtaactttttaaagttgggaaaattatttaattatttagtgcctcagtttccccttctataataggtgtgtaataaaatatgaccttcctcacagagttrttgtgaagctgtatcaagtcaatgcatgtaaagttgttactacatgaaagggaggggaatgtagtaattacaactattattatacaccatgacaaa

SEQ ID NO: 831736 - DNA, 556 bp, Homo sapiens
tgattttttgatatggaaggtaaagttgaaaaaaattacatggcacaaacgtgtgcttacattcttccacattctgaaaaatgtgtaagaaaagagatacgaaagctgaatctaagaggcctcaaccctgcctaagtgaaattataaaagcaaggaacagagataatgggaagaaaaagaaataacagaaaaaaaattactcaaagaagaaaggcataaagcttagattaaaagcatccacccaagtgctaagccctatgaatgaaaagtagtactgttgggattgtaaaatcaaacttcctgggttcaaacactggctttaaaactcatttgttggaaaatgagttgggaaaaagttatgtaactttttaaagttgggaaaattatttaattatttagtgcctcagtttccccttctataataggtgtgtaataaaatatgaccttcctcacagagttattgtgaagctgtatcaagtcaatgcatgtaaagttgttactacatgaargggaggggaatgtagtaattacaactattattatacaccatgacaaa

SEQ ID NO: 831737 - DNA, 582 bp, Homo sapiens
acatggatggtagttttggcagaagcactgtgtgcagagaaggcacatccatatccagagcgtctattccagtaaagataaartgctgccccttccatgatggaagtgtcccatgtaactggttgactactctggggaatgatgccatatcaggggctcagtgctggtctctgctgctggcatattggacactcagcagtggctgtagccaggcccatcttggtgggtgaaagtccatgatgctgagcccaatccatattgttcatccctcccaccgtggccactttgttcgtgagcccattggccattgacaggggtgactagggtaagaagccaattggtatccacagaacaggtcattctagccacttgattaccaaagttttcctgtgctgaagtgaccctttggtgagcattcacatgggacacaaatatcttcatgtcttttgcccactcagagaggtctagccagtaactccttcccaaattgctttgtcaccagttctctaatcatgttcctttcatgtccctgaccatccagccaaaccactggctatagcccatgaattggtatacaactgc

SEQ ID NO: 831738 - DNA, 544 bp, Homo sapiens
gatggatcctaggaacaatggggaaaagggcacatgcaggactggggaaggaaatggaaggagtaggctgagaccctagaatctcagtgggtccctagttggtgcagcacccccagtaagatgccatggccacctgcaagctggtgctgatccagcattgccagagcaccaggagcctggagaaccacttcagcagttataggacaataacctgagcccagtggggcatgaagcaaagggcatcatgcaggctctgtgagattctgcctataaggttgatatgtgcttctcctcagtgcagaagagagagcaatcctgacccactagatagtgctggatgccattaaccatatgtagcatcctgtagtaaagatttgatgtctcagtgaatgacgctatgggggtctgactggcctcaataaagcagaaactactgccaagcatggtgaggcccaggtaaaatctggaggcctyctatgccatcccaacacctccagtaaagcccaactatcccttctacagcaacttcagtaaggatcacaag

SEQ ID NO: 831739 - DNA, 539 bp, Homo sapiens
aaatcataagggggagaataggacattactcccaatattgcaggggctgtacacccccaccttgatattgttcctaatattcaggagggagaggatgatattacttccaacatcgcagggagtgtacaaccccatgttatattttctgaatatccaaagggggagaagataatattactccaaagatcgcagaggtgtacacctcctctgtaatattgttactaatatccaaaaagggagaggatgatattactcccaatatcacagggggtgtacacgcattctgtgataatgttcataatatccaggaaggaaaataatgatattatgtccaaaatcgcaagggggtttacactccccaggtgacaatgtttctaatattcaagtggagagaggatgatattactcccaataccgcagcggttgtacacaccttctgtcacattgtttctaatatccaaagcgagagatgataatattacamccaacatcaccaggggtgtacacctctcttgtgatattgttcccaatatttagag

SEQ ID NO: 831740 - DNA, 601 bp, Homo sapiens
atgtgatgctactaggaggtagggcctagggaggtgattagrtcatacgtgcggagccctcatgaatggaattagtgcccttctaaaagggaccctaaagactctctcaccctctcccctccgtataaggatataacaagaagtcagcagtttgcaaatttaaaagagggcctgcaccagaacctgatcatgctggcactctgattctcagacttccagcctccagaactatgagaaaagattttcagttgtttataaggccccagtctatactactttgttccagcagcccaaactaagacatagttttattgctaacttccatatgacatggaacaaattatttcaccttcatgagattcttttttttcatctaaaacagaggatacataatgtttgtcttttggcaagtttgttgtaaggaagatgctattattccttacacagtgcatggcccatagtaattgtacaaaaaagtaactaggtcattatcatgacactcaaagttctctatgacctgctcctaacttgacttccaagtcttatttcctgttctgagatccaggcacatccttgtactttcatgcatctatgccttcat

SEQ ID NO: 831741 - DNA, 646 bp, Homo sapiens
gtgtacaccccctttgtgatattgttcctaatattaagaaagggagagaataatgttacacccaatattacagagggtgtacaccgcccccccsccccgtgatattgtttctaatattcaggcagagagttgatattactttcaatatcacagggttgtacacccccactgtaatattgttcctaatatacggggatggggggagagaatattactccagaggtcacaggggggtgtacaccccccttgtgatattgttcctaatatccagtggaaaagaggatgatattactcccaatatcgcagagggtgtgtactccccctgtgatactgctcctaatatcatgaaaaggagaggagattatcactcccaatatcgcagaaggtgtacactcccactgtgatattgttcctaatatccaagtggggagagaaaaatattactcccgatatcaaagggaatgtacacaccccccgtcatattgtttctaatatcaagggaaggaaaggatgatattaccctcaatattgcaggtggtgtacaacccccccttgtgataatgttcctaatatccaaaaagtgagaggctgacattactcccaatatcacagggggtgtacatcattgcaagggtaatggtgtaca

SEQ ID NO: 831742 - DNA, 532 bp, Homo sapiens
ccacattgtaagtagatgtgctgtcacatagactttgttgttctatttatagagcataagcagattagtagattyagcataattcaaaagagccctggcattgccttcaacttaaagtcaccacctgcattagcccctaacaagagagtcagccccatcccttgaagctctgaagccaaacattgactgctccttcctaactatgaaagtcctagatggcttcttctcccaatagaaggctgttttgtctacactgaaaatctattgtttaaggtagccacacttttttttcagatctagacctgcagaaatgtagccacttttattatcttagctagatcttccttaaaacttgctgcaccttccccatcagcacttgctccttcaccttgcacttttatattatggagacagcttcttaaacctcattaaccaacttctgctagcttccaacttttcttctgcacctccctcgcctctttcagtcttcagagaattgaagagagtcagggccttgctctggattatgctt

SEQ ID NO: 831743 - DNA, 488 bp, Homo sapiens
tatacacaattacatatgtgcataaatattacataatatgtatttgtggtataaacatagttaatatagtaaatattacatatgtacacacataatatttattatatttagtatkcttattattaagatattattaagatatatatcttctcaataatatctacaatgtatcaatacaatagaatttttacataatagtaaaatagtacaatagagcttgtcatacaaactctgaggttttataatatatattttgagggaaatagtcatgcatttcattcattcgtgtgtatagtttctaaaataccaggaggtttgtagtattttatggtgaaagattcccttactgccatgtaaagagttcagtgaactgtgccaaaaaattatgtcaaattgataaagagagagccactgactagactagacaaggccccatatccacggctccacaaggacggagataatagaagtagaaccaactgggaaga

SEQ ID NO: 831744 - DNA, 643 bp, Homo sapiens
tgatgaaatccaagcatattctaaaaccaaacaacacacttttcctattttgtttttaagwtttgtatgtctgtatgtaaagaaaacttagataaatattttaaaatgtaaattatatttttaatacccaaagcttttccatttataaaaagtcaacattctaaaaaatggaggcatccttagaatcagcaatatttcagttttattggcctcttagaagtaaatcaaccacatatatagaaaatacataacaggaaattttaatattaatacacctattatttttaaattttaggatagttttcacttgttttgtgatataaccatgcatgtttcaaatgtttaaacaaaatcagtttcagaattccaaatattgggctatttttgtttaaaaactttatattccacagagatatatttttaaattgaagtgtgtacgtcactgtaagttggagatatctttttttaatatgtaaagagaaatgttccagaatctgatgatatttgcatttgattttcactaacgacctcatttttcactcctgcaggcaaactctggaatactcctgtcactgtgattcattgacagagacacacttaatcacatagttgtattaacaatttttgttgcactttatacctt

SEQ ID NO: 831745 - DNA, 588 bp, Homo sapiens
gtgggatataatctcctggtgcgctgttttttaaggccgtcggaaaagcgcagtattcatgtgggagtgacccgattttccargtgccttacgtcactcctttctttgactaggaaagggaactccctgaccgcttgcacttcccaggtgaggcaatgcctcgccctgctttggctcacgcacagtgcactgcactcactgacctgtgccccctgtctggcactccctagtgagatgaacccggtacctcagatggaaatgcagaaatcacccatcttctgtgtggctcatgctgggagctgtagaccggagctgttcctattcggccatcttggctcctcccccctctatttaatttttaaacattatttatttcttgttgtttttcttcttctgaaaaaactaaattcttagtactcaaatgagtaggtataattcaacaagtgacagcagccatagatcagtgactttgacagcactactcagcaacgaatcttcccagcaatgacagacattttgacactcaacttttgatcatcagttctttgaagaataaagatttttgatcaaaaaagggaaatgagaaaa

SEQ ID NO: 831746 - DNA, 612 bp, Homo sapiens
agtggagacctctttattgtatagtaagcacccaaatatacatggaaccattacggctgtctattctgttccactttgctgggtgtggtggctcatgcctgtaatcccagcactttgggaggacgagactggctgatcactttaggtcaggagtttgagaccatcctggctaacacggtgaaaccccgtctctactaaaaatatgaagaattagccgggcgtggtggtgggcgcctgtaatcctagctacttggaaggctgaggcaggagaatggtgtgaacctgggaagcggagcttgtagtgagctgagatcgtgccactgcactccagcctgggtgacagagcgagacttcgtctcaaaaaaaaaaaaatacaaaaattagccaggcatgggtgcacatgcctgtaatctcagctacgcaggaggctgagacaggagaattgtttgaacccgggaggcggaggttgcagagagccaagatcgcaccactgcactctccagtccgggtgacagagcgagactctgtctcaaaaaaagtaaataaacataaaaataaatttttgttccactagtttactggkctattcctcaactattttcacactgtttt

SEQ ID NO: 831747 - DNA, 545 bp, Homo sapiens
actccttttcttcagttggtcacatattggtagatttgttgtctgctttccagacaaatagtgctgtagtgagagccagggccatacaagcctggagctgaagcattttaactaaaaaaaaaawtgtcgaaaggatcttaatcagatgagaaaaaaatggtgagcattatcccctaagctttcagaaagataaatacttagtgttggaaatatataaacaggttggggatcatcactggctctggagacaacgaagaccatgatcattaatgtttaaagggcagttctattttcttagtaatatggtggtttgaatggggaacacaattattcagtccagtggttctcaaactataaaagtgcatgtccatgaacatgtcataccttccaaccagttttggatatgtactcagatttggacataaacttcatacatactgcttcaaaatcctgccacaccacacctctcaagaatcattaatatacacttttgttcacttttcaaatacaagtcacaattaaacatgtttgtccaagccacaagt

SEQ ID NO: 831748 - DNA, 630 bp, Homo sapiens
tgctgatgaaggataaaaacttacttggaaaagcagtggaggatgcagggcgccgacaggacccaccgcagcacgccgagtagaatggcggggtgctcagaaggaaaggtttggaaggtgctgcagagaaagcrttgatctcattgattagccatttctttaagacaatattcaaaactccagtttcctaaaagtcattgagtaaatactttgcttagttttttaatttgtattgaaattaaagttattataaagtagcctttgtctgtcaaagagcatgccaaataatctcatcaagatttgagaggggtagtgaaaagacgcaaagagactatgaaacaccaagcttcttagatcattttctgtgcggtcatcattataaatagtaaacatcaaatattcctttatttaaaataccctagaacaacactgtccaagaaaactatctgtgatgattggaaatgtctatgtctgtattgttcaaaatggtatctgctacccacatacagctactgtacacttaaaatgtagctagtataatgaataactgcatatttactctaaattcacttatatttaaatagactcatacgactagggattatattaaatagcacagctctagatatc

SEQ ID NO: 831749 - DNA, 610 bp, Homo sapiens
atgagagtatgagaaagtcttaaatatatttccgatcctcctgctatataaatgtataaccagagattctggatgttgaggtacacttaactaagatattyccttccctccctgtgtccatagtgacattttatcagtttgtctttgaaacttatttctaaaattactttgttaaagcaggaaggacttttccttgcttactaattgaagattggagtatttccagaggtaactttgagaaacaagaagcaaatatggtaaactccaagaggagatgaaaaatatgtttgtaatctatttttagaaattttagtatttataaatccttttattccgtgagatttctacaacagtgggagtcaaatccctattttgtgataaggagttacagacttgggatttgcccttaatatacttgatattgtgaattaaggatgaataaagatgaacttatcagagaaataaagattttactttaccatggggtaaaggaatattctaaatattactaaatatcttcatatggagacagagagaaggaaaggtctgaactgaagtgcactgataaccttttacaagagctttactatattatgggatgtcaagagcc

SEQ ID NO: 831750 - DNA, 635 bp, Homo sapiens
tttatgtaggtttgcattatattaatattattttatattaatattaataatttatcatttttactacatgctgagcaccatttatcttcattgtaccactgcatttccacaacattcttaagagacaggcactattattttttcctctctttgctggaaaaactgaggtttagggagttttaaaaattgttacagataggcagttgtatcatttaggatgtttgtggctacaagtagctggatacccaaaaagggcttagacaaagtatttattttctcacgttcgaagaaatctggcagtaggatggttgaaggtcaggttaagtcattgcttgagcagtgtcatcaagaacttgagctcttttatgttttcattctgtcattcttagcatgttaattgtgtttgtcaggtactttcagggtcatgtgatcatatcctcaataagaggggaaaactacctatgcagtgttagcctctacattgggaatcagggactacctatagaggggagagggaagcaatggctgactattaggtactgtctatyaaataaggactgccattaatctcctctgcatgacaccttagaaaggacattaatagaaaggctcgtttcagaaattaaagatagata

SEQ ID NO: 831751 - DNA, 635 bp, Homo sapiens
tttatgtaggtttgcattatattaatattattttatattaatattaataatttatcatttttactacatgctgagcaccatttatcttcattgtaccactgcatttccacaacattcttaagagacaggcactattattttttcctctctttgctggaaaaactgaggtttagggagttttaaaaattgttacagataggcagttgtatcatttaggatgtttgtggctacaagtagctggatacccaaaaagggcttagacaaagtatttattttctcacgttcgaagaaatctggcagtaggatggttgaaggtcaggttaagtcattgcttgagcagtgtcatcaagaacttgagctcttttatgttttcattctgtcattcttagcatgttaattgtgtttgtcaggtactttcagggtcatgtgatcatatcctcaataagaggggaaaactacctatgcagtgttagcctctacattgggaatcagggactacctatagaggggagagggaagcaatggctgactattaggtactgtctattaaataaggactgccattaatctcctctgcatgacaccttasaaaggacattaatagaaaggctcgtttcagaaattaaagatagata

SEQ ID NO: 831752 - DNA, 647 bp, Homo sapiens
ccaggtgcgggatataatctcctggtgcgccgttttttaagcctgtcggaaaagcgcagtattagggwgtgagtgacccgattttccaggtgccatctgtcacccctttctttgactaggaaagggaactccctgaccacttgcacttcccgagtgaggcaatgccttgccctgcttcggctcgtgcacggtgtgctgcaaccactgtcctgcacccactgtctggcactccctagtgaggtgaacctggtacctcagatggaaattcagaaatcacccatcttctgcgtcgctcatgctaggagctgtagaccagagctgttcctattcggccatcttggctgccagaagaaattttattaattgaaccaagaagaagaaagaaataaaaacattctgattccaactacccaaccttatttcctcccaagcctccttgacttacttccttctttctgattatgggtattaaaggatatgctcctttaataaatattcagaaactgcacctcagccatgttaagggttttcttgttgcctttcaatttttgaaaaaggacacaaaagtccaaacttccagattctttctttggttccagggcaacgtataatattaactttgtatttttctttatctgtgacatagt

SEQ ID NO: 831753 - DNA, 552 bp, Homo sapiens
cctttctgtttgttagttttccttctaacagacaggaccctcagctgcaggtctgttggagtaccctgccgtgtgaggtgtcagtgtgcccctgctggagggtgcctcccagttaggctgctcgggggtcaggggtcagggacccacttgaggaggcagtctgcccattctcagatctccagctgcgtactgggagaaccactgctctcttcaaagctgtcagacagggacatttaagtctgcagaggttactgctgtctttttgtttgtctgtgccctgcccccagaggtggagcctacagaggcaggcaggcctccttgagctgtggtgggctccacccagttcgagcttccgggctgctttgtttacctaaacaagcctgggcaatggtgggcgcccctcccccagcctagctgccgccttgcagtttgatctcagactgctgtgctagcaaatcagcgagactccatgggcgtaggaccttccragccaggtgcaggatataatctcgtggtgcgctgttttttaagcccgtcagagaagcacagtat

SEQ ID NO: 831754 - DNA, 529 bp, Homo sapiens
ggagagggatagcattaagagaaatacttaatgtagatgatgtgttgatgggtgcagcaaaccaccatgtcatgtgtatacctatataacaagcctttatgttctgcacatgtatcccagaatttaaagtatattaaaaaaattaatttactgaccatttcatatgattttatgttgtttctttaatcagttttgtttccttattaaatcttttggtatttaccatcaaatctataatgtaaattttgtacatttttaacaaatataagcctaccttcatataacaatatcaatttatgtgtagtgcagatgccttatagcagagtgtgagggcttatttaatgggtcaatttgactgggctaagggatgctccgatcgctggtaaaatgttgtttcttggtgtgtctctgatagtatttccagaagagattggtatwtgattcagtagactgagtaaacatcactctcaccaatgtaggtaggcattatcccattttttcagggcctgaatagaaaaaaaaaaatcaa

SEQ ID NO: 831755 - DNA, 624 bp, Homo sapiens
gaaaacgcaattttttcctctcacattaagcagctgtctgtgggattccaccagggcatctgtcctctttgcttcaggaaaaaaccaaaaccaaccaaccaaacgaaattccgtttctctcaggatgmtaattatatgatactcttcaattctgcttttcaggagagactcatcaagaatacatttagcagaaatactttagagctctaagatgtacctgatactcattctctttttaattactaatcagtattttacctatttatatattgttttctatttcatagtacattcctttgctgacactaccatcttgccaataaatccagattttaactagtttttaaaatttgtataacataaagttaaatgcttattttatgggagagttatattgttgaattctaagtagaatattagagaaaggtattgtggataaaaaactttaggttagaagcatacgtagaaaagatattgtgtccttaaaagcagagagataaataaaaagaaagacagagaacaaacgtaattcaagatgactgattacatatccaagaacattagatggtcaaagactttaagaaggaatacattcaaaggcaaaaagtcacttactgattttgg

SEQ ID NO: 831756 - DNA, 586 bp, Homo sapiens
tttattctattttttatttgatcagtaatttggctgaacttagaaaccttatgattttaaaggtattttacttacagggttagagaaatttaaaccattctgagacccatccttgtgtgaaaccarttacgggtttatgtccactttcccgccatttatatgctgaagtcttaaatccccagaacctcggaatgtgagtgtatttggagggttgggtcttcaaagaggtaattatattaaaatgagattattacggtgggccttaatctaacatgacagatgtggacacaaatacatacagaggaaagacagtgggaagacacaaggacaatatggccatctacaagccaaggagagaggcctcagaagaaactaaccctgccgcctcctgtatcttagacttgtaggcttcagaactgtgagaaaataaattcttgtttgagccaccccgtctgtggcactgtgctatggcagccctggaaaactaatacttgacatactttttttttctggatacttctaggaccttcttcttctgccctatgatctgaaatttctcaataatatgtattttcaatttaagtag

SEQ ID NO: 831757 - DNA, 280 bp, Homo sapiens
atagcacacaggggttgggagtcatcttctctgctttctcagcttgtggcctggaatattattttctggggctgaaaccctgaccaagggctacttcctgtttttcattggtttcctgtatccattgagttccagtgcttccaattattaggttgscgcaaaagtaattgcagcttttgcaattactttaaatggcaaaactgcaatatgagcatagtaagataacaatggaagtcattccatagcacctaaggatccctgctccccactccatccaggc

SEQ ID NO: 831758 - DNA, 280 bp, Homo sapiens
atagcacacaggggttgggagtcatcttctctgctttctcagcttgtggcctggaatattattttctggggctgaaaccctgaccaagggctacttcctgtttttcattggtttcctgtatccattgagttccagtgcttccaattattaggttggcgcaaaagtaattgcagcttttgcaaytactttaaatggcaaaactgcaatatgagcatagtaagataacaatggaagtcattccatagcacctaaggatccctgctccccactccatccaggc

SEQ ID NO: 831759 - DNA, 280 bp, Homo sapiens
atagcacacaggggttgggagtcatcttctctgctttctcagcttgtggcctggaatattattttctggggctgaaaccctgaccaagggctacttcctgtttttcattggtttcctgtatccattgagttccagtgcttccaattattaggttggcgcaaaagtaattgcagcttttgcaattactttaaatggcaaaactgcaatatgagcatagtaagataacaatggaagtcattccatagcacctaaggatccstgctccccactccatccaggc

SEQ ID NO: 831760 - DNA, 597 bp, Homo sapiens
ggacagacaaatttatatctactctataactaaagaagaccttagtaacttacattttttatttttttactttttagtkttttgtttgttttggcaggcggaagggggagctgacatgacattcaatccctggaaaatctaacattttttttttttttttttttgtgacggagtctcgctctatcgcgcaggctggagtgcagtggcacgatctcggctcactgcaagctccgcctcccgggttcacgccattctcctgcctcagcctcctgagtagctgggactacaggcgcccgccaccatgcctggctaatttttttgcatttttagtagagacggggtttcaccgtgttagccaggatggtctcgatctcctgacatgatccgccagccttggcttcccaaagtgctaggattacaggcgtgagccaccgcgtctggcggaaaatctaacatttttaaaaactattcttatgtgagtaataccattttcaaattggcaacatgcccatcagaaacatttccaaaatttcttaaaccaaaaaataatattttaaaatacattttctttcagttttagggggtaaaaaaagctaa

SEQ ID NO: 831761 - DNA, 607 bp, Homo sapiens
gacagagtaccatgcagatgggggcaaggttaggtgaaggaccaaggagcagaggaggctgggtggagtggtgtctagcccatgggagaactctgagtggccacctccccacaacacacagttggaggacttcctcttctgccctcccaggtgcccatcaagtggatggcgctggagtccattctccgccggcggttcacccaccagagtgatgtgtggagttatggtgtgtgatggggggtgttgggaggggtgggtgaggagccatggctggagggaggatgagagctgggatggggagaattacggggccacctcagcatgtgaagggagggaaggggctgcctgtgccccaccttgcagggtctgtgcacttcccaggattagggaaagaccgggtagggtctgtctcctggcatcacatctccccctgctacctgccatgatgctagactcctgagcagaacctctggctcagtacactaaagctccctctggccctcccactcctgaccctgtctctgccttaggtgtgactgtgtgggagctgatgacttttggggccaaaccttacgatgggatccsagcccgggagatccctgacctg

SEQ ID NO: 831762 - DNA, 529 bp, Homo sapiens
ggatacccaggcgctgccacggggccagagcagaaatgacacctgaactgtgagaaaccttaaaaccctgccccggttctgaatcctgaagcagcttctgcctttctgtcctgcagctttaaaaattctcgacaaagtttccctgggtgagaagtggtaagaaagggcgcagctgccttgggagggctgttctgctctggaaactttctccaacctaaagcactgggacaggggcgccagccctgggagtgtggacgtgagaagaaggccaagaccggggctgggttcacaggaaggagggcaacggatttcaggagggagatgcgaggagcggagtcaccttagttccctagggcagggaagggaagctggggcgctccgaggggaggagaagagggaacctctaggcgccggccatgcccagggagctggggcacagcgttgggtggagacgctgcccagatgtgagccagggtatggctctagcgcasgcaactctcctgccctctccagcgcgggagcgcagcga

SEQ ID NO: 831763 - DNA, 529 bp, Homo sapiens
ggatacccaggcgctgccacggggccagagcagaaatgacacctgaactgtgagaaaccttaaaaccctgccccggttctgaatcctgaagcagcttctgcctttctgtcctgcagctttaaaaattctcgacaaagtttccctgggtgagaagtggtaagaaagggcgcagctgccttgggagggctgttctgctctggaaactttctccaacctaaagcactgggacaggggcgccagccctgggagtgtggacgtgagaagaaggccaagaccggggctgggttcacaggaaggagggcaacggatttcaggagggagatgcgaggagcggagtcaccttagttccctagggcagggaagggaagctggggcgctccgaggggaggagaagagggaacctctaggcgccggccatgcccagggagctggggcacagcgttgggtggagacgctgcccagatgtgagccagggtatggctctagcgcacscaactctcctgccctctccagcgcgggagcgcagcga

SEQ ID NO: 831764 - DNA, 616 bp, Homo sapiens
agaactcacagtgcgatttactaagagaggattgatacrggcctcatgttcttgctcctgtactcttttcccctgtaccctgaaggtcatcctggcagttaattttatatttgcagaattctttaacagtggattatttcctgtcacatagcagtttaattatcctttatttggatatgatctaaataaaatcaacataatcttagatgataagataaatgtatcccaaacaagtacactgatacctgatatgcataatgaattaaccttcttgatgcctaggataacagctaatggtgcatctcctctcagttagtgaattagaaagccaggcgttcatccaaatatgcagatgtttagccttgtgtagtcaaaacctctgaatgactgacacaagtttcactttgaattatattctttggtgccagacagtggcagagtatcaggcaaataaatgcatgactttaaaaagaattctttcaatcttgaccagtagcagccccagttgagtggagaaaatatatgttttgtggttttacttattaatcttatattggacttatgtaaattttaattagcctttttgactttcctagttttcttctactgaacagtg

SEQ ID NO: 831765 - DNA, 530 bp, Homo sapiens
ccttcatcaagcttcaggttggcttgagctttctcagctctttcttatcaccttcccaggagaactgcttctccttaatgtgtttgagtgattatttcctttctagctacaagawagactcttttggaccccctaggacctggataatttacattaagatatacaatttcattactcccaggtccaaacttgtgttgctgccatttaaattttcttactgttaatcacatcaatcctgtgtgacagatccagaattttcttaaaatagatgttctaagcaagtaataagcctctcatcaagggccatttgggactcttcagtttggctcctctctcatccacatatcgtgtgtttttctaaaagttctgtatcatattgatttttttctgatatttattatgcagaatcattcaatcagatctatcggctgagctttaaaactctcaaccaattcacttaattagtacacgtgacaaacttttattaagacctttctttttgccagacatcatagtggatgctggggtat

SEQ ID NO: 831766 - DNA, 601 bp, Homo sapiens
atattccttcataagatgctaattggtggcttatggattttttggaaaaagtttatttcatcaaaactctaaatagatttttgatacagacaagcttatctttttccctgagtagtcagaaytgattttattgtatgaaactatatgctttgatttagaggctagaagtagaacatttattcctgaataatatcatgttagtaatagaggtgaggcagagataaataagaaaaagatgaaagcagattaaaagtcagattaacatctgcaataaactttatcttcaaagattagtaaatattctgaaatattctccttagaaaaatgaagctacaagttagctcatccagtaggtatctgtgatttatttgagaattcccaagcgtacaattactgagacttattaaaactaatgaactgtcaaaaaaaaaaaaaaaaaaaaaccttgttctgacagttctgacaagatggtaaggaagactttattacagaaccattgcaataggtataaaagctatcaaaatactggaaagaaatcaggctcaattctgaatacagcaaaaactagtgggagatttataacaaaagagcagtttggaga

SEQ ID NO: 831767 - DNA, 595 bp, Homo sapiens
aaactaggtagaaacagaaattacactttaaaagaggaataaatcatactaagcaaaagctgactgatctgctttcctactccttttcaaagaattcattctgtaattctgtacatcaagaggataaaactgtcctttctactcaaagtccaaatcatcaagcaaaggatggaaaaacagcatatcttttagaacctcttctgctctatcacccaacagacttagcacagtgcctggcttatgtaatactcaatgtttgctaaatctgaacttcatctgatctcatctctcccccttatttcaccttcttctttaatggaatctcttaaacctcccaacctccactcaattatttgcctagccttttccatgatggaactacatgcttgacttatgtcaagtgaaagacgcctgatattgagggccacaccttgtgtgagtccatttagtacctgtgctctgactagacaaatccatagagacagaaagtcgattcgtggttgccagaagctgggggggagrggggaatggagaatgctaatggatgtggggttcctttctaggatgatgaaaatgttttggaagtaatgacagt

SEQ ID NO: 831768 - DNA, 620 bp, Homo sapiens
gtggcatgtgcctgtagtctcagctacctgggaagctgatgtgggaggatctcttgagcccaggaggccaaggttgcaatgwgtagagattgtgccactgcactccagcctgggtgacagagcaagaacctgtctcaaaaaaattaaaaaggaaaaaaagaaaagtaatggaactcagtatttggtaagcagtgtaactgtggtagaatttttttttttttttaaagcttaggaattacatctgaaagtcttttaaaaagtataatattctacttagaaattcagggtcatttggaatgcattggtaccagaaaaagtttttgttttccttttctcatttctccctccagcttttttgaggtataattgacaataaaattgtgtatatttaaggtatatgacatggtgatttgatacatgtttatattgtgaaacttaccgtaaccaagttagctaacacgtgtatcaccttacgtagttaccaattttttttatgtttgtgtgtgtgagagagaacattaggatgtactctcttagcaaattgcaggtatacagtatagtattactagctatagttaattatgctgtacattagatttccagaaatttttcatcttata

SEQ ID NO: 831769 - DNA, 630 bp, Homo sapiens
aagtaaaaattccactgccattatcacaggtgtctcttgcctgcaagcaccacctactggcctgtaggatgaactacacaatccaatataattcctgctgacaaaagtaaggaaatgagataatttcccaaracctccacctcctcatctttgtaggagacagtgagcctcaccacacacacaaggctaccacaacctacaaacaactaacatttgggaaaaccactatgctaaggctatctataactaagacatttacacagagacttggccccttgaaatcacacagaagcaaagccaaatgaacctacccaacatgagcaatagtcacactctcaaggaggaaagaagaaacccaccgaattaaaataaattttaaaatattaaatttatttttaaatttaagaatttaaatttaaatttaagaagaaaccagcacaagaatttcagcaccatgatgaaacagatggttgagacactcctaaaagaccacatgagctctctagcaatagctgccaaccaaaatgaaaactttgaggtgagagataaagaattaaagttatgaattttaaggaagttcagtgagatccaaaagaaagtggaaaaccaaacaaagaaaccagaaaaaaa

SEQ ID NO: 831770 - DNA, 630 bp, Homo sapiens
aagtaaaaattccactgccattatcacaggtgtctcttgcctgcaagcaccacctactggcctgtaggatgaactacacaatccaatataattcctgctgacaaaagtaaggaaatgagataatttcccaagacctccacctcctcatctttgtaggagacagtgagcctcaccacacacacaaggctaccacaacctacaaacaactaacatttgggaaaaccactatgctaaggctatctataactaagacatttacacagagacttggccccttgaaatcacacagaagcaaagccaaatgaacctacccaacatgagcaatagtcacactctcaaggaggaaagaagaaacccaccgaattaaaataaattttaaaatattaaatttatttttaaatttaagaatttaaatttaaatttaagaagaaaccagcacaagaatttcagcaccatgatgaaacagatggttgagacactcctaaaagaccacatgagctctctagcaatagctgccaaccaaaatgaaaactttgaggtgagagataaagaattaaagttatgaattttraggaagttcagtgagatccaaaagaaagtggaaaaccaaacaaagaaaccagaaaaaaa

SEQ ID NO: 831771 - DNA, 593 bp, Homo sapiens
tcttattctattttcctaaagaaactgtatttcaaggagaatttatccttcaaatgtcattgaatctatcattatgtgattacttctaagatagtaaatacaagaaattgtttgtggcacatactgttcctgtggaaaaccagttgtacacagcgaaagaggattttacctctggtgttttaagattagcactgaagatatactgaagctcagagttctgaatccacttagccatgagccaccagaaatctttaactgttgaaatgttagtgctttcattgaaagaggcatgaactctggttccctttgtgagaatatagtgcaatgacctcagggtctcagagcttctaaatatgtaattataataagcaactcataaaataccagtattcctattttttattaacagccattttagctcactgcatgtttatttgaaagatcatgaataagccaaccaagaccagcccagacaccctttaattcatctatattgccttagmcttttctaccattcaattttcttaaaacatataattctagtggaatttatctttgaaactctcaagtttaacaatgaaacataaccaaaa

SEQ ID NO: 831772 - DNA, 644 bp, Homo sapiens
cctaatttgttgcatttgctgacttctatggtgcatttatgctcagcatggccaattttaagctgccartgtgaagtcactgacaaggagttgggaagagatgcagaaaataatgatccaattcatgccagctatagcccagcactgctaccctttacctaggtttacctactgttggcattttatcctatttgatttattacttgtgcttcattcccctttacttttcttccttttccttttttcttctcttttcctttctcctttttctgcatagttttttggggggagggattttttaagcatacagattccaaaaccccagattagtaatctacagtgagattcaggatgtgttaaaaattttacaagtgctattgatgcatcaccaaactaaggaacactggcttagtcttgtagacctcatatggcattaccaagattttgaaattcagagcctcatagactccaccttgatctttatctaaggaagaaccacatgacctcccctggaatctttcatcagtgccatggcattcagccttctaatccacctggttttaatgtttggtttgcatgacctattcctcacctagccattttctgttaaatctgacttgcactttttcctcttcactttgggc

SEQ ID NO: 831773 - DNA, 628 bp, Homo sapiens
gcatggtttgctgtgtgaatgtctaaacagtgttgctgcacctctggagtgtttttctgcctcacagtaactagggctgtcagctgaaccaagacccataatgattgagagcttatcaaaaccaaaacgktacatacatttctatgggattaggtggccaacttctttagcaaataatgaaaactcagaaagggcatctgcttggattttgtatcacaaactctacatttctctctcagtccatcagctattcagggtcaattaatgtgtgtttaccttgcttaacagaaactgttctcaggcaagagacactgcttgctttcaacatgaagtgtaaatcagaggctgcgatgaaccatacaaagaaagcaactcaataatactatctaatggaaagctcaaggttctaatcccagctgtcttgcagaagggcatttaattgttctaactgtgatttcctcatctgaaaaatagagattggattagatgacctctaatattggttcaaaatagtctgtgtattttattagtttcaggaatctcaaagtggatttgttaacaaggatgttttaacttaagatgtttgtggatttggggatatgtctagtacccctgcttttttatatac

SEQ ID NO: 831774 - DNA, 569 bp, Homo sapiens
cctaaatctcagaaatcaccacaaaagaacttattcatgtaaccaaacactacttgttccccaaaaacctattgaaataaataaataaataaaggcaaagtaattatggcattggcaggaatacaagaattaacatagatacacaggttagcacagtttttggcttatagttggcatttcataaatgcagcctctcatttcaaccctcttaaatataatctatttaaaaataaaataagagtaaaaataaagttaaataaaaccagattttgatagcatcatgtttttttctctctaaaaaacaaaaacaaaaacaattagaaaaatcctgatggaagaaaagtaattttcaatagcactgaactattcccctgagcctttaaaaactctcatattgaaatgaatgaatatgcaagtgtcacttattgatggcctcctcccataggcagtgaattgctttgaaatcakgtggaggtaattgtaaaaggaagttgtatgcatacaattacttctctggtgcaataaagatcataaatcagttcacaagcaattcatctgcaacttcttca

SEQ ID NO: 831775 - DNA, 502 bp, Homo sapiens
tttggggccggatgtggtggctcacgcctgtaatcctagtaccttgggaggcagaggtgggcagatgacaaggtcaggagttygagaccagcctggccaatatggtgaaaccctgtctctactaaaaatacagaaatgagccaggcatggtggtgcccacttgtagtcccagctacttgggaggctgaggcagaagaattgcttgaacctgggaggtggaggttggagtgagccaagattgtgccactgcagtctagcctgggcatcagagtgtgagactccatctgaaaaagaaaaataagaagaagagggagaaaaaaagaaaggaaatagtgtttttgtagatgggattaatttagaaagctcaggatttagatttcctggatttaggatacgctgtaaatccagtagctggtatccttacaaaagaaaggagaggggatttgagacatagacatacagacacagaggagaagttcacgtgagggaggtggaggttgta

SEQ ID NO: 831776 - DNA, 662 bp, Homo sapiens
ttggatggttttgtgaggacgagatgcaataacttgaggtgaagaactttgaagagtgctgaaatacagtcagaagtcaatcaattttagttgagaatttttacaaagtgtaagagaaagtgcataggctctggagtcacagatacctggcttctctttcttctctgccatttactagatatgtgatttccatagagttgctgcttggaatctcagtcccttaatctataaaaaggggacaatcatacatatttcccaaaggctcttaaatgaggtaatacgtaaatcttcagataacaatagatgttcactaaatgttaatacattttcaccttctctaccactggaaaaccagtagaataaataaaagagggaggaaatagggacattaataaggaaattgtttcataggaagctgtgaacattaggaattagttgaagggtgacttatagccaaatcacaaggtacgagtttctactttgcccgtgctctttcttcccctgccacacctctgggtctctattctgagccctgtcttgggactgaaatggggtattagaaccagtgagtcttctttcctagtatgcagaaccctgtgatctgctgagacagccttcaaagattccatgcttgcaggatrtctgcatgtgagtctgtgtgt

SEQ ID NO: 831777 - DNA, 634 bp, Homo sapiens
accaactgcctatttaaaaacctagagtagcttctgtttcctgatcagatgcagactgctaagattgcatctttcgcctactttaacaagggacaaaaggcaagtgaaacccttttcccatctttactacctgggttttgggaactgccatttcattaggatcaacggaatcagagcagggccttcccagaaaggggaggtggcttgagtttggcagacccgtggcaaactggattggaagccaatgttcttccttagatactcatggtctaggttagtttctctggacatactccctgagatgaggattcaggagttagtgacttattaccagtgtgctattaagagaggcctttaaaagaatgaggtaagccaggcaggatgaagccaagcaggggagagatgcaggtaaggtctcacagagggtagctccaggctgatccccaggggagctttggagtataagctatgccttagagctttcctgatcacatggtcagtcattgtctacaagctgccttaaggacacataaacttccaggcaattttgactggttccagtagtmtgagaacaggcctctgaaaaagagtcccaggtacaggtctttggaaacagaaatacactgaagctggg

SEQ ID NO: 831778 - DNA, 615 bp, Homo sapiens
tcttgaagccacagggtgaggacacagaagcttcatatctgggaccctcccaggcctcacctatggggtatcttcattggctggtcctaattcttgtccttcataataaaactacagttataaatgcagctttcctgagttctaagaatcattctaacgaatgaattatcaaatctgagggggctgtgggaactcccaaatttgtagcaatttgtcaaaaatgtgggttacctattgattcctgaacttgtggctggcgtctgcagtgaggtaagtcttgttagggactgttcccttaacctgtggagtgggctaactctgggtagttagcatcagaattgaattacagcattacaatgtttgacaaccagctctccaggagggaggggggaagccctaagccctagtttgtggtgtttgcatattttcatgttatgaatgctcccactatggccaatagcaagttaccaatgtgatgtcattgatcatggagttgggaagagatgcagagaaatcagctgcttgtaagcctgcrtgagttaactgtagcatacacacaccattgcttataccttttgaccaagcaacaccacttaacaaaattcatccaacaaa

SEQ ID NO: 831779 - DNA, 592 bp, Homo sapiens
aagtccaatgccccatcttmtgaactctggttctcccgtgcttgacatctttacacatactatcctttacatgctatcccatgcacgtgccccaagtgggtaatcctatttatttcatcccaaagctttcgtgtatgctctaggttaaaggtttgggaggcagagacctttccatttcattaacagaaacaattaaaaattgaatattagacatccctgtacttagagctttgctcatttctgcacctcagattccagctgctataaaagttcctttgtaaggccgtctgtatggttgtgtagtttgtacagtgcacagaagaatctggccaagggaggtgagtgagggtaaaatccagcctgtgatctgcttatcaagctgtgagcccgagggaaggcctgtgtttactcagaggtggtccttttcgctaattaatccactcagatgggcacttttatctaagtcacacaagggctatgttaactcatcatttttctctctcctatccccttcttttatctggtctttatatccaaggagcaattaaacaaattcctcgtataaattcatattctcttagcctaaactctt

SEQ ID NO: 831780 - DNA, 604 bp, Homo sapiens
ctgatgtcccctggcataggtgttgctagaagctggcgtttttaggaagcaygtagaactctctgctccttcatagtcagtcagtggctccatcccaggcaggtgctccagacccatcccattcattagtcatctattctgtacaagaaacttgatgaattttatttcatttaattctaacaactatatgaattaggtaatgttatccccattttacagggaggaaagctgaggctcagagcaagtgaacatctaacccagggccaccaacaagagctcagggattggaatctgggagaagatgcttcccttctcttctccaagagtccttttggggctggcaagttgatacaagctccagctcatgtcttcagacaatgctgggtccaaggaaatgcatggatctcctgcattacaaagtttgactccaagagaagcccagaagtggcttccagcccctcctacctaactgtgccccgccgttcaccacttcctgtcttcctgcgacccagtgacagatgtgtctgtgggggctgctacttgggaaagtccaccaggaggagagcatgccaatctctcctctcagatcctctgggggttactt

SEQ ID NO: 831781 - DNA, 388 bp, Homo sapiens
taaaaaaaaactttttgtacagatgggatctccctgtatagcccaggctggtctcaaactcctgcactcaagtgatcctcctgcctcagcctcccaaagtgctgggattacaggcatcagtcactgcrcccagtgtaaaaaatggccaaaattaattgtggtagattgattgtactagcagctctaactcttcatctcttaaaatccatgccctttgccatatgactgcagctcctttcactgaagatgtggagtgtatttccccagcagggtcaggactatggtgaggcaatgaaggcaactgccccagccttaaaattaaggaggcaccaaaatcctcagtaatcaagaaaaataatattgaatgcaatgtttttgaaaaatcaaa

SEQ ID NO: 831782 - DNA, 585 bp, Homo sapiens
caatatatgaaccttacaacaatatatttctaattaccaaactcctgcactttgtgtccttttgtcatatgccgtacctctacatatgctataaaccccacagtacattttttgtttttgttgttttttgagaccatctcactctgtcgcccaaactagagtgaagtggcaggatctctcctcactgcaacatctgcctcctaggttcaagtgattctcgtgcctcagcctctgagtagctgggattacaaacattcagcaccacacccagctaatttttgtatttttagtagagacagggtttcaccatgttggtccgactggtctcgaactcttggcctcaagtgatctgcctgcccactctcccgcctcagcctcccaaagtactaggattacaggcatgagccatcacactgggccccacagtcatttttaacatttctactttaaatagcttgaakttcactttaaatactcttttaaaaagacttaatcttgtgaagtaggtctgctggagataaattctttcagcttttgtctgtctgaaaatatctttatttctctttcatttttaaaagatatttt

SEQ ID NO: 831783 - DNA, 611 bp, Homo sapiens
gcagaatccaggctaaaagccaggataagggcagatgggagaaaatacaagacgaactgtcttggtgtcttcccttctatttggtaactacacaactacttactcttccaacgaccacatgtctgttgaaaargtgcacagcagagcaagagtatatgggctttagaagcagattaatcctgaccaggtctttcaccggctgctgaacactccttgaacacttacaatgcatgtggcagggtgctcagtgtgttccacgatatccccattttccagataaggaaactgaggcacagagaagtaagtaaactgcccaagaccacacagagagttaaatgggaaaactaggatttgaacctgcatatcctaaggcctgagttttgttcctaatcattattatgccaaactgcattgcagttttttttttcaactctgtctgatgattaaaattctctgtaagatcccagccaaatagctgagtcaaaataattataattaaatcctccatttgtatagggctttgcagcttacaaaatcattttatgtacagtattacctttaattttccaaaaaatacagttaaataggatttatttctctcttccttttaa

SEQ ID NO: 831784 - DNA, 606 bp, Homo sapiens
cagacagaaagaataaaatgtatcacttccatttctggccaagttggagtaacaggataattgtcaagactggtataacagtcagtaaagggcagtgatccctggaagaaggaaggcaaatgaaacgaatcctacgagtcctccagcttactgcctgagagaatttccagctcaaggtgtctggaggaaagggagaactcaggcagagctcagtgaactgcctgagttgagtgaattgagctaacagtccagggagaccaaggcaactagagtttgcaaggccaagtatcagagaaaagagagctgcagaaagagccacagagaatccccctcaagtattcagcagagtgctgatcagtgcatacatgtgtggcaactacccagcactggggaaagaaatatccaaaaagatatttccagattggaaaacctcatgattccccacgccacgaggagagcacatagaagagtgttttcactgtcatggagaataattagttrtagactaagtacaactatttcagtcttccaaatcttcaaagcaagactttccaaaaggatcaaactgcttctaaacaacttaaacacattccagaacaaagttca

SEQ ID NO: 831785 - DNA, 604 bp, Homo sapiens
ctccagcctgggtgacagagcgagactctgtctcaaaaaaaagaccaaaaacatgatacccataaatacagccacataatamgtccatgttatgagtagaagattcaaaaacaggttaaaacaagaggtcaaaagcatgcaaatgctttttaattctttaagaatactcattaaatcatataaatgacataaaactaatgcaaaattacaacattgtaatcataataatacagcaattttctcctatcataataaataattaaaccatctacaccagggctcagataaaataacaaaatcagcaataagtaatatttattaagttcctactatatgccaagagcattatattatttcatttaatcctcaccaaaaaaaaaaacctagcaaaatacccaacatatactttttatagatgaaaaacatctgagattaaaaaggttaattaatatccccacagtggcagctctgggattcaaggtcagtcaaacttcaccatgctacatcctagaattacgaaaatccagactatcgagtctcaaggttgaggaagttcccagatttttctcatcagagcagcacatctcagatgttaatgtgcaga

SEQ ID NO: 831786 - DNA, 579 bp, Homo sapiens
cagtcatcattgggtgattttcttttcttgaaacgtcttttatcataatgttttggtgtttgggacatagaagcttatacaatgaattaggaattgttccctcctctcttttgtgaaagagtttgcccaatgttggaattatttcttcctaaaatacttgatagaattcacttgtaaagtcatctgggctagggattttccttgtgaaaatgttttaaattaagatttcaattgtcttttataggtacatagctatttatgtcttttatttattcttctatctatccattgtggtgagttgtgtttttcaaggaatttgtccatttcatctacaactttatgtgttggcataaagttattcataatagtcccttgttgtcctctattgtctgtagaccctgtggttatagtctctctctctcatgccctatgttggtaatttgtrggtttttttctcctcttattttctttgatatcactaggagtttcccgattgtattaatattttcaaagaacaaactttcatctttgttgatttttgtttattatttacttgttttctatttcattaaattttct

SEQ ID NO: 831787 - DNA, 579 bp, Homo sapiens
cagtcatcattgggtgattttcttttcttgaaacgtcttttatcataatgttttggtgtttgggacatagaagcttatacaatgaattaggaattgttccctcctctcttttgtgaaagagtttgcccaatgttggaattatttcttcctaaaatacttgatagaattcacttgtaaagtcatctgggctagggattttccttgtgaaaatgttttaaattaagatttcaattgtcttttataggtacatagctatttatgtcttttatttattcttctatctatccattgtggtgagttgtgtttttcaaggaatttgtccatttcatctacaactttatgtgttggcataaagttattcataatagtcccttgttgtcctctattgtctgtagaccctgtggttatagtctctctctctcatgccctatgttggtaatttgtaggtttttttctcctcttaytttctttgatatcactaggagtttcccgattgtattaatattttcaaagaacaaactttcatctttgttgatttttgtttattatttacttgttttctatttcattaaattttct

SEQ ID NO: 831788 - DNA, 606 bp, Homo sapiens
ccaccactaccaacaccggcctgttctttcccatctctgtaaatgacatttccatcctttcagctggggaagcaaaaactcttggagtcatccttgatcctrtatataatcagaaaatccttttgaatcttccttagaaattatttagaaattaaccatttttatctccacagctactatccttttatgagccactcatctcacctgtggattattgcaataacataatattgttattggattatagcctcttaatattcctaacttcatccttactaggcttcagtctgttctccatacagagcctgggtggagaacatcatcttgtaaaatacaaatagatcatgtcagcaccctgctcagaatccttcctgtctcagtgccttcccctctttttcagagtaaaatccctagagctcttacaatgcccacaaggtcctgtgtgattgggctctccattactgtcctcgttgcttccactcactgtagtcttattagcctctagtctgttctttttgttttgttttgtttttgagatggagtcttgctctgtcacccaggctggagtgcagtggcgcgatgttggctcacctcaagctccgcctc

SEQ ID NO: 831789 - DNA, 574 bp, Homo sapiens
attggatcaccaagggaggaagtattaacagggaagagaaatagaagtttaggkatggacccaaggtcatacaaaaggccggacaatgaggagaagccagcaaacagactgtaggatagaccagagaaataagaggaaaacaagaagaatgaagtcttggaaactaacaagaagaatgtaaggatgagggtgtggtcaactgggtcaaatgttctcataggcgtagtaagttcagaactgcatattgatcattaaatttaacaacttggaggtcactgatgaccttgacaagagcactttcagtgaagtagtaagtctgtttagataaaataaaagaggaaatggaaaaagttaaaaatttcaggtatggaccaattaatacaagttttgcaataaattagagaagagaaatggggtggcagatagaagggaattggagtcaagagtggactttcagagagttcaatgtttgtatgctgatggcagttatctcctaagagaggaatattgttcaggcaaggaagaaggagttttcactgaagccatgtccttatgtagaagagacaggatgtaa

SEQ ID NO: 831790 - DNA, 468 bp, Homo sapiens
ttctaggtccagaggtaacaaaatattatttctaagagactttataaaaattactaaaacccaggcttatttgtttgtttgacctgcaaaagaattatagggaattcttgggagactgyatagtccaactagggttcctcctctactatacataacagagttggtcaactaaactctagatcagtgtatttcacaaagaaggttatgccttactagtgagttatgaaattaatttagtggattgttatcggtgcttttaaagaatagaaaagaaaaaggaaatactaatgcatcacatgtgataaggataaaacagtttcatgaaaattttgttttaattgtgtttgagtatattgattacaatgtaaaatattttttagatgagtgcaataaaaaaagtttgaaatccaatgccacaaataaatactttctagtgaacacaaatgcattctttcaaaatatgatcct

SEQ ID NO: 831791 - DNA, 617 bp, Homo sapiens
gaaagatttctacaatatcttgttcagccatatagacttaaaattataagatagtcaaatttataaacttcttctgtggtttgtgccttttttgttcattgtgcttttttgaaaatcccagtttatcccaagtgtatgaagttcttccacatttttcttctgaatgatttaaagttttattttttagatttaagtcttaagtctctctggatttttattgttactttggtaagagcagggttattattttatttctttacctaaagaaagccattttgtcatcatctctctagccttttctagtgaattataatattatctttgccatattctcaattctagtgttgtcttgtggctattactgagctgtgtttgttgttgttgttggtggtgtgtgtgtgtgtgtttgtgtgtgtatatctgtatctggccctccttgaggactacactgttttaattactatcattttagtataagtcttgattataaagcaaattcagcctcattattttattctcatrtattagaatagccatagctacttactgaacattttaattttgaaattggactctttcattacatcaaaagatctgtttgggtttttattagaagt

SEQ ID NO: 831792 - DNA, 596 bp, Homo sapiens
gaagcttgctatccagttaggtaggactgatgggagttccctccttcaccatttgcacattttgtgacacgaatcaagttaaattatgcctctgagtttcagtttccttttcagactatttattttgatgattacatgagttagcacacagaaaatgtatagtggtttttgtgatatactttaggtaatcggtaaattcttagctcaagaaatgcttatataaactgtcccttcaattaatttctcacattgatagctgacttttgttgttttatctgggaacccttcacataaacatcatataaatcctggcacatcacgtcaaccctgacagcaagaggtttagagaggacgtgtttaaatttgatccagtggtgcaaatatcaaagtggttaagtaaacataggttgcttcattttgcattctcaataaggtctcacgttcttggtaaatttcagagttatatgaaaataagcatataattttggtaaattttaaatgtaccagggaatcagtrtataaagggatctcaattattaagccatcggtacaatatcatgttttgttacacagctttcatgatttcttccgctaaa

SEQ ID NO: 831793 - DNA, 597 bp, Homo sapiens
ttaggcatgagaaaaacaaggtagtggccaaaatggctggacctgggrgtttcgacaagcagcatgcaccctgttgccactcagacctagcccttcctttccatccctacgactgcaccgtggcttgcaacctgcaattaatcaccactcatctccacggtggcagctcctgacacatttccctgcctcaggcctgcccctccattccacttccacactagagttcaagctaagaaccttcaatagccacccactgccgacagaataaagtccaaactcctcaacagcacccttgagaccgctggtcactgggccctagctacctccagacactactccaccccatcctgacacacaccttcacaccatctgccatggacaggcacttacttcctcctgaaccagctgatcccaaccaggagttggaaaatgaaagaaagctgaatgtgtgtaaagtttttatcagcaaaggagaaaaaaatatttcagggttgtgaatttgataagcaatctggaggagaatgaacatttttctctgctgttctacttttacagcaatcatcctatagggctgccatcttctgaactgtttgggta

SEQ ID NO: 831794 - DNA, 632 bp, Homo sapiens
gagctcagcttccaacctgcccaggagtgatccctgattggaagggatgtgtgtgtgtatgtgtagctcttcccttcctctcccataccatgggggctggcctggagagtgtgccttggtcttccttcccactgtgctactgtgctgtgggagctgatttggggagggggttgcagtcgccttcagagctggcagcttgttggggtgtctgtacaattcgagagccccattgaggccacacagctggcttggtgggtctcctagcttttatcagggatacctacctgactcctgtctttctcaattgatcttctttcaaatgttgggtcagggaaaagggattgtattggcctcttaaaacctcaacatgaaaaaaaccaaaaactcaaatgtaaattatctgtttggagtacacagagggaaatcttgtttctgacccagaacctttgtctgagcccagaggtccctgagaaggtggggctggtgcagggtgatgctggttgkttggttgagggggtagagcttcttggggtagagctttttttggggttgaggttatttgggcctaaggccatgtattcattctcatgctgctaataagaacatacccaagagtgggtagtttataaagg

SEQ ID NO: 831795 - DNA, 582 bp, Homo sapiens
gaagaccagacttacctgtaataccccatagcgcaagatgtacatgttcctggatcatctggaaaaaaaaaataataaaaagtaataatcatgaggaattcgtcatttggaaaaatagggtctgaaagctgtagcttgagataaacaatcctgtgggatagtttcatgaaatgtactgtccagaaataatatttgaacagattgtactgtttttaattagcaacaagatgtacactaggatttatctttatcaaaggtagtaagaattctcataaacacttggccctgactttcaaggaggaataggttcaagctactgggtcttcgaattaaagatcaacgaccatccacattaagaaccccctggcctttactgagatagagggatcaaccaagtccacacacaaatatttggaaggggctacaagcttctgaccctgaatagagggttttccatcagttacccaagaatcttgccaatggaagtgagcatcatttggggcactccttcgaaatctgcacaattatttttcycaagtatccacttcatgttacgcccttcgcaactttcttaaaaaaact

SEQ ID NO: 831796 - DNA, 634 bp, Homo sapiens
caagttatctaccagatgtagctaagattattaatgaaggttgctacactaaacaacaaattttcaatgtaaatgaaacagccttctatttgaagaagatgccatctacmactttcatagctagagaggagaaatcaacatctggcttcaaagcttcaaaggaaaaggtgtctctcttattagcagctaatgaagctgttgactttaagttaaagcaaatggtcatttggcatttcaaaaatactaatgtccttaaaagttatgccaaatgtactctgcctgtgctctataaatacaacaacaaagcctggaagatagcacatctgcttactgcatggcttactaaatattttaagcccgcccttgagaattattgctcagaaagaaatatttcttttgaaatattactgctcattgacaatgacctagtcacttaagaactctgagggagacgcagaaggagattaatgtcctttttatgcctgctaacacaacgtccattctgcagcccatggatctgggagaaatctctacttttaagtctattatttaagaaatatatgttgtaaggctatgtctgccatagatagtgattctcttgatagatatgggcaaagtaaattgaaaaccttct

SEQ ID NO: 831797 - DNA, 613 bp, Homo sapiens
tgaaatccaatataaaacgaagagaaattaatgccttacaagcaagtaattcattagtaattaatgtattatataaaagatagtttatattttgttctgccttgaacatattggtcctctttctttatactatcacagaataagatggcaacctcctcctcctctctcagtagtaccaaagataggtttttttttaaggtagttatcacagaagagactacagttagcttatattttatgactgtttctaccacagttgaaagtattgaaatttattctgactgtgatgattatgctcttttacacttttgggagccaagtaaactgtctacggttttaattatgctaaaaatattgaaatgaaaatgggaaaacaaatgtcacttttatcactatggataaatttcctgtgatttcacatggttcaccagaacatttatatttctcttttaaaatgctaaatttaggggaaatatctaattttttwaaaatatacagtcattcccagaactgaaaatctaaaaattcatgctaaattgactctcatagcaaattgacccttgtagtaaattgacctagaaaaacagatttcatggcctggtgaaaatgtaca

SEQ ID NO: 831798 - DNA, 613 bp, Homo sapiens
tgaaatccaatataaaacgaagagaaattaatgccttacaagcaagtaattcattagtaattaatgtattatataaaagatagtttatattttgttctgccttgaacatattggtcctctttctttatactatcacagaataagatggcaacctcctcctcctctctcagtagtaccaaagataggtttttttttaaggtagttatcacagaagagactacagttagcttatattttatgactgtttctaccacagttgaaagtattgaaatttattctgactgtgatgattatgctcttttacacttttgggagccaagtaaactgtctacggttttaattatgctaaaaatattgaaatgaaaatgggaaaacaaatgtcacttttatcactatggataaatttcctgtgatttcacatggttcaccagaacatttatatttctcttttaaaatgctaaatttaggggaaatatctaatttttttaaaatatacagtcattcccagaactgaaaatctaaaaattcatgctaaattgactctcatagcaaattgacccttgtagtaaattgacctagaaaaacagawttcatggcctggtgaaaatgtaca

SEQ ID NO: 831799 - DNA, 603 bp, Homo sapiens
ggataccctaagaaaggaagcagatgaggagagacatagcgcaaggtatggggaaaggggtagggagcttctgtgcccactaggggcatgctgccctccatatgttcagctagccagaagccgtctgaatcctgtccttttggttttgatggaggttttcattctgtaggcgtgactgattaaactgttgtcctgccactggggatcaaattaaccttctgcctcttcccgaatgctgggggggggggaggggcagctgaaagccccaaccctcctattccccaaactagagctacctaggtgctgccagccatgagtcaactcactagcatataaaaagacaccactttgtggagattttaaaaattgtagtagttgtatgccaggaagcagggtctaggaccaaatatgtattacacaatatcacacctgtgcataccagctcaatcagaacacaaaatttcaaaaatgatactgaattttwaaaaaaaaaaaaaaaatagagtctctatctcaaaaaaaaattaacctcatcctggacctcctgggctggaggcatcctccacccttcggctctagagtagctggggctatagctacata

SEQ ID NO: 831800 - DNA, 614 bp, Homo sapiens
ccctacaaggtgggcatagaaggagcccatggatcctacagtgagaagagcctacagaggtctaaacttactactgtgtctattcaaagatccctcatatgtcagcagaaacaaaaccattcagcattttaagatattgagatactctgtgtctttagtgcacggcaaaagagaaaataatttaaatcaggactaacatattgtttatactgaaatttcatttgagcaacgatcaattttcactattttttatattttaggttatgtctttgaaagcagggatagtatgtcctgtttactgccaatctccaaatcctggaagatgtgcttgtcaaatattaaggacacaaaactgtatcttttatttatgaaaagtaaaccacaaatttatatgctctcttagataattgctaaagtcacaaaaacagcctagggattagtaggtggctttaccagtaacataattggagtatttgacaattttgtggacttactgctcaacacttaaatcaagtwgcatgagaagaaaactaaaatgattagtgaatttgaagacgaaatacatgtaacaaataagaacatttttaaaactcatatctgtcatttcccagctt

SEQ ID NO: 831801 - DNA, 622 bp, Homo sapiens
tgcagtgagccatgatggtgccactgcactccagcctgcgcaacagagtgagaccctgccttaaaaaaaaggtaagtctgtgcatcaatttaacatgcatatattaagaagtaatgatayggacaatctcaactatatactgatgaagggagaagacataacacatttacactgtgatccgattaaaatgcagcagcatgtttgcctctgaataggcctgtttgtcactaaatgcagaaaaaatataagtacaaattataagcatagaaatatttgcattgcttattgtttaagacgtgaataatttcagtaatcacctcctatatttgcagttatatgttttagttcatccaggaaaatctgtgaattatcattcatgcaattgtgtaagcactaagttcctcagcattttataataataatttctaaacatcaattgtttattctgtgacaggcattatactgataattaaattttaattctcatattctccattaaatagattccactattcagattttacaagtaagaaactaaagctgaaaaggtgaagtaacgtattaaaggccgtactaagaagtggtaaagtaagaatgcaacctaagttttaactggctttga

SEQ ID NO: 831802 - DNA, 528 bp, Homo sapiens
aaacacgaaattgtgataaaaaaaagctaaatgacccagaaaactccataatcctctgaggaaaaaaaaatcgaacggaggcatcgccccagattgctgagaacccagcaaggggacacaggcagaccagagacatgctctgactgacggcacttgttggcttgagtctctcctcaaagccccacggccaggtggcctggccacagcagtcagcaggtcgtcttctgctatgaaggggccgacgcagaaatcaaactgggctcaacgttaacacagctccctgaagaggcctcaggacaaagtcatggcattgaaaacgggttgggcagcatggctgctcccttccggctctgtccagtgtttctaacgatgggacaatctgccaggcatcagtttcacacccayggtgcatgcagaaacatggcccaagctcgagacttgcaatctaattcatgcaacctgacagcacgattcaaacaaaactgacgctgtggggagaatgacagtggcaagtgcacaaacaggttc

SEQ ID NO: 831803 - DNA, 626 bp, Homo sapiens
tctacattctttcacaacaggaagatatgctccatgtcttgctccccagcgcgcccctggcacccagtagagagtacagacragataaacatttattgaatgactaattaaaggagtaattatactccctggagcttctcaacataattttaaacctccttccaaccaagaaacctccttgtatttcacagtagttctctatacttctataccaagttgtcaacattaacccccctcatggtcttactgagttgtccctaaggagcacccaagtttacaaaactgaggtctttgccctttacttattgatttgaaaggcgctttatacattaagatattacctttgcctaacacattgccaatttttttttaccattttgtcattgatactttaaatttattaataagctttagtatttgtttgctgatttttttactcctatatagaagtttaaatttttatgttcctctcttcagtgttgtgcttagaaaattttttccttcccagagatcatatgaattatacataattatatctattgttctctggcttattttaatgtaaattgtttccatttaatccctctggaaattgcttcactccgatgggaaggatccaactttat

SEQ ID NO: 831804 - DNA, 608 bp, Homo sapiens
tcatcctcggaagtcatgtgaaattgcatgaccttctaccaggctattgtttccaagtaggaagggagtggacagaattcagagacagagagagatgagagagagagagaggagagagagtgagtgagatgagagagagaggagagacagagaggagagaaagtgaggagagaaagtgaggaaagagtgaggagagaaagaggagagagtgaggaggggggagagagagaaagggggggagagagagagagagagacagacagacagacagacagacacaggtgatcgtagacacataaggcccaccagtatatcaaagcccaagtgccctgggtcaaggctggcctctacagttacgcaagtctgaaaggcatcgctctctgagtcttccctgactacttttgtcattgataattgctcttctatgggattccatagcacttgtaatttgattcatgcagtctagcatgaagatgccatcttacattactgttgattgtacttggcttttctacttaacaaagtaaccagcatctctaggttgggccaaatcttakttttgatcctacagtgctcaataaatggtgccagtgttaaccttgctcggg

SEQ ID NO: 831805 - DNA, 444 bp, Homo sapiens
  misc_feature 1, 2, 3, 4, 5, 6: n = A,T,C or G
nnnnnntatcgttgctttttatcttgttacctattcctatccatcttggaacacsctttcaaatcgtagactagagcaattgactgtcaagataggatcagtttgtctgaaaacactactttggggttcatacatcttactgcccttactgccctttatatcgacctttcaactttgtcagaatatctctgaagggaacaaatctcaccatttgtcatcggaagtattgaaacctctggaagagtgtatgggggacttggcaatggcaacccttgatagggtagttccatcagtcactctggaaagggcgggtcttttgtgaggatgtgccagcagcactctaaagccacaaaaacgtgagtttaggctccctttgtggttaccgccaaaggagaactgaaaataggctgagttacccatatgtctcctatatcacctgctgag

SEQ ID NO: 831806 - DNA, 561 bp, Homo sapiens
tgctgagaagaatgtatattctgttgatttggggtagagagttctgtagatgtctattatgtacgcttggtgcagagctgagttcaattcctggatatccttgttaactttctgtctcgttgatctaatattgacagtggggtgttaaagtctcccattattattgtgtgggagtctaagtctctttgtaggtctctaaggacttgctttatgaatctgggtgctcctgtattgggtgcatatatatttaggatagttagctcttcttgttgaattgatccctttaccattatgtattggccttctttgtctcttttgatctttgttggtttaaagtctgttttatcagagactaggattgcaacccctgctttttattgctttccatttgctcggtagatcttcctccatccctttgttttgagcctatgtgtgtctctgcacgtgaaatgggtctcccgaatacagcacactgatgggtcttgactctttatccaatttgccagtctagawcttttaattggggcatttagcccatttacatttaaagttaatattgtc

SEQ ID NO: 831807 - DNA, 595 bp, Homo sapiens
cacagaattgaacctttcttttgattgagcagtttggaaaaactatttttgtagaatatgaaagtggatatttgaaaggctttgaggactatggtgcaaaaggaaatatcttcacattaaaactagacagaarcattctcagaaactttgtgatgcatgcattgaaatcagagagttgaacctttcttttgattgaacagttacaaaacggtgtttttatagtatcttcaagtggatatttcgtgccatttgtggcccatagttgaaaaggaaatatcttcacctataaactagacagaagcattctgtgaaacttctttctgatgtgtgcattcatctcacagagttgaacctttcttttgattgagcagtttggaaaaaccctttttgcagaatctgcaagtggatatttgaaaggcttgaggcctatggtgcaaaaggaaatatcttcacattaaaactagacagaagcattctcagaaacttctctgtgatgcatgctttgaaatcaggcagttgaacgtttcttttgattgaacagttacacaacggtgtttttgtagtatctgcaagtggatatttggtgccatttgtg

SEQ ID NO: 831808 - DNA, 548 bp, Homo sapiens
cacataattaattttgctcttctctgtggacctcagggcattactactactgaagcccacacttggtcagctatcatctctggcgtctatattttacaattcagtgtgcagagagaaaaaaaaatatgtcctttccaaactctaaatttctttctgaatatttaccttcccttgagaagattgatgctcagtataatatattcccaaacactgcctcctgtgggaaagaactcacatcctacttacaaaggtctggccctactacatggctggccaagagaccagttatattaggatactacaaaatgcacatgactgtgcttttcctcttctgcaaattttcttctattgtgtcaacagcaagttttcttttagttttgtgaaacattgtgtatttgataataaagttttaatttcttgtgtactatctcatgawtattttgtgcagaatattgtcttgtaaatttttagttgcatcagttctcattcttagaactcagttacaaattcataggttaacctttggaaaaatcatggtgacaagtttg

SEQ ID NO: 831809 - DNA, 590 bp, Homo sapiens
cccattcttcaccccatgaatcaaaaagtaattttgagacatacctttcataaggctgtagctgccatagtgatttctctgatggatcttggcaaagtaaattggaaatcttgtagaaaggattcaccatcctagatggtatttaaaataattgtttaatgtttgtaggaagaggccaaaatattaacattaacgggaatttggaagaagttgtttccagctctcatggatgactttgagggcttcaagacttcagtagaataagtaactacagttttgatggaaagagcaggagaaccagagttggaagtggggcctgaagaggtggctgagttgctgcaatctcatgacaaaattttaatgaataaggagttacattttatggataagcaaagaaagtggtttcttgagatagaatatattcctggtcaaaatactgtgaacattgtcgaaatgacaacaaaatayttagaatattatgtaaacttagttgacaaagcataggcaaggtttgagagaagtaactccaatagtcacataagttctgtgggcaaagtattatcaaacaacatcccatgctacagagaact

SEQ ID NO: 831810 - DNA, 616 bp, Homo sapiens
atgacaacaaaatatttagaatattatrtaaacttagttgacaaagcataggcaaggtttgagagaagtaactccaatagtcacataagttctgtgggcaaagtattatcaaacaacatcccatgctacagagaactgtttcatgaaagaaagagtcaattgatgtgccaaacttctttgttttcctattttgagaaacaggcacagccatcccaaccttcagccaccacaatcctgattagtcagcaagcatcaatattgaggcaagaccctccaccagcaaaaagattacaattgctggagactcagatgcttgttagcatttttaagctataaagtatttttttcaccaaggtatgcacattattttttaatgcataatgtcagtggacacttaaaacactactatatagtctaaatataacttttatatgcactgagaaaccaaaacaaaattgtgtgattctctttattgctatatttgctttaatgctcaagcttggtaccaaacttgtaatatctctgaggtatgcctgtattaagtttatttcagcttgcatattttaagaagacagattggaaaatattttttaaaacatcagccaagtgatgaaag

SEQ ID NO: 831811 - DNA, 535 bp, Homo sapiens
gattcaaagataaataagatgaaatacctgactttgtgatgcctgagtccagtaatgggaagccctccatgccacttctctgtgaggttttgtgagcgttccctaagattacataagtgttttaatttctctgtacagtatttaaagctacatttaaaatgcagagtgtcttctcatctatgtccccacttccttgtttcatttttgaattcctttcatcttcattctacacggcttgagttaattctggtatctccaaaatacagatatgcaaaagccaattgaaagagaagcatgcttgcatggacagtgtcagggaactacatcatcaatctacttccttcttgaccccagcaacttttcagaagctttgattgagttccgcaaattaccatcctgttctctaaatctttctgcgtgtgagctttttgaggtgttctttaggtcaattcaaggatatgtctccagtcccaaagatsatacaaaatatttatttttgagtctgggccagctttttcaaaacaaatacctaatt

SEQ ID NO: 831812 - DNA, 534 bp, Homo sapiens
tatggagttaaagatgtaaaatctaagaaatcaagcataatgaattcccgtgayttttcagcatatttgtcaccggataagaaaaagttgaggggaaagtgatgcacggccaatgttatgattgtttcacctagtggattaagcaggattggagccttcacatagactgatttttttttttcaaaaggttcttcagctccacctggaaacttctgaaattatgtttgataagttggaatatatcaaggagatgcaatcactctgattatatattctcagttggctacctatcacttctcagaccttaactaggtcatgtgaaggtagcttagaaaaactgggtaaatcgtgtatcacacagtcagaaaaactgtgaaatcacattcaggatgatgacaataaatagtggctgccactcttttacacgtatttttaatacttttaatattttattagcttttatatttctagcttagctttgaaaataaaataaatattgtgttaagatatttctcatgggctttttatctttga

SEQ ID NO: 831813 - DNA, 590 bp, Homo sapiens
  misc_feature 563, 564, 565, 566, 567, 568, 569, 570, 571, 572, 573, 574,575, 576, 577, 578, 579, 580, 581, 582, 583, 584, 585, 586,587, 588, 589, 590: n = A,T,C or G
gtgtgtgtgtgtgtgtgtgtgtgtgtgtatgtggcagttgtgaatgggattgtgttcttgatttggctgttggtttgattgttgttggtgtataggagtgctagttatttttatacattgattttatatcctatgactttgctgaagtggtttatcagcttaaggagcttttgggtcgagactaatttggttttctatacagagaatcatgttatctgcaaacagagatagttgacttcttctcttcctatttggatggcctttctcttgcctgattttgctggctaggacttccaataccatgttgaataggagctgtgagagacagcatccttgtattgtgccagttttcaagaggaatactttcagtttttgcccattcagtaaaatgttggctgtgggtttgtcatagatggctcttattattttgaggtatgttcattcaatacctagttcattgagagtttttaacatgaagcaatgctgaatttttttraagccttttctgcatctattgagataatcatgtggtttttatccttaggtcttttttgtgatgagtnnnnnnnnnnnnnnnnnnnnnnnnnnnn

SEQ ID NO: 831814 - DNA, 555 bp, Homo sapiens
tttataataaaatttagtgcatttccctactagtttggcactatgattttttaatctttgattttttaaaacaataagcaaagcattttttttacaaattcttattatagyttataatttcaagtaactaaagatttaaaaaatatggattaaatatgaagtttttaaaaaattaggcacagaaatgacaaaacatgtccagtttaattaacattttgactctaaaattaaatagccagatttttattaagcatttgaatgtttttagagtacctgggttcaaatgcttttcttaagtcttcttaactctatggtctaaattctttgacttaaattctatgaattaaattctctgaacatcactttcttccataaaatgatggtaataatagctacttctaagtgctatgaggattaaataaagtggaactttcacagtggttgatgaatccttgctctttcatcagagttaatgcagctagagattaaggaacaaattggtagttaatggaggaatcataaattgttggtccctgctttttgcttaccatgcca

SEQ ID NO: 831815 - DNA, 555 bp, Homo sapiens
tttataataaaatttagtgcatttccctactagtttggcactatgattttttaatctttgattttttaaaacaataagcaaagcattttttttacaaattcttattatagcttataatttcaagtaactaaagatttaaaaaatatggattaaatatgaagtttttaaaaaattaggcacagaaatgacaaaacatgtccagtttaattaacattttgactctaaaattaaatagccagatttttattaagcatttgaatgtttttagagtacctgggttcaaatgcttttcttaagtcttcttaactctatggtctaaattctttgacttaaattctatgaattaaattctctgaacatcactttcttccataaaatgatggtaataatagctacttctaagtgctatgaggattaaataaagtggaactttcacagtggttgatgaatycttgctctttcatcagagttaatgcagctagagattaaggaacaaattggtagttaatggaggaatcataaattgttggtccctgctttttgcttaccatgcca

SEQ ID NO: 831816 - DNA, 551 bp, Homo sapiens
aatgaattgtggtcaacattaaggcaagaatgtggttgttgtggtaataaacaagatatgtaaaaacaacatgaagctattaacaattaaagggagtactctgaataaaataaggtcattatgccaatcagtccagtattaattagaacgccacttctagtggttacttggaggatgatctgatgcaagagataaggaagaccaaatggctcaagacctaaaaactgaaacctcaaatggtttaagtttagtgaggaataaatctcagcgattatattcaacaaacactttagatgaatgaggtgaccaggactaagacttgtttagaaaacttgccatgcatgaagctacatattcctttacagtggatgcatttatgagaaatagtgggaggatgaaaaagtttagtaataaattcccacttgttctaaagagtataaaaattttctktgtcatcaatttgaagactacaacccatttacaagtaagaacattttacaaatttgtatgacataaatggcataggtgataaataatatccaattttcaaa

SEQ ID NO: 831817 - DNA, 610 bp, Homo sapiens
caataaggatcaaaaaagacaaaaaagggcattacataatgataaagggttaaattcaacaagaagayctaactatcctaaatatatatgcacccaacacagaagcacccagattcataatcaagttcttggcttcaaagacacttagactcccacacaataatagtgagagacttaaacacctcactgagagtattacacaaatcactaagacagataagtaataaaaatattcaggacctgaactcagccctgaatcaaatggacctgatagacacctcaaaactctccacccaaaagcgacagaatatagattcttctcactgccacatggcacatactctaaaattgatcacataatcaaatgcaaaacattcctcagcaaatgcaaaagaactgaaatcataacagcaactctctcagaccacaacacaatcaaattagaaatcaagactaagaaattgactcaaaaccatacagttacattaaaatttaataacctgctcctggattacttttgggtaaataatgaaattaagacagaaatcaagaagttatttgaaatgaatgagaacaaagatacaacataccaaaatctctagacacagct

SEQ ID NO: 831818 - DNA, 525 bp, Homo sapiens
catactcttgcttacctccattgtgaagtagtagatcgatttcatctccatagtcaggtcaatcacygcagccaataccataactccctttttagcctgttgacttagaggtaggaggagccaaaagtggccaagtggcaatcttaacttccagtttaatagaactattgttgtgtctcctggaactgagatctctaggccagcagaacataatgtcacgggaacaggaagcaaaaattttgttagtggttcactgcgggtgatggtgagtggtgccacttccacctcttgattcctggacccatgaatcctggctgtgggagaaacagtaccatatattggatgctgatttatggcatacacagccttctggagaactttgttcagccttgtgaagtattgtcacctagttggcattgtaattgtgactttcaaaaggccatttcaccgttgtatcaatccagctgcttcaggataaggaacatggtaagaccagtgaattccatgagcatgagcccactgcca

SEQ ID NO: 831819 - DNA, 544 bp, Homo sapiens
gctcacattaatgtggcacgcatcatagtctcttctatggtaaaaagactttatggacgctgtgattttaaaatgtcattatttggcaattgaccacacagatgatctaggtcagaagtcctaaactaccatttcataggtcaaacctgacttgcagttatagttctctttttgttttgttttcctacataattgaaatagagattttacataaaatcccagtttccgacatcacttgcaaaacataagattggtcaccttgcgcttgaattcccacagagcatcagtcagtcagaattgaattgagtagtagtagctcctttttttttttttttttttttttctcccctttgagacagggtctgttgcccaggctggagtgtagtggggtgatcatggctcattgcagcctctacctcctggactcaagtgatcctcccacatcagcctcctgagagctgggactacaggtgtcagccatcccacttggcctagtagtagctcatttyagatggatcctgtgctccctctcattgccacagtc

SEQ ID NO: 831820 - DNA, 593 bp, Homo sapiens
ttaccatttctgtcttactgcttgttattagtctgttcagagattctatattytcctggtttaatctaggaaagttgtacatttccaggaatttatccatctcctctaggttttctagtctatgtgtataaaggtgttcacagtagccttgaataatcttttgtatttctgtggtatcagttgtaatatcccctgtttcatttctaattaagcttatttggattttctctctttttggttaatctcattaattgactatcaattttatttgtcttttcaaataatcagcttcttgtttcatttatcttttgtattttttgtttcatttcatttagttctgccctgatcttagttatttcttttcttctgctgggtttgggtttggattgttcttgtttctctagttttgtgaggtctgaccttagattgtctatttgtgctctttcagactttttgatgtaggcatttaatgctatgaagtttcttcttagctccacttttgctgtatcccagaggttttgataggttgtgtcactattattattcagttcaaagatttgtaaatttccatcttgatttcattgttgacccaa

SEQ ID NO: 831821 - DNA, 636 bp, Homo sapiens
acttattatatactgagtgttgtccatctgctgggatttgccaggtaagtaatgtagttcccagcatatgccatgctctattttagsctctcagccttataagtgctatctcttctttctaaaatgtgattaccttctactcattcttcagatctcagcttaaattatttcttccctaagaagctttttctgaccctgcaaggctggattaagagctcttcctatgtactctcataaaagcctgtgcacatctctatcattgtcctggccttcctgtctctttatctagactgtaacatgaaggtggagttttattcagttttatagcctcaatgttttgcacagtgcttggcatagtgcacatactcaatgaatgtgtgttgtatgaatgagtgaatgaatgaatttatgaatagaaggatgaatgaataaaatataatccagagtgcagagacaatgcacagaatgggagaaaatatttgcaaactacctatgtgataagggattaataactggaatatataagaagctcaaacaaccctataggaaaaaagtctaataatccaaaaataaaatgggcaaaagatttgaatagacagttttcaaaagaagacatgcaagtggaaaacaggcata

SEQ ID NO: 831822 - DNA, 618 bp, Homo sapiens
atgttagcagtttccatttttcttctcaattagttgcttgagctttttatttgccttaagcaaaagtcttttcttgtttaaaaaataaataaaaaaagactcctccrtggatgagactaattagggggccctcactttcaaatgcacttcttaaagtgcaatgttgttcacttggaatgttccactctaattttaaactatctttagtaagattttgccatttctataaccatttgctgcttctggggcctaatacttttcatgtgtaaatgtaggcatagctggaaggtagattactcagttcttaagaaattaaggatcccatttttactctgaatcttggctttgactctcagatctccttgatcaacttaataatttttccatacccaaatgcccaggaaaaattgacaaaaatctctgtaaatgtatgaaagctgaagtttgcatcccctgtagtataaccatttaatcctagtttctctctgagccagtcagacacctaagacctctaactagatccaattcagttaattaacagagccaatctgattctgggcccagccgaatttatgctgcaacttccaacccagtttggatcagaaatttgctcaaact

SEQ ID NO: 831823 - DNA, 452 bp, Homo sapiens
gtaacctgacctttctctctggctgctcttaaccttttttcctttatttcaactttggtgaatctgatgattatgtgtcttggggttacccttctctaggagtgtctttgtggtgttctctgtatttcccgaatttgaattttggcctgtcttgctaggttggggaagttctcctggataatatcctgaagagtgttttccaacttgcttccattctccccatcacttttcaggtacaccaagcaaatgtagatttggtcttttcacatagtcccatatttcttggaggctttgttctttccttttcattcttttttctctaatcttgtyttcacattttatttcattaatttgatcttcagtcgctgatatcctttcttccacttgattgatttggctattgacacttgtgtatacttcacgaagttctcatgctgtgtttttcagctcta

SEQ ID NO: 831824 - DNA, 452 bp, Homo sapiens
gtaacctgacctttctctctggctgctcttaaccttttttcctttatttcaactttggtgaatctgatgattatgtgtcttggggttacccttctctaggagtgtctttgtggtgttctctgtatttcccgaatttgaattttggcctgtcttgctaggttggggaagttctcctggataatatcctgaagagtgttttccaacttgcttccattctccccatcacttttcaggtacaccaagcaaatgtagatttggtcttttcacatagtcccatatttcttggaggctttgttctttccttttcattcttttttctctaatcttgttttcacattttatttcattaatttgatcttcagtcgctgatatcctttcttccrcttgattgatttggctattgacacttgtgtatacttcacgaagttctcatgctgtgtttttcagctcta

SEQ ID NO: 831825 - DNA, 526 bp, Homo sapiens
tgtaatactaaaatttctcctctctcttttctttatctctctctcccctgaaaataatcattttttttccagtgccagttcagatcttggcaacagttgttttgaaaaagtacctgaacaraatacattttataaagtaaagtattcaggaactgacagaactggagaagaatatatttatgttacagaagtcatggacaacatcctattcattttagtcaaggttttctcagccaaaccaatttatatctctttatccagattataattatgttgtatcatttatagactgtaagtttgttctttagcatcacctttctatttttgaccaataaattctcaatttggaaattcttataggcagtgtgatggaaaaattcaatgtaataaaaatattatgccagagtcatgtacataagcagagtgtttccacagtgtccctgcaattaggcaatacccattgtccattcctgttggctcttggctgcctagatcttttctttgccttactttacctctttattga

SEQ ID NO: 831826 - DNA, 526 bp, Homo sapiens
tgtaatactaaaatttctcctctctcttttctttatctctctctcccctgaaaataatcattttttttccagtgccagttcagatcttggcaacagttgttttgaaaaagtacctgaacaaaatacattttataaagtaaagtattcaggaactgacagaactggagaagaatatatttatgttacagaagtcatggacaacatcctattcattttagtcaaggttttctcagccaaaccaatttatatctctttatccagattataattatgttgtatcatttatagactgtaagtttgttctttagcatcacctttctatttttgaccaataaattctcaatttggaaattcttataggcagtgtgatggaaaaattcaatgtaataaaaatattatgccagagtcatgtacataagcagagtgtttccacagtgtccctgcmattaggcaatacccattgtccattcctgttggctcttggctgcctagatcttttctttgccttactttacctctttattga

SEQ ID NO: 831827 - DNA, 600 bp, Homo sapiens
taaaatgccagggcccagcagaattaggcaggtacaagcccctggagtgatgtttttaggatgatctgtttcatagcctgaataaccaagagctgaaactgcttatttcccccatgggagagggctttgggatcaatagcaatcaagatagcccccaagagtatttcattgtctcttggtcatggtgtggggggtgggggttacgtgtccacagcccctctgtgcctggcaggcatggcaaaagcacagaacaaagacaaatctgaatgctttcgcctggcctctctccatgcaggcaaagctaatggattatgattccagaatccatcaaccaggacaaagccgggttaacccctgcctttccagtcttacaccagagagaacctctgacagagttactgtacccatcccctgcctctgtccccactgaagcttcttccaggataaaagtggtggggtgggcccagggatctcattcactggatgttttgcctgaaggaacaatcacctcatgttttacacttaygaattctggggtttgttgattaactgggagacttcttagaagcctggtgagttcagcccaggcagtcacaaagc

SEQ ID NO: 831828 - DNA, 419 bp, Homo sapiens
gggatctgtccctcatccactatgctccaggtccctcctgtcctgcctcccctttgtacaacagcagtgctgtccaacagaaatatattgagagtcacatatatccttccagctattccagtgggccaaaaagtaaaaacaaagaaaacaaactaacccatgggtgaaagtaatttaaataatatattttatttacccaatatatccagaatatcattttatcatgtaatgaataaaaaataatttcagactccagtgcgttttgtatttacaacacccctcacttcaraccagccacactgcaaatgttcctagccatgtgtggctagtggctcccctggtggacagctcagttctgcagggaagtacggtgctgtcctcatttacctctttggcccctcccctccctctgcctctgg

SEQ ID NO: 831829 - DNA, 577 bp, Homo sapiens
ctaacagattttctttccaggaaggtcaaacattactctttttccattaagcctggaggttgtaacaaagttattctgtaaacagtaggtcttctgaagaarggtttaggatttcctgctactgagggtactggagcaactttctcactgaccctcctaaagctcacttgttagctcttttcttttcctcagtttattcaagtatccctctaacacttcctctttttgctaagttagccagaattagtttcttttgcttgcaatccaaataaacccaaccaaagcatgtgtttagtcacatcattcctccattgttagaattatttccctgggattttctcgacattgccttctgttgtttgtaccaacactgtcagagatgggtatgagggagcccaggccattgctgacagctctgacttagccagagttgctcctgttactaacttggcctcagccttacctacttgtgactttcatccttaagtcctagttcaaatcttagggtgcccctggagcaagcctcatctatgttactctagcagataattgaagggataactaccatgttcccaag

SEQ ID NO: 831830 - DNA, 592 bp, Homo sapiens
ttaaccatgactccaagttgcctcatgtgacaggcatcgtggattgtaaattagagtggtcagttcttttcccattgactttgtaccttttgctcagttccctyaaggaacaaaatcggttaaaatgtccgtagagagccatttcccaagaagtcatcatagcagtaaaccatctccatcagtatttttgcatttggcagcgttcaagtggatttttctgccttgtcttgtgagaccattgtttatctgtagttctgtgtttctacccagcccttcccatctttccatacaggacttccatctccagcttgctctagagtgttggtctagagtctcagtcataattgttgcaattgcaagctcaccttggatctctgtgattgcttgataatgtaaagcaaagcaccttagagtatgtccattttttcccttttaaatcacaagaaggaagtacattaacatttacagatgtaacataatagctttaaggatgtgacagagcttttttcaccaaagttaatgtcatggtgctttctttattaagtttcaacttgactaacagtgaaaattcctgaattaggaacaaagggat

SEQ ID NO: 831831 - DNA, 547 bp, Homo sapiens
ccaatcagcgctctgtgtctagctgatctgggggacttggagaacctttatgtttagctaagggattgtaaatacatcaatcagcaccctgtgtctagttcaaggtttataaatgcaccaatctgcgctctgtgtctagctgatctggtggggacttggagaacctttatgtctagttaagggattgtgaatgcaccaatcagcactctgtgtctagctcagggtttgtaaatgcaccaatcagtgctctgtgtctagcgaatctagtggggacttggagaacttttgtgtgtagctcaaggtttgtaaatgcaccaatcagcaccctgtcaaagcggaccaatcagctctctgtaaagtggacccatcagcaggatgtgggtggagccagataagggaacaaaagcaggccgccccaggaagctttgttmtttagctgtttgcgataaatcttgatactgttcactctttgggtccacactgcctttatgagctgtaagactcaccatgaaggtcttcagcttcactcctgaagccatcgagacca

SEQ ID NO: 831832 - DNA, 547 bp, Homo sapiens
ccaatcagcgctctgtgtctagctgatctgggggacttggagaacctttatgtttagctaagggattgtaaatacatcaatcagcaccctgtgtctagttcaaggtttataaatgcaccaatctgcgctctgtgtctagctgatctggtggggacttggagaacctttatgtctagttaagggattgtgaatgcaccaatcagcactctgtgtctagctcagggtttgtaaatgcaccaatcagtgctctgtgtctagcgaatctagtggggacttggagaacttttgtgtgtagctcaaggtttgtaaatgcaccaatcagcaccctgtcaaagcggaccaatcagctctctgtaaagtggacccatcagcaggatgtgggtggagccagataagggaacaaaagcaggccgccccaggaagctttgttatttagctgtttgcgataaatcttgatactgttcactctttgggtccacactgcctttatgagctgtaagactcaccatgaaggtctkcagcttcactcctgaagccatcgagacca

SEQ ID NO: 831833 - DNA, 557 bp, Homo sapiens
agagatctttcacttcccttattggctatattcctaggtattttattctgtttgtggctattgtgaatgggattacattcttgayttggctctcagcttagacattattgttgtatagaaatgctactaatttttgtacagtgattctgtattctgaaacgttacttaagttgtttatcagttctgcctttgggcagagactatggggttttctaggtacagaatcatatagtctgtgaagagagatagtttgatctcctgtctttcctatttggacgcatattatttctttctcttgcctaactgctctggctaggactttatatactgtttagtattagaatttacctcaacagtatgtttacaagattcattcatgttgcacataagagtagtttgcttattttcatttttgttctatactttgttatattaatatgacaattaatttatccattctattattgacatgtattttgattgtttcctgtttgcaatcactgtgatagtgcttctatgaagatccttacatcagtgctttgatatgtgaccatata

SEQ ID NO: 831834 - DNA, 589 bp, Homo sapiens
agttgggtatataaatattccctgccaaaaccatatttcccaaactgccctgcagagaggatggctatgtatcatggtcctggccaatgaattaattttaggtggaagtcaccaaatgcaggcttctcagaaaggcccttaacagggagagaatcacgtttgagcatgtgttccttttgcctcttcttgtcttcctgcctggacacagtggctggagtcttggcagccgtcttgagaggatcaccttcagaatgtcaaaggggaaagctagaaggaagctgctcccttgaatgacacaagggctgcctttggagctctgaattgcctctccagatgtattagtccgttttcacgctgctgataaagacatactggagactgggtaatttataaagtaaaagaggcttaatggactcacagttccacgtggctggggaggtctcccaatcatggtggaaggaaaaaggaacatcttacatcgcagcaaaggagataaaggagagccatgtgaaaagcgtttcccctyataaaaccatcagctctcatgagacatattcactaccaagagaacagtatggggaaaactgac

SEQ ID NO: 831835 - DNA, 515 bp, Homo sapiens
ctgggcacggtggctcacccctgcaatcccagcactktgggaggccaaggcgtgtggatcacgaggtcaggagatcgagaccatcctggctaacacggtgaaaccccgtctctactaaaaatacaaaaaaaacaaattagccaggcctggtgggggacacctgtagtcccagctacttgggaggctgaggtgggagaatggcatgaacccaggaggcggagcttgcagcgagccgagatcacgccactgcactccagcctgggcgagacagcgagattccatcttaaaaaaatatatatctatatatatatatatttgatagcagatatttactatattttgcagaacaaaaagtcacagagctttaaaaaattatgcttcccaacaattatgttccacattcctttccttaaaatttctctagtacttatatcttccaacatcttctgctctgattgcctatggacagtttactacattattttttcttttattgttcccaaactgattaatat

SEQ ID NO: 831836 - DNA, 436 bp, Homo sapiens
gcgtgagccaccatgcccagccgaaaaacatcgtttcttagttgagttataattaatattgagagcattaaatttatgtagaaaaatcatttttccttaaatcctcaaagataacaaacaagcataaaaatcatttatagatttagtatttttctgttaaaatcatttactcttctttgtttttgggtcagtgttcaattggtttatacctttgatagttgaaatttacttactgaatactgatatcatttgtgggtcctggtaaatatttcaaagttgtcgtacaaacaggacaatagattctctcaactcttcaaacgtctaacatgacagacttataagtcttttttcttcttttttttttttttttttttttttttgkagagatggggtctcgctatgttgccaaggatgatcttgagctgctgggctcaag

SEQ ID NO: 831837 - DNA, 571 bp, Homo sapiens
gtaaactagcattacctcctgagctgggcctcctgtgatatcagcagaggcattcaattcccagaggaccatgaaacctattttgaactgcacatgttggggatctaggttggacrctccttattagaatctaactaatgcttgatggtctgaggtggaacagtttcatcctgaaaccatgctccctgccccactcaacctcctggaaaatttgacttccatgaaaccggtccctggtgccaaaaaggttggggaccactgccctaaaacatcttcattcagttaaaatttttctgagagcctactatgtgcaacgcattattcttagcatttgaggtacaattctgcccttaaaattctcctccttccctccctcctttccatatcctatcagaaaaggtctgaacaaaatggttattctgataggagaattctaaattctatttgatgggagggatgggggagacaaggaagatggaggcaactctccattcctccttggggttgtaatttttcaccatgtgaacgcattcatgagttactcgtgtaattaaaaataaaagatggtaaa

SEQ ID NO: 831838 - DNA, 404 bp, Homo sapiens
ccctcttgcttctgctgcagccacactggcctccttgctgatcctcaaacatatcaggtgcattcccatggcagggcctttgcattgattgtccccactgccggaagcgtctttccccrggtcgctgaacggctcactccctcgtttcctccagatctttgctctagtttcgcctgtgcagtggggatccttgcagcctgcacctacctgtcccttttttttttttttttttttttttgagacagtcttgctgtcgcccaggctggagtgcagtggcgagatctcagctcactatagcctccgcctcccgggttcaagtgattctcctgcctcagcctcctgagtagctgggactacaggtgtgtgccaccgcacctggctaatttttatatttttagtagaga

SEQ ID NO: 831839 - DNA, 562 bp, Homo sapiens
tgtagagccaataaatgccccttggagaaaccggcctcataccttgcctacacagtctctgtacagggtttctgacctgtggtaagtaaagaatgtcactttctaacaggcccaggagccccaagttatcttggaacctcaaaaggagaggaatttactcaactcataggtattttagggcacaaacccatggcaaggcttggctcaaaaaaaaatcttatctgagattctttatgaaacagagttccatcaaagccaatttcaaagagcttatataaaaaataatcattcttgcggcactttatacaaataatcaggccaaatataataaagcaagtcagtgttaccatgattagtctttagtaaaaatgggaaactagagacagaaatattatatttcaagaactatggtatacttgttattaaattctagtctcagcagttgtttttaagtttttgcaatttagactgattgcttgctcctgtgacccaaccagagmtctctggctgctgctcaaaagaaacaaaaaggacaggttatgtaaaaatctggagtcaatat

SEQ ID NO: 831840 - DNA, 663 bp, Homo sapiens
caaagatggggtttggagtcaagtatgttggtttgaatcttgccacataccstattactttgaacttcagtttatttatcaagtgaaatagggttagtactaccagtctcataaggttattatgagataccaaatggaaatctaaagaagatcttgcacatagtatgtgatcagtgaatgttaactcctttctccttggaggagaaacttctagaatgtcattatgtacttgcaaaactagctggggcatgtctcctgttgactctaaggcagccacccacacattctggaatcccacacattgtagaataagtctttgtcaagccctctttccctcagtgggactaatatatgacagataaaataatatggtaagtctgaaatcaaggtcatagatatcctttcctaatttaggataaatcttggggcaaggaaaagagacctaagtaaagcagtgctgtgggggaaaaaaaaaacctgttatctttgtcctgtgatatgggaaaataaggtgcaccaccaacctgacctacttgatcttccattgctaaacaagttttgcagctcttcctatagcaggctgtaacatatgtaacatagtggtgggaaatgaacagaagtaagagctaatgtagaggtgctagagaaaggacttgagattgc

SEQ ID NO: 831841 - DNA, 595 bp, Homo sapiens
agaaagggaaaaacaacctaacagtggcaattacctcctatgtaggagtgagtattaatctttcacgggccacataactctttgaggatccaattttaaaacaatgagccctttctacagaaatgtgcatatcacacacaaaatgccacacacaattttgggactattcatgtcatttattgaaacctgaaaaggtccgtgagattcaggttaagaagacttcacataggaaagaacagccaagttaaagatttgttactacttttaaaaggtaagaaaagattagttatataattgcatagcaataataatatttcacacatataggcactaaataaattaaatttatatttccaaacctaaaattgatcttaaaagataacagtaggctaaaaatgttaatcagtgatatacaaagtaaaataaaataaaataaaatatgttggtggaaaggaattatatggttaaataagctggagaaatgctggattaaacaaaattaagcaggtgttccttactatacaacttttcagagttgttgttatatgaatacagaaaaatgagagattactayagcatttcctcaaattctttt

SEQ ID NO: 831842 - DNA, 644 bp, Homo sapiens
tttaaaaagccaaatatatgtgttttgtaaagtgatttaaactttaagtgaaaaaaattatatccatgaaagcttgttaaatgttaagaatgtaagttatactatttctgtaagaatatgtaagttatactatttctacaagaataataataggatgtaaaccctattggttcagcatttattcactgacagattataatgtgggacctcttctggtatgagagattcacagtgaacaagacagaggagctttctgtactcacagatctcatattctatgggatggatgttgaaaacatcaagtcaaaagtgtgcggtaatttgtggaagtcaagaggatcaataagagagacaagtataggcaggtattatttaaagaatagctcgaaattactaaattgattattttgcattttttggtgacatacatttttttcaaagtattccacataattgaaaaagtcactgcactaaagcagcacctagaaatggagaagagaggccaagctatgtraatgtctaaaaaccacttgagaattggtatctaaaaagaaagttttgcttactagagttttacagcatataagaggtaacatggatcatgataaagtcaagttacaattaggaggacaattaatatctga

SEQ ID NO: 831843 - DNA, 479 bp, Homo sapiens
aattgaaaaagtcactgcactaaagcagcacctagaaatggagaagagaggccaagctatgtgaatgtctaaaaaccacttgagaattggtatctaaaaagaaagttttgcttactagagttttacagcatataagaggtaacatggatcatgataaagtcaagttacaattaggaggacaattaatatctgaagcagctggctggtcacttacgcgggttgtctcagcctcctgtcgcaggctcaggagatactaatttctgctaaccaacccccaagagactaatgtaagccagatacctaatttgacacgggagttataactgtcaagtaaactagtaaatttgcatcagctaataaatcaccttgtttcttcaaaacaggaaattctatraaggaagcaaatttaaaatcaggaagttacttcaatggccatggttctaacagaaatagatgaacaatcttaatggtcaacaaaa

SEQ ID NO: 831844 - DNA, 498 bp, Homo sapiens
gccgttaatagctagtctagctctaaggagtttagaaacctacttattttattaacttcattttttttttgtttgtttgtttgaatgacagactttakcatttttgttttgaaataagtgcaaattttattttttgggggagggacacttagctaaaattctatttagtctacaacccaccacagtctggattgaactcccatctcaagtgaaattgccctgactggccatgaaaagtgacttctagttaatcaatccattgattattttatcctgctattctacctagtctctctgatgcacttggcaactgtaagaagaaattctcagaagatggtggaataccatcagagaaaggcattctcctgggccttcttccttggtggcatctgccattccatggaaagcagcttcattcagtgttcagtctttggctctgttctcttctgacttactaatttctccttgggatagctcatttaaaagttgtttcccaat

SEQ ID NO: 831845 - DNA, 505 bp, Homo sapiens
caaaacacagcaaaacaagcaagcaaacaagcaaacaaactagctttctgttttactgaccttgaaacccactctggaagaacaattccctcttgtaggccacccttatccttttcatcacccaatagctccacctctcagcactggaaggaaatgtgaaggttttgggcaagtcaaccagctgtgtgataccacacaagttagctgctgtattggagcttcaatttcttcatctgtaaagtaaggagaataatattaactttataggttttctgtaaggattaaataaaattctatggatgatgtgcttagcatggtgccaggcacataagacattctcaagagatggctagcgctttcctcttcaatcacaaactcctgtctctgggctctcagtctcttgcccccatcagaactgacctccaacaccaagaccstcggcccctccatgtctccattttctgttactttatcattacaccatcctcacctccaccctcaggct

SEQ ID NO: 831846 - DNA, 505 bp, Homo sapiens
caaaacacagcaaaacaagcaagcaaacaagcaaacaaactagctttctgttttactgaccttgaaacccactctggaagaacaattccctcttgtaggccacccttatccttttcatcacccaatagctccacctctcagcactggaaggaaatgtgaaggttttgggcaagtcaaccagctgtgtgataccacacaagttagctgctgtattggagcttcaatttcttcatctgtaaagtaaggagaataatattaactttataggttttctgtaaggattaaataaaattctatggatgatgtgcttagcatggtgccaggcacataagacattctcaagagatggctagcgctttcctcttcaatcacaaactcctgtctctgggctctcagtctcttgcccccatcagaactgacctccaacaccaagaccgycggcccctccatgtctccattttctgttactttatcattacaccatcctcacctccaccctcaggct

SEQ ID NO: 831847 - DNA, 612 bp, Homo sapiens
tctttggtatctaatcttgtcattgcttgtgaagtattcagggaagaacatatttgaaaccgaacaaacttcccaattcactggtaacatccaattcaagtcctactgcttgtgagcaaaaagttgaatataataacataataaatgattatttttactttctctgaggatcttatacaaagagtatttctaagaaacacttaatctgtatcaaataatatggagacttagctggtctacaaactctggggacaggccacttggccaaaggaaagacaatatacagtctagacgaagcttgggaagaaccccttgcctttatatcagtcatccctttccagcccattgttaactgcagttggagatagaggcagcattgcaagtacaggcagcctggtgtccattgagaagttcttaattcgtttctgtaagatatattcaaggtggcctcatgaatcccatctgttagagcccactsagtggaaagtgaatgcttaaaatgtagtttacagtaagcaaatgttagagcatttcaatttgcctcaaaactgccaggggtggtatttgattaaataaactcaatggcttaagtacttaaattggatttgagat

SEQ ID NO: 831848 - DNA, 491 bp, Homo sapiens
gttagaagcttcggatgatttggatgtacagctagatgtgagaacccttgatgtaattaatacaccatacaacataccttcatatacacacacacacgtaattaaaaaaatacatatagagagctttacagtttacaaagtgctttcacatatattatctcatttaacctgtacaaacaacattaatcattctcattttatagatgataaagcctgaggctcagaaaagggaagcagtatcattagtcagtaaggtacagacctgctgtttgacaccggatctccgggcttccaattctctgtccctgcacgatatatgtcatagctccttcctgagcccttggctccacacaactctcacgggtggtgtcaggcctggaatacagctctcctgcctcgaaggccagtgctgtttatattytgattatgtcaactccttgtttaaaacccttgcatggctctatgatagactcaggataaaatccaaactc

SEQ ID NO: 831849 - DNA, 474 bp, Homo sapiens
aaactgatcattgttccttatttttttcttggttatagaatgacatttccatgaacactcatttctggtttagctatacacaataaacacaatagctattaccaattatttagtccctactgagcagttcatcaaggatttgtgaaggcaatggcatcaattgatattccttcctttccttctcctgcctgctctgtttaaagataacatgttctaagtctaggcatggaaataacctaccttcaggccattgcctccaaaatgcagtttctatcttcacctcctgtagcccatagcaaaatgaagttatcgctctctggtgggttagctactaaaatgagaattcaaagtttacactgtgcaggaggaaggatagtatgtgtagagctttctggatgtcctgttcctttcaagctttgtggacttatttccttgaagattttgaggctrgataggcagctacagtggtgatgt

SEQ ID NO: 831850 - DNA, 498 bp, Homo sapiens
agtaattgcctggggctgacagggtggggaagaaatgaggaatgactgctaatgggtatggaatttctttgggggatgatgaaaatgttctaaaattttatctgtaaatatgtttaaagctattgaattatacttcaaaaaagggagttcattacctgtgcacacaattacttaaaaaaagagaatattgacaaagagacagcagttactttaaaaagaacccaataaaaattctggagttgagaagtacaataactgacatttaaaattcactagaaggactcaatagcagatttgagctgacagaaaaaagcatcaatgaacttgaaaataggtaaattgagatcatccagtctgaggagtagaaggaaaaccaaatgaataaaaatgaacaaagtatagtgtgggggtggggggagtagtttwaccaaagtgtggagaaacctgacaaggtctgcatcaacactgttaagccatgttgatactatgtatttttga

SEQ ID NO: 831851 - DNA, 646 bp, Homo sapiens
aagctaagctggtatcaattcaaaagtgttatcaatttgggatgttaattgtaatcattataatcactaagaaaacatttaaaaatataatccaaagggaatgagaagggaatcaaaatggtacatcaaaaaaaaaattccttgattacaaccattacagattattttgttccttctccactcccactggttcacttgactagactaaaataaaataaaataaaataaaataaaaaaactatcagaatcccagtggcctgttttagagaaataggaaggctgatacttacattcagttggaattgtaagaaatcccaaataggcaaaaggattttgaaaaattaaaacaaagaagactcatatatcttgatttcaaaacttactataaaaccaaagctacagcaatcaaaatggtgtggtactggcacagggacagacatacagatcaagagtctgtatcaagatggacatacagccgagagtccagaaataaccccaaaaaatatagtaaactgattttcaaaaagggttccargacaattcaataggaaaacaacagtctctcaaacactgttaagtgagacaactggatatccacgtatacaagaattaaggtggatccttacctcacaccatataaaacaat

SEQ ID NO: 831852 - DNA, 641 bp, Homo sapiens
tctgtggagcttgggagttgtaaggataacaaatgattcagaagacaattaaattcacccagaaaaattccagcaaaaaactccaggactacaggcagmtgggagtttcataaggtagcccatagagaaagtaaacatgaaaaaagcttaagtctatctacattaccaatgaaatggtaatgaaattcttctgcctaacccctccgccaccaatacccatctaaggaaaaacttactctcacacgaaaacatggttttgctgggctgaatctggccaatcctaaaaccaacagcagctgctggcaggcagtgaactgccaccccagccatgaaggcagaggaagcgcagagcgggcgtggctgcttctcaagggtatctaaagtatattcaccacactcactgttcttaaaatgtcttctctccataatagcccacttcccaaatttcactcaaagacagaatataatcaacagaaagggattttacttaagaatagataaaatcagtacattccaggcaaaaatatctttaacccaggaatagggaagaacatcaaagattactggaggcccctggtcatggttctcatggttgagacttgtcatggattgtgtaggatccagggttagttctatgtttc

SEQ ID NO: 831853 - DNA, 512 bp, Homo sapiens
gatgacaatacaattatttcattatcaacactcactgaatcttatgtactaggtaagcactggtgataaaagcatgacaccagacttaggtaccagttgtgtccttattttacatagcaaacatagccacaggataatatacaacctcttgaagatcaggctgttgtaaactgggttaatagatctgggtttcaacacatagagtcaattatgagaatattcactgctaaacatttgaatcaactgtgtacatattataacaaatttaaactttattctataaaaatagaatgaaacaacattgaaaactatgtgccaaggctcgagacaatgagtgcagtaacgtggtagtattatcagttcagttgtgaatcagtaagrcctaaattaagatgatgatattagcaataaaaataaacgatgtataaaagacatctctacttcttttgggctaatggtcaaatgcctccctttcctccatttttattgtaaaaacatattaaaatgtttta

SEQ ID NO: 831854 - DNA, 512 bp, Homo sapiens
gatgacaatacaattatttcattatcaacactcactgaatcttatgtactaggtaagcactggtgataaaagcatgacaccagacttaggtaccagttgtgtccttattttacatagcaaacatagccacaggataatatacaacctcttgaagatcaggctgttgtaaactgggttaatagatctgggtttcaacacatagagtcaattatgagaatattcactgctaaacatttgaatcaactgtgtacatattataacaaatttaaactttattctataaaaatagaatgaaacaacattgaaaactatgtgccaaggctcgagacaatgagtgcagtaacgtggtagtattatcagttcagttgtgaatcagtaaggcctaaattaagatgatgatattagcaataaaaataaacratgtataaaagacatctctacttcttttgggctaatggtcaaatgcctccctttcctccatttttattgtaaaaacatattaaaatgtttta

SEQ ID NO: 831855 - DNA, 383 bp, Homo sapiens
tcagagtgtggcaggggacttcatgagataggcaaagatagattggcaaagataawcttgtttggagaatctctcctcagcgactagttaagacgggtatggtacatttctttctaccatgtccacttccttctttctcctcatgaagcctggcttgccaatttatgtcataggtgattatgaaataattagaataaaattatggtatgattttgtcttttctttgtacttttttctttctttgatataattctgacacatctattagccttttcattttaaataaaagaattttaataaaatacattaaaaaggattcaaaaacacataatggctaaatagctatagaatgttcaattcatcaacaaaggtagaaatttaca

SEQ ID NO: 831856 - DNA, 635 bp, Homo sapiens
tttttcatcaaagacattgggcagtaaggaaataaaaataattgctcatgatgcttattgtcagtggaattactgtatctccacaggtcagggcatctgtacatttgcagcatactttawttctttagcaataccttttgtaggccaatttatacagctgaaaattcttcttgccttccaattttaaaagcatgattttgatttctctttatccataaaagttttctaagcttctcccaaaatttttcagttcagcagaactataaacctgatagtgatatattggaagataaaaggattatattgtgagttttttaacttgaaagatcaatgtatttgtatatttgtgtgtgggcatgtatattatagagagacaaagaaagacagtcagagaatgttattagtattttccatttctgtagaaatagacattcactttgcttactctaaagaaactgcagattaaactgtccaattctactttatttatgtagatattcagatacttaaatatgtgaaaaattttaaaactataaatgttttcttttggctcctgtaacattttttatttgagatagagagatacagacataggtataaatgtattaattatatatgtacttatatatattata

SEQ ID NO: 831857 - DNA, 570 bp, Homo sapiens
aaatatgatatatttttaagtgaactatacacgcatattagccagctatcccactcctagatatttacttaagtgaaatgaaaatatgtgtctacagaaagaatatatgtaaatgttgagccgggcgtgttgtctctcacctgtagtcccagctactcagaaggttgaggtgggatgatcatttgaccctaggagtttgaagctgcagtgagctatgatctgccactgcctttcagcctgggcaacaaagtgagtctcaaagtgttgtttgtctcaaaaaacaaacaacaacaacaaaaaccactatacatgaatgtttatagtagctttatccataattgacaaagactaaaaacaacccaaatgtcatcaactggtaaatggataaacaaattgtttcatgttcacaaaatataatactacttggtaatagattgaactactgatacacaatgtggatatrttgcaaaagcattgtgctaagtgaaataagccagattttaaaaattatatagtgtaaactgtaacttatataacattctagaagtggcaaaactagaccacaccaat

SEQ ID NO: 831858 - DNA, 415 bp, Homo sapiens
aagttggcactaaaaagaatattcattaaatgaaaagtaagtgaacaaatgccttaagatttgactttaaattatttcttctgacaatcatctctacttattgtaaaccacacacaaaaagtcaattgctaccacttttccttgatcttagctctattaacccagcttttatgctaatgggctattaaacttgtcttagttgcttgatatctttgttgctcaatttcctcattgatgaaaatctgaatattacagtgaaagtgataatttgtgtctccttcttctactaattrtgctttatttctgttttatagcttatcatcatgtccagaactcaacgaacaatgtcaagtaacaatgatgatagaagaatcagactcttggtttttaaagacctatgggaaacgtcatttga

SEQ ID NO: 831859 - DNA, 415 bp, Homo sapiens
aagttggcactaaaaagaatattcattaaatgaaaagtaagtgaacaaatgccttaagatttgactttaaattatttcttctgacaatcatctctacttattgtaaaccacacacaaaaagtcaattgctaccacttttccttgatcttagctctattaacccagcttttatgctaatgggctattaaacttgtcttagttgcttgatatctttgttgctcaatttcctcattgatgaaaatctgaatattacagtgaaagtgataatttgtgtctccttcttctactaattatgctttatttctgttttatagcttatcatcatgtccagaactcaacgaacaatgtcaartaacaatgatgatagaagaatcagactcttggtttttaaagacctatgggaaacgtcatttga

SEQ ID NO: 831860 - DNA, 552 bp, Homo sapiens
agtcttctttcttaacagatcagagaaaaatagaagctacattactagcaaatttatttttacatccttttcttgaaaaatgacacatcggtaaacacagtaatctagtttattactttatttaaacaaagaccttctgtttgattttttttacttcttctattttccaaactcacataagcaaattccaaaatgcttgaagataataatcattctgatttcaattttgataattttaaaacgttaaaattgaaatgtagaaaatgcttatttttaaattaataaaatataattacaagatccctcttataaaattgccaaagtgtcacaagagtttacgcatgtaaagcgctttactcagtgcctggaacatgaaatgtgcaattaaaaagctgttattattagcattggatttcatacttacaaaataaatagtttgtaccacatgacctacaatgtccttamcaattttaaaatcttgaatctgaattttactcccaacagaatttctggtgtatctatgacattgcttactaattaccccaaaaatat

SEQ ID NO: 831861 - DNA, 614 bp, Homo sapiens
ccagttcgtaacagtccgcaaactggtaccagtccatggcccggggaccaggcacccctgttagacaaccaccattttgccctcagaaattacttcttatacttactrtcaattttaaaatactttacatttcctccccaaatatattttatcatattcagtccttgaatttccttgatcacttgtagtaagtaaaggagtatcctgggaatccatcggtcatctccccggactatggaaggtgggaaaataatagcataggaaaaggcaaagaggcaggaggaaacttcacccagacttagtcactcttacccaccttccaacaaccctgagtcactttctcttaaagtgtgaaataatcctttctgtgacctgtcaacaaaatacagaaacaacagttttgaaatgcctaatatataggccccaaaatattcacagctaattaaattcagttgataattcaactgcaaatcataaatatacatgctacttgagattctgcctagaatttaattttcatcctaattctagcaataactaaccatttttccactatatcaagttttgggttttaaacactaggtcaaacaaacacaatcttgaggtttcagtct

SEQ ID NO: 831862 - DNA, 659 bp, Homo sapiens
agctgtctgtcttagttcctttatgctgctgtagcaaaatacctgagactcagtaatttgtaaacaacagaaatttatttattatagttctggaggctgcaaagtccaagaactgggcactggtagatttagtgtctggtgagggcctgttccactgatggtgggtgtcttctcatggtagcgtcttcaaatggaagaagacagaagggcaaaaaaaagcctaaggttgttccttccagcccttttataaggcactaatccattcatgagggcagaaccatcacaacttaatcacttcctaaagggcctctctcttaacaccaccataataggggttagttaagtttcaacatgaattttgaaggggacatattcaaaccatagctttgtcctagtagttgtgaggtagtatctcactgttgttttaatttgcatttccttaatggctaatgagggtgagcaccttttcatatatttattggccactcatttgtcttctttgcagatatgtttgttcaaatcttttcttcmtttttaagttggattatttgtctttctattattgagctgtaacagtttgtcatgtattctggataccactcccttatcagatttatgatttgctaatgttttctctctctgtgagatgtcttcacttt

SEQ ID NO: 831863 - DNA, 652 bp, Homo sapiens
aaatgccagttgttgtcaggaaggcattctygctattagtgtatttcaaaaatgcaatatctgctgttgattcagagctagagctgagagcttgttgattagctcccatttatccagattacagcaaattagatttaactgtgactggcatgtgaaagatcttatgtaggacatggaggaggaataccgctccataaaccatagtgcatttaatttctttttctttttttcttttttgagacagagtttcactcttgttgtccaggctggagtgcaatggcacgatctcaacctccacctcctgggttcaagtgattctcctgcctcagcctcctgagtagctgggattataggcatgcaccaccatgccccgctaattttgtatttttagtagagatgggatttctccatgttgatcaggctggtctcaaactcccaacctcaggtgatctgccctccttggcctcccgaagtgctgagattacaggtgtgagccaccgtgcctggacttaatttcttttaaataatgagattttatgtggttgccttaatcattacggactaggcggtatgcactttatggtacattatcttttggttggaatgtgaatgaaccaacacctacctgaggtacttctaggtgaaatcttga

SEQ ID NO: 831864 - DNA, 618 bp, Homo sapiens
agttcctgaagaaagtattccactgatatgagaataatgcctttgggctaaaacatactgtcttttgactgagtttcttgaaatctctgtactaaatactgatactccacaaataataaaccataacaagatctaaactgaaaaggttttataaagtatcacattaaaaaaacgcaagggttgttcagagtctttttcatccattaagacagaagcttctccagaagctgaggaatccacgtgtagggaccattcaagaagtcctggcaggatttggagaagagtgaagaggcagtttccctgggaacatggctgaagcacttccagaaaaaataaactcagggggcctacatcaccaaaggcaagaaattaaaactaatttttttcattttgaaggctatttttctaaaactaaataaaataaattgaagtatattaaaatattaactcacacacaaaaaaacgagtgagataaggtgtcagatacccctaataaatgcaagtgggaaatcaaagggagtcycagacaggcaggcaaaagactatgctgactttaaattaagtttgtccccagacagcgatttgtagacagagaaacaacattaatgttatgcttaa

SEQ ID NO: 831865 - DNA, 500 bp, Homo sapiens
acttttacccttgcttttgctgatgccaagggctgccttcaggagaagtagcctaattcttcttaaatgtttccattagtagaggtcttcacttgtttctgtgtggcgacgctgaggtcatgccaatttctgcactttaacctatatctttggaatggtaattcataggtcagtgtttccctatttaaggcaaatgaagagcaattttccaaaaacagtatttgccccacctccactttaccagagcatctccagtcaggaagattgcctctcccaacaattacttgcctccccagaagatgcaacccaatctttgttcttccccagacttcttatgaagactgatactgactgtgggagactgtggaatgatggcrgacagtgcttgggcggatgatgctgaagactgatactgactgtgtgtgagacagtggaatgatggcggacagtgcttgggcggacgatgctgaagactgatactgactgtgtgagactgtgga

SEQ ID NO: 831866 - DNA, 549 bp, Homo sapiens
taggagtggtgagagagggcctccttgtgccagttttcaaagggaatgcttccagtttttgcccattcagtatgatattggttgtgggtttgtcatagatagctcttattattttgagatacattccatcaatacctagtttattgagagtttttagcatgaagggctgttgaattttatcgaaggccttttctgcatctactgagataatcatgtggtttttgttgttggttctgtttatgtggtggattatgttttgatttgtgtatgttgaaccagccttgcatcccagggatgaagccaacttaatcatggtggataagcttttttatctgctgcttgatttggtttgccaggattttattgaggatttttgcaccgatgttcatcagggatattggcctaaaattttccttttttgttgtgtctctgccaggttttggtatcaggatgatgctggcctcataaaatgagttagggaggattctttctttttctattgaktggaatagttccagaaggaaaggtaccagctcctctttgtacctc

SEQ ID NO: 831867 - DNA, 481 bp, Homo sapiens
ggaattttaccttaaaatatgctattttagtcaaagtcttcataaaataaacagtgtctccaaatgttctgttctaaaagactcttactaaacttacrcaaataaccatattgtcataaaataacaatcaaaattttggagaactcagataaagagaaaagtaaatttgcttacaaaaacatactttattcaagtgctctaaactatgaataacttaatttttttaaaaaattgaccctttttaaaccacagcagcaacctttcaagcaagatgttgttcacgtaaaccttcaatgctcagacactgaagaacatctcctagcactaacaccatccaggaaaacatgacctcacctcaccaattgaactaaataaggcatcaaggaccaattctggaaaaacagagatatgtgaactttcagacagagaattcaaattagtggttttgaaaaaactcagagaaattcaagacaatgcagag

SEQ ID NO: 831868 - DNA, 321 bp, Homo sapiens
ccccctggatggatgggtctttgtgttttgaygccccttggctctggcattgtgggggggccccctggggcatgaggaagagggccagtgccaaggccccgagggagcgctactaattgctactcagtttccttagaaagatttggctttttgtcatcaacagcgctaaagtaacagcaaagatgacctacttaagcgaaagaaaaatccgagtgaacctttaaagctggtattctcacttcattttggggcttggggttgtcttgcagattcaatctgtttcctctgtgccacaataatcagaaaataggttaatttaag

SEQ ID NO: 831869 - DNA, 455 bp, Homo sapiens
tctttaacgaacagggttgtttatgattcacccggagtcgcctcgccaggcttctcagtatacccaggccgtcctgagcccagcctggccctgccctgggcacgtccaggcctggacagtggagccgctggtgtccctccgaccctgctgcatgatgctcaggacaaggttgcgctctgtggctgcctcattccttgggtgaagagtccatgccttgggtgtcatgaatgactcggcgtccaaagggtttatgtagcttttcctgagctctcccttgtgtgaggccaaagcacagtgcaggttgagacgccgagtcaagtaagagagacagtgaccgaagggrgtcttgagggtttccttcgtgtgttttcgggcacccctaggtcaggtgatgtcgtctcagacttcacctgggtgctcctttacttgctggtaaacacggggtttctaggagc

SEQ ID NO: 831870 - DNA, 518 bp, Homo sapiens
ccaaactttccctcatcttcctgtcttcttctgagccctccacactcttccaacctcggccctttacccagctccaaagcagcttccacattccagggatctttatagcaatgccccgcycctggtaccaattttctgtatcattgcattctcccattgttataaagaactgccttataagggtgacttataaggaaaataaggaaaagaggtttaattgtctcatagtttcacaggctgtacaggcttctgcttccgaggaggcctcaggaaactcacgattgggcagaaggcaaaggggaaggtgtcatgactcctgtggccagagcgggacacaagaggcagcaaagggtgaggtgccacacccctttaaataaccagcgagaactcactatcatgagaacagcaagggggaaatctgcccccgtgatccagtcccctcccgccaggccctcctcccacactggggatgacaattcaacacgagatttgggcaggacacaaatccagaccatatc

SEQ ID NO: 831871 - DNA, 639 bp, Homo sapiens
ttactgatggggtctgtgcagacccagtaggcaggggggtccactttcctgctagctgtccctagcgtcgttggccaggtgcagaggggtctgtcattctcctaccaaaaatttcacccgtgcatgtggggccttttgtaacacaggatctcaggtcccactgcaggtacaggaatcaaaaccatcattccagccaggctcaaggtaaatcctgtgcccaggaaggtgtgagaagcatttctctgcgccaggagccctcaaacttttcctgtaacagcccagaaagtgaatacttcaggccttgccggccacactactccactctgccactgtgacatgaaaaccacccgggacagtttgtgatcagaagagcagggctatattctaataaactttacttgatttggctcagttcagcccagtttgccataggtgggcagcatcttggctggcaagatgataacgaagcaccccagctctgagccacccacatctcacgtcaaatggtaagccccagtgttgcaggtggggyctggtgggaggtgattggattattgggcggatttctctcctgtgctgctctcgtgatggtgaatgagggcttgtgagatttaattgtttataaaagtgtgtggcacc

SEQ ID NO: 831872 - DNA, 579 bp, Homo sapiens
gggaaagcaccctgagcacggctggcaagccagcaaaatgaagaaatgtgtgtggtgctgtctggccaactccagactcccagcactgcaaagtcaggaactcgaagtgacacagaatctccggtggcatcaagtggcagaggcaggtggagtttggctgagttgttaccttggtctttgtgatgctttgtgaccagggtctgctctctggtgccttaatcccaggacagcaaaagaagaaggcaatcctagatcaacgtctcttggcttttctggcctggcacccagagttcagtttcttaaactctgcctaacacacaggtcggcagcacttcccacagaactggactcccagttatggccgggactttggcaaggacacactcattcatgagcatcaagagtgatacccatccacgaccctgagggcctgctggtgcaagacccaaactcaacattttcagtgtggcctccgcctgctcttggwcacctgaccaggtttctgttcctgagccctgtggatggttcagacgtccccatccacatgagggtcatgtgatgcggctttaatttccacct

SEQ ID NO: 831873 - DNA, 480 bp, Homo sapiens
tccttcctgcaaggcagcaccatccttcttccggtccaagtttggtcagaaattctacgaaacatgaagtgttacatccgcatcaccatttcacagactagaaaacccactgaaggagaaacagaatgacttgagcagaaccatccaagctccaggtgaagacagcgtcccacgagccaagccagcatcaaatttcactctggaatctcaagcatgaacccgacaaacagcaagcacagaccctggtgtccggatgggaggggatgcaggaggccctcgccaggagactgggaggagaaacaccaggagatcctgggctgcccacattggcagttcttaatccccagcacacgaggtcagccagattccagaccccactagaggaagggaaagagcacttggagaggacggccttgaacgctcagttcatcacaccaaamtgttcgtcagccctgctcttcccacagaattagagtacag

SEQ ID NO: 831874 - DNA, 618 bp, Homo sapiens
tgagagattccatgtggctgagaggtggcttcgtggggaagacgtgagggcgagcggaacagtgtggaggcagatcacagagggctctgtgtaacttacgcaagacctgagcaccaggcggagccgtcaagggaaatttaggttgagcagagatacaattgggtttggaatatctctctatagcagcagtaaaataccatgcaggtgacaagactgggagccgggagaggaggcaggagggtgtgggtggttcagaccagggatggacagtggggccgaggggaggagacattggagtggcaccatgtggacaggggcaggtcttgggaacacataaaactgaaaggagatgtggaaacatccaggcccacaatctaggggtccaggggctgtggccactggagtgccattcaaagacttctcccaagcccaccccaggtgaagcccctcccctgcctgtgctggcttggtcctgggagccagggcccctccctcatcgcagctgctaagctggaccatccaagaagtaaagcagcacccgcctaccatggcccacgcctgagtttccyggcctgagccttcattctcaaagctgtttcttgttttaaggccatttcc

SEQ ID NO: 831875 - DNA, 620 bp, Homo sapiens
cactgggacccagcaaggctggccgtccctctggcggggtggtcagagccgcttcctggaaggcggatttcagccgaagtgctaatgtcgccaggacttcctggccgcggacctgcagaaggagctcccagaacagtgcaggccacggggctttaatgctgctcctccttctgcgtcccattttacaaaataacattaatagtaggttgatcacagttaattgttgttttgtagattgaaagcatttggagattgacaatttaataaagtttatattgttccagctaagcataaaaacttaaaaatttataaagcgccttctaaaacagtcactttgcttcaaacatttcaatcctcaaacccgccacgtgactaagttagggccggtatccttctcccggcctcaggtgaggaaactgcctgcgccaggttctctgggccgcgcggagccggggctgacacagctgcggggctggggtttccgatcccagcgcagagcgtctcccgctgctcctgcgggcgtgaggctcccgggatgcccctccctgaagtgggtcgsgacccgcatcgggatccgggcagccaggcctcgcaaaaggccctgggcccgggtctgctgc

SEQ ID NO: 831876 - DNA, 606 bp, Homo sapiens
cacaaatagtcttctagcccttcctaaacaaacaaatggaaaatgaaatagtttcattacccccagggtttcatgcacacctgataatagaactatccctgaagaaatggctctgtatacaggaaaaagttgatcttgaagacttttcaaattaaattctattttttgtattctttagattttataaccagaaatgaaatattatttgaaggctgttctactttatgaaaaaatctctaaaaatattacaatttcaaaaaaggatatagcatgagtcttgtcaaattgaaaaataaaaaataaagaaatatgagaatagccattttggtgtcaaagaagggtattttattgttatatagtgatatttcatgataatgaaatgttttaattttcatatgcccttcaaagtgagaaaataggatagcaccaactgtatgcgaggcccagtgatgtgcactggcaagtgaaaataatgcatatcccaatcattcattcrttcataccctgatgagcctaactcttccccaccaagaaggggtgcctgccacttgcccaaaaccccaaagaaattcattcagccttgtatacagaagacaattctttagc

SEQ ID NO: 831877 - DNA, 587 bp, Homo sapiens
ttctaaatatacaatcatgtcagctgcaaacagaaacaatttgacacttccactcttcctatttgaatacattttatttctttctcttgcctgattctcctgaccagaactttcaatactaygttaaacaggagtggtgagagagggcagccttgtcttgtgcccgttttcagagtgaatgcttccagcttttccccattcagtatgatattggctgtgggtttgtcataaatagctcttattattttgagatatgttccatcaataccaagttgattgagagtttttagcatgaaggggtgttgaattttatcaaaggtcttttcttcatctattgagataatcctgtggtttttgtcattggttctgtttatgtgatggattacatttattgatttgcatatgttaaaccagccttgcattccaggtatgaagccaacttgatcatggtggataagctttttgatgtgctgctgtattcggtttgctggtattttattgaggattttcgtatcaatgttcatcacggatatttgtttgaaattttcttttttttgttgtgtctctgccaggttttgatatcacga

SEQ ID NO: 831878 - DNA, 587 bp, Homo sapiens
ttctaaatatacaatcatgtcagctgcaaacagaaacaatttgacacttccactcttcctatttgaatacattttatttctttctcttgcctgattctcctgaccagaactttcaatactatgttaaacaggagtggtgagagagggcagccttgtcttgtgcccgttttcagagtgaatgcttccagcttttccccattcagtatgatattggctgtgggtttgtcataaatagctcttattattttgagatatgttccatcaataccaagttgattgagagtttttagcatgaaggggtgttgaattttatcaaaggtcttttcttcatctattgagataatcctgtggtttttgtcattggttctgtttatgtgatggattacatttattgatttgcatatgttaaaccagccttgcattccaggtatgaagccaacttgatcatggtggataagctttttgatgtgctgctgtrttcggtttgctggtattttattgaggattttcgtatcaatgttcatcacggatatttgtttgaaattttcttttttttgttgtgtctctgccaggttttgatatcacga

SEQ ID NO: 831879 - DNA, 631 bp, Homo sapiens
tgaagctgaggacactgagcttgtaaactctgatgaagcttttttgccagaagaaacagcttccccattcccagtagtggcaacatcccctccctgacccatgttgccatcagcctttccatctttgtctgaggagataagctctgcaatgcctgaggcagttgccaggcaagataatgttgattctcctcaagagccaccaccaacactcctgtttgcttccagacctataacaagactaaaatcctggcagggccctaggggtgaggttcagagtgtgacctatgtgcaggtgtgctacactcaaaaagaactgcttgagttttctaattcatatatgcattaatctggagaacagtcatgggaataaacattaagggtgtgggatgataatggaggaacataaagttgaatcaggctgaattcattcattttggcccactaagtagagattttgcatttaatgttgcagcctggggaattaaaaaaggttctaatagtttatttgcttggttagctgaaatatggattaaaagatgrccccctgtgaatgagctggaaatgcttgatcttccttgatttaatgtagaggaagggatccaaaggcttagggagattgggattgtggagt

SEQ ID NO: 831880 - DNA, 635 bp, Homo sapiens
attgctgggattacaggtgtgagccactgcgcctggcctattttgarctatttttaaatgaagatgttatgaatattcttgtgtaaactgtcaatttaatttttcatggataaataataacagtacaaaaaggaatatacctcaacatgaagaaaacacatgacgaagccacggctaatatcatacttaatggggaaaacttgaaatcattccctctgagaactggaacaagacaaatatgaccactttcaccattgtacaacatagtattggaaatccttgccagagcaatcaggcaagagaaaaaaataaatggcattcaaattgaaaagaaggaagtcaaattattcctgttttctgattatatgatcttatatcaagaaaaccctcaagacttcatcaaaaactcttgagatttgataaatgacttcagtaaagtttcaggatagaaaattaatgcacagaaattagtagaatttctgcatatcaataatgatgtagccaaggaccaaatcaagaaggcaacccaatttacaataactgcaaaaaaaaggtaacaaataaaatacctatgaatatattcaatgaaggcggtaaaagtcttttataagaactacaacacagtgaggaaaaag

SEQ ID NO: 831881 - DNA, 624 bp, Homo sapiens
aatacaaacatattcttttcacacctaacttactaggctagtctcttcagctgggggagtctatagatatatttwaaaaaaaacagcaaggaggaatcatagatgttttgaatatgaagtgacctttaggagccaaagtatggagagataaggtaatgtggccaattaccaactcagtttaacaaacagtctggttcttaatgtgctttattctttattgcattgttccattctgttggctagctcattcttaggtcctgtctctttggcctactgttcttttcgcagattatcacgtacatttcacatgtcccctttccttggttctgcattcaaccattagcttcaggttaaaattactttcttagtgtacctgaactcattcataacggttccctaattgctctctcttctttactgggtggaaatctcctcaataagtttccgcaaaaggaatttccaagttccaatagttgcattaatgtgacgttagaactgtgacaacaggacaaggtaagacttgagagatatgctccatacaatcagatgccattgaaatcttttataggagtgttggccggccaatagaaagaatatgaaaacaatttagaaatggaatgacac

SEQ ID NO: 831882 - DNA, 452 bp, Homo sapiens
ttaaaatttaatgagcacagcaggyaaagcagaaaactttaatgtttcttaaaatttctttactatacttattcagttgataaaatattaaatgctttaaggatatggaagccaaaaataatatttggtaaaaccaatcatgcatgatccctatgagtctttgttaaattaaggctatttcagttcatagagaacaaaaaaagtgtccattcaaacaatttgaaaaggcagttagttttttcctaatctctaagggttaagaataattttgattgttctatttgttttctgaagaaaatctaagccaattaaataattaagtccctagatgaaatgcaaaaataggtacatcctttggtgatatttcaaagtaacaggtatctttcagtgtagccaaatttgaagagaggctcattattcactgtaataaaacaaataatgcttttgttcca

SEQ ID NO: 831883 - DNA, 562 bp, Homo sapiens
cttttgggagtacaatattttgtagaataactaaagaatagcacttatttctgaattaacgatttgggtaaattttggtctgccaatatttatacttattgcatattaaatayaaatgtttatatttaatgtttattaaataagttatctttaaacagaaaaaaacacataaagcaaggttatgtattgatgggttctaaaaatgttgtgaccagaaactccccaaaaactaacaggaatattcattattaaattgaataagctcatgctctttcttctactattcattaccttcaggtgccagcattcacacatgcccagtgatttaacactctcaaatattacacacttaagtatttggcaattgtggaaataaatggcacaagtacttattacatgttaggcaccatgcaccatgtttcatttattcctcacaacataattcatcaagttagatatgattagtctcatttcaatatgagaaaagtgagtctcggagagtttaaataacttttccagtgtcaaaaaaatctagtaatttgggacacatatttgaaatttg

SEQ ID NO: 831884 - DNA, 552 bp, Homo sapiens
ctttcacatatagcttgtttctagtttttttcgctggatatttggtttttgactacaggcctcagtctgctacgaaatgtcctttcactgattctacaaaaggtgtgtttccaccagctgaatcaacaagaaaggtttaactctgtgagctgaatgcacagatcacaagtagtttcacagatagcttccttctagtttttactgtgggatattcggtttattactatagtcctcaatgtgctctgaaaagtccctttgcagattctaaataaagagtatttccaaccagctgaatcaaaataatagtttacctctgtgagatgaatgcacacttcacaaagcagcttcacagatagcttctctctagtttttatggcaggatattttgtttttcactaaaggcctctgtgggctttaaaatgtctcttcgcacatrctacaaagacagtgtttccaatctgctgaatcaaaggaaacatttaactctgtgaggtgaatgcactcttcaccaaacagttttacagatgccatttttctagtttttatcacaag

SEQ ID NO: 831885 - DNA, 616 bp, Homo sapiens
tttttccaactaaatgacgattgaaaatcaagtattcttgggatgggaaagtcctgatagggagggctgactttttgtagctatggttcttcaggacctacttcaggacttgagtagcgggaactgtggtatacacagggatcctggaaccaagcccccatgtataccaaaggacaactgtagttggaagtagttttgaagtacagttttttcccccaaggagctcctggttttgtggggcaagggcatacatggatagttatgccactgtgtactctgtgcatgtgccaattatgcttcaggtgcttggggacaacaggggaagaggactaaagctgagtggttaagcagtgtttcccaaaagggatacctgagctgggttctgaaggtagagtaggagttggcgaggccaagatggcggggatgggcatgggaagctgaagaaatagcaatgcaaaaatgtactcctcaaagagaacagcgtgttcctccctgagtctttctcaccttggccagtggtgctttttcttccaggatgctggacactgaggagtcctcctgggcattgttgcttccctcatactccctgtcaayacatcttatgtgcagtcacact

SEQ ID NO: 831886 - DNA, 627 bp, Homo sapiens
ttctatatcctgtttatcttttataaatcccaacaatgaaaaagatattctaagctgtagccagtgagatgcttattggaagtaataatacaaaacttataatatgccaaagtgactacagaataattagtwtggccccttggtgatggtggaaatgagttttgacaggtgagtatgaaagtagacgtggccagcatatgttaaggatagaattggagctgccaaagatctcctgcaatagctctttagagtcagccttgaggtcatgcttttacttaggctgccatataacctagaggctgggactttctctggcttagccagacacaatattagatgtagaataaggaattagggtcagggaaatctaattattctccaacctctatccactcacccattttcgctgacaaatacacattgagattgtcctccaagactctagttatgtggaagaagaagagtgattttccttctctatatttctgggaaagaattaattctaattctggtgggtttttctgtagcaagattgtatgatgagtttataagctactcatgacaaatgggagactgaggatggttgaatgaaaaagttcttactagagtcataaagggctgattttt

SEQ ID NO: 831887 - DNA, 617 bp, Homo sapiens
gagagcaccatattgcttatgtttgtaaggaaggaacttggaaggatcttggacgggacttaacctacaaggagagagtgctgaggaataagactgtcttgtagcagaggagtgggaagtctcaggatagcacmgttagaatgtcttggcaagaatccagtgaaggtattataagggggtaaacaaaggcagcctctctgggaatggagagaaaagattcaagagatattcaaaaactagtttcaaaatgtgatccatcaagagtgacactgccttcaacattagtggcttcacacaacctgcctctaccctgaggcccgaggccacagagcaaacctctccccggtaccctccccacagcatcagtcacatgtagccagcaaatacttactgggcccctgatacacacaacacctcaaaagttgatcagactaattttaacaaaaagtcttactgacaaacacactcattataccaaatggcatttagatttactgaaacgtaagtatttattatttaaggatgtattgcaacatattgtgacatcttttcaaggtgtgcatgtacacagctttctgaagagcaatgtttcaggacttatcagtatcagtaggatg

SEQ ID NO: 831888 - DNA, 589 bp, Homo sapiens
tgtgaggggaggcccagaataattcttttcagctggtgaataaattgtaaaatttcaatggttaagctcttgactaaataatactttgtgatgacttccgttttcattaaactttcttcctgtgtgatctctaggcaaaacacgtttgtctgacatttaggaaacactgaatgaataaatagaatgactaactaccttttaaaaaattatatttgtttttagttacatattacactttagtcattttaaattaacaaatagaaattgtatgtatttatggtatcaacatgttttgatgtgtggatacattttggaataattaaatgaggctaattaacatgttcatcgccttaatacttatcaattttggggggtgagaacaattaaaatgtattccttaaggaatttttaagtacccactacactatcattagctatagtcaccatgcagtacagtatatctccagaatatgttcctgctatccarctaaaactttgtatcttttgaccagcaaacatctcccatcctgtctccacctgcaacccctggaaaccaccattctaccctttacttcaatgagtttgactt

SEQ ID NO: 831889 - DNA, 592 bp, Homo sapiens
aaacttaaccgttacagaacccaaggagaataacacagctctccarcagaatggtttctgcctctccaccctattccctactgattctcttcctcaggacccttgctaagtgttctcttgaccagatgaaatggtaaagggtaggaagagcagggaagaatacagacaggatggatggaacaagaagaatttctgaatgagtttggggccaacccccttttgaggtaaaacttgattttggtaatctgccaaattataaaggggaattttaagtaatctcctgtgtttggcctagacttgtagtatattaaggcattaaattggattaaaattatatatttagaattttcaaggaggtaagcagtatcaagaagagacttttttaaaagaaaggcttaataagctcccgcaacgttcctggccctcatctgatgccccaacagccctttgagatagacactactatccccacattacagaagtagaaactaaggtaaaggcatgttcctgccacaatggtgaaacaaggactgacccaggtagttgtcattcctggcctgccgttcttcaccacctcacagaacctgccgtc

SEQ ID NO: 831890 - DNA, 592 bp, Homo sapiens
aaacttaaccgttacagaacccaaggagaataacacagctctccaacagaatggtttctgcctctccaccctattccctactgattctcttcctcaggacccttgctaagtgttctcttgaccagatgaaatggyaaagggtaggaagagcagggaagaatacagacaggatggatggaacaagaagaatttctgaatgagtttggggccaacccccttttgaggtaaaacttgattttggtaatctgccaaattataaaggggaattttaagtaatctcctgtgtttggcctagacttgtagtatattaaggcattaaattggattaaaattatatatttagaattttcaaggaggtaagcagtatcaagaagagacttttttaaaagaaaggcttaataagctcccgcaacgttcctggccctcatctgatgccccaacagccctttgagatagacactactatccccacattacagaagtagaaactaaggtaaaggcatgttcctgccacaatggtgaaacaaggactgacccaggtagttgtcattcctggcctgccgttcttcaccacctcacagaacctgccgtc

SEQ ID NO: 831891 - DNA, 573 bp, Homo sapiens
tgatttttagtgttatcaatatgaagttctattttatgcataaaattttcaacatctattcttccatgttttaaattcagcacactttttttttcaaataattcttttggttttgacctttttatgttttgcgtttaagtgtcacttacattttgggagttttactgtctcattagttagcacatctctgaaaatggaatccaccaatatattttcaaagttaacacatcatgaccaattagaatttatcccaggaatacaaagttggataacattctaaaagcacagtataaacaaattaagaaaaatcatactagctcaacagatgtaaaaaggcatttgacaaatttcaatattaattccattaattcctgataaatactctcagcaaactaagaatagacgggaacttccacaacatgaaacagtgctacaaaaagcctacagctaacgtcgtatgtaatgatgaaagacgggctgaattacgtcccatyctccaaattcatatgttcaaatcccaacccaacggtaccttaagacgtactggttatttggagatatggtctttaaaga

SEQ ID NO: 831892 - DNA, 384 bp, Homo sapiens
taaattaaaaaatgactgaaataagtccttacctatcaataataaccttgaatataaatggattaaactccccacttaaaaggtatagactagctgagtgaattttaaaaaccatgaagcatcttgctgcctacaagaaatatatttcacctctaaacatacacataaacttaaaggtatggaaaaatatatctcacgtgaacaaaaaccaaaagcaagcaaaagtagctacatttatataagataaaatacactcaaaaacattacagtcaaaacacraaaaagaaacaagatcattacataacaataaaggaatcaattcagcaagaggatataacaattctaaatgtttatgtacccaatgccacagaacccaggtatata

SEQ ID NO: 831893 - DNA, 622 bp, Homo sapiens
ccccagccttgctagagatctagacatccaaatataagaagctcaaagaacaactgggaaactcatcacaggaagatcatcaccttggcacacagtcttcaggttatctaaagtcaggacaaagaaaaggatcttaagagctgtgaggtaaaagcatcaggtaacccatgaaagaaaaactattacagtaacaacagatttatcagtagaaactctacaagccagacaggattggtgtcctatttttagcctcctttaacaaaataattttcagccaagaattttgtatctggcgaaactaagcttcataaatgaaggaaagacacagtcttttccagacaaacaaattctgagaaaactcagcactaccaagccggcattatgagaactgctaaaaagagctctaaatcaaaacaaatccttgaaatacaccaaaatagaacctttttaatgcataaatttcacaggatctatataacaataatacaatgaaaaaagaaacaaggcattcaggcaacaaatagcaagatgaatagaatagtaccttcacatctcartactaacgttgaatgtgaaatggcctaaaggcaccacttaaaagacaaagaatggcagaatgaat

SEQ ID NO: 831894 - DNA, 573 bp, Homo sapiens
ctgtgttatacacataaggtcatgtacttctgttcagtaacttgctccctttcccaaagtagtagctggtaatcctttaagatgtaaacagattgatcatgcctttgctcacaaccctgcaaaggttcccatttcattcagaatgaaagtccaatccttgcactagcccaaagtgctgagtgatttgatacccttacatcatcagccccatctcccactactcatccacctattcaatccggccacatcagcgaatttgcttctcctagaacagaccaggcctgttcctgcctcaagattcttgcacgagctgttgtatttgcttggtgctcttgccctgccccatcccttcatctccttcaagcctttgccaaaacgtcactttctcaatgaggcctactctgaccactatatttaggattgtaaacccacccggatagcatggaattctccaaccaacttccttcacctgctcttcttcctttctccatcatacctaycacctggtaacagaatataaaaaacccttgtttatgaagcatattttactcttccctctcaccattgacatca

SEQ ID NO: 831895 - DNA, 551 bp, Homo sapiens
attaatagtgcctattttcattctccaaagtgttcccgtttcagtgacaaattacatggtcatcctactctagggattatagaaaccatcagattagaatgcccctctctcccccgtggcaagtacacagatctgccaggaaatgcaccttgacccattcagagtctcctctatgttccaagtgaaaatcccttcactattgacaagtgggaagatctccctgtctatttaaagtcagtttctcatggatacaaaaaaatagttggaaaaaataaataagaactagtatttgctagcacaaaaggatgactacagtaaaaaataatttcattgttcatttaaaaataactaaaagagtataagtggattgtttggaacaaaaagtataaatacttgaggtgatggataccctacttacttgatgtgatgrttatccattgcatgcctgcatcaaaatagctcatgtaaataaatgtatacactcactatgtatccaaacaaaattaaaaattaatatatagtatatattatctattatattatttataata

SEQ ID NO: 831896 - DNA, 569 bp, Homo sapiens
atttttgagtaacataaagttctgattgaagcattcactcttttagccctatcttttggratgaagaacctttgcacactaagtgttcttgagaatgcacaaagcaaatggtcttacatgtcacaggagtaaacttttttatattagttaacttaattaattttcaaggtacatttttaagcattgaaaaatttttaaaaaacaactttaaagtgaacaaatgtatggaagcctaaagaaaagatatcatatttgagtcatttaagtatattgaaaagagtaatgaaattcttgaaatgaatacaatgtacattcatttatgcaatttcttattctatgcccatttcatttaaaaataaatctaagacttctaacacatttacttaatgtgcacataatatagatttaaactaaatttaagtattcaattcaccattattcatattaccaggattgggtcataaaataatttttatatccttattaagcaaaacaaatttcattgcaaatcaaggagtcagttaagaaaagacactcaaatctctgaaactcacttcaattattattaa

SEQ ID NO: 831897 - DNA, 446 bp, Homo sapiens
ctgagcagttaatgtattaaagaaaatgatggcaacaaatcttgtagcaaatagaatgttaattttactgttcaggaataatcagaaatgaagtttaaaccgattaataatttaaaattattatttaaatttaaaattattataatttaaaatgccaatgaatatcttatttatgtttactttaaaaattttgttttgatatacagattggattagtctcttctcatgcagctaataaagacatacccaagacgggataatttataaagaaaaagaggtttaatggactcacagttccacatggctggggatgcctcacaatcatgacagaaggcaatggaggagaaaaagcccrtcttacatggcgacaggcaagagagaagtgcaggagaactgccctttatgaaactatcagatctcatgagacttattcactatcacgagaa

SEQ ID NO: 831898 - DNA, 541 bp, Homo sapiens
gtataattaaaaaaataaaaaataataatatggacattgcattatttattggtaaattggctttccatgttgctaagtttatartcagtattttctaccttttcccccttatttatttataccaatattgcatattatcattgtctaagacatccaaggtcatttactgctagcttcatttctctcaggcttacgagcctccttacaagcccacacattttatggagccttttctcacattatcactctaatccagatcttctttttatttcccagtattgccaattagttcagtatctttccactgtgtgattgtgctatagcaatagacatatgacctggctctatctgctaagaaatttaatatattacttcttgttcagttctgaaggttgtagcttggaaagtatcaaacaaaactactaaacaaaagtagccttgggagaatatgtcttctagtataataattttctgttcatttttaatatatgtaaatctcagtataaaatttggttttcatatttctagcaacacataaaga

SEQ ID NO: 831899 - DNA, 622 bp, Homo sapiens
tatcagtcataacattcttcccaaaatgtttaaaattatcagtctgacaggtttttctttgtatgtcggtttcctggtgatatgtatcctgaagttatctaccctcctgactcaaacaatatcaaaagctgkgtaggtctgtttcacagatgtctttctagggttttgtttttccattgttcaagaaaattcctttgtcctcttttctactggaattactgaatctatttcctgaatctattatgttcctatttctcatttgtactgttttaatggagtatatcccctgggagcttctggggaaaaggtacccgaagtgggtacctcctttctgcaggcaggtcagcctgacgagtgtcccactctcagcagagaggagacctgaagtgagtagcttcttcccacagctggttgtccctgtgtctgtgactggcagattccagggtttttatgggctcaaaagggaggaagtgtatgctaattgggccatgggtggtcatgggtgaggccggaaaaagcactctaatatctcactcctagctgcagactccactggtacctggcagcccagcccccagggttcaggctgtccccagcttgaaggtgaggtttcaccagtgac

SEQ ID NO: 831900 - DNA, 645 bp, Homo sapiens
cagaaggtaacccattgtcttgaaggaaaatacccagtcctggtaggattcattgcyttctgactaaagatctcttaggccttgaataaataccagcacttgccatggggtttgggtgagacccagtgccacagtggcttcaggtgtgacccagcacattctcagctgtggtggccatgaggagagactccttctgcttgaagaaaggagagggaagggtaaaggaagctctgtcttgcagctggggtaccacctagaccatagtgaagtagagcaccaaacaggctccaggagctccattccagacaatggctcttagatggtatttttgggcctgccctgggccaggagggagccttctgccctcaatggcaagacctagggctagcagcattcaccacaagctgactgaagagcccttggatcttgagtgaatgctggtgacagccaggtagtacacaacatggactcagggaaagggaggctgtcatgaaagactccatctgcttgaccaaaaaagagagaagagtgagaagaactttcttttgcagcttgggtgccagctcagcaacaatagaacagagcacaaagtacattcctaaggtttctaattccaggccctggatcccagatggcatctctgga

SEQ ID NO: 831901 - DNA, 564 bp, Homo sapiens
taccacctcttatctgactgtaggaaatcttttcttgggttgctgagagagaggcaggaagagaagagcagayaggggagagggagagaggaaaaaagggagggaagcaagaggggagatgagagaagcagatgagggaagggcagcagagtggtcagtgataataatgaattgacattcttaccagatacatttctgatttcaagctaaaaagaataggatctctccagcctgtgtatgtctcctcttccctggaggagaggcaggagtcatattattcattaatctatgtcttagcccaagtttcctacaaaaaaaagaaaggattctgaggcaaagtttacatgctattgttttattgaggacttcaatcctggggcagcaagaataaagtaaatttggccgtggaggaagaagagcaaataccaggtagtgtgctactcagctggttacattcttataggtgacacagctgattgcttggtcacataggacatttctggagtggtcacctgaaatcattgtctaaccctttggattagaggggaggcaggcaaaataatt

SEQ ID NO: 831902 - DNA, 312 bp, Homo sapiens
ttagtgtgttggctttctcaaatgctggttgtagtagtaatgaactggtcacatgtacagacttaggacctcctggttagccagggttgtgtaggcaatggtgatagctgaggtcacacacaagttttctccttcctgggtgtggtattattcaacttggagatgctgtaatggactgcgtcagctrgcctccagccaaaatgtggcacttgcaaaagagcaccagctatggtagtagcagtgggatttgtgcttgctttatgttacccaagagaggtactccggtttctcaggtggtgggcataaagctcc

SEQ ID NO: 831903 - DNA, 649 bp, Homo sapiens
tatttagagtaagaaacaaaataaatccttgtgyatttattagccagctcactaattatcaaccgatgtcctatcatatatcctctataccctcacattatttggaggaaaattctatatatcaaatcatttcaccaataaaaatgccagcatatatcattaaacatcattttaaagaatgataaccacacattttcaaactcatgaacataaaagcattttaaggatgacctgtgattatcttgggaaccatagtgatttgtgtgagaaaatatttaatgcgggttttttgttgactttatagaaaatttttactggtaaatgagtgaatagaatattacggaaaaactaattgtctataaagcatatgaaaagattgttggataatataatgtgaattcaagtttttctttaggagacttaggctattatgggactaggtgtttttcctcaataaagtcttccctctcatcctttctcttgtctcctggttatattcttttactttcttccaaactttgccataagaaaaagaacatggttttggtatataaattcgatttgaaatcctgtggacactgggtgaattattttttaaaactgtagctctgatttctcaaagataaaatgaggataatatttatacaat

SEQ ID NO: 831904 - DNA, 470 bp, Homo sapiens
actcgccttgaacaaacatttgaagatatgaaagacatctcaagatgttccatgaaatcgggaaatacaaaaaaacagttgtgaaataagagttaaccaaactaaagggaaaaaaggaaaatcatcycaaaaatttagattacaagaaaaaatactgattcaaaatataaggaacactgaatagaggagtaaagatagccaaaacaaagaagacaaaataagaaagaggtgaagggatccaagagaaattaagatagctatagaaggtcggcaaaagagactcaacatacatataattgaagtttcagaaaatggaaaaagaactgcactaatacttaaatataatccaaaccaatatttctgaaattgaagaactaactatacatattggaaggatctcctgtggacctggaaattttgaatcagaatagccaaccatgagatatctcagtaaaataatcagacttgat

SEQ ID NO: 831905 - DNA, 564 bp, Homo sapiens
ttgtcctcaatcttagggaataaagctcaggattagaaaaccacagttgaagccagtatttttgggaacatgtaacttaattcatgaaaacctgaggctcagtgtagacaagcttgagagtttaaaagtcttaggggttcagtctcaggggggtctttacacttttgtgttttacctccaggagccctgccaagttctcactgtgaaaattggagtataatctcttcatccttctggcagagggaggataaaaataaccactgtaatgtaagcccagagcagcctgcccttaccctctccttcaaggggaattacaagagcctaactaatgtgaggtaagaaaaacattcaatccattcaactcatcctcctctagctttcctgcttcacttaagtggggagaagctgagaagccctttcaaaggtcacagcccaggacacaggctcagyggaagatagcaacccaatcataagactatagaatgctgttttccccataccttacaaccacatcaacaggactactgtaaataatggagaattacaattgaaaaattgaaagtt

SEQ ID NO: 831906 - DNA, 655 bp, Homo sapiens
tcgcagtggtggaggtggggtctggagcatggtgtgcacagagcagccacagctctggggtctgggatgggtagagggttggaggggtgggtggcagtcctggtccccactggcacaacagtgtctaatttctgtgggaaggtaaagagcagcatctccttctctgaggggttcatggcagtgatggctgttggttacatcagtggcaaaagcttctgctgttctttgaagagcaggccactgggggctgtgacagaaccgactgcatagctgaatgatggcccttcccaatttctttgttcctagccatctcgatgtgccacagctaggctgtctctccagtgatcctttagcgggggtcattatccatccattgttccactgtgttgctgggcacattcttaattggacccttgagccctccaaaggcttttttcatttgtggatagctgcttaattgttgccctttgtgaggagatgaaggctggtatctcctactatgtcaccttgctgacatcaccctcctaagatggttaagtttatgttatgtgaatttcatctcaatttaacaaagcgattaaagaatgtaaaaagccaggtgtggcagttccagggagtctgaggcaggaggatccsagctaccagggaggctgat

SEQ ID NO: 831907 - DNA, 659 bp, Homo sapiens
ggttaggaccttggttttctattgwgttccatgggttgatgtctctgtttttatgcaggcaacatgatgttttgattacaatgactttataatatgttttgaaatcaggagtgtgatactaccagctttattctttttttttttttttttttttttttttgacagagttttacttgtcacccaggctggagtgcaattgcatgatcttggttcactacaacctctgcctcctgggttgaagcaattctcctgcctcagcctcctgagtagctgggataacaggcacctgccacctggcccagctgatttttgtatttttagtagagacagggttttactatgttggctaggttagtctcaaattcctgacctcaggtgattcacccaccttggcctcccaaagtgctgagattacaggcatgagccactgtacctggcccagctttgttctttttgcttaagattggtttggctatatgggtttttttgtggttccatgcaaatttaaggacatttctccatttctatgaaaaatcacatggaaactttgatgagaatttctttgcatctgtagattgcttttggtggtatgactattttcacaaaattaattcttctagttcatgaacacaggagatctcttcatttatctttgtctt

SEQ ID NO: 831908 - DNA, 552 bp, Homo sapiens
caagagaacttttcacagtattggyaattgaagcttaagccataacgttttgggagcggaccacctccccagtgctgcggtcttggtccccgaacacggacaaaggcccctccatcttcaacgcaggggtatacgtcgacttccactcacacacaccgcgggcaaccagtatcatctcacctcagccaaccagcgaccagagcagtgatgcgtggagccgaccccgcatgacgccacaggggctgctgggtaacaccccctacaccagcttcccagctcccccaacgcttggccgcaggacatggcaggaaagctagtgtgaatttttaacttgggcaaaaatttgtttttggagggcatgggagggaggaaacttagacattgcaatgcttcatggctctccaaaggaccagtgtataaagagatgtgcaatgtatcaacgttttatgggaggagggaataaatagggggaaaaagtctgaaagctccttaggggggtaatgatagaaaaaaaaaggttgagaaacactgcaatatggggtgcagtctgtt

SEQ ID NO: 831909 - DNA, 506 bp, Homo sapiens
gttttgtattcccctcagtgcatagtacatcagcatataacagttaatagtagtggtcccctgcttstggaatttatacacagcagcttcccaggccatggaagaaattccacctggatctgtttatttccttcttgaatagaagatgagattttcccttcatgttctcatctccgtctaaagtgtttaagttcaaaactctcagttcctgaagttggaggttacagtgcgctatgatcactccactgcactccagcgtgggcaacagagtaaggctctgtctctaaaaaataaaaataaataaaaaatagaaaataaaaataaaactctcagtttagggtttaaaaatatttgatgttggtgatcaataaactttatccattctaatatacttcctgaaaagtcagtctttcttccctttcccacttcctctgcgtgtttctctccagttctcattagtttccccatttcccctctttctaccagctttcagtgtgagttaatct

SEQ ID NO: 831910 - DNA, 399 bp, Homo sapiens
ccaataatggcattcctgggcatttatcttggagaaatgaatacttacatttacacaaaaatttgtacacaaatattcatagcagctttatttacaataytcaaaaattggaaaaaaccctgatgtctttcaatgggcaaatggttaaacaaattatgatatacacatatcatagaatagtgttcaacaatgaaaaggaggagcgggatcatcatggcagatgggaggcaggactagattgcatctctggcacagagcagtgtgcggggactcacactgtgaattttagctccagatcgaccgcaagagcaaaccagccatcccaagaggacccacacaccctctgaaggaagtggacccgggataccaccccgcaaaactgttgagtgccccaaccgt

SEQ ID NO: 831911 - DNA, 600 bp, Homo sapiens
tcttgcaaaaaaatgcgtaaaactaattggaaccctctaaaggtctctacagttttgtacctccagtattgaaatgatgtgaagatgaaatacatagcaagtgaattgtagaaaataatgctgataattttaaagagtgaaaaactaaaataataagaaaaaatcttttaaaattccatgtgtgaaaaagtgtattgcaagaatagattgtggacagttgcctggagatagtttataagagttgggtgactttcacaatcattatatcttaaagtcttgtatcatgatgaatagctgaggtttttctttcaagacacagctctccttaaatcatattcaatttccaaataaagacagtaagaaggtaatagtttcatctaacatgatacaactatcatgtgactataattttcagaattttggactttaagattttgatttaaagggcgtttgatatttagggattttgatcctttgggatttcaacatttgggattgtatctttcaggattatgatccaaaccaagttycctggatttgataattatgttgagatgttaccatctggggaagctggctaaaagaacatggaacatttgc

SEQ ID NO: 831912 - DNA, 527 bp, Homo sapiens
agaagcaacatctttgttggtgcctacttgtcatcagctagaaaggtccgattttttttgcaaaaaccttaggaacaggattcagggtacyttccaaaagcgaaaagtaaaggcagacttcagggctcctagaaagtttacatccaagaattccctataatgtaaacttgaaaattaatgctttttcctccacaagaacttgtttcaaaaagttagtctggtaactcattctcataaattgttcttagtatttttcttgcagattttcatgatatggttcccaaaataaatcagtagcaagcattatgatctgtgccttccacttcagcatagtactttgctccataaacataatataatgaacatttatgtatcactacctttcttacttttctttactcacttcatcatatcaacaaaatgtatttgatacacagttgcaaataaatattaagctttacattttgtaataaatatttctgagtaataaaaatgttccaactgatcaaaaaatttgatatttgatg

SEQ ID NO: 831913 - DNA, 636 bp, Homo sapiens
aagcattcaaagaaacttctttgtgatgagtgcattcatcagaaacagttgaacgtttcttttgattcagcagttttgaatctctcgttttgcagatctgaaagtggatatctgtagcgctttgaggcctacaatgcaaaagcacatatcttcaaataaaaactatgcagatgcattctgagaaacttccttctgaggtgtgcattcaactcacacagtcaaacctatactttgattgagcagttttgaatctctttttttgcagaatctgcaagtggacctttggagagctttgaggcctattgtggaaaaggaaatatcttcacataaaaaatacacagaagcattctgagaaacttctttgtgatgtgtgcattcaactcacagagttgaaccgatcttttgattgagcagttttgaatctttctttttgtagaatctgcaagtggatatttggagcgcttggaggcctactgtggaaaagcaaatatcttcacatgaaaactgcacagaagcattytgagagacttatttgctatgtgtgcattcatctcatagagttgaaactttcttttgatttagtagtttcgaaacactctttttgtacaatctgcaattggatatttgaagcgattt

SEQ ID NO: 831914 - DNA, 636 bp, Homo sapiens
agtgagttgctcaagatggtcagaggctgtcttattccatttgggctgccgtaacaaaataccttagcctagggggcttataagcagcagaaattttgkctcataggtctggatgctggcaagtggaaggtcaaagtagtggcagattaggtgtctgttgaggacctgtatcttacagagggcacctcctagctgtgtcctcacatggtggaaggagagaacaagctcccttggctcccttttacaaggcctcttatcccattcatgggctctttgctttcatggtgaaatcacttcctaaagtctttgcctcctaattcaaacctaacctatcagggattagttttaacacacggattttagggacacacaaacattgactatagcagagacgtagctggacctgggtctgggaccttctgggtccagctccattatgacactcacactgcacatggcctcccacatgatgtaattctgttctgtgacattgtgcccatgaggcagggatgcagtagaggcctctgcagacatggcttgttcttgggacgtccgcctggctttatgctgcaggcctggaagaatccaccagctgcccactctcatgcctgactcaggttcgtgggtccctccagg

SEQ ID NO: 831915 - DNA, 604 bp, Homo sapiens
gaaaattatagatgatgtattattatatgtgcaatttatgggaaagagaggataaaagatcttttgaatatggttagatttacatccayctaaaaacatgtctgtgttctgcattcaaaatagtggagaagttttaaggtaaaataaaatgatgtttgcatacttcaattttttaatgattccacactttaatagatttttttcaattaatccactaaatagttgtctcagataatataagttaacagtgattctagtgtataaaaccataaaattggcaagtacagtcaaggaaatgagatacatgaaagtcagaactacttatgaagacagcttaattttgcctcaaggcatcttttttccctgtgcattctatatagtgccaattcttgctatttggtgttttaaaggtcactcagaacctggaactatccatcgtagccattccagcctttagtaatgtcaatcatcatatcactcctctcttactattgactgctgaacatgttagaaaaagtcatgcagtgatggcagctggaatgacagccaatccatgttatctaacatcagctgcccatcaagactcctgggcaatcatttatct

SEQ ID NO: 831916 - DNA, 550 bp, Homo sapiens
agagtgcagtggcacgatctttgctcactaccacctccacctcctgggttcaaacgatcctcgtgcctcagcttcccaagtagctgggattacaagcatgtgccaacatgctcagctaattttcttttattttcttttttctttcttttttttgggggggtgggggcggtatttttagtagagagactgggtttcatcatgttggctaggctggtctcaaactcctggcctcaagtgatctacctgcctcggcctcccaaagtgctgggattacaggtgtaagccactgcctggccaggagatttcatattaaagtacttttttctgtcccctctttaaacgtcaagagatacagacacagttggcccatatctctatgttgcaataatcagcctgggatgaatagccacttcctgttctcccagttcattacaatcctcagaagcacctacttctctgtttcactgatttctagtacatggttgacttctgtaggcattagagcttgtgattcatggtggtcrgccctcaaataaatgaatgttgaccc

SEQ ID NO: 831917 - DNA, 640 bp, Homo sapiens
aacgagtttatgtgtagaacagagaaatgaagagagagctcattagaagtcgtgttgtttcactgagttcttgtaaagtttcrtcaggaagtcatccttaggaacgttattgagttttggccaacatgagattaggaggcttacatggaatattacaggtttaccatcccaaggagaaaaggagaatatagcattctctccttggaaactccttggaaagctggtcatatatgtggtcttttactcttgttatctgattcagaaatgccatattcagcactgcaattttgtgagagaatgtccccaaattaattcctggagacatttgatataagtccctggcaatgacacagcagacagaactgtgaaggaatgaaaaggaagaactttccttgcagactaaaaacacaggagaaccacaactattctcaggaagttggttcctggtttctcttctgcacaatccctactctataacaatcccctttgtgtgacagcacgtgtgtgtgtgtgtgtgtgtgtatgtatgtgtgtgtgagtgagatgtcattgtgtgagttcacctacaggcccatggtgtgctacattaagaaaagtttggctacacagtgagggcagggccattgacatactttactta

SEQ ID NO: 831918 - DNA, 626 bp, Homo sapiens
aagtgtagagtatcagaaaatttattgttgtacataatttatcaagaatwttcaaaatccttttaaaaaccagagtttcttaatctggggttccaccgactggctttctggggatccataaaacccctgaaattttatatagcattctctgtttacattcattttctagagagaagtttcatagctttaatgagattcttgctgtggtctttgatctgtagatcaaaggcaaaattcttagcaggatccagaggctcaagaaactttagaatttagtgagtatataaccatggctaagaacttctcactttacaatagtttacttcttcttttttttttcaggtaaagctaatgaaaaagcactatgcaatgtgtaaaaggtaacaaaactgcttaataagataaataattacatatttgtggcactgatgagccagctaagtatgttcaggtgacacttctgtggagggaaaactaatttattataatttaatagcactttacaatagatgtgtaacaaaccaggtaataaaacataaacagtagaagccttttagctgatgttgaattctaaagaaaaaaaagtactttttttttttttttttgacatggagtctcactctgtt

SEQ ID NO: 831919 - DNA, 626 bp, Homo sapiens
aagtgtagagtatcagaaaatttattgttgtacataatttatcaagaattttcaaaatccttttaaaaaccagagtttcttaatctgrggttccaccgactggctttctggggatccataaaacccctgaaattttatatagcattctctgtttacattcattttctagagagaagtttcatagctttaatgagattcttgctgtggtctttgatctgtagatcaaaggcaaaattcttagcaggatccagaggctcaagaaactttagaatttagtgagtatataaccatggctaagaacttctcactttacaatagtttacttcttcttttttttttcaggtaaagctaatgaaaaagcactatgcaatgtgtaaaaggtaacaaaactgcttaataagataaataattacatatttgtggcactgatgagccagctaagtatgttcaggtgacacttctgtggagggaaaactaatttattataatttaatagcactttacaatagatgtgtaacaaaccaggtaataaaacataaacagtagaagccttttagctgatgttgaattctaaagaaaaaaaagtactttttttttttttttttgacatggagtctcactctgtt

SEQ ID NO: 831920 - DNA, 524 bp, Homo sapiens
gtactcactgaaagaatcatttgggcaaggaataatacaaaaagtaatgttagtctgttccctaaatatagaaaattttggagtgggtctatttatttgtagttcttacaaaattccaaagttatgmgacctcagggttatcttgctctcctatcctacctgccttctttgaatagagaggtaccactctagttgtctgcaataaataaaattatcttgctgcaaagatgcaaagcacattagaaattcaccaatcatgttctatgggaaagtaatttcaagagagacaaaagggagatggatgttagagaggcaatccaaaaatgtctgatatacaagacaatacaccttcatcaaaaacaccattcaagttgctcattaggaacctgtagaatctctaagagctgcaaatattgtcagaagacagaccctcattttcagatgtctgagatttcttcttgaacatcccacaagtttagcacattcaaatgtttaaaataaaactgaccttccctctcaaaagt

SEQ ID NO: 831921 - DNA, 634 bp, Homo sapiens
ataaattagagagacaaataattatttcactgaggcaaataaattgtaaaggttgaaaacaaacagtatcttatattaacatacatggacaatgctccacctgtagtaaggagaaaaaaaagtatttgaaatgcaatggttatgccaggaaaactgactgtgtgatcctcaaagggaaaaattctaaagataaaagaaaatggaaagttgtaaaaatccattcagtaagggtaagggcagacaggaagagtttgggcatggagtttagagtgaaaaaagagacaaaattaaatagaagtaaaaataaagatgcagaaaaaatagatattgaatatttacaagccattgtttgagaacacagtagaacataagcaaaaaatagctggatttagaatattttctttactcattatttttgtctgaagtttagagaacatgtcttccaatcatgttttttgctggggcctaggagtagtagtttgtttaagttgttacctagtgctaatctgtgactccagtgtgaaaaagttcttgtgtataatcctcgtgcaataaatttgttgaaaattttatgttggctggcatgcctaccrtatgggagatccaggtaaaattaatgccccatttttctgca

SEQ ID NO: 831922 - DNA, 596 bp, Homo sapiens
agtttccacttgggggtgatagatacagggcacgtctgctcacgttcaactccatcagccaaagcaaatcacatgactgaagccaaaggcaatggagcaggggaaattgctrtaggagaagcaaggattgaataatttcaaacaatgttacgatctacaacaaagggtgttttacaatgccataaatttacactaattttttcttgcactaaattcctcagaatagcattcaaagccgacaataatgtggctctaatctgtatcccagcctcagaacccactactcctttataaaacttctgtgatctagtaacctagtacttctcataattctatgaaagcacttgcatttgtaagcccacatggtcttatgtactttgtctatccttcccgtaacacatttatggactagcgttagtagatttcttgagtttcctcaaatgaaccacactctttcatgattgagttcaattattttctctgcctggtatgttctttagttacctcttaccttgcatcttgaattactgcctgtccttcaaggaccaagtcttcctggtcttggtcgtgaaatctccctacatgcacatagtcag

SEQ ID NO: 831923 - DNA, 609 bp, Homo sapiens
atccaaaggcatagttgaaatgtattagcctttactgttattcctgtgaaggcttatagtgttggcatccattccctctggatttcgagtctgtgttcacagytgataatctcacattgagccatgatactctttgtatcattatcattacctgatataaagaaaccagacagaccattacctgatacaaagaaacttcacagtgaattcatagaaaagacagaaaaaagttttgctgaatatgtcgtatatacatatatataatattttattttaaaatgtcattgaacatatacatttctttagctttttccaggggacattgcacctaagtttcaaaacacacaaaatagatcccctttactaaacagttttcattttggggttacaaaaaagtcaatgtttcacaatcacaaagcataaaggtacatggttctgaaacaatttccaggcagatttctctcattcactgtactagggtagttttggaaacccagaccatgatccattccttacaaatgatctccaccatgggcctccctgggtctccagaaaaaaaacaaagaaaactgggggcaaaacaggagtaaaataataacctcaggactc

SEQ ID NO: 831924 - DNA, 609 bp, Homo sapiens
atccaaaggcatagttgaaatgtattagcctttactgttattcctgtgaaggcttatagtgttggcatccattccctctggatttcgagtctgtgttcacagttgataatctcacattgagccatgataytctttgtatcattatcattacctgatataaagaaaccagacagaccattacctgatacaaagaaacttcacagtgaattcatagaaaagacagaaaaaagttttgctgaatatgtcgtatatacatatatataatattttattttaaaatgtcattgaacatatacatttctttagctttttccaggggacattgcacctaagtttcaaaacacacaaaatagatcccctttactaaacagttttcattttggggttacaaaaaagtcaatgtttcacaatcacaaagcataaaggtacatggttctgaaacaatttccaggcagatttctctcattcactgtactagggtagttttggaaacccagaccatgatccattccttacaaatgatctccaccatgggcctccctgggtctccagaaaaaaaacaaagaaaactgggggcaaaacaggagtaaaataataacctcaggactc

SEQ ID NO: 831925 - DNA, 657 bp, Homo sapiens
gggaagtgttttggtcatgagggtggatccctcatgaatgccttggtgccttccccacagtaataagtgagytctcactgtattagttcatgtgagagctggttgtttaagaacctgtctgtttttggccggccgcagtggctcacgcctgtaatcccagcactttgggaggccgaggcgggcagatcacgaggtcaggagatcaagaccatcctggctaacatggtgaaaccctgtctctactaaaaatacaaaaaactagccggccgtggtggcgggcacctgtagtcccagctacttgggaggctgaggcaggagaatggagtgaacccgggaggtggagcttgcagtgagccaagattgcaccactgcactccaacctgggcaacagagcgagactccgtctggcaaaaagaaaaaaaaaaaaaagaaagaaaaaaaaagaacctgtccattttttttttgctccctctcctgctgtgtaacatacctgctccctctttgccttacgctgtgatcgtagacttcttgatgcctttgcagaagcagatgccagcagtatccttcttgtatagtttgcagaaccatgagtcaaaacaaacctcttttctttataagttacccagtctgaggtattccttcatagcaaaaaaaatg

SEQ ID NO: 831926 - DNA, 520 bp, Homo sapiens
gtccagcactccccagtgagatgaacctggtacctcagttggaaatgcagaaatcacccgtcttctgtgtcrctcacactgggagctgtagactggagctgttcctatttggccatcttggctcctgaatttgatcttgtcattatgttgctagctggttattttgcccactagttgatgcagtttcttcataatgtcgatggtctttacaatttggtatgtttttgcagtggctggtaccagtttttcctttccacatttagtgcttccttcaggagttctcgtaaggcaggcctggtggtgacaaaatctctcagaatttgcttgtctgtaaaggcttttatttctcctttgcttgtgaagcttagtttggctggatatgaaattctgggttgaaaattcttttctttaagaatattgaatattggcccccactgtcttctggcttgtagggtttctgcagagagatatgctgttagtctgatgggcttccctttgtgggtaacctgccctttctctc

SEQ ID NO: 831927 - DNA, 523 bp, Homo sapiens
acttttgagagggaaggtcagttttattttaaacatttgaatgtgctaaacttgtgggatgttcaagaagaaatctcagacatctgaaaatgagggtctgtcttctgacaatatttgcagctcttagagattctacaggttcctaatgagcaacttgaatggtgtttttgatgaaggtgtattgtcttgtatatcagacatttttggattgcctctctaacatccatctcccttttgtctctcttgaaattactttcccatagaacatgattggtgaatttctaatgtgctttgcatctttgcagcaagataattttatttattgcagacaactagagtggtacctctctattcaaagaaggcaggtaggataggagagcaagataaccctgaggtckcataactttggaattttgtaagaactacaaataaatagacccactccaaaattttctatatttagggaacagactaacattactttttgtattattccttgcccaaatgattctttcagtgagta

SEQ ID NO: 831928 - DNA, 626 bp, Homo sapiens
aaaatggggcattaattttacctggatctcccatayggtaggcatgccagccaacataaaattttcaacaaatttattgcacgaggattatacacaagaactttttcacactggagtcacagattagcactaggtaacaacttaaacaaactactactcctaggccccagcaaaaaacatgattggaagacatgttctctaaacttcagacaaaaataatgagtaaagaaaatattctaaatccagctattttttgcttatgttctactgggttctcaaacaatggcttgtaaatattcaatatctattttttctgcatctttatttttacttctatttaattttgtctcttttttcactctaaactccatgcccaaactcttcctgtctgcccttacccttactgaatggatttttacaactttccattttcttttatctttagaatttttccctttgaggatcacacagtcagttttcctggcataaccattgcatttcaaatacttttttttctccttactacaggtggagcattgtccatgtatgttaatataagatactgtttgttttcaacctttacaatttatttgcctcagtgaaataattatttgtctctctaattt

SEQ ID NO: 831929 - DNA, 625 bp, Homo sapiens
agactctatggaaataaatatgcgctagagttaaraagtagtgtgccaagctggggcgtagattaaatttgtgtgggctcatgaggttggtactccaaatgctacctgagccagagtcacagcgtttggtgagtatgctgaaggatttgggataaaaatggaataagtgttcatgaaaaacgccagaagaaaaacaccagtagctccgtttagttcaagataagaagtatgttataaacattcatgaagaaaaattccccactttgcttggaatttatctctgatcgcctggattgtaaaccacatccagagacataaattaataatcatatatatcattcatccttcacatatagcttggatgttgccttgtcagggaaacgttggtgaatctaaacccctttctcctctgctcccacaaaacccctcagctcacacttcttttgtaatacctcttatagcactttgcaaattatgttgagctcacctcttcaactacttgtctccattaccggaatgtgaatattttagggataatgatccaatctcgttgatctcatgtctaaggcccaagaactcctctcatggttcaaaacatatttattcaattagtaaatacacacat

SEQ ID NO: 831930 - DNA, 588 bp, Homo sapiens
atgtgcatgtagggagatttcacgaccaagaccaggaagacttggtccttgaaggacaggcagtaattcaagatgcaaggtaagaggtaactaaagaacataccaggcagagaaaataattgaactcaatcatgaaagagtgtggttcatttgaggaaactcaagaaatctactaacgctagtccataaatgtgttacgggaaggatagacccagtacataagaccatgtgggcttacaaatgcaagtgctttcatagaattatgagaagtactaggttactagatcacagaagttttataaaggagtagtgggttctgaggctgggatacagattagagccacattattgtcggctttgaatgctattctgaggaatttagtgcaagaaaaaattagtgtaaatttatggcattgtaaaacaccctttgttgtagatcgtaacattgtttgaaattattcaatccttgcttctcctayagcaatttcccctgctccattgcctttggcttcagtcatgtgatttgctttggctgatggagttgaacgtgagcagacgtgccctgtatctatcacccccaagtggaaa

SEQ ID NO: 831931 - DNA, 611 bp, Homo sapiens
ttactctttcctgaggcccagaaatctatgtcaatgattttgatgtgcagtcacatttgagagtgagatatgacacttgtgaatttgaggactagaggctagtacaaaggcaaattttgagtacgtgtgagttctcatatgatattaaattggcatcatagatgagagttttttctgagtgagaacagaatttagcttagatcagtctttaaaaaaatgtaaaattcttcacactttacttcttagaagagactgaaaatttgaagaagagggcaagagattaatttaggatttggcatcagaggagttcctcagaaatgaagtcacataaagactctttagaagcaaagtcatcttataacaagagagaaatattagcaaacttttgcttcacaacacggaagaaaatggatcagtttacttgaactgtttaaaaataaatttatatattattatatctgcacaaagctagattatttttaatgttagcaaaggakaaaaatattaattttttacacaatcttctaattgtctcagcatcattatctataatttattaaatcgctcaataatttaaaaaagaaaatgtacttaaaatatttaaatgtttt

SEQ ID NO: 831932 - DNA, 632 bp, Homo sapiens
ccaacccccaacaatttgtagaagatgaagatgatgatacattctcctatactgttagaatagcagctcaagacttgttgctggtaagtttaccttgatayttcagccacataatttctatcagtcacttgagcatttcttcttttttgtagacaactaatccaaggtgagcagtgttgttgggtggctttatctcagactttattggggatgcaagagagtttctgaaatgaaattcgagactcagaaattctaaaatcattgctactggttctaacttaaaactaaatattagataaaagaattgtgcagaccatagggccggggtgcgggggagaattgtatagaggataaagtgttccatggagtaagggtagttgaatcaagaacatttcagtttatggctgggcgtggtgactcacacctgtaatcccagcacttggggaggccgaggcgggcagatcacctgaggtccagagttcaagactagcctgaccaacatggagaaaccccatctctactaaacatacaaaattagccgggcgtgatggcgcatgcctgtaatcccagctactcgggaggctgacgcaggagaattgcttgaacccgggaggcggaggttgtggtgagcc

SEQ ID NO: 831933 - DNA, 627 bp, Homo sapiens
ggtcaggtgtctatctttaactaccacacccagagcctggtgcygggctgtctgcctgtggatttcatttctgccttttagtttttacttcttctttctttggaggcagaaattgggcataagacaataagaggggtggtctcctcccttagctgtaggtgtgcagtcttatttctgctgaattctttactaggaatgttaaaataaattaataattcattttcattttacatttttatacaatcaggtaacatgaaatataacttgatgtacaattttgcctgttacaaaggatgtgctaaatatagtggtatatgcacagaacatattggcatgacaacaggctgaataaatagctattttacttaataaaaatgaaaaaagaaaattataaaataaggaatatcaaacacaaagtccaaattcaacagcacataataaaagttttttctaaaatctagttttttctttgaattcctgaaattaatacccttctgaaaacatctactgtatttagacataattaagatataactgaaattaaagaataaaattctcctaccacttcattgagaaaatcctgcctcattctgattactggtgtcagtgataagctttgtttctata

SEQ ID NO: 831934 - DNA, 510 bp, Homo sapiens
gcagtatcattcaggacataaaaatgggccaagaattcatgacaaaggcgccaaaagcaatttcaacaaaagcaaaattggcaaatgggatttgattaaactaaagagcttctacccagaaaagaaaaatatcaacagaggaacagacaacctacagaatgggagaaaactgttgcaaactacgcacctggcaaaggtctaatatccagcatctataaggaacttaaaaaaaaccaaaacacaactccattaaaaagtgggcaaaggaaatgaacagacgcttttcaaaagaaaacatccatgcaaccaaaaatcatatttcaaaatgctcaacataactgatcattagagaaatgcaaatgaaaaccacaatgacatacyatctcacaccagtcagaatggctattatcaaaaagtcaaaaagtaacaaatgctggcacggttgcagagaaaaagatccttatacactgttggtgggagtgtaaattagttcagctattgtggaagaca

SEQ ID NO: 831935 - DNA, 590 bp, Homo sapiens
catgtttaacataacagatctagacagaaaacgattaactggccatctccttgtcatggatgcaggctctgtctccttttctcatcttctactactctacagtcttaaatcacattttcaagtaaaacataatagaaaaaatttgtctcttctttatcaagcaagtaattcaaattctaggtcctagtttcaagtctctctcagagtgactcctgttctgttattgctgttgtcagacttctgtaccttactctaggcccatctataaactttcttgtaaaattcagttgtagcaaattaccttgaaaagtcagtttagcaagaacacttcatccttaatatctgatcagcctcaatgtttcataaggtttctcactgtccgccatcgcacaagtctgatcaccctggctgtccccagcaagaattggtttggtcactttaaccagaatacccctcatccttgtttcctcttagtaagttttcacccatcaacccttagcctgctccttgcctataagttcttacttayccatactgtctgtatttagagttgagcacaatctttctccccaactacaaaatcttactgc

SEQ ID NO: 831936 - DNA, 518 bp, Homo sapiens
aaattacaaattaaatgtgtaattgatattttaataagtatattgcaaaaagttttataattataattagggagaaaatattatgaaaataaatgatttttggaagatasgggccaacaacttttgagaatatataaccattgaacaagattttgaaaaattgatggaacttcagaagtgttcctgatttcaagaatgagagaaaaaaaattattggaggtcatatatgaatatgacatgacaggattatttagtaattttctgtggctaaagctcagaatgcttaagggaggtagtttttgaaaatctgaagtgataaactgagataaagaatcctgtttttttaattcaaaattgcttggaatatcttgaatgcaataagaaagcatcatttttttaacaacgaagctcatctgcctgctctttatatgaaaacttccattatagttgtacctatagaaagctgaccacaatctattccaaaaagctactgcttaaaagaatgttatgttacctga

SEQ ID NO: 831937 - DNA, 646 bp, Homo sapiens
agcacaatgaagatattgtgttgttctggaaatttagaaaatgctaataatataaaaacgttataaatgcttaagtagaaaagaagaaaacactgcacatctaaccatcctaataataatattttcctatgtttacttttcatgctagttgtcatgtcagtgagcttttataccttcctgtacacatttagcattatttcagaagtctttgttcatgtaactgcattcatcatgatggcacataatatcccatccagagaatcatcaaatgaactgtttattattgcacacttgtgcttttattttcatcttgtgctaatatttgtcaatcattatctgtagttccagacattatactaacagcttctaggctttaacttccataaggattatttccaatgattcctagaataatgccatggtgacaacagaatgcacatattattttgcatcttctctattatattttgagattgatgtaccagaagcagaattactatgtcaaaagttataaatgcttcttggttagatattgtacaaaagakttgtactaagttccacataccaaacaacttgtaccaagttagaatgctactaggtttataagagagcatctctttcagcctttcttttttaatctaaaatg

SEQ ID NO: 831938 - DNA, 476 bp, Homo sapiens
ccttagctcagcacagagcaaatagagaaaatgttcccagctcccagcttctccttcagagggaaatagttgatcaatgaattygatgccacattttggaaggctgcccccagaactagtttttgtcttgcttgtcttggggcactgacaaaatcagacacaatctacccatctgggggctactgaaacacagattaaggtttgggctggtagtcaccatagcctctctccagattcgcacagagtgcatgattaaaaataaacccaatttctaggttctccttggggaaagaaataattaaatgaaacatcacatgatccgatattttgggggagggcacctgaggaactcgcttcaatcttacttgtcttacttcagtgcgctgatatgacctggaaaactggatgacatctgggggttataaagaacaagaaagaagcttggagcagtacaaaggtttgaaaagatcccagaa

SEQ ID NO: 831939 - DNA, 374 bp, Homo sapiens
ctctttgggtaattcccagagaactgtgtctcacatttcaggaaatagagatatccctgtggcaaccttcacttttctcaaggaaagctaaatttgcaaagaaagagtagttactgtatggtgaattgcttcgtcaagataaaatagaattaaattaaattaaacaaaacctttttctttcaaataactttgcatttacttgagtaaatgtagctagaaattcagggggaaatgaaaatatgcattttgaaaagatgttrgaagatgcctagacacgttcattatgcagcaaaacgcacagacacaggcagggcgacctctgtccttagtcagtacaaaatatttactgaagtctgtgttacgtatgtatgata

SEQ ID NO: 831940 - DNA, 672 bp, Homo sapiens
catgacaactcctagatgcatctcagaaatgtgaaacaacatcctcaaatcaatgccttttctagagagaaatacttgaaaagtctcaactaatcatcaggttgggtctttagcttcacttctcacattaattgtaggtccgtgagtagaagcctagctcattacccaatacctcatacatgctctactaatacgtgatgtgtgaatgaggtcaggatttttgtctttagtatatatttttataaaaacagcaaaaactaagtagaaaggcaatcacagaacttgatcacaaataaaatatatagaaaataatgccgtcttatctaagtattcagacaatcgggcataatttcaggcctcaattgtcattgtcattgttgaaaagacctataagtcatatttataacaggaagtgtcaataaggcacatgaggaactcaaaccttgttgacactcacatctgcttaaagccatagctgatgtttccctgaggtgtcacttgctttctgatatgaaaggacccagtctctctataaacaaatgcttctctagcagtmgattaggatgaatgaattctatttcttaaatgttcataagaaatctctatacaatttgctattaataagattagataaaatctcctaaagcaacattttcccctcattctcagttg

SEQ ID NO: 831941 - DNA, 589 bp, Homo sapiens
aatccaggtgaagatgaggctcttcacatgtagttccttaagctttggcaacatgagtagagttttcttgacrgtagatgtgttaactaaagagacaattatctgtcccacatacacctaacatgcaatggcagacaagcaaacaacattatagacatttctgctcaaaaaggatggtggagggaatggaaggcactgtccagtggaagaatcgctggtccatagcaatattgtcaccaaataaggcaaatgttgtaagttccttgtttaggtctcaaaagtgatatcacaccacttttgccatatcttatttgtcaggagttagtgggtcaatctcacattataaggagatggggtccttgagggcatcttagagattgtctaccacacagtttcccagagcctttggctagtttgtgtaggacttccatatgccacaaaggcctgtgtcacacattcttttgtgttatcttctcaatactgcctgtttaaggtgggtaacagttactaccaacaactaggaccccaggaaaagctcaggtttaaatacctgacaaaccaatgattacattagctgccagtggatacc

SEQ ID NO: 831942 - DNA, 540 bp, Homo sapiens
ccttgaactctgagttgttccccaaccccttccctccaagaaaatttctaccgttgkagtcaaatagtcacccactgagaattcattccccatgaggtcttatagctatgattagaatctatcttttgcaaaactcactattaccttagtcttgtggttcatgtagatgaactacatgacaatctactattttttcctgtgtcagtagctacatttctttaaatgaattccaaaacagagctcttaatacatagattgcatctatagcaaattataactctataaattaccagtgccactggcagtcctcagacacaataggaagcacaacaggatggagactggtccatttctttcaacacggattaaaatttgcatggcaattttagtttgctacagccatggctacactggggatctagacctatcctagtcccaccaccaactatgcagtgtttcctgcatttgagggcattctgctgaacaacttataaagcctcactgagcctgcaatcaccacagactagtggggcaaattgc

SEQ ID NO: 831943 - DNA, 647 bp, Homo sapiens
ttgattttattgcgagatatcagagaaacatatatgcagagaaaaaagcatgacagtaaaaggagtagtttgtattagagtcatgagtttgacacaaagctcacagggagctggaaatgyatgaatggataaattggcctttgctgcacttcaatatgatgaatttcattgagtcactaaaaaatatttgttgagcacctactttatatcagacattgtgttggatgtcatagatacaatgaataaaacaacacaaacacgtccttgtggcttaaattttgtcttctaaagatgtatatgttatgtcctgcccaagactataggaatccaactcttgcatcaaggtaacccagatgtgaggacatggattcaaatgagatcattttggagctttatgatttgactgccctgctggatttcagacttgcatggggcctgtagtcccttcattttggtcaatttctccaatttggaatgggtgtatttacccaatgcctttacccacattgtatctaggaagtaactaacttgctttgattttacaggctcataggtggaaggtacttgccttgtctcacatcggactttggactgtggacttttgagttaaggctgaaatgagtaaagactttgggagactgtcagaa

SEQ ID NO: 831944 - DNA, 707 bp, Homo sapiens
gtataagttccatgaggacaggatccatatatttctttctccactctgaaaagaagaatttgtacttacttgtgaaatgtactacttgtatattttaggtgcacaatcaaataaatcagtagattgcagttagtgtatactacgaactacatacactgggcacattaaggagaatatattatctgactggaaagtttaatttgaatatgttaagcatagatttatccttgagaattattttacattagtatgtaaaaccgggaaaggatttgcctgccattggaagctgttggaataaagttattcatgactgaccccaaacagaattagtcagaatgttttctgtagccacgctttctgtcaaagagaagggagttcagtagaaaagaataaacagacgctgaagagcagctgctgaagtccagaatgatggataagagctcacaggagtaaaaatgagttcccaggtaccaggttgcttggattatatcccatatctggagagaactttggcctgagatctgatccaccatctgctttcttagaggagttacaggaagatggaaaacaaayggtacgttttcagtttagaaaaaaaaaaggtgtctacagagcgagttctgagactgtaaatcaggaagatgctaggtgcaactgcaaggtgcaagaacacttgtatgaaatattggtcaatatgagccagtgga

SEQ ID NO: 831945 - DNA, 552 bp, Homo sapiens
ccgccgcggacgtccctaccgccaaacaccccatcttagcggatgttttctctcccaaatgttccctctttccagctgtttcctttgcacggcatgcaatcttyctaggtgttccgtctacccaccgtggaatctgctcagaggttccttctgcccaccatgagacctgcttaagggttttctgctgttgaccacgccatcttcgcacttaggccttctgctaaacgtgcagtctacctgagtgttccttctgccaaacagctagttgtgtccgctccctcccctgacaagcgctcagtcttgtccggcgcaccatgggcccaatacttcctccacccagatgtttcttgggcaggccttgcaatctgcctagggcgtccaactgcccatcctgcagtcttctcacgggttccctcaccctgccagccccccctgcaatctccctaccctaaggtttcctcatgctgatcaccagatgttcttagcagttccttccgaaatcgctgcagtctgcttagatgttacctctgtcacactcggctgtcagatgtt

SEQ ID NO: 831946 - DNA, 663 bp, Homo sapiens
gtgtttagttcatgtctgctttgctggcgggccgagtagcaacagctgcagttggtgtgttctctgaaggcagtatccgaaggctggaggggttgcttttcttcccaggtgtcttttgaagaggcagtcaagtcagcagctcgcggtgaccttctggtaacatcgtatgggctgggttacagcacatgccgactgctaagccggtcactggggaaaaccatgtgattgctgtgatgagcttagaatgatcattcctccttcgggagctggggtgggttgagggagtgataaagatcccgataaccttgcatttctccagcgagaaagaagaaagaaattccgtggatagggagccagccaggtttcctgcagaaaatcatgggaagcttttgagcaggggagtcagaagatgagcggtgagtattagggctttccggtcacggtgtgacacagggattggccagctcttcctgtaaagggccaggtgggaagcactcgtaggccctgtggtctctgtcgtgtctgctgaagcctgccatagtagcrtggaagcagtcagagatgacgtgtaagcaaatggtcccgactgacctccggtaaagcattgattccggaagcatttaacagacctaacaacctttcaaaccgcatggcgtttctttc

SEQ ID NO: 831947 - DNA, 512 bp, Homo sapiens
catcccagatcagtgaaccttccaccagtttgcctctcagggtgcacgtgtgagcccattcacccaactcccgaggtgtgctggggaggcttctgaggttcgtgactgctgtgggggagggggactgcctttccctggtgctgcctgtgatcagtgatttctctagagagtctgcttcgtgaccaccgggccatcaccttgcggctgcctgatgtttactggtggtggggaaccctctcgggccccgctccacacgtgtgactgagagggacacctgacaggattgaacgcgtggcagatcatccgacgagatggagtgtctggtggaaggaacatctgacagccctgagcgtgtggcagagggaacatctaagcagaytgcagcgatttcagaaggaacggctaagaacatcgcatggtcagcaggaggaaaccttagggtagggtgattgcaggggtgctggggggcaagggaacccgtgagaagactgcgggatcagcagttggatgcc

SEQ ID NO: 831948 - DNA, 511 bp, Homo sapiens
  misc_feature 486, 487, 488, 489, 490, 491, 492, 493, 494, 495, 496, 497,498, 499, 500, 501, 502, 503, 504, 505, 506, 507, 508, 509,510, 511: n = A,T,C or G
atcccagatcagtgaaccttccaccagtttgcctctcagggtgcacgtgtgagcccattcacccaactcccgaggtgtgctggggaggcttctgaggttcgtgactgctgtgggggagggggactgcctttccctggtgctgcctgtgatcagtgatttctctagagagtctgcttcgtgaccaccgggccatcaccttgcggctgcctgatgtttactggtggtggggaaccctctcgggccccgctccacacgtgtgactgagagggacacctgacaggattgaacgcgtggcagatcatccgacgagatggagtgtctggtggaaggaacatctgacagccctgagcgtgtggcagagggaacatctaagcagaytgcagcgatttcagaaggaacggctaagaacatcgcatggtcagcaggaggaaaccttagggtagggtgattgcaggggtgctggggggcaagggaacccgtgagaannnnnnnnnnnnnnnnnnnnnnnnnn

SEQ ID NO: 831949 - DNA, 511 bp, Homo sapiens
atcccagatcagtgaaccttccaccagtttgcctctcagggtgcacatgtgagcccattcacccaactcccgaggtgtgctggggaggcttctgaggttcgtgactgctgtgggggagggggactgcctttccctggtgctgcctgtgatcagtgatttctctagagagtctgcttcgtgaccaccgggccatcaccttgcggctgcctgatgtttactggtggtggggaaccctctcgggccccgctccacacgtgtgactgagagggacacctgacaggattgaacgcgtggcagatcatccgacgagatggagtgtctggtggaaggaacatctgacagccctgagcgtgtggcagagggaacatctaagcagaytgcagcgatttcagaaggaacggctaagaacatcgcatggtcagcaggaggaaaccttagggtagggtgattgcaggggtgctggggggcaagggaacccgtgagaagactgcgggatcagcagttggatgcc

SEQ ID NO: 831950 - DNA, 669 bp, Homo sapiens
accaatgctgtgtatatgaaaggatgactttcatcctttctgtaacctatcttgtgtatatgaaaggatgcctatattctacttgtgatttaattattttcagatttgtgttggtatctaatttcactatataaatttttgatgaaacttttttataggcatatatgtattgactttttttctataaggccttttttgtattttgtcataaaacattttttcgtattttgcccagtatttgaaaaaattttttattttgtttaatttaaattcatacttatcactatcatatccattaccaaagtagaatatatttccagaagatgataatgacgaatttatattcatgcagttcatatataatctgaacagaactgtgtccacaaatttaccgagacgatagcaactgtattcatttctcttgtatgattttagtcacttcttttaggccatcaaatttgtcacacatggttaatttagctttaacttcactacaaaatagtattagtggaatagacatggtataatgtattttaagctcctcatgccttacttacactaactgacacattaacrttcattcattttattcaatttgtacaaatgcttttgtggccacagaaaggctgaggaagaaatccgatatgtttaatacctattatctgtact

SEQ ID NO: 831951 - DNA, 616 bp, Homo sapiens
caagtgggagatagaaaataatggggaacataaggyttccactaccttactgaacagcaatcaaagagtaagttttaaattttgtagataataaagcagatattttgttttaaaagtaaacagcttattaataatctttgtgatcaaataaaagtcaaggggtgaattaaaattaaaggcataccataaaatttgcgaagggaaggtggaagaagatggtttctcagtatagttctttgtcttttattgagggaagacattaaatatcatttcatattttaggaagaaatcatggtacaataatatatttgagaattctataacaaaaaatcataatatagccatgtgttgcttaatgacgggaatatgttctgatagatgtcttctttggcgattttgtcactgtagagtaaaattacacaaactagataggagagcctgttacacacctaagctatacagcatagcctattgctcctaagctacaaatttgtacagcagactacagtattaaatactgtaggcaattataatacaattgtgagtatttgtgcatctaaaaatatctaaatctagaaaaggtacagtaaaaatatggtataaaaaatacaataca

SEQ ID NO: 831952 - DNA, 629 bp, Homo sapiens
ctcactagaaattaattgactttagctacaaaacttttacttgagaatttggtttctataagtgtgtctgccaatgactgattatctcagggtttgttggcaactgagctttccaaatcacaaggcaaggaaccaaatccctgaagaagaagtgatcaacctgaggcagaatgtttttctcaacaacctatcactattcctgacaagcaaccataacttcattctatttgcaacaaagtattaatgaggtaataaagtagaattttggatgctttcatttttaatatttaactttgttttgttttctatggtgaaataattatagactccatatatatccttatgcatttaaacttttaaaagctagaatgcatttaattgcctggtggcactgcataatacatttgatgttaacattgctaaataaatgtttctagataaaattatgaaataatagtagagtatcttgtcactattcataatgctttatgccaatatgtcactctattttatcccaacrtgcaactcactcatcatttttatttttggtttttgttttgttttttgagatggagttttgctcttgtcacccaggctggagtgcaatgatatggtcttggctcactgca

SEQ ID NO: 831953 - DNA, 632 bp, Homo sapiens
cagaaaacacaaataattacatatatgtttaaagtagaaacagcgtggtgtggcgaaaaataatggctttagagctacacagcccttattttgaattccaaatctgtcacttaaataatctkcctaattttttggcacctcactttcctcatttttaacatggtgataatggttacctgtcctgattgttgtgaggattaaataagccacaaaccagtgcctggtttgaacactggctctgctactcaccatgctcaacaatggtagttggtatttttactgaaatgttgatgacattttctgggtaaaattgtttcctctttcagcctggccaaagcaagaaattctcgattctttaaatttaccagcttataatcaatttgttaacctatgccatatgtctaaattcagcccgaaatttaaaaatcttttgaatattttataatacactaaaattacacttaatatatttttatattcctaaatattgctttgactatagaatttaaaaattaagcaatatgcatattttatagcaatttttatctttatagaattaaatcagttgaaatctggtgtatctcttgtggggcaaaagtagcagacagttgacagaaggttggtatactaag

SEQ ID NO: 831954 - DNA, 587 bp, Homo sapiens
tgggatcctcctcaagacctcatttgcccctgcctacaaccacaaagaattcaaggcaggtcctaccaggaaacaatgtgagatcccagagtcctgagactggggtgggattcttggaaagtaagtctaggaagcatgggtccaaaaggttttgggagggagtaagtggaagctaagcttggaagaatctgttcatttttctgagttttttctttctttctttctttttttgagacagagtttcgctcttgttgccgaggctggagtgcaatggcacaatctcggctcaccgcaacctctgcctcctgggttcaagcgattctcctgcctcagcctcctgagtagctgggattacaggcatgcgccaccatgcctggctaattttgtatttttagtagagatgggggtttctccatgttagtcaggctggtctcgaactcccgacctcaggtgatctgcctgcctcggcctcccaaagtgctgggattacaggcggagccaccacgccyagccttttttttttttttttaatcaaagatattatagagaaatagaagaagagccaggagacaactttgggcatccag

SEQ ID NO: 831955 - DNA, 634 bp, Homo sapiens
ccatgatagcagtgtttcaaaaaggcaagtcccagtgtgtaaacacttttcaggcttctgtgtgcatcatgtttgttgatgttccattggccaaagcaagccacattgttgagctttcatgggtgatgagcacatcacagtctatattcttctctctattttgtgtgtgtttgagaatttccacagtacaaagttaaagaaaaaaactgttcaagcattaaaaatgaaaccaccatatgatccagcagtcccacttctggatattcatcaaaaagaattgaaatcaggattttggagaaatattggtactcccatgtttgtcgcagcactagtcacaatagccaaggtgtggaaccaaccaaaatgtccaatgatggacgaatcaataaagaacatatggtatatacaggcaatggaatattttcagtcttaagacggaaatcttgacatttcctacaacttggatgaacttgtaggacattttgctaagtgaaatggcccagtcacagaaggacaaatactgcatattttcacttatatgagrtatctaaaatagactcacagaagcagagagtaggatggccattaccaggggctaaggagagggggtgaaggagagttgcctatcagcaag

SEQ ID NO: 831956 - DNA, 590 bp, Homo sapiens
ctgttgataacatgtcagtgttatcagctgagggatgattatcatgaaactttttaagttctagaatttctaaatatctgtgtgtgtgttgtatgcagggaaagtgcattttcctcagcatggattatgctttatctctgtctgtgaaaacactgttgcgagaagctcagctcaatttagcagaacataagtggaaagtagacatttgaacgatactgatggttgatttccattaagtaggaattgaaatgaactgttgaattgttgctttttgatatgtggaaatgagtaaaaaccttacgtatctcttggtctttaaagaaaatctactttgatataaaaattctttttaaaaagttggcttatacccccacaactatcagaaatgcagctaacagagctagcagtttgtaaggagttaccttggaaacttctttcctagagagaaccctccacatgtaatgtacggcttgccgtttggaaaacaaccagtrtgaaatccttctcgaatctgtgggtgtgccaaggcaggcttttcctcatggagaagtaagtgctggtgctttaagggaacccctttttcataggtg

SEQ ID NO: 831957 - DNA, 608 bp, Homo sapiens
ttttactatgaacacttaaatcttataaaaaatggagatgagggcagagggaggtgtgcaaatcagaactcccccaagaatgttcaacaggtgtccacctgtattaatgcctttcmctgttgcctgcgttatgagctctctgctggagtggggaactgggaatagagttggcatattttgaacaatcagtcgtccaaaaatcaatagttgatcattctaatgaccatttcatcttagattaattataatagctgacatttattgagcattgtttttgagccacatcctgtattttccatgaaattagtactttattactttacccttgagaggtaggttctattacaagcatttactacactgaggaaactgaggcacagaaaggctaagtaccttgaccagagtcactcagctagtatgttgcgaggcggtttcaaccccaggcagcctgttccagagtcgcttcctaacccgtacgtggtgctgctgtctgtcatttaggcagtcagtcactttctctccttactgcactcaccacaccctgccaaggcaagtccttgtcagcaagatgttttgccagagcctgtgtttcggggaccccagtctgg

SEQ ID NO: 831958 - DNA, 616 bp, Homo sapiens
agttttgtgtaatgtgaagtagggattcagttaaatgttttcatgttgataccccattgatatcccattgtttcagcaccatttatgggaaagtcttttttctaatcttctgtagtastgccttgatttaaattaagtttctacacctgtataggtttgtttcttggctctgtattctctatcattggtgtatttgtctagattttcaccttagtcatctatactgtttttgtgtgtgtatgagacagagtctcactctattgcccaggctggagtggagtggcacaatcttggctcactgcaacttccacctcctgggttcaagtgattcttgtgcctcagcctcccaagcagctgggactacaggcatgtgccaccacagtctgctaatttttgtgtttttagtagagatgggggtctcatcatattagccaggctggtctttaactcctggcctcaagcgatccacccaccttgacctcccaaaatgctgggagcatgagccactatcccagcctagaccttaattattagacctttataatagtccttgtttgctagagcaaatcatcctgctttatgtttcttcttcaacaatgtcttggttattcttggc

SEQ ID NO: 831959 - DNA, 626 bp, Homo sapiens
cctttcttgcagctgcagacacagtgaccaggccttggttgtatgatgcctccagctcgtttctaagttaggaccttcgcttttgctcttccctttacctgtagrctctttctcccgctcctcatggggctgcctctttctcttcattcaggcctcagcctcagtgctacttctttagtgatgtctgcctgcgttacccagtctgaatgagttttttttaacttcctattctacacatttatatagaaatagaagtggcttagaatcccaggccttcctccctgcactgatcccatgtcctgggtctccattactcttcaggttaggtatgagaaaactgggaggcaacaagacaatatgtgtgacctagacttcatggaattaagtaaacatcaaacattagcaaagccacaatttgtggtcagagaaaaattgctagaaccagagggacattcaatagtggaagacctaaagtgaccacaggggcaagggccttgagtgatcagaatcctgttggcaactgacagcctggatgatattccttgtcctgcttgtcatcagggaggctcaagcccctccgccctgccgccacctctgcagggctgaacacaggcactttgtatagg

SEQ ID NO: 831960 - DNA, 610 bp, Homo sapiens
aaagcatggaggagcttacatggaaggtattcacttctcttctgctccatttccgtctggaggaacttagtcacatagctgcaaaactacaaggaagactgatatasgtgggtagctggccagccatgtgcaggcatttctttactatgtggcagggagaaaaaggattttgaaacacagatggctgctccactaaaatctcagagaatgtttaccaaaataaacaatttttaaatcattatattgctctgctatagatgctgatatcaataccccaactcccagaatcattctgtttctttcattttgttggcaggatttcaatatccaaacaactggcttcagtgaaaggtaaggcacagatgacgcagatgtacatttttctcctctaccaagatggcatgccaagtgttaaaaaaaaataataggacatcaaagaatgccagagatgtaagggaacttttgaataaatcatcaaatattcatgatgttctttttaaagatgtgggaactgaagtcccggagtaggaattaacttacctaaacttacacagttcattaaagacagagctgagatgagaccatggatcccctggctcctaattcagcg

SEQ ID NO: 831961 - DNA, 638 bp, Homo sapiens
aaccttcagccttgctctggtgaagtgttgcttcatcctgtcgttttccagatccaccagaacccaactccctggccctccccacttscaaagctcagacatcctaaatcgaagagattacagataatgtaaaggaaaggcccagagtttatcctctcaccattttaacaggaggcaggagtgtttaacaaaaacattcaaactcacttatctgacaaaagaagaaaaaggaattaaagaaaatttgttatatgtcccattttcaaaggcttcttgctttgagctgtttcaagttgagtgatagaaaagtttttttttgttgtgttttgttttgttttttgacaaacacagggctcatactatgagccaggcactgttctagggagttccaaatagtaactcatttaatacgataacaaccgtgtgagatagatattattattattaccatctcatagatgaggaaactgaagcacaaaggttgtgattttcatgaatcacacaactaagcagattcgagagttttctgccttccccaagggcattgttaattttgctttaatattagacttctttgtgagcaataatattataactcaccaaaaatagctgtgcacatttcaggcactgtgcaagag

SEQ ID NO: 831962 - DNA, 542 bp, Homo sapiens
tcccggaatagccgacctccagcccccgcrcacgggtacattctgtacgcccagggtggctggcgtgggtggcggctggccctgaaggccgggggctgtgttcctgtggccgactcactgccctttgcccttggtgagcaagtcttccctgggcctggctgcttctctgtaagacggaggcccagcagggtgggaggggacatcatgaccccgcagcactgagagtactttgtaagctgggaagtaccgtggctccgccagggccatggtgacatcagccattcactactggctgggactggcagatgtccagggaccaagcgaggagggagaaggagtctccctgcaccttcccgccccagctctccctccctcccgctcccactgcctccccatctgggagcaagccctggtttaaagattggggtttgtgctgggcagacagaatcagcagtggctgtctcccccgctcctcccccaggggtgctgggctggcccttggggttgagggtgacccaaaacttgccattggctgccgggtg

SEQ ID NO: 831963 - DNA, 374 bp, Homo sapiens
ccccaggggcccctctttggcccttagccccaaatcccattaaccaggcaggtgaggccagggacatgtctgtcccytctgaggcccaagcccacttggtgttcctcatggtgcggcatgcaggcagattgaccaagatggctattgaggctggagtcccaagcccctcacccacgcaggctggccaagaacctggaaggaacctcaggccccacaaaacgtgaaaccatggctgcccatccttcttcccctagtccttgaaatccatcccctccatccatccagcctgtgaatttacccccaggccaaggagcatagctgcagagcaagggtccctcctgcagggtcaggctctggaaggtgaccagaaaccc

SEQ ID NO: 831964 - DNA, 583 bp, Homo sapiens
tatgaacaagtatatgccaacaaaatggaaagcctagaagaaatgtataaattcccagacacacacaatctgcctaaattgcattgaaaagaaatagaaaacctgaacataccaataacaaattgaagcagtagtatgtctcctatcaaagaaaagcccaggaccagatgaatttactgttgaattttaccaaacatttaaattgccaattctactcaaactattccaaaaaattgaagagggaatatttccaaacttattatatgagtccagcattaccctgatatcaaaaccagacaaggatacatcaaaaaagaaaactacaggacaatatccctgaagaacatggacacaaaaattctcaaataaacactagcaaactgaatccagcaacaaattaaaaagatcattcactatgaccaaatgggattaattccagcaatacaagaatgattcaacayacatgaatcaataagtgtaataagtcacatcaacagagtctaggaaaaaaacatatgatcatttcaaaagatgctgaaaaagcattcaacaaaattcaacatccttttatgataaaaactct

SEQ ID NO: 831965 - DNA, 485 bp, Homo sapiens
tgtgacagtttacaaatgtcatggcaatgtcaggaagttaccctaaatgttctaaaaaaaaaaaaaaaaaaaaaagggaggaaccctcagttctaggaattgcccacccctctcccggaaaactcatgaataatccataccttctttagcatataatcaagaaataaccataaaaatgggctgctctgcatatagagtagccattctcttattcctttactttcttagtaaacttgctttcgtttacgctatggacttgccccagattctttcttgcacaagatccaagaaccctcttttggggtctggattgggacccctttccagtaataaaacaatataaatattcacaccccaaattaaatacaycagagttgctaaaacccaactagtcccatataaaacgttttctctcactaatcttaaatttggaaaggaaaagagagagagtgatttttttttttttttttttaccattcactcga

SEQ ID NO: 831966 - DNA, 632 bp, Homo sapiens
agagctgaatgcaaaacatcctaatttgtgtaaatgttgaggtcaaaagctagaagttaatatgcaaaaaraaatagaatttatttaagttgatgggattatggacaatttttgcctttaatgttggtaatcgtgtttttcaaacaattttttgaataattatatatttacagaaaagttctttttttttttttgagacggagtctcactttgtcgcccaggctggagtgcagtggcgcaatcttggctcactgcaagctccgcctcccgggttcatgccattctcctgcctcagcctcctgagtagctgggactacaggcgcccgccaccacgcccagctaatttttttgtatttttagtagagacggggtttcactgtgttagccaggatggtctcgatcttctgaactcgtgatccgcccgccttggcctcccaaagtgttgggattacaggtgtgagccatggcgcccggccagaaaagtactaagtataatagaaagttctacagaatctttacttaatttccttctgttattaataatcctgtttttaatgttatcactttattttaaattaaaaatattcccaaaatgattaaagataattttaataaccacatacgtccctccc

SEQ ID NO: 831967 - DNA, 632 bp, Homo sapiens
agagctgaatgcaaaacatcctaatttgtgtaaatgttgaggtcaaaagctagaagttaatatgcaaaaaaaaatagaatttatttaagttgatgggattatggacaatttttgcctttaatgttggtaatcgtgtttttcaaacaattttttgaataattatatatttacagaaaagttctttttttttttttgagacggagtctcactttgtcgcccaggctggagtgcagtggcgcaatcttggctcactgcaagctccgcctcccgggttcatgccattctcctgcctcagcctcctgagtagctgggactacaggcgcccgccaccacgcccagctaatttttttgtatttttagtagagacggggtttcactgtgttagccaggatggtctcgatcttctgaactcgtgatccgcccgccttggcctcccaaagtgttgggattacaggtgtgagccatggcgcccggccagaaaagtactaagtataatagaaagttctacagaatctttacttaatttccttctgttattaataatcctgtttttaatgttatcactttattttaaattaaaaatattcccaaratgattaaagataattttaataaccacatacgtccctccc

SEQ ID NO: 831968 - DNA, 538 bp, Homo sapiens
actcttagtttgacaataggatgaaatacaataccttaagagtttcaaagagggccgggcatggtggcttatgcctgtaatcccagcactttgggaggccaaggcaggcggatcacttgaggtcagaagtttgagaccagcctggccaatatggtgaaatcccatctctactaaaaatacaaaaattgggtgggcgtggtgtcgcatgcctgtaagcctgtaatttcagccactcaggaggctgaggcaggagaatcgcttgaacctgggaggcagaggttgcagtgagccaagatcgcaccactccgtcttaaaaaaaaaaaaggagtttcaaggggggatcactgagaggctacccagagatactgagcagatggaatcatctgcttatagctaccaacaatgtcctaaggcttcttagcagattcaaggtatygcagggactgttcatccaggtgttctgttccatccaggtttggagtctctggcaagctcccctgactgtgcatccctctggagacgaagaggagggggaggc

SEQ ID NO: 831969 - DNA, 561 bp, Homo sapiens
gaaaacaagtgattgtaataagaacaggtataataatgaaattttatacccaccatgagattttaattttaatatatctgtctgagttttgctagaaaatgaatcaactgtctaaagaccagtctccaggatggtttagagacatccttaagacatcctgcacaaagaatgaaagttctctgtatcaaaattaaacttcattttcacaagtcccttctccctctactgtttaacaccttaatgttaagcataccctctgggcaatttatgtttttaatattgctcttgtaaatagagttgatcagaactcactgctgctgggaattctacacaatactgcaaagttctgggttgaatctagagagagggtgcctggtgagactgacagaatgcctagcccagcaggcgtgtcgctggccaattagccaagcttggcccctctccctgaacttgccacgagccaagatcagagcacaacaagagacacacacactttccrtgttgtatctgaaccctgagaaaacagggctgtccaaaaactgggatggggccctatacaga

SEQ ID NO: 831970 - DNA, 619 bp, Homo sapiens
atacacatattgggtgttctttcagatttttttcgttttcccttactttctcttctgtcatcttatctctcatcatgcttggtaacccacgtgaattacttggtgcatatctttttatgttttcctctatccccaggtaaccatatgtgaacatataaacataaggggttgagaatatttattaacttttattaaatggtatattaaacacacttttctgtatcttagttttttcattaaacaaaacttcgtagaagcatctccaactcaactggccatagctcacattcattcttttatggctacatactgttccatggtatggacctcttattatttattcaactgtcaccttttgttttcttttttgccattaggaatagtggtataataaacgtatttgtacattctttttgtactggtatttttactttaaaaagtgttacagtgggatctcattaaaatgtacctttagcaatagctattgccagattgcttctaaaatttttttaacagttgccattagcaatttgtgagaatgcccctttcttgacatctctgttagcaataagtgctaatctttatgmtttttgcatctggatggaaatgttgagtttga

SEQ ID NO: 831971 - DNA, 520 bp, Homo sapiens
ctctgtacctggctttcttcccttaaaaacacatcttgattattgttctatgtcacttgcaaaacaggttcctcattcttattttgtggctgcagatgacttcattgtatggaaggactgcacattatttaactgatcccttattttttgttttttgttttttgaaatagagtctcgctctgtcacccaggctggagtgcaatggcacaatctcagctcactgcaacctctgcctcccgggttcaagtgattctcctgcctcagactcctgagtagctgggattacaggcacgcaccaccacgcccagctaatttttgtatttttcatagagacggggtttcaccatgctggccaggctggtcttgaactcctgacctcatggtccacccaccttggcctctcatagtgctgggattacaggcmtgagccaccgtgcccggctgatcccttattgatgcacatttagcttgtttccgtgtttggtaattacatgaaatgttgcaataaataactttgtac

SEQ ID NO: 831972 - DNA, 430 bp, Homo sapiens
cagtccggattggggtcaagagttctgtttatcttaccaaaaacatccctggaatgcctcctggggaacaaagggagctggggcctccccgctcaggctggggggctggcccctgagagcccagaagagggactgcctgccggagaggggaacactgggcaggcctgggctgggggtctccggagacgccttcctgaggcccagaggaggagcaggcctcagaggagatggggacggagggggacctttagatttgggttggattctcctggtccagcctgggggcaggaggtggytaggatgaggtgaaaggctgcccctccttgggcaggtttgtgcctccctgcccaggcctctagtaggtggctgaccaacggccctcccacctagggtaggtggggggcagccccgggcttggctcaggacgggg

SEQ ID NO: 831973 - DNA, 594 bp, Homo sapiens
aacatatataaaaccagacagatgaacacagtgaacccccaggtacccatctcccagcttcaaygattatccatcataccacaattactttctctccttactgccactaggttattttgaaacaaattcgagatacaatttcatctatactatttcactatgcgtctttaaaatcgaaagaatattttttaacataaccacaatcatattgccactcctacgcatttttatagtaattcctgcatatcatcaaaaagccagccagcattcaaatttccttgattttctcataaattattttattttacttttgcttttttttttttttttgagatagggtcttgctctgtcattcagagtgcagtggtgtgatcctggctcactgcagcctcaatcgcccaggctcaagcaatccccccatctcagcctcccaaaaaggtggtaccacaggcatgtgccaccacgcctggctaattttttaattatttgtagagacagggtctcactatgttacccaggctggtcctgaactcctggccctcaagcaatccttctgccccagcctccccaaatgctgggattacaggcatgaat

SEQ ID NO: 831974 - DNA, 568 bp, Homo sapiens
tttttgattatactttttgagtgaatrtgaactgatatctcatggtggttttaatttgcattttcctaatggggcatttttcagtatcttttttttaagatggagtctcattatgttgtccaggctgatctcaaattcccaggctcaagcgatcctcccacctcagcttcctgagtagctgagattgcaggtgcaccactgtggccgctgcgcgtcttttcatgtgcttattggccgcttgtatatttctttggagaaatgtctcttcagatttttgactactttaagattctgctatttgtctttctcttttttttcaggtctggtgaacagaaagtagtattatttttctttttgagttgtaatagttctttatgttttggatacaagtcctttatcagctatatgatgtgccaatatattctcccagtctgtggactggctttttcactttctttttaatttattttaatatattttttattttttttgagacagggtctctctctgttgtccaggctggagtgcagtgtcacgatcatagctcaccgcagccttgacctccagg

SEQ ID NO: 831975 - DNA, 479 bp, Homo sapiens
ctaagtaaaagtcatgaagtactatatatacttgtttagttaattaaacatatattcaacatttaaataactaagtgatatggaaataatgatgaaggtcacagtgtatattggttaaaaataaaataaatatgttagtaggccaatttatggtacagcgctgtaacagaaccataaccgtgctgtgagagtacagaaaagggactgatgcagttgacttaaggaagttcttagatatggtgacatttgagctagggtttgaaggatgaaaagattacagaggttgaaggcattgcagagaacagcatgtgtaaagcatatagtgtacactgggagattaggggacaatttagctgatcgtgtaggaagaacaatgcaggaggtgacactgcctacagaggtagtctatggtccrattataaaatgctttgagtatcttgctatggagttgggtcctttagatatcaaaagttatcctt

SEQ ID NO: 831976 - DNA, 551 bp, Homo sapiens
cagctgggaagtgataatggcttggaacacagcaatagcaaggatggagaacagtgggcagatctgggagatattstggagaagaactgacatgatttggtgataactggatgtgggaagtgagggagagggaggctccaaggacattttcaggtttctagtttgaatgacttaatgagtaaagtctaatgaataacaacttgttagtataatccgcaagactacaccaaagcagtaggagagctacacaactttcacaagctcccatgtctgcaggagtgctctgctctctttggattctgtaggaacagaggcatcaatcaggtgctgggaatacagaaattttccaccaacgtgctcatcaaactttcctttaccgtaagccaaaagaatgtctctgagctatgaacatcagactttaatataaactttaaaatcttactctcagctctacggacatggttataggtgtctggcaattgaactaggagagcctgaaagtaaacacattgtctcttggaaattgatgaaaaaaccaagcatgtttcttt

SEQ ID NO: 831977 - DNA, 630 bp, Homo sapiens
ttcagttgtggtgtctggtctaggagcatcacagggtcacaggagagaacttgctagaaatgcagattttcagggcccacctcagacctactgaatcagtaactctgagagcgggactctgcaatttgtgttttaacaagccctacaggtgattctgatgcatgctaaagtttgagaaccactaacctagggtagccttatatattgctaaaaccaggacacttttttttttttttttttttttttggttctgggagacagaatctgtttctgttgcccaggctggagtgcagtggcatgatctcggctcactgcaacctctgcctcccgggttcaagtgattctctctccttagccttccaagtaactgggacaacaggcatgcgccaccacgcccggataattttttatatttttagtagagatgaggtttcatcatattggccaggctggtcttgaactcctgaccttgtgatccacctgcctcccaaaatgctgggattataggcatgaaccaccatgcctggcctgttttttaaatttrcaatgagagttttctgttgtgttctcattccagtattcctaaactttgtaggtaggattagtcactctttatgatttctcttagca

SEQ ID NO: 831978 - DNA, 472 bp, Homo sapiens
ttcaagtctgaaggcctgagaaccaggggaatcgatggtgtaactcctggttcaaagctgagagctggtgggatggggagttggtggggaaggcactgkagtaaatcctgaagtctgtaggcctgcgaactaggagctccaatttctgagagcaggagaagatgggtatcccagctcaagaagagagagagaatttaccctttctcctgctttttgttctatttgggcctttaatagattagaagatgctcacccatactgggggaaatgaatcttctttactcagcatattgatttaaattataatcttttgctacaacatcctaatagacacacctgaaaataatgttttatcagttaaatgggcatcccttagcacaatcaagttgacatataaaattaaccattacagagatcaatcttggataggcttctcctctgggtcctctctagctgccttgtaaaatgctaa

SEQ ID NO: 831979 - DNA, 606 bp, Homo sapiens
tgctcctttaacttggagaagtttgttattatgaccttctgaagcctacttctgtcaattcatcaaagtcattctccgtccagctttgttccattgctggcaaggagctgcgatcctttggaagagaagatgtrctccggtttttagaattttcagcttttttgctctggtttctccccatctttatggttttatcaacctttgatctttgatgttggtgacctacagatggggttttggtgtagatgtcctttttgttgatgttggtgctattgctttctgtttgttagttttccttctaacagtcaggtccctcagctgcatgtctgttggagtttgctggaggtccacttcagaccctgtttgcctgggtatcaccagtggaggctacagaacagcaaatattgcagaacagcaaatattgctgcctgatccttcctctggaagctttgtcccagagggcacctgcgtacatgaagtgtctgtcagcccctattgggaggtgtctccccattaggctacacggggatcagggacccacttgaggaggcagtctgtttgttcttggagctcaaccaccaggctgggagaaccactgctctcttc

SEQ ID NO: 831980 - DNA, 346 bp, Homo sapiens
tcaaaataaataaataaattttaaaattgacacatatagagcaaatgtaaagagatagagaaagatatgccatgttaacattaatgaaaaagaagctggagwagctgtattaatttcagacagaacagacttcaaagcagagaaagttatcagtggtaactgggagcattacttaatgataaaggaatctattctcaaagaaaacataacaatctttaatgtgtatggacttaacaacaatcaaaatgcatgagccaaaaaccaatagaactgcaaagagaaatagatgaatccactatcatagtcagacttcaagaccactgtgtcagaaatggacagatcctgc

SEQ ID NO: 831981 - DNA, 589 bp, Homo sapiens
tattttttttaaagttcatgaacaatatgaaacatttttaaagacttggctttsataagctttgatttttttttttttttaaaagtatgctttacaatttgtctaaccttttgaagtaagagatgtggccatgtgactaggttttctccaaagaaatatgagcagaagtgtctgtgatctcatagagatcatgcagatgaggacaatacctaagggatggtatgccaaaaagatggaagaaaactgagtccacaaataactatggagcacagctgcccaccagtctggataccttacctcagggctgttatatggaagataaataaagtattatttaagccactgtgctttgggtcctctttttttttttaaggcagtttagcctgcactgtaactgatcttcacaatttccatgaagaggatgcatgtgatcctagttgactccttttgaattaaactttttcaaagtctacccaaagagagcttcacgttgaagtatctatcacacattagatcttcaataaatgtacagcctgttagacaagttcaatggctggtagaatgactttgagttagaggtcaaaagacc

SEQ ID NO: 831982 - DNA, 628 bp, Homo sapiens
acgttttaaacagtctattctggaatttgtgttgagaaaagctacagagggataaagaggatcagtaggagattattgcaatcatccttgtgtgagagatggtggcttagactagagaattaagagtaacagtgggccaggcgcagtggctgacacctgtaatcccagcactttgggaggccaaggcgtgcagatcacgaggtcaggagatcgagaccattctggctaacacagtgaaaccccttctctactaaaaatacaaaaaattagccgagggtggtggcgggcgcctgtagtcagtcccagctacttgggaggctgaggcaggagaatggcatgaacctgggaggcggagcttgcagtgagccaagatcgcaccactgcactccagcctgggcgagaaaacgagactccgtctcaaaaaacaaaaaaaaaagagtaacagtgatataaagagtttgcatgtctctggaagattcagacaagatttgccgacgtagggtgtgagaraaagtgaaacgttaaaggtgagcccacctttagtctgagcatgtgttaggatgtagttgcatttacagatgctcctcagtttaggatagggttaaatcctaataaacccatactaagt

SEQ ID NO: 831983 - DNA, 602 bp, Homo sapiens
gcaggtggctatgtctgggcacccagctgggtgattcctccagacgtgctctccctgtcttcccctctggccctcagcaggaagccagggtctatttgagctgttgctgcagcagccatgtgcatactttgcccaagagaaaaaaaaaaatccttgctcttaaacttagataaattattctaacaagagaacacaaaacagcttcttggcaggtgaggaccctgtttgcgtgagatcatgtatttttccttttgcttttctccaacagtttacttaaagggcacccacaaatagaatgtcacagtcctgggaaattgtttcaccagtatttcactgagtacttgggaactgagaaagtacaaatgaatcaaacacagtccagaccacagcgtcaataagcaaattatctaaaagaggagttacaaatgctaattctaaagtcagatagaaagttcagacagagagatcctggagttcaagagaaggagcagtgacttgtaacttggagagttcaagaagaggtgggaagaggtggccaytttgagggttctggaaggccagtcctatttgtgtttgtcaacttgggcaagatgtcagagggt

SEQ ID NO: 831984 - DNA, 614 bp, Homo sapiens
atgtttatagcagcacaatttgcaattgcaaaaccgtggaaccaactaaaatgcccatcccatcaatcaatgaatggataaagaaactgtgagatatatayagatacacatacacacacacatacacacacacacacgatggaatactactcagccataaaaaggaatgagttaatggcattcacagtgacctggatgagtttggaggctattattctaagtgaagtaactcaagaatggaaaaacaaacatcatatgtcctcactcatgtgtgtaggctaagctatgaggatgcaaaggcataagaaagacacaatggattttggagactcagggggaaagggttggaaggaggtgagggataaaagatcacaaattgggtgcagtgtatactgcttgggtgataggtgtgccaaaatctcacaaatcaccaccgtagaacttattcatgtaaccaagcaccacctgttgtccaataacctgtggaaataattttttttagaaagaaagggtgcttaatgagacttttggtctacttactgatctaaagaaaacatatggtggtaaatggtttgaaaacacagctcaaattattttctccctgcatctatgcc

SEQ ID NO: 831985 - DNA, 439 bp, Homo sapiens
gccaatgctgatctgtacccagcccatactttctgtgcctcactttggttttcttgcccataattgctatgcagaaggcagccctggttcactgtgcacttactgtggtctgggggctgcctgattcacaaatcgttctttattcaatgttcaattaaaatcagtaaaatctaatttgtctaaagttttaaaaaactatattaacaagaagaacattcttaaacttgttctgaaacctcaattaaaacttcaatactacccacatagtgggtgagcctaaaaaccctattttgtgagggaaaattaatttgacttgttgaacatgtgatgtaatcatcccagtagaattaagtatagtctctgatagcaggtgcttccttttgtttaatctggtaaagttagtattgcatgggtttgrtgctttaaaaactaaaggaaa

SEQ ID NO: 831986 - DNA, 622 bp, Homo sapiens
ttcataattgacatagtaaaatatatgagttatatatgcaaaactttggctcttcatttcatctaatagatatggctccacttaaaaaatttccttttgctttartattattgcatattatttttagacagaagcagcagttgggctgtgatgcaaattttaatggcttttgggtttttttggagtgaagtgcatattcaattactttcccatttttctttgcctatttctaatatatacaaattccttttatattatagatattatttcttatcaataacacattttaaaatgtcttatttttacggtgcttttcacaccctaacgtgtatatttagtgaatagaggtctttgatatgtatttagtcaagtgtatcatgtatctgtaatttctttgtatggttagtatgctttttgttttgcttaagagattccttcttgcagaaatttatgaagatatcatcttcgattatattctgacagtcttattattggctaccacctatatttccttaattcacctgtaattgatttttgtgtatggtttgataaaggggacatctttctttttgatatctattgtctcacatcatttattcagtctttccactttattggccag

SEQ ID NO: 831987 - DNA, 636 bp, Homo sapiens
ggtttaaagtaaaagggtgaaaaatcatatgatatgaaagtattaagcctaagaaaattggggcagctataatgaatctcagacaattataactctaggtaaaaacatcatcagaaaygaagggggccattttaatatcataaaattgccaattcgtcaggaaagcatataaacaataatcatgtatatatctaattataaagcttcaaaataaagaaaaaataaaaccctaaagaagcaataaactaagtcaataatgtaaatgattgaaataatactgagagatttctggtttctggtctggaatgtaaggagcttgaaagttgtcactgcaacttcacaacaagaaaaagttgaaaacaaaacccactaaaaattgacgactcttcttagatccgtcaggtgaggatatgtgaggtcacaaagtgaaacaccgaccgaaatattgaagacgaagacaggtggatgcagagaatcacaggttcctggagcagaacaccaggaacgaaaactgtggggatcggtactgggggtaggaaaacctaaactgcagttgacaaattgccagaggctcatcatggacaattttgagagttaacttttgctgagagtagtggaaaaacaggtagatagagt

SEQ ID NO: 831988 - DNA, 503 bp, Homo sapiens
cttcacaacaagaaaaagttgaaaacaaaacccactaaaaattgacgactcttcttagatccgtcaggtgaggatatgtgaggtcacaaagtgaaacaccgaccgaaatattgaagacgaagacaggtggatgcagagaatcacaggttcctggagcagaacaccaggaacgaaaactgtggggatcggtactgggggtaggaaaacctaaactgcagttgacaaattgccagaggctcatcatggacaattttgagagttaacttttgctgagagtagtggaaaaacaggtagatagagtacatattgtatacattcaatttacatttatcctacattttatttatgcaggaataggaaagactcttctgtggtgacagaaatgacagcggtggctatgagaattaggtgaagtaattagaaaagcttatgcaggaactttctagggtgatgaaaataatgtaaaattttacaggrgtgtaggtaacatgggtgaatacact

SEQ ID NO: 831989 - DNA, 591 bp, Homo sapiens
atcaattaaggcctaccactaacatcatacttttaattatagaagactgtattacttcccttagatcaggaataaggcaaaacaattcagctcatcactcctactaaatattgtactggagatcctagctagtgcaataaatcaaagaaagaggtggaagggagagaaaggcagattagataggaagagataaaattgtctttatttgaaggaagtctatgaaaaatatcacaaagggtgatcaaacatattacaaaagcttataatttaccatagcaaatttatgggtacaagttcaatatacagaatcaaaaaccttcaaatatattagcaatgagccattaggaattaaaatttaaaagcttcatttattatagcatcaaaaacatgaagtacttttgtataaatcaaatatatggaagatccatatgttgaaaactacaaaacattattgatataattcaaagatggcttaactatygagatataacatgttcatggattgcaaaatttaatattgttaatgaaaattcaccccaattgacctatagaatttatatcaaaattatagtaattgtatataaataaatt

SEQ ID NO: 831990 - DNA, 599 bp, Homo sapiens
aggggctcttgactgagtagaccataacttgtaagccagattctatggctatctgccattctttggtttgatttttcttttattcttatcagtcttaaagaaaagtgtgcttgaatgtgccatctttgctagcgagacttaggggacaacttctgccttggcccacttttgggcttcagcatcaaagagccagcaacacctcatgtggtcaatgtggtggtacagtgatattagtagaacctcaaagggaaggagatcagccaccaacagtggccagcatcctctccctctgtgaagagttttcttccgttacttgtcttggatggccattgtattaaggaatcagaggggtcttataattggtgattagtagtatcttggttggaacagcccatggcccatggctagagacttcaatatccaacaggaggtggacaagagatcagagctttagcaaatggtttaagagccagtacaggacttccrttctaggaggcagccagaatacaaaccataaattccagagaaaaggcacagttcattgggagtggcaggtaaggggagggcaagtttgcaactcaacagctttgttcagaaca

SEQ ID NO: 831991 - DNA, 576 bp, Homo sapiens
tgaaaacattccaaaggttttcatttcacttgtttaaaatttaaaaatgtacagggtttttacatgacctcctgccactgacctcactgtgttcattctgcctcagccatgtgggccttctccttgttctattataaaacacatgaatagactcctgccccatggttttctttcctgctcttctctaggccaggaaggctcttcccatagacatatgcttggaccattctttttcttcaggtttctgttcaagtgtctaagatgagagaggcgtcctgtgcacagtctactaagttccagccctctttccctgaatttcctataactctattttgtatagttaaaataagggataaatcaaagtatgatttcacaaatcacaaagagtattgccatacaaagatattttgtttctttttgaatcacctaaagaagggaagaataatgagaacaaayctagagggaatacacttgatagatgacgtacattaaccacagagtgagttccaattttgttagagcccagttattagtctagttgctcaattaggatagaagcagggcctctgtggaaag

SEQ ID NO: 831992 - DNA, 610 bp, Homo sapiens
caaagtaagtattactattggccgcaaattacaggtgagaacattgtaggcacagggaagctaagtaacttcttcaagactatctttacgggttaataagacacagaacagaacccaggtctgccttgaaggcacattctatttatcaacagacttactaataaattaacgcagtggaagaactgaagatggggatttattttcccagttgagttggtttgtctaactcacaaccaaacacaacaaagctgatgaacaaggcagagaaagacaacgctcaggagtgagaagtgacaagaagattatgacagcaataatatcatgtatgtgaaaagtttactaaaactgacatttgttgtaataaatggaaggtgatcccatgcagagaaaatattttcagatgggcctctccttataaatttccaattttgagtgactcagatggctgaacagctgatgctattagttttcagctcctgctgctataatattaattgtaggaggcaaacctatccagttgctacacagatgctagatgctaggtacacacacacacacayacacacacacgcacacatgcacacatgcacacatgcatgcacaggataag

SEQ ID NO: 831993 - DNA, 607 bp, Homo sapiens
cctccaacaggggttgtcagacaccctattcaggagtgatgctactggcatccggttggtgtcccttgaggtaagaagtcccagaaggaggagcaggcacccatctttgctcttctctagcctccttgagtggcatctccaggcatgggagtgaatcagatgaatacgcctgaagtgaacccccagcaaactgaggcagccctacagaagagggacctgactacttaaagaaaaacaagcaagcagaaactgacaacagtgtcaacaacaacaacaaaaaaggccctcagaaaaaccccatccaagagccagcagcctcaaaactgaagctagacaaactcacaaagatgagaaagaatcaatgtaatgatgctgtagaccctaaaggccagagtacctcttctcctccaaatgatcacaacatctctccatcaaggccacagaactggatggaggatcagttggacaaactgacagaagtaggcttcagaagatggstaataaaaaactacaatgaactaaaggaacatgttctaacccaatgcaaagaagctaagaaccttgataaaaggttagaataagggaggagaccacccctcatattgtc

SEQ ID NO: 831994 - DNA, 601 bp, Homo sapiens
aacaaacgagagtgtggatatctctttgacatactggtttcctttcttttggctatatacctagcaggaggattgctggatcatatggcaggtttctttttagtttttttttgaaagaccttcaaactgttctccatagtagttgtactagttgacattcccaccagctgtgtacaaggattctctttttttccatatccttgccagcatttgttacctttttttgtcttctttaactttcttggggacatacaaggtgtatatatctatggattacatgagatgttttgatacaggtatgcaatgtgaaataagcaccccatggagaaaggggtatcaggcattgatccgttgaggtacaatcaaattacactctttaaggtacgttaaaatgtacaattaaggtatcattgactgtagacaccttgtgctatcaaataggatggcttctttaatctttctaagtattttttttttgtcagccattmactgtctccacctctcctccagctcgccactacttttccccacctctggtaaccatccttcgactctctatgcccatgagttcagttgttttgatttttatatcccacagata

SEQ ID NO: 831995 - DNA, 348 bp, Homo sapiens
  misc_feature 308, 309, 310, 311, 312, 313, 314, 315, 316, 317, 318, 319,320, 321, 322, 323, 324, 325, 326, 327, 328, 329, 330, 331,332, 333, 334, 335, 336, 337, 338, 339, 340, 341, 342, 343,344, 345, 346, 347, 348: n = A,T,C or G
agctatggccaacagggctctggatctggccagtctcctagtcgcggccgacatgggtccggttccgggcactcttccagctacggccaacatgggtctggctccggttggtcttccagcagtggccgacatgggtctggctcaggtcagtcttctggatttggtcaccacgagtctagctcatggcagtcctctggttacactcagcatggatctggctcaggtcactcctccagctacgaacaacacggctctaggtcaggacagtcatctaggggtgaacracacggatctagctcaggttcatnnnnnnnnnnnnnnnnnnnnnnnnnnnnnnnnnnnnnnnnn

SEQ ID NO: 831996 - DNA, 595 bp, Homo sapiens
aaagtaacttgtttagggtctcataagaggtttctaacaaaactggtctggtttcatgtcctcatttccagtcgtgttcattcaccagatcacattaccacttggtgtttttagggtgatgragacttcacaatacataacttgcttaaatcatgactaaggttatcttggcatacttcccatcattgggtaataccaaattctctgtgatctttctttttttacataatcagtaaatatttattttgctaactggtgtggaggatagaaatgaggcataaagcctgtctcctgcccgtaagggacaaataatctatacataaccattttggccttcatctctttttcatctactttccccatttcccccaagacaagcccactgataatctgtacctacagcttagaattaggtcaggtccttaaacttggtcacccattcttggtttgtaggttccagaatttcactggattccttttgctgacagttgttgtgcctctggttatcccccaagtctctactccctttatcctgtgttgaacttgtctatgagactgagcttatgctatgcttttcactcctcaattagatatc

SEQ ID NO: 831997 - DNA, 636 bp, Homo sapiens
ttagtttgttgtccctgacaaaaaaggagctagtttaaaaaaaaaaaaaagagaagtgaaaaggaaaataaaagtcagaaaatgactaaawcaaaaccaaaggaatctattccaattttatgaacaataagagagaaacaaatttccaaatagttttgtcgtttttaattttctttgaccttctcatatttaaattatgccgtactgctaggtttccttttagacagagaaaggaaatgctgtgtaataggatcaaaaatttaagtaacttggtccagacaatacaattaagatgagtgggtcaagattcaactccagtttcagcctcaaaatcctcttgtgcaaagtgggcaattgtacttacatcatagactcatagtgaggatgaaatctgattacataaggaaattgtgtagagcagactttatgatagaataagtcttcaaaagctgatacttaaccattattattattattaactagcagctcaaaagactgttagctcatcaaacagttaccaactctattttcatttttttgagagaactcagaagcaatgaggttcctattaacaataataataataatatcagaaagaataagttggtttaggctgcagtaacaaagaaagctcaa

SEQ ID NO: 831998 - DNA, 532 bp, Homo sapiens
ctgcaaagactttctccaagtaagatcacattcacaggtttcagggatttgatgtggacatatcttttggagagggtcagcattcaacccactacaccagtgttgagttcctacaatgacataaatctgaattgctggtgtcattaaaatccttaagtagttctccattacctaaggagtccagactcctctgcatgtcacaaaaagaacttatatctgaccctttcctaatcctccaggaaaataggtttcatcttggcagacaatctcccatggccactccatttcaatgatacgtagagagaaagtaggggaggagagatccttgggaaaactgggctgcctgcttgtcaagcagctagaggtacagaatattgggatttgtatgctgtgtagctgtgaccacctgaattcactggtggcgcagaagagggatcacagagwttagtttgcacttatatttttcatcagataacacattaattaattgacaataataaactattaatgtttcgttgaatgaagtgaatgg

SEQ ID NO: 831999 - DNA, 617 bp, Homo sapiens
ttggtgttattataaatgctatagctttttaaatttaaagtactacttttacattactagtatttagattttgtgttttagccttaygtcctatgatcttgccatacttattagttccagattttttttgtcaattatttgggatttgtttttacaattaagagacagttttatttcttcccaatattcgtgcctttattttttcttatcttattacactgtctaggacttctattatgatattgaatagaagagtgagagagaacgtcccttcctagttgccaatcttagaaaaatagtgttgagtgttctcattgaatataatataaaatgcagattttatatagatgttcctaaccaagtagaggaaatctctctgtcttccaagtttgctgagtttttttttaatgaatgagtatttttaggattttttcaaatgctttttctgcatcaattgatataatcatataatttttcttctttaatctgttcctttgatgtatttcattggctgactttctaatgaaaaacagtatttgcatatatgtaataaatttcccttggttttggtacataattatttatctttccctattaagccagtagggtatctttat

SEQ ID NO: 832000 - DNA, 602 bp, Homo sapiens
acatatatatatgactcctcttattttataatttctcattttttgatgtatcatattgcctgaactgagattacaagagacattttgaaatacaaaagtttctgtcttctcagtggcaggggcttgaattattctttgcattagttttcttctgcctgaggaaatttcttaaatgaacccttaaattgttcacatataaggcaaatacatactccctatttagaaggaaaaacctggaagaaacctgtaacttggatgcaaatattgttctcaaataatgtcccaaatattctgtggggtatgcattttattatggttcttgttttaaatgagagagttctctctgcagaaatagtgtcttatagaatttttcttgttctaaatatggaatttgatggttctgtgctatgcacttcaactcacttttgtgaagctgtgttcttttttcagtagttaattgcgggaggtgcagagcagaggcacaagttgctgaagaaggatgtatggatctcactttcatctgaccctgcagggggtaaagtggaggggaaaatagtgatccaggcaaagctcastctgtactgggttgttatggatgactg

SEQ ID NO: 832001 - DNA, 588 bp, Homo sapiens
ttaaccggttgtcagatatgtagtttgcaaatgttttctcccattctgtgggttgtcttttcaatttgttgattgcttcctttggtgtgcaaaagctttgtaacctaatgtgatcccatttgttcrtttttgcttaggttgcctgtgcttgtagggtgttgctaaagaaatttttgcccagattaatgtccaggagattttcccccaatttttttttttgtagtagtactttcatagtttgaggtcttagatttaaatctttaatccatttttccttgatttttttatatggccagagataggggtctagttttattcttctgcatatgaatatctagttttcccagcaccatttattgaagaggctgtcttttccccagtgtaccctcttggcacacttgtcaaaatgaactaactgtagacatgtagatttgtttctttgttctctattctgttccattggtctctgtgtctgttttcatgccaaaaccatgctgttttggtaactgcagctctttagtataatttgtggttaggtaatatgatttctctagttttgttctttttgcctcagatagctttggctat

SEQ ID NO: 832002 - DNA, 628 bp, Homo sapiens
atgagatcacgtcctttgcagggggaggaaattatccttagcaaactaacataggaacagaaaaccaaatactgcatgttctcacttataagtgggagctaaataatgaaaatatgaacacatagagaggaacaacacacactagggcctttaggagagtggagggtgggaggagggagagggtcaggaaaaataactaatgggtaccaagcttaatacctgggtaatgacataatctatacaacaaaccccaatgatgcaagtttacctatgtaacaaatctgcacttgtaaccctgaacttaaaagttaaaaacaaaaacaacacacacaaaaaattgcaaactagtaagtatgctcaattttccataacatcaaacaacttttgttatttcccatttttataatgtatatgaattatttcttgagattgtagtggtctagccatagcatttctattcatttatccattatataattaattcattaattcagtcagtacttactgagcacttactgtacgccagatactgttccaggcactaaggatacaacagtaaaccagaagtaaaaaagcctttctctcacraaacttacattgtagtggaagagataaactatgagcaagt

SEQ ID NO: 832003 - DNA, 460 bp, Homo sapiens
aggccgaggcaggcggatcactaggtcaggagatcaagaccatcctgggtaacacggtgaaaccctgtctctactaaaaatacaaaaaaaaaaaaaaattagcygggcgtggtggcatgcgcctgtagtcccagctacttgtgagggtgaggcaggagaatggtgtgaacccaggaggcggagcttgcagcgagccgagattgcaccactgcactccagcctgggcaacagagcaagactccgtcaaacatacacacacacacacacacacacacacacacacacacacacacacttagctgggcgcggtggcacatgcctgtaatcccagctactctggaggctgaggcaggagaattgcttgaactccaggggcagaggttgcggtgagccaagaccgcaccattgcactccagcctgggcaacaaaagtgacactccatctcaaaaaaaaaaagaaa

SEQ ID NO: 832004 - DNA, 611 bp, Homo sapiens
actttcacaagatttactggaagataactctcacctttatagacattsgcggcggccagtattacactggagttttaggtttcccaatattctgaaagaaattaaacattttgatgcagacgtaagtgcaaaatattattgaaattcttcacataagaaaaagttggggccgggcacactggctcatgcttgtaatcccagcactttgggaggctgaggcaggtggatcacctgaggtcggtagtttgagaccagcctgaccaacatggagaaaccccgtctctactaaaaaatacaaaattagccgggcgtggtggctcatgcctgtaatcccagctactcaggaggctgaggcaggagaatcacttgaacctgggaggtcgatgttgcagtgagctgagattgcaccattgcaatccagcctgggcaacaagagcaaaactctgcctcaaaaaaaaaaaaaagaaagaaagaaaaagttgggttaaatgtttcatttgtgcatttatgaactaaatggttttatccattttgtttgtggggtaagaaaggaatatgtttaagaataatgatggaataagtcttaataaggtataactttcagagaggca

SEQ ID NO: 832005 - DNA, 511 bp, Homo sapiens
taaagtggtttcatccacattaaaaattgttggccaggtgcggtggctcatgcctgtaatcccaacactttgaggggctgaggcaggaggattgctcaagcccaggagttcragaccagcctgggcaacatggtgaaacgccacctctaccaaaaaatattaaaaaattagcccggcgtggaggcatgcacctgtaatcccacctacttgggaagctgaagcagaatcgctggaacccaggaggcagaggtagcagtgaaccgagatcgtgtcactgcagtccagcctgggcaacagcgcgagatcctgtctcaaaaaaaaaaaaaaaaatctattatttagtgtagccaccttcatcaatgatcttagctagatcttctggataacctactgcagcttctacatcagcagcacttgctgctttacctgtacttttatgttatggagatggcttcattctttaacctcataaattaacctctgttaacttccaacttctcttctgcagctt

SEQ ID NO: 832006 - DNA, 532 bp, Homo sapiens
aaagccaggccaggtgctgacagcttcctgtttgtttcccctggggtggtgtcctgaagtactcaagtttgtgtaccttgcttcaattccacaatcaagccatctgtctctatatttgatgcttgcagttgccatccaatgtggcatgcttgggaagccagcctcagggagatgggggtgaggtgcacagagaatttggggtggccatgggtcatgtgggaggtccatatgcaaggtatcccagtggttggtgaggcttcctgatggagtctgtggagtgctgagtaggtttcaggagcctttcttccctgctcccagcctttcccaacgcttagctatgacagtcacctcaatattttaattggagcaagaaagaggtagggttcttaggcagcatcccacacagctaggggctgagcactctcactatgctatcaccttctcccatgggagaaattgtggactgaggggagtctctcttgccactaagcygtgccaacttcaaagagtgatgcagataaagtgaaaatct

SEQ ID NO: 832007 - DNA, 553 bp, Homo sapiens
caactgactaaaaaggctaaaaagaaatgtaaaagtccgttgtatccataaggtagcaatcacatttgtttatccaattgtccagggaatttttctctggctggattcaagttcctgtgatayaataatttggtctattccatgattaatggcatttaatattttggaaagatctttgagatcaaattgaacacattcatttcatggatgaggaaaatgctgcccagagaggtttaatgatttgtccagagttataggaacatacagaaatacatccaggacatggacacagagttcctgattcttagtcaaattctttaggtaacacattccccagggtcagattcgacataatttacagtcacttgattatagagaatgttataatttcaatatatatcaatgcatatattctgcctgatatagttgggatacttgtccctccaatctcatattgaaatgtaatccccaatgttgaaggttggccctaatagaaggtgtttgggtcctgcgggtggatccctcatggcttggtgctgtccttgcagtaatg

SEQ ID NO: 832008 - DNA, 630 bp, Homo sapiens
ctgaataatgtattttccagatgaatgtagggctattttttaaaatgtatgaagatatcagctttccaggtaaaatggaaaatttataatagcttttttctcatagtgtattttcccaatttgatgttaatacctttatattttaaacattgacactggattagactattttgcacatttcttgattttagcatgaattcaacttaaaattgacttgtatatttcctataacacaatccaagttccccgtattttgatctaataattctgtaataaaaaggagttgcacttgttactcttgtctaaaaatgtgcaaaatttctcacatttacagtaatattctccacatatcgaactcacagtaacataaaaagaaagtagggaaagctttcagaaatccatcttctctcctgagagtaagcattttacccacataaacagtcttacctgtttatctcttcatcaacaaatgtaatttgactcactgcctcagagacgttgaaatcatcactgyatcctgcctcttcctactgtgcccctagaattttcaagagtttatgtccaagaatcttgtaaacttattttatatttcatccttatgaagtacatagtaagttcactaagtcagtc

SEQ ID NO: 832009 - DNA, 629 bp, Homo sapiens
tgttttatctgatataaatagcaagcctgctctctttttccgtttgcctgatagatcattctccattcctttattttgagcctgtggttgttgttaatgcgtgagatgtgtctcttgaagacagtagacagttgagtgttactttttttttttaatataacttgcctctctatgccttttaagtggggtgtttagctcatttgcattcaaggtcaatattaatttgcaaggacttgatcctgtcatattgttaactgattgttgtgtagacttgattgtacagttgctttctagtgtcaatggctgtgtacttaaatgtgtttttgcattgacaggtactgttcttttatttccatgtttagcacagcctatagaccttttgtaagtcaggtctagtgataacaaattcctttagtgtttgctgctctaagaaggattttctttctcctttacttacgaagctcactttggcaagataaaaaaaaaacttggttgaaatttttttttgtttaatgatactgaaaataggcctctcaatctcttctggcttytaaggtttctgcttaaaggtctgctattagcctgctggggttccctttttaagttacctgccccttccctgtagctgc

SEQ ID NO: 832010 - DNA, 471 bp, Homo sapiens
ttatgactatggtttaggggaaaggatrtcgaaactaagacatctgtgaaagcatttgctacactgataatggaaaccccttccgcatctgttttgaaatctgggagataattgtccaagcgaagctctgtttcaagtaaccgtcaagcctccaaactgaagaaagctgttctaattcagattctaagccattaactttcttctggaaggtcatgtgcccatcattgacatgaaaatatttcctgtctacgtgcctcacagccctgggctaatccaaactgctctttcattccttgcataaaaccttaacatcactttcttcttattcatgaaatgcagtttctagggcaatgcattttctccactttgagaggggtaacgtcagctacagatacagatatcatttgaattttttctccatacatgaaaagtttgctttccatgctggcaaccacggtgatgtctggagaa

SEQ ID NO: 832011 - DNA, 601 bp, Homo sapiens
aaaacagcctattctttcagaaatggttctttggtctcttgcacatgtgtctgcatgctgactggcaatttctcctaaaggatataaattaaaatctcactttttcccattgagcttttcacttcaaaatgtcaacatagtcgctatgatagatatagacgtataggaatgaatcctatatatccacaaaacccactaccctttcccctttgataactatagttcttgaattgggcttcatataaggtgaccaaagaccagattcatgaagtatcctattcacagaatcagaaaaatactgaatagcagagctggaaggaagcttaaagatgatttagtccaattccctcattctgagaggtctagagaagtagaatggggatttctaggccacagactggcaaaaccaaagctagaagctggtccattgcactttgtagaaaacatgtcattattaaactagaactaggatcccttttttcgatgaacactctaaattctagtgttttaaaaaaaggggggggatggcaaaacttaggcaactattattatttattwttttttttttttggagtcttactctgtcacccaggctggagta

SEQ ID NO: 832012 - DNA, 522 bp, Homo sapiens
caatgcataataatcacatcaggggctgggcgtagtggctcatgcctgtaatcccagcactttgggaggccgaggcaggtggatcacaaggkcaatagattgagaccatcctggccaacatggtgaaaccccatctctacttaatatacaaaaattagctgggcatggtggcgcgtgcctgtagtaccgctactcaggaggctgaggcgggagaatcgcttgaacccgggaggcggaggttgcagtgagccgagatcgcgccactacactccagcctggtgacagagcgaggctccgtctcaagaaaacagaaaaaaaaaaaagccgggcgcggtggctcatgcctctaatcccagcactttgggaggccgagacggcggatcacttggggtcaggagttcggagcagtctggccaacctggtgaaaccctgcctcttctaaaaacacaaaaattagccaggcgtggctggcgggcgcctgtagtcccagctacttgggaggctgaggtgggagaattgctt

SEQ ID NO: 832013 - DNA, 522 bp, Homo sapiens
caatgcataataatcacatcaggggctgggcgtagtggctcatgcctgtaatcccagcactttgggaggccgaggcaggtggatcacaaggtcaatagattgagaccatcctggccaacatggtgaaaccccatctctacttaatatacaaaaattagctgggcatggtggcgcgtgcctgtagtaccgctactcaggaggctgaggcgggagaatcgcttgaacccgggaggcggaggttgcagtgagccgagatcgcgccactacactccagcctggtgacagagcgaggctccgtctcaagaaaacagaaaaaaaaaaaagccgggcgcggtggctcatgcctctaatcccagcactttgggaggccgagacggcggatcacttggggtcaggagttcggagcagtctggccaacctggtgaaaccctgcctcttctaaaaacacaaaaattakccaggcgtggctggcgggcgcctgtagtcccagctacttgggaggctgaggtgggagaattgctt

SEQ ID NO: 832014 - DNA, 596 bp, Homo sapiens
tatcttttgtaatagcccttataataaacctgtaaacacaattgtttttctcagttctgagagctgctccagcaaactaatcaaacacaaattaatccagcaaattaatccaggggggcatgggaaccccaacttaaagatggttgatcagaagttttggaatcccagacttgtgactgggtctaaagcgggggacacagtctcaggggactgatccctcaaactgtgagatctgacactatctccaagtagatagtaccagcactgaattagaggatgaccatttgggtgtcatctacagaattcattgcttgcttgctggtagagagaaatacccacatattttgaggtcatagaagtcttctgtgttcattattactgtgttgatgtgagaacagagggaaaaaaaatggtttgaaaaacatgttaaacatagttgtatacccaagagaaatgggaatacatgtccacacaaaatatgtacacaaatgttcatagcaaaattattcataataaacaaaaacacagacacaacccaaatrtcaatggatgaatggctgaacaaaatgtgatgtatccaaccaatggaatattat

SEQ ID NO: 832015 - DNA, 653 bp, Homo sapiens
aaggtattttgttcaaagctcttagtatacttgtgaacacttggcttgagcacsctaagcattgagtgtttaaagtccacctggcagaatgctggcattcggtgcctggtgcagttgctgggagggcgtgcttgtcctccctgaccttggaaatctctgctctccttagcagccatatgtgagttgatcagttttatctctctaaacccttactgaagccagtcctttatttcttctgcacaaatgatgaactgttggagaaaggaatcccttaagtttattattgtccagggtgttattccctgcccaattcctgctgtttttctcctcccacactcagtagtagagttcctgctttccctcacttttcagtccttcctgctccccaggccagtttgtaattgagaaatgatatttttttctgttgttttgggctccacttacccgttgctgttggttgttcggggctctatagctcttttggggaatcggggctccaggcttctacactgatccctctaccacatactcatgttttacctgtgaattcaaggtgctggcttttagtgttgcagactaggttggggtaacttggttatgatgaaatctatgctccagacttatctcttctttcagatctggcagaatagaac

SEQ ID NO: 832016 - DNA, 653 bp, Homo sapiens
aaggtattttgttcaaagctcttagtatacttgtgaacacttggcttgagcaccctaagcattgagtgtttaaagtccacctggcagaatgctggcattcggtgcctggtgcagttgctgggagggcgtgcttgtcctccctgaccttggaaatctctgctctccttagcagccatatgtgagttgatcagttttatctctctaaacccttactgaagccagtcctttatttcttctgcacaaatgatgaactgttggagaaaggaatcccttaagtttattattgtccagggtgttattccctgcccaattcctgctgtttttctcctcccacactcagtagtagagttcctgctttccctcacttttcagtccttcctgctccccaggccagtttgtaattgagaaatgatatttttttctgttgttttgggctccacttacccgttgctgttggttgttcggggctctatagctcttttggggaatcggggctccaggcttctacactgatccctctaccacatactcatgttttacctgtgaattcaaggtgctggcttttagtrttgcagactaggttggggtaacttggttatgatgaaatctatgctccagacttatctcttctttcagatctggcagaatagaac

SEQ ID NO: 832017 - DNA, 599 bp, Homo sapiens
aatgctattcatagtggtcacaaggcagaaataacttaaatgaccctcaatggagcaayagataaataaaatatggtacattcatacaaataaatagtattcagtcatacaaaaggaatgaagtcctgaaacataccataacatggatgaagcttgataacattatgcaaaatgaagaggtatacacaaaaggtcacatatatgatcccattcatatgcagtatcaggaatcagcacatccatacagattgatggctgccaggcacttggggagtggggaatgccgagtgattgctaatgggaccccagatttcattctggggtcatgaagtgctttggaactagatagtggtgatagttggataacattgcgaatgtattaaatgctacagaattttacaatttaagatggttaaaattgtgaattttacgttatgtgaatttaattacaattaaaacaaagtgagtagacaaatattgcctctttggggactcaaggcatctggagacctcagggtttgtttggttcatgtgttttgttttgttttgaatcactagctaagatgttggcaacacagtaaacaaaagctgaacaataa

SEQ ID NO: 832018 - DNA, 622 bp, Homo sapiens
atatatactgtatgatttacataaagctcaaaaataggcataagtataaaattagacatcaagatagtgtttacctatggggaagaggatgattggctatgaaggaggcttctagggctttggtaatgttctggttcatacttgggcaattgtgataatctatcaagttgtacatttacagttggtgcactgtgtattttgcttcaatttcagaagtttagacaaaagataatcaatgagaatgttcaggaattaaagaattacgtgaatcttcattttaaaatgacacaagtagtatccaacagaatagaaacagatttacattttatgaaactttaggacataaaagacaaaaataagaccctaagagctactagagataaaagattgttacaaaaaaaaataactacagcaatagcaaagttaccatcagcaaaaatgaataacatcatacaaatgattaatcattataatggtgaagagaaatatattagaattttatcaccaawgaaactatctttcaagagaaaacatgaaataaggatgttttcaaatatacacacattaagaaaattttatgaaacttaaaaaacatctgtgaaataactgttaaagtttgcta

SEQ ID NO: 832019 - DNA, 517 bp, Homo sapiens
aaaaaagctttttaaatttatttttgtctgacattgattatgtgggataaaatatctccargtgcggtgcagagtctatatgaagaagcacagataggaagagaagtagtcacattaaagtcaaattaagagtcctattaaagtctacaatagccaggctgggcatggcaactcacaccggtaatcccagcactttgggaggctgaggagggcagatcacttgaggccaggagtttgagaccagcccagccaacacagtgaaaccccatctctattaaaaacacaaaaattagccaggtatggtggtgcatgcctataatcctagctacttgggaggctgaggcacaagaatcgcttgagcctgggaggtggaagttgcagtgagccaagatggcaccattgcactccagcctgggtgacagagagagactctgtctcaaaaaaaaaaaaaaagtgtacagtagccattgggctagatagcctgaggcctaaccggtgcccacagtggggatgtgtt

SEQ ID NO: 832020 - DNA, 520 bp, Homo sapiens
ctcttcaggctttttaaaaaagctttttaaatttatttttgtctgacattgattatgtgggataaaatatctccaagtgmggtgcagagtctatatgaagaagcacagataggaagagaagtagtcacattaaagtcaaattaagagtcctattaaagtctacaatagccaggctgggcatggcaactcacaccggtaatcccagcactttgggaggctgaggagggcagatcacttgaggccaggagtttgagaccagcccagccaacacagtgaaaccccatctctattaaaaacacaaaaattagccaggtatggtggtgcatgcctataatcctagctacttgggaggctgaggcacaagaatcgcttgagcctgggaggtggaagttgcagtgagccaagatggcaccattgcactccagcctgggtgacagagagagactctgtctcaaaaaaaaaaaaaaagtgtacagtagccattgggctagatagcctgaggcctaaccggtgcccacag

SEQ ID NO: 832021 - DNA, 498 bp, Homo sapiens
cttatgtgtgtaagcccttctcatatgtggtctcattcactctttctttttcttttttttttttaaagtctgggtttcactctgttacccaggctgatggcatgatcacagctcattgcagcctcgacctcccgggctcaagcgattctcctgcctcagcctcctgagaagctgagacaacaggcatgcaccaccatgcctggctaattttttattttttgtagagatgggttttcactatatttcccaggctggtctcaaacccctgagctgaagcaatcctcctggcttagcctcccaaaatgctgggattacagacatgagccactgcacctggccgtgtcatctcctttaatctctgcaacgaccctgtaaggtagatgctatcgtagcatcctcrttgtacagatgaggaaaccacaacaaagagtggatactttactgtgagtgtcagaactgggatctgaacccagaggtctgatgccaaaggccatgagg

SEQ ID NO: 832022 - DNA, 584 bp, Homo sapiens
tgcataatgtgttttctattgttgcacctgctcttcgttccgtttttcccctcttttctgccttttataggcttaactgagtagtttttataattccgtttcatcttttttattggctaattttctatattttttgttattttcatggttgctttagagtttatatcatttctctgtctatatatatatatacacacacatacacatatatatattttacaatatacatatgtaatatttttcaaagcctgcattcaagtgatattatatcattccatatatcattaagaacactacaatagtattcttccaagtcttcttaaatggtcaattttcttttaaagaactctaagtaataagaaataaatactatatgtttcccatgtgccatttctgatgttcttcctttttatatagatccctatcgccatctgggatcaactttctgctagaaggactacctttaacatttcctgaagtgcagggctgctggtggttgattttcttcagcttttatatctctaaaawgtatccattttgctttcattcttgaaagatatttttgctagatatagaattctaga

SEQ ID NO: 832023 - DNA, 553 bp, Homo sapiens
ttttttttttttaagacggagtcttgctctgtcgcccaggctggagtgcagtggcgcgatctcggctcactgcaagctccgcctcccgggttcaggccattctcctgcctcagcctcccgagtagctgggactacaggcgcccgcaaccacgcccagctaattttttgtatttttagtagagacggggtttcaccggcttagccaggatggtcttgatctcctgacctcgtgatccgcccgcctcggccacccaaagtgctgggattacaggcgtgagccaccgcgcctggcccaaacactgtatttttgaaagtgagacacctgctcagtgctgaggagagaaaggatctgcttgaggtcccagaacttcttggtagccaccccattcatcctcccaaacagttccctctcatcttttatatcaagtctgaagctgtaggagctgcaaagcctcctcatttacctgcatcctccctgggcacctataacaatgcctagaacactgaagyagatcagtaaaagggggatggacaaagaagggagaatccagag

SEQ ID NO: 832024 - DNA, 596 bp, Homo sapiens
aacaccatccatcaacctccaaagttattaaagtagatcaaagcacaattctatctctagaacagcaattctcaatcctgactgcacctcagactggcctggggagctcaaaattccaattcccaggcctcccttgggtattgagatataataggtttggatggggcctgagcaacagatacttggaaacgcttggcaggtgattttggaaggaagccagggatgagaagccttgctctacactgaaatgggcatgtcctgtccatgctcagccaacttttaaggatggcgtcttccatcactgcctttctctgcatcttctctctccaaaactgcctcttgcccactcaccactctcagttgctgtggaccctctctatctgccccctcttcttactctctctgctttttattgtgaggctcaacttagctgcttaggattcttttgttaattccctatgacccagattttgtcttgcaaaygagcgcaggtagctgagcttcccaggaaagttgaatacagcctcatcttctctcttggttatggtatcttcttcctcctcattggatcttgatgatcactggacttcctgttg

SEQ ID NO: 832025 - DNA, 488 bp, Homo sapiens
taagtaaaagaagccaatctgaaaaggctatactatatgagtccaagcatatgacattttgraacaggcgaaattatggagacaataaaaagatcagtggttgccaaaggctagtgaggagggaaggatgaaaagatggcacatagggtatttagggcagtgaaactcctctgtatgatactacaatgtcattatacatttgtccaaacccctacttcagtgtaggtttattagttgtaacaaatgtaccactctggtgggggatattgatcatgggagaggctatgcgcgtgtggggatagggacaaggggtatgtgggaaatctctgtaccttcctctcaattttgctttagataattttgcttttgggtactggttcttgggttttaagtaaatatttatatttgtattgactttgccacagtaggtacagcaaatttgctctaaaactgctctaagaaaataaagtcttaaaaaaaagctggtg

SEQ ID NO: 832026 - DNA, 532 bp, Homo sapiens
ctaagtctttcggagaagctcttaaataccagtagatattaatgttgctctgtttccyatcacagtgacagtctacatgacgctgcaccttactgcaccaccccgtactcacccagggaagcagcagaagtcagaatattagtcattagcttcagcagacttattattaacttttctacatggcctttcagactcaggagcaaatttatgtccaagttagctcagttcaagacatagaagcaaaaagctgattatttgtcctgtcttctctttctatctatgcttccaacttctgctagtccccttcaacagtctggctgataatggttaggccccattcatcaactcaaatattaagatatggctgttcacttacctaagtctataatatgctccacatggatctctggcttcagacatcccctctctttcttcttcatccttctactccagatgaactacaccttctcttcttattaatatttaggacaggagctgtcttatgtaggataggccttacttatttccttta

SEQ ID NO: 832027 - DNA, 640 bp, Homo sapiens
aagagctgaggttcctataattggatrgataagacaggatgtaggaagaatagctctaggattataactttgactaactttatgttcaaactggtgttgccaaggaaaacatgattacctttgtaaagatatgggtagtgatttttaagagcctgggaacagatttatacgtcttcctaatcctaaaactccctgcctggtgcaatgccttgtacccataggggttcatacaatgtttgttgatttaaagtagatttcagaaaacattatacaacagtcatttgtctttaaatccagttcagcagcaattaataataatcataacccaggcatctaggcaatttgtgctcattgtctcatttagtgccccaggcgaccctgttgaatgagtacaacctccattgacgaagtagaaacagcggcttccaggtggacagcttgataaaggcagtgaaagtctggctctcctctgcacatagtacttttgaatgcagatatgtgtagacgtccataaacagcagacctcaattgaaaacgggaagccaagatttggagccaggtctgtttgagcataaagtgtattgtttctgtcactcctttcaaaaatgaggcctttctgagcttcctctagtctgcaaag

SEQ ID NO: 832028 - DNA, 657 bp, Homo sapiens
gatttgagctccttcagggaaaaacactatctgtttctctacatctgccctgagcctaacaatgcctgaaacataggatctactcaacaaatgtatgttggtcagtgttattgaagatcaataacttgctgagcagcacattctttcctgaacagaagcaaagcacccaataccaggcttagctgtctcggttccaagaccaaccatgcagttacccaggaggatatgaagataatgacacagaatcaagtgaattttgatgtgcagtttgctatgatcttatgccttcgttggagaacctgggttttggccttgatcctggaacaattctctcaactcatcactagacccacattttaatcttgtgtgtccaagtttctattttggtaatatgctggtccaaggattaccaaaagtaaggtttctctccttttctaggcaagactatattttgattccttttctggcaatgtaatggaaatttcaaaacattaggaagctagtcaaaaagtttcacccttaagaggtggagcttgcagtgagcggagatcgcgccactgcactccagcctgggtgacagagcgagactccgtctcaaaaaaaaaaaagtttcrcccttaattctctattaaacacaatgttaggagcatcagtacc

SEQ ID NO: 832029 - DNA, 620 bp, Homo sapiens
gaccattaacaaatacacggataataartacggtaaattcaggtggtagtaagagttgtgaaggaatttgagcagagtgatgtggccgagagtgactgatgggtgggaaagtcttatgacacgggcagggttgtgaatggggagagttagccagcacatgaggatcagggaggttataggtagaaggaagagcaagcccaaaggccataagggaggaaaaaatttgcacgttgctatcattgctattgttagcagaatctgcacttgagaccccagatccaaggattccactcatccctttctttcccagtctgtagctgggcagttgctcagggtcacgatctatttggccctgaaagaaacacctggggttcctgacttcctccacaacgtttcagacactatcagagttctgtatggtttagattataaatgttctatgtattcctttcttgtttctcttctttggtggaatttgaagccatggaacctatatttttccattttccttgttcctaaactatctttcttacccaggtctaaactagattccattggatgtctgaggtccacctccaaattttctcccatggtagagttgtgtaacccaaaaataaaat

SEQ ID NO: 832030 - DNA, 620 bp, Homo sapiens
gaccattaacaaatacacggataataaatayggtaaattcaggtggtagtaagagttgtgaaggaatttgagcagagtgatgtggccgagagtgactgatgggtgggaaagtcttatgacacgggcagggttgtgaatggggagagttagccagcacatgaggatcagggaggttataggtagaaggaagagcaagcccaaaggccataagggaggaaaaaatttgcacgttgctatcattgctattgttagcagaatctgcacttgagaccccagatccaaggattccactcatccctttctttcccagtctgtagctgggcagttgctcagggtcacgatctatttggccctgaaagaaacacctggggttcctgacttcctccacaacgtttcagacactatcagagttctgtatggtttagattataaatgttctatgtattcctttcttgtttctcttctttggtggaatttgaagccatggaacctatatttttccattttccttgttcctaaactatctttcttacccaggtctaaactagattccattggatgtctgaggtccacctccaaattttctcccatggtagagttgtgtaacccaaaaataaaat

SEQ ID NO: 832031 - DNA, 613 bp, Homo sapiens
catcctttgtattattgctgtcatgcattttacttatatataaataaaaatatacataatcaaatacattgttgcttgtattactttgaacaaattgttatacgttagatcacttaagattaagaaaaataatggtgtttatttttccttcacttatttattctcccatgctttctctttcctcatgtagatatgagttacagactgatatcattttccttctctctaaaggacttctttcaacatttcttgtaaggtaggcttactggcaataaaatccctcaatttttgtttgtctgattaagtctttatttctccttcacttttgaaggataatttcacagtgtacagaattccaaataggtagactttttttctctcaaactttaaatattttactccactctttctgtttacatggtttctgaggaacagtcagatatagttcttatctttgctcatgtataggtaaggtattttttcctctggcttctttggggattttttttwatctctgattttatgttgtttgaaaatgatatgctgaggttcaatttttctggcatttattctgcttggtgttctctgactttcctggatccgtggtttggtg

SEQ ID NO: 832032 - DNA, 588 bp, Homo sapiens
ggctttctctggtctcaccatttgctttcatattccccaaattttggtgcaattgtcttctcttccattctccttgtcttttaagttaatgcctttaaaaattccctttactgatacttcagtggaattagcagagattaatagatgccatgttttcttggctttttaaaagattaaatgtaattccatgttttatatatgattttcaaaaaatgaattaccaatcgtaaattacaacagtatgcaatacacttagggtgaataagattagaagcttaaataaggttgatgttttgtactggggatattttaaaatccaatttggtattagatgattaatatagcacttttacctaatttattagagaattagtttaatttcattaaactagacaatcctgttttattctcaacaatggaaaagtaggattatatagaagaatatattctttctttccttcctaccctatccctatggcattcagccacacatasattacacagacactttgttctcaagcataacttgggcttcaagcataacggaatattcttctgaaagagaagacagatgacagcaaagtagaa

SEQ ID NO: 832033 - DNA, 682 bp, Homo sapiens
gaaattggataaatatatattttaaaatctttttaaaagcatctaatagctaacaagatagtaataaattattatgatgaattgtaagaaacattagtgtccaaagagcaaarcaacccataggcacttttggtctggagtatatatttttacttatcttctcatgtagaaatagggcaaaaaaaattttaagagaccaaaataaaagccacagagagtggtactctcacagaagacccactacacaaaagaaggattcatctaagttaaggaaacaatgcaagtggtcaagtcttagtgcaaaaataaaaaaaataggctttaaaagccttgctaatcaatggataatcaggtattcatttgacttgaggtgattccagactagttatatctccagctgattagtcaaagcaaatttaaaatctctcaggaaagagtaaccccatccaaggttgcatattgctccacaatgaaacatatatatatatatatattcaaaaatatatataatataaatataaatataactattgtgaatgagaagcatagtaatatttatggtgagggagaaatatattattgatagttggtacaaaccagaccctatgagggagaagcatatgtaaaaaagacaacttgtgaaagacatagtcaaatgttaagtccatgttaaccctctgga

SEQ ID NO: 832034 - DNA, 586 bp, Homo sapiens
atccattatcctttaaaaatcctttcttagtatgtaggtgtttctagggtattattttgcttttttttttttttttttttttgagacggagttttgctcttgttgcccaggctggagtacaatggcacgatcttggctcactgcaacctctacctccccgattaaaacaactctcctgcctcagcctcccgagtagctggtattacaggcatgcgccaccacaccaggctaattttgtatttttagtagagatggggtttcgccatgttggtcaggctggtcttgaactcacgaactcaggtgatctgcccgactcggcctcccaaagtgctgggattacaggctattattttgcttttaatattattttgttattatttttagataatttctctctcttgtttttcctcacctaatatattttgtaaactcttcatgagaagagaatttatcttgtagtttatacatactctaaagactcctaaacttttatactcatgcaatcgtcattcaatagatacgtgaaatgaatatctcttgacgtttttaccaatcttcatttwccaatttttagctcatatacata

SEQ ID NO: 832035 - DNA, 645 bp, Homo sapiens
aaaaggaaaaaagttctcttaattctgaaaaataaaaggattagcaatgtttaacatatcagctctccatgagagtcttagaagttttttttctctattccaatagcacaatttctaaagttatcagagacctgtattcaagagtacccatcagagttttctatcagattataaaccaccttttgaaaagaatcaaaacaagacaacaattatctgtgggtgacaaaattctcaggacgaccatagttaaaaatgcaattaaaaaagaaatctggtcatctctgtgacacacaacaatttaacataagaattgtaattgggggaggggctatcaaaatctgatggagccattagggggagaggtggcagtggtatccacgaatcaccattctcagtcttttctgcctgtgggctctggagactcaggacagtctggaagacagtctggaagagggagatccccccaagcacagcacacctgctctgccaaggggcagccagactacctatttaagcaggtccctgatcccatttcccctgactgggtgagaactcccaacaggrgtctccagacacctcatacaaaagcctctagttggcatcaggtcagtgcccctctcggacagagttcccagaagaaggagc

SEQ ID NO: 832036 - DNA, 611 bp, Homo sapiens
agagtgagcagcagcaagatttactgtgtagagcraaagaacaaagcttccacagtgtggaaggggacccaagcaggttgcctctgcaggctgaggtggccagcttttattgccttatttgccccgcccatgtcttgctgattggtccattttacacagcactgattggtctgtttttaacagagtgctgattggtgtgtttacaaaactttagctagacacagcatgctgattggtgcgtttacaaaccattagctagacacagagcaccaattggcaagtttttacagagtgctgattggtgcatttacaaacctttagttagacacagagcgctgattggtgcattttttacagagtgctgattggtgcatttacaaatctttagctagacacagagtgctgattggtgcgtttacaaacctttagctagacagaaaagttctccaagtccccacccaacccagaagcccagctggcttcacctctcattgtgatacaggagttaagaagaaatcatttaggcagatagtgaggatatgggagtcctaggtaaggttttccttttaatgaaaatcagcccccagatcattttcttttctaacaaagag

SEQ ID NO: 832037 - DNA, 611 bp, Homo sapiens
agagtgagcagcagcaagatttactgtgtagagcgaaagaacaaagcttccacagtgtggaaggggacccaagcaggttgcctctgcaggctgaggtggccagcttttattgccttatttgccccgcccatgtcttgctgattggtccattttacacagcactgattggtctgtttttaacagagtgctgattggtgtgtttacaaaactttagctagacacagcatgctgattggtgcgtttacaaaccattagctagacacagagcaccaattggcaagtttttacagagtgctgattggtgcatttacaaacctttagttagacacagagcgctgattggtgcattttttacagagtgctgattggtgcatttacaaatctttagctagacacagagtgctgattggtgcgtttacaaacctttagctagacagaaaagttctccaagtccccacccaacccagaagcccagcyggcttcacctctcattgtgatacaggagttaagaagaaatcatttaggcagatagtgaggatatgggagtcctaggtaaggttttccttttaatgaaaatcagcccccagatcattttcttttctaacaaagag

SEQ ID NO: 832038 - DNA, 502 bp, Homo sapiens
acactacaagaaaagaaaattacttttcaagctagtatccctgattaacataaatgcaaaaatcctcaacaaaacactagcaaaccagattcaacagcatattaaaaagatcatacaccatgatcaagtgggatttgttcctggattagaagaaagatctcaacaaattatgtaaagagcaaatgtacctcaatataataacagccatatatgacaagcccacagctaacattatatttgatggtgaaaagctaaaagtttttcctttaagtttaagaacaaaacaaggttgtccatagtcaccattcctactttacatagtgtggaagccctagcaagagcaattaggcaagagaaagtaataaaaatatccacatcagaaaggaagcagttaaatgktctctatttgcaaataacttagtcttacgtaaaaaaaaatcttaaggactccatcagaaaactcttagaactagtaggcaaattaagtaaagttggaggacac

SEQ ID NO: 832039 - DNA, 502 bp, Homo sapiens
acactacaagaaaagaaaattacttttcaagctagtatccctgattaacataaatgcaaaaatcctcaacaaaacactagcaaaccagattcaacagcatattaaaaagatcatacaccatgatcaagtgggatttgttcctggattagaagaaagatctcaacaaattatgtaaagagcaaatgtacctcaatataataacagccatatatgacaagcccacagctaacattatatttgatggtgaaaagctaaaagtttttcctttaagtttaagaacaaaacaaggttgtccatagtcaccattcctactttacatagtgtggaagccctagcaagagcaattaggcaagagaaagtaataaaaatatccacatcagaaaggaagcagttaaatgttctctatttgcaaataacttagtcttacrtaaaaaaaaatcttaaggactccatcagaaaactcttagaactagtaggcaaattaagtaaagttggaggacac

SEQ ID NO: 832040 - DNA, 627 bp, Homo sapiens
tttcatttctcaaagtcaattaattgcatctgagctgtcaagattcattggtatttgtctagcaggagtttgttttcaaaactccttcctattctccttttttttcagtctggaagcttctgttagcatttgagccaatctcatcgtttcttcaattaaatccaacacttcttggaaactggctggaaggctacagcctggatggcagagaagggattaacaagagttgctcattagcacgatacggctaatgaagaaactgtgtggcgatcgcttctctggagaggagtttaaccttgggaaggatttcactggtggcggctgaggacactgatgcctttgagaaggggttgcagaaattagcctagggttgcactcactaagagagagagagccttaagtaaaggcacttggaatttgttcaggccaatctgtagggagcagatgtcgccaggagcttggggctgggatgtgagccaaggtcgaagaaggagtcaggaaaaccctagtgacagatcagcggagccagcggccatgmctgttatagaatgaaatgctggcttccaatgtttgcagccagctttgctgtatctgagaagagttggaaggaagatgaaaagatgaaaa

SEQ ID NO: 832041 - DNA, 594 bp, Homo sapiens
cttgggaggcctgagcatgggaggtcgaggctggagtaagctgtgatcgtgccactgcactccagtctgggtgacagcaagaccctgtctcaaaaaaaaaaaaaaaaaaatrtatatatatatatatatatatatatatgtacatatatatatgtacatatataaaataaaataataaaacctgaagtgaaaagttataaaaattgatttaaacttataaataacaagctgtaggtcattactattccagaataaagaataaatcatgcattgattcctttagcataattttttcacaaaattgtgtgattgcacaatagggtattctttatttcatatttaacgctctcagtgagaacaaataagagagtcatttttgaaaaatacttaaaggcttcctcattttgccgaagagactcccttaggcatttgatattttaatcattttctctcaaagaagttcaggcatcctcatccttatctgcttcaatttataagggttcttctgattcctgttttgccaatggttcagaccatcctccaatatcaattccctcgacttcatgaaatcctacaccttttgcaatattttca

SEQ ID NO: 832042 - DNA, 620 bp, Homo sapiens
caagttgtgaccatgaaaaatgcctccaccagtatgattccacttatgtgaggtacctagagtagtcaaaatcatggagacagaaagtgaaatgatggttgtcaggggctaggagaagagggaaatggggagttagtgtttaatgggtacagagtctcagttttgcagaatgagaagagttatatggatggatggtggtgatggttgcacaccagtgtgaatgtgcttaatgccactgaactatacacatgatatggttcaaatggctaattttatgttaggtgctttgtcacaatttttgaaaatggaaaaaaaagtgtctccagacattgccaacatactcgggaaagcaaaatcgcccctggttgagaactagtgttccagctgtagcacaacacattcaattgtataatatgtgtaaaaacatgggcctagggctcagccctgctttttgccattaagggttagaatctcatctctcctaaaatattttttatctactcagattttaggccaggatcaaaaggacaattgacctgtttgatctagaaaaagcccgtctatggacwcaaaactggtgtgatataaaactgtaaaaactcttacactgttttaagctt

SEQ ID NO: 832043 - DNA, 584 bp, Homo sapiens
tgtgtgatgctgaggtttagggtatggatctcatcacccaggtagtgagcttaatacccaatacgtatcttttcaacccatgtcctcctgggagttgtgaaagtgaaaagactctccttaagaaaggagaaaagatgcctgatatggtttgattctgtgtccccacccaaatctcatctccaattgtaattcccatgtgttgagagagggacctggtgggaggtgattggatcacgggcatggtttcctccatgctgttctcgtgatagtgaggacgttctgacaaaaactgatggttttaaaaattgtttggcagttccccctgtgctcttctttctcacctgctgccatgtaagatgagccttgcttcctcttctccttccaccttccaccatgattgtaagtttcctgaggcctccccagccatgcagagttgtgaatcaattaaacctctttccttcataaattacccagtctcaggtagtatctctatagcagtgtgaggacagactaatataacgctccttycttaacctatattttccctgccagttgaaatccttttcgcttttccatatatgcaa

SEQ ID NO: 832044 - DNA, 587 bp, Homo sapiens
ttaatattaataattaatgttttataattaatattattgcttcgaatactcctaatactgcagggggtgtacacctaccyttaatattgttcctaatatccagggacaggaagcatgatattagttttaatattccactaggtgtacactcaccctgtgacactgatcctactatccaggggatagagtatgacattactcccaatatagcagtgggtgtacatccaccctgtgatattgctcctaatattcacggaagaaatgtatgatattactcccaatattgcagggagtgtacccatcttctgtaatattgttcctagtatcccgagggggagaggatgataatactttcagtatcgcaggctgtgttcactcaccctgtgatatcctgggaggaagaggatgatattactccccatatagcagttggtgtacacccacccttggatattctttctaatatctatggaggggagaggctgatattactcttaatatcgcaggagatgtacatccaccctgcgatattgttcttaatattcaaaggctgagaggttgatattactcccaatgtcatagaaagg

SEQ ID NO: 832045 - DNA, 587 bp, Homo sapiens
ttaatattaataattaatgttttataattaatattattgcttcgaatactcctaatactgcagggggtgtacacctacccttaatattgttcctaatatccagggacaggaagcatgatattagttttaatattccactaggtgtacactcaccctgtgacactgatcctactatccaggggatagagtatgacattactcccaatatagcagtgggtgtacatccaccctgtgatattgctcctaatattcacggaagaaatgtatgatattactcccaatattgcagggagtgtacccatcttctgtaatattgttcctagtatcccgagggggagaggatgataatactttcagtatcgcaggctgtgttcactcaccctgtgatatcctgggaggaagaggatgatattactccccatatagcagttggtgtacacccacccttggatattctttctaatatctatggaggggagaggctgatattactcttaatatcgcaggrgatgtacatccaccctgcgatattgttcttaatattcaaaggctgagaggttgatattactcccaatgtcatagaaagg

SEQ ID NO: 832046 - DNA, 625 bp, Homo sapiens
cctggccagacggcaaagccacgtttgttctcattgcagctctccaagagccagcgacctgccaggcaccagctttatttgtaggtgagggtcattaatttgaattaatagtaccgcactggtcggcgcttcgttttgctttgtttccctcctgtggacgccacagacttctttgttgcctggttctgtgagtgggaagacactgtgaacaagcatccaattagccagaaaaacaaaatctgcctggattcccgcttcagccagaggcctctccctcaaaagcctggagaccacactccacacacaggctgcttctgtttaatttgcccctcctggcagcattcccactcttccctgcccttctaacccatatagtcatcatccctaccccagggacattattatctcccagttacccccacctgctgtgccccccgctcaggctaccgtggaaataatacccatcccatagggacagagtgaggatcaaagataatgtatgccgaggcttagtgtctggccgacgtagacctcgataattgtgaggycgtccctcaggaaggggcgtggtgtgtctcattgcccctgccctctggaactgtaaatgggtttaggtgcatacagc

SEQ ID NO: 832047 - DNA, 576 bp, Homo sapiens
accagaagcacccaggattttaggcaggatcccccacaatgagtaatgagtagaagatccaaggaacagggtaaatatgtgtaagccttttgggttttacctcaaactcttttttaattttcctttttcatgcatttttaaaatattttacccagacagttttattttgaaaatcctgtttcctaagcattgaataaatacagataatctttgcatattagttcaaattttcaaaagcctactaaggttatcagctagtacaatcaaactattattaaaactcaaaagagatttaaaaaatgtgctagaggaacaacctctgcaaggtcatattttcccagtattatttgcattttgtaagactccattcaaaaaagatactattacatttgggccataacacatttcagtttcaattttgcattcacattacatgagcatttagatrgctctaattcccagacatttttggtcctattttaaaagtttttaattccattttaacaacaacagaaaaaaaataagctatctaattcagtaaggtacatctttaggaagttttggtaagacaaccca

SEQ ID NO: 832048 - DNA, 651 bp, Homo sapiens
ttgagtatcaactaaaatatattttgtaactaaattttaaaattgatgtgttacattgtacctttgttaaagtatttcctcagttaaagcaaaactgttcaggatatttcgtgcttctaaytgataatcttatatctgatttataacatgaagtttatatactattcatttcaattacatatgtgtatttttactcctcagacatttgtgcatttgcaatagacaatccaggaaactagctaaaggtgtaattttcaaagaagaaggtaatatataagaaatgtgaaaatgtcattaatttggtgtttaaataagcttttaaagattttatctattaaatatctatattaacactcatctcaaattcaaagttggtaataattgaccattcccttccccttccccaaaatatgttttacttacttttctgacttagctaaacttggtctaattgaacattagttttaatttaatcatcagatacaaaaatttatattatatataatcatatgtttctatacttaagttacaaatcactccttcaaaggagtactgaaagaaggtcacatctttatccatttagagataaaattcaaactcagaattgaaattgtatatttgtaatatgacctccagtaagaagagagacaa

SEQ ID NO: 832049 - DNA, 642 bp, Homo sapiens
gcaaatattttctctaattctctagggkgtctgtttactttgtcgatagtttcttttgctgtgcagaacctctttagtttaattaggtctcatttgttaaattttgtttctgttgcaattgcttttgtcctctttgtcatgaagtatttgcccagtcctatgtccagaatggtgtttcctaggtttgcttcaaggtcattaaagttttaggttttacatttaagtctttcactgatcttgagttgatttttgtatatggtgtaagggaggggtccagtttcagtcttctgcatatagctagccagttaccccaacactatttattgaatagagaatcccttttccattgcttgtttttgtcaactttgttgaagatcggaggattgtaggtgtgtgatattatttctgagctctctattctttccattggtctacgtgcctatttttgtaccagtaccatgttgttttgattactgtagccttgtagtatggtttgaagttgggtaatgtgatgccttcagctttgttattcttacttaagattgccttggctatttgagctctttttttgttccatatgaattttgaaacagttttttttctaattctgtgaaaaatgtcattggtagttcaatagaaaga

SEQ ID NO: 832050 - DNA, 605 bp, Homo sapiens
tttagcagaattcagacctttcccataatcctcatcttgaggcctgtcattagttttatgaaggcaacttcagcctccaagcaaggaggggatcagtyttagggaggaacaattaccattcttgcttcaaagttaaaatataaattcctcccatcgttagcttgacttacacccaagaatgaatgaagacagccagactgtgaggccaggagcaagatggagtcagtcatgttagatttctctcactgtcattatctttgcaaaggcggtcttaacaaaacataagtgattatctgggtataaaataactttataacacaaatgttttctgctaggtgaaccactaacccacataccttattagagattgcatgcataattgttggctgtagagtgtgtctgatgtgataaagaaaaacctgggaaatagtatacaatgtcctaggcctctcttttcttcacttgcgcctcttcattacttgaatacttgaaattattcagattgaacctggttgggcatggtggcttatgcctgtaatcctagctacccaggaggctgaggctgaggaccacttgaggccaagagttcaagaccagcctgggca

SEQ ID NO: 832051 - DNA, 561 bp, Homo sapiens
cacttgtttctctcccgctgaagagcttgtataaagattccttcacagagcagtgccaggwacaccccctgcctgcacccaaagggagccgcctccacctggcctgtctttggacttacactggggcagtggcttgatctgctggtcattttgtggattgagtcatgtgagggcagagtgttctgacaggctcgggtgaaaatgggtaacccaggccacgcgcagtgcgtcacgcctgtaatcccagcactttgggaggccgaggcgggcggatcacgaggtcaggagatcgagaccgtcctggctaacacggtgaaaccccgtctctattaaaaatacaaaaaattagccaggcgtggtgacgggcgcctgtagtcccagctactcgggaggctgaggcaggagaatggcgtgaacccgggagacggagcttgcagtgagccgagatcttgccactgcactccagcctgggcgacagagcgagactccgtctcaaaaaaaaaaaaaaaaaaaaaaaaagcagaactgggtaaccgcacaacccggagtcctataagcatc

SEQ ID NO: 832052 - DNA, 512 bp, Homo sapiens
ggaatgtcgcttcaaaggttgatcttgtgagtccagcagcaggcactacagggacaatcaaaatcagaagttgaaatggaacttagggctggctgtgtgtgtgtgtgtgtgtgtgtgtgtstgtgtgtgagagagagagagagagagttcaaaatcatatatcatattgagtacctactatattcctagcattagattagatgatttacataaaagcactctatcctcacaagtgtctacgcctttccttcaaaaggaaactgaggctggaagaagtaaaacaacttgcttgatgttccacagccagtaaataagtgacagcactgagatgtgaattcaggtggtctgtccctaaagctctgtcctctttatcatgctgcctccgtttcagccagggtttctgaacccagggttcacggataaccttcaggggtctctgagccaactgaaattgcatgtaagccactacgtggtttatgtttctcttgggtaaagacccacagctttcacca

SEQ ID NO: 832053 - DNA, 666 bp, Homo sapiens
agccccgtcggcgcggacgcttgtcgagaatgcagattcctgggtactgccagatacggttggtgatcttgtagggctggagtggaagccatgaatctgcattttcatcatttctggccctctgcccgggctggggtgattcacggggattcgtagtggccccaaaggagcacgcagaacctcggctgctgtgcatttatcacctcttttgttcccggaggccgcaccccaggtccagtttacacagctgccaactccttttcttggttcccactggaatctaggaagaaaactcgccctttacttctccgccccacacccgacgacggagtgtctagaggtctggtcggccttggctgtgcggagggctaggcctgacgagcgggcgctgatgcggcgcagaccccgccggacctcttggtcggcccggggtaggctggggagccgcgggaacaggactggatagggaaagcggcaccgcagcgtccacgggcaagctgaaagtccgcttgatgactttgcatcacagtggcgccctccccgcaggaacgcccggccgcctgcaccgaacgtttgcctgcagggaacggccaacccgccctgaaatactctttttgtgggctgcagctttcgggtattttaakccatggttctgtgcccttcctt

SEQ ID NO: 832054 - DNA, 563 bp, Homo sapiens
cattcttctaagcacctcacatgttttttttaaatctagtttgtatacagaatatccccagaggaataggagagaatattgtaatgatgaaaaagaaccagttaaatagattgttaccatttwaaaaaattatgcgaggtgtggtggctcacacctgtaatcccaacaatttgggaggctgaggtgggtggattgcttgagctcatgagtttgagaccagcctgggaaacatgacgaaacctcgtctctacaaaaaatacaaaaattagctgggggtagtggtgcatgcctgtagtcccagctactcaggaggctgaggtgggaggatggcttcagcccaggaggcagatgttgcagtgagctgagatggtgccactgcactccagcctgggcatagacccagaccttgtctccaaaaaataaataaataaaatacaatataatttttaaaaattaaaaggtggactaaacagtgaatggacttcttcaatgaagagcaaactagcaaaactggaacagtaagctaaagagttactccaaaagaacaaagataatggtggagg

SEQ ID NO: 832055 - DNA, 630 bp, Homo sapiens
ggttttaggcatggaagtggcattatctgatttacattttttaaagattactggttctgggtagagaatgtattggacagcaagagaygaagttgagggatgaattctaggaggctattgcagtaatccaggctagggagaatggtggttagattaaagtgatagaaatgtagatcaagagaagtggaccagtttaagatatattttggagatagagccaacagaacttctgatggattgaatatagaagggacagaagaatcaaaaacgattcataggtttttgaccttagtaactgaccgtggtgaacaatggagaaaaactattctgaacatgttaaacttgaaatgcctattagatattcagggggaaatttcagtaggcaattcaatacagatgatatacatctatagcttgcatggggggaaaggtagataagagatagagacatgaatttggaaatttttatcatataaatgggatttaaagtcataggattgatgaattacctcggagaaaagtattcagagggaagaaaagacccagaataaatccttggtggtacttcaatatttataggtcaaacagagtaggagaacccagcaaagactgagctgaattggtaaaggc

SEQ ID NO: 832056 - DNA, 630 bp, Homo sapiens
ccaaggttgcacaatgaatcccctaaaaacactgcctaaattgtgatacagcagtcacgaaattgtaataagtttggtgyatacaatgcatttcaatggtaatcacttaacatcctacctagtaccttggcttcctacaatatttataaaaagtaataaattctaatattgaagcagtagataatatctcaaagaaaagatattgaccaaaaggacaatgaagtaggtctttaaattttttaaagagaatgataaactttgacatagattattctgacaaggataatcattatacttttttttaaacaataagtgtatcaatttagatttctgataaaacaaaaagttgttatttacttggcagaaaaaaatagtacttacaggtactgatatatttccagttgtgaaggtttttgtaaaatgatatcaatttacttatttctatttaatgccccaaatagctctgcagggaaatgtgaatcatttcaatcagctaaagctacaatataaaaccactggagtataaacctttgagaactgtttttgaaagactaaattaccttagaaatacatatttctctgttcatcatttatcttaaaagtaaaattttatttattccttgagggaca

SEQ ID NO: 832057 - DNA, 592 bp, Homo sapiens
cctacttatgagtaaatattcagtgaataccatgcccttgtttctctaaagacaattttgtgtcagagaccaccgatgataaaaacaagatgggtactatgagaaaacaaagcccaggtgacaagctgggatgctataggtcacatccatttcatcaggtggcacattgagagccaccttgaccactttggtttctccggaacaagcatctttggcaggaacccagtggcaaaacaaactggagtcatgaggggtgattaccttgcaactgctgcttgccacattatctcaagagtgatgcttaggattctgaaaacaccctgcctggggccaatagtacaacatttagaaagacatggagttggtgccatttttcctcttcgtctacaactccaatagatacgtcccttttcccctttaagaaatgtggcatttagggtatttaatttaattgggtggattgggtagaagtagaataagttgcttttccctgtccttaattctgttaggtaaccagrgaccagttggaacaaaaccaaatctgatttaccaaagataacatctgttagcatgttttcttcttccgggcttt

SEQ ID NO: 832058 - DNA, 617 bp, Homo sapiens
gacctagggagacagggatagggcagcgttagccaggccaactcctctcacccccaacacggagatgggcccaaatcctgatttggaattccctgaatcactgggtgaccttggggccggtccctctcagggcctcagcttctctatctgtaaaatgggtatactgacagccttcccttggagctgctgggagtagagttcccaagaacctgccccaggtatactacatgctcagtaaatcagttttttttttttttttttttgagatagagtcttgctctgtcacccaggctggagtgcagtggtgtgatctcagctcactgcaacctgtctcccaggttcaagcaattctcctgcctcagcctcccgagtagcaggccaccacacccagctaatttttgtatttttagtagagacgaggtttcaccatgttggccaggctggtcttgaactcctgacctcaagtgatctgctcgccttggcctcccaaartgctgggattacaggcatgagccaccttgcccagcctttttttttttttttccaatagaggtggggtcttgctatgttgcccaggttggtcccaaactcctgggctgaagcagtcctcccgcctc

SEQ ID NO: 832059 - DNA, 570 bp, Homo sapiens
ccccctgccttggcccagggagttatctccaccagatccacctttctgagcgaggagctgggtgcattgaggggcaggggcggctggagttcagatgcaccttttgagcgaggggctgggcctctctgtcgctgggctccaggcacagggcagtcatgatgtacacacacacgtgcaaacacacacgcacacacataagcctgtcagcaacatagaaacaccagccagtgaactcgggcacaagcagccgggcacagagtgttcaccaggtgctcacatgtggagtaccccaactcctaggaggatgcggttatggcctggatcctacaggtggggcccagacatgggctttgaacccacgccagggtatgcacaaacctatccaaacacacgcgtgtctgccctagcttccctcacccgggagtcacccccccamccccccaccttgtttttgatgttcaggaaagtccccagaaagcactgggcccgggcaaggggccaggaggaaatggtgactcagccggtggccatcagtgcctgccacgctgggctgggtggactgcgcggccc

SEQ ID NO: 832060 - DNA, 625 bp, Homo sapiens
tgggagttgatttatgaagactctgtggatctaatcacaaagctaccttgtgtcrcagcaaagatctaccgaaatctctatggagaaggcagtggtattggggccattgactctaacctggactggtctcacagtttcaccaacatgttaggctatactgatcatcagttccctgagctcatgcacctgtacctcactatccacagtgaccatgagggcggcaatgtaagtgcccataccagccacttggtgggcagtggcctttcagacccttacctgtcctttgcagcagccatgaacgggctggcagggcctctccatggactggcaaatcaggaagtgcttgtctggctaacacagctgcagaaggaagttggcaaagatgtgtcagatgagaagttacgagactacatctggaacacactcaactcaggacgggctgttccaggctatggccatgcagtactaaggaagactgatccacgatatacctgtcagcgagagtttgctctgaaacacctgcctaatgaccccatgtttaagttggttgctcagctatgcaagattgtgcccaatgtcctcttagagcagggtaaggccaagaatccttggcccaatgtagatg

SEQ ID NO: 832061 - DNA, 643 bp, Homo sapiens
  misc_feature 18: n = A,T,C or G
ggacacagagtgagaccntacctcgctatgttttacataaataaataaataaataaataagtaaagtatacggaaggatgtgcataggttatatgcaaatactttaccattttatatcaggaacttgagcatctttggattttggtatctgcagagggtcctggaaccattgccccgtaaatatggaaatgactgtatacattatattatgtatgtctatctattgtaaactacatacataagatactatactatgtatacctattagatacatacttgctttttattccttccttagttttttttctcattgaactccgggaggtggaaaaaatttagtgcatttcacagaagagaaaatctagaccagaggaaagatgtctaagttcgatcccagaagccatgactgcccatctcccatttgacagcaggaaagactgaggcacagagagatgaaaccaacccacacagcaggcccacagctctccacacatacacgtgcctccacccagcaagaggagccgccatgccagggtcaggggactcaccgccctgcctggacagcaggaagaggaagaggagggggaccacccaggtcaccagcggctccatcrgatccacgtagagccccacagccccaggg

SEQ ID NO: 832062 - DNA, 581 bp, Homo sapiens
tgggaaataagcgcctttaaccaggcggcggtcccgcccctaacccggrcccgcctcccgatgcccacgcccctcgggtcccgggccagcgtctctccctcctccactccttcctctgagtgtcccacccccacccctgccaggtgctgggtccccagtcacgaggccattgggccccttggcaatcagccctgcccaggcacgtgagtcctggcgcaagactacctttaggggaggtgaggtggggcctttgagacagacacaggctgagaggaacggtggtgtctccacgcacccctagaccttctaggggcggctaggggacttgaggcccgagacccactctcagagtgggcctgtgacctaacaggggtgacgtcggatggaggctggggatgggatggaggccggggttttgggggagtaactgaaatattcaggcccccgagagtgggcaaggcctgtgtggccaggtctcctccctccagtctcgcccgtgacctccctcacacccaacccccacatcctgcccctcaacccttcccccctcaaactcctgaccccgacgctccagacccctc

SEQ ID NO: 832063 - DNA, 624 bp, Homo sapiens
tgacaacgaaatgcattgcgtaatcatttattgatcataaatcaaaaagaatatcacctatcagggacattattcaggaaattggagcattttaatgggggctatatgttggatgaaactatggaatgttgaaattcctggatgtggtcattctttttagagtttgtaggaaagtgtctttcttcttaggagatatatgttgaggtgatagggggtggagtatcatgatatctgtacctgacttccgggtagttcagcaaataacaatgataattttgacaataggccaggcacagtggctcatgcctgtaatcccagcactttgggtggccgaggcaggcagatcacgaggtcaggagattgagaccatcctggctaacacggtgaaaccccgtctctactaaaaaatacaaaaaatcagacaggtatggtggcgggcacctgtagtcccagctactcaggaggctgaggcaggagaatggcgtgaacccgggaggtggagcttgcagtgagctgagatcacgccactggactccagccygggcgacacagcgagactctgtctcgaaaaataaataaataaaataattttgacaataataaatgtgtagatatcaataaatg

SEQ ID NO: 832064 - DNA, 621 bp, Homo sapiens
ggtgaccttttaagaacttccaggagctgtaattctgaatgtccaatcaaactgctgttaactcaaactacattttagtatgtagcagcaggctcagttaattgaaagattgtccttaaattcaaaaaaggctgatgcagaaagatgcttataattctcagccaaatgtactttctctaaaatgtgctttaacatgcctaatgaagttgtttactcttatactccatccacattgaaaagagttggaactgtatatttttaaagaggagataatgttgcaagacttttatggttatttatctgggttctaatccatctgaaatgattccatcctcaggcctgcctcaggccaaaacaatgtgagaagggctagggctgaccacaacccccagttcactatatccttctatttataaaactaacatcataaagagatgttgcaaaatattgaggttaaaaattagttgcactaaaataaatcctaaacatataatagggtattaaaaaagctgattgccacaatacaagtcaaatcacctacagtyaaatatatacatgtaatatatattacttacaaagctattaatccattttaacaacatccagggcactagtgttaag

SEQ ID NO: 832065 - DNA, 461 bp, Homo sapiens
gtctcttggtgcctaaagttgttagcagtggtctggggycatgctctgtgtcatgtgggtagaaaagaatgatgctggcagcagagagagtggtggaaaaagcccaggagaccttggggcccaggctgtagtcttccccagtcacttccctgtccttcctggttgtgtgagacagtaacttgctctttcagttgcgtggagttgggttcgccacttgcaactgactagaaaccattcaggagggtttattcaatccttttaaaggtattctgtggctctttcctcatatatgccagcttgatggtgtgcactgactctgattatagctttgtagtgccatttcaagggccttgttctcaagtaaagacacatctgtgaccattattacagagtgcctaagaaagaaaaaaacttttaactgaggaatgcgagcccctttaagttatcaggcccagaaaggc

SEQ ID NO: 832066 - DNA, 531 bp, Homo sapiens
ctgatttcatcaagtggaagaaagggtatcagtgattgaagatcaaattaatgaaataaagcaagaagagaagtttagagaaaaaggagtaaaaagaaacaaacaaagcctccaagaaatatggcactatgtgaaaagaccaaatctacgtttgattggtgtacccgaaagtgatggggagaatagaaccaacttggaagacactcttcaggttatcatcgaggagaacctccccaacctagcaaggcaggctaacattcaaattcaggaaatacagagaacaccacaaagatactcctcaagaagttcagccccaagacacataatcgtcagattcaccaaggttgaaatgaaggaaaaatgttaaggggagacagagaggaaggtcgggttacccacaaagggaagcccatcacactaacagctgatctctcggcagaaactctacaagccagaagacagtgggggccaatatacaacattcttaaagaaaagaattttcarcccagaatgtcatatccagccaagtaa

SEQ ID NO: 832067 - DNA, 619 bp, Homo sapiens
gacagaaggcactgaagagtcccacaaaacagggttaggaatatacctgactcactggcagtgacagcctttggtctggagagtgctttttgatacaaatgaaagaaatatttcaaaaccaaagtaagaaggggaggattggaaggatttaacttattgcccgggatttgtgattttataatttaggggttttttttcttccccaaactctaatttagtcttctatttatttttatttttattttttgaaaccgagttttgctcttgttgcccaggctggagtgcaatggcatgatcttggctcaccgcaacctctgcctcccaggttcaagtgattctcctgcctcagcctcccgtgtagctggaattacaagcatgagccaccatgcccagttaattttgtatttttagtatagacagggtttctccacattggtcaggctggtcttgaactcctgatctcagatgatccgccctcctcggcctcccaaagtgctgggattacaggcgtgagccaccgmacccggccctaatttagtctttttgttttttgttttttgtttttgagagatggagtctagctagttgccaggctggagtgcagtggcgcaatcttggc

SEQ ID NO: 832068 - DNA, 647 bp, Homo sapiens
gtgtggggcccttggatgtaggatttcagggaggctagaaaacctttcaattggaagttggacctcaggccttttctcacractcttgtctcatttgttatcccaacctgggttcacttggcccttctcttgctcttaaaccacaccgaggtgtctaatttcaacccctaatgcatttaagaagctgataaaatctgcaacactcctgctgttggctggagcatgtgtctagaggtgggggtggctgggtttatccccctttcctaagccttgggacagctgggaacttaacttgaaataggaagttctcactgaatcctggaggctggaacagctggctcttttagactcacaagtcagacgttcgattcccctctgccaatagccagttttattggagtgaatcacatttcttacgcaaatgaagggagcagacagtgattaatggttctgttggccaaggcttctccctgtcggtgaaggatcatgttcaggcactccaagtgaaccacccctcttggttcaccccttactcacttatctcatcacagagcataaggcccattttgttgttcaggtcaacagcaaaatgcctgcaccatgactgtggcttttaaaataaagaaatgtgtttttatcgtaattta

SEQ ID NO: 832069 - DNA, 568 bp, Homo sapiens
atttttctttttaagaaatctatagaatatgtagtctaaaaagtactgatgtctgcagcttactttaaattgtatcaaacaataagatggattatggataagagataagtgaaaaaacatagcaaaatactaattgtggaacctaggtggtaggtatatgcgtattcactgtacaatctttggcttttttgtatatttgaaattttttataatacgttggggagaaaatccatgtagctccatctgttgaagagcacaaatggctttcggctcctgcatatttggaacaccacagaacataataatgtaggtttcttgagttctcactgttcactaagcaccttatgtgaactgtctcatttatcctcccaagcacttatgaagtaaataccatcatcttcacttcatagacaggaaagccaaggcacagagaacacaaaacatttgtccagagtcatgyaggtggtaaatgtcagggtcaggatttgaactcaggttctaactgactccagaaaccaaagctgtgactcccacgccactctttggacccagatgtggatgtcatggc

SEQ ID NO: 832070 - DNA, 517 bp, Homo sapiens
acattgctgaatgcccgctgcgtgccagcccttgctagatacataatgctaacactaaaacaaagaaagggaaggcgtcataaaagtccagttggtagcaataactcaatttgaacaaaacttccccaataattaggtaataaataggacttccttggggaaatatttttgcacatctcaatttccaaagttggaaataataatgtaataattattttaatagccaaaacaataatttttcttgtgtaataataatggtataattatagacagttggaagtcatgaaacaacaaaactgaatactgaattttgctttgaggttcattattcactcaaattctttttctaaggttcaaatgggcttttttttgttttacttctttttctttttcttttttttctgaaaaaagcagctaagctcaactaggtcaagayggttaaaaaataaaatcatttttagccagttagccagaatatttgttgaaagtgaattttctaccaccaagaaatgctgtg

SEQ ID NO: 832071 - DNA, 595 bp, Homo sapiens
agtccccattgacttctttttcacattgctctgtttcgactcatctacttttaaaaawactgtcactcttactaatgtagaaatgtctaagtgtggattatgttaatgtgaattagagtaatccttgacataaattatcagacagcaaataatgcaaaataatgatttaattaatatgtattataaactgtgttagcattccattatttttatttaaaaacttaaatttccaaaaagaattaaggacataaatttgtttttttaaaatgacaaaatttggaacctggaaaactccaaattgtgtagtgctctgtggctgtgcccttggagacgtgaacatctagatatatttttcaataaaaaatgtaattaggagacatcataaaatcattatgtatttgagctgactggaagcaattctttgttcattttctctcttgcactctgggatattaaccttcagaatatttcccagcagactaaagtcattacttttatagaaaaggccaattcagcttagctgtgcagcgtggttctatatttaccactcagttgatgcagctctgggtggagctgagatgtttaaaggtgaatc

SEQ ID NO: 832072 - DNA, 586 bp, Homo sapiens
cattgcatgttctcacttatttgtgggatctaaaaaccaaaagaattgaactcgtggacataaagagtagaaggatagttaccagaggttttgcattttaaaaatgtgctttaagtgttttatgttattaaaatatactactaaatgtgtgtaatcacattatgtataaatgtgccattatgaagttgcattatttttgtttgtaaagcaagacattatacagattaatttcgctagtgtttcatgtctctaaacataggtttatattaggattttatttaattatttatttattttgagatgaggtctcactctgttgcccaggttgaagtgcagtggcacgatctcggctcactgcaacctctgcctacccagtagctgggactacaggtgtgagacaccatgaccggctaattttcatattttaatagagacagggtttcaccatgttagccagtctggtctcacactcctgacctcaggtgatctgccygcttcggtctcccaaaatgctgggattataggtgtgagtcactgcacccggcttaataaggcttttaatatctttaagtagcagccatttttt

SEQ ID NO: 832073 - DNA, 617 bp, Homo sapiens
agggaatgggcagcaaaccctccctcctctccatttgtgaaacacacactgctttagggaaagaggtagaaacaaaaatatatttgctactgtgggaggtgtggaaacccctctttccctccmaggactcagacaaagatctactacttgcaggagaagcttcaaatgagagaaagagacaacatcatgagctcaagattctgcaccatatcaaaggagaagacttgcaccattggggtaagggtaaaaaagaagatctctttctgtcccaaaccaccatagatagcatgcaaaatttgactgccaagaggaagaaagatataaatgctgagaaggcaccatccacaaggcccaagttcacaggacctgcctaagattcaggtcaccctccaaagatgtccttatcctgattctcagaaactgtgactatgtcaccttactggcaaaagaaattttgcagatgtaattccttgagataggcaggttattctggattacccaagaacccaatgtaatcacaataatccccctagaaggcaggcaagagagtcaaaggcagagaaggccgtgtgatgatagaagctgagccagtgaagggaatgtgtcaatgctatgct

SEQ ID NO: 832074 - DNA, 476 bp, Homo sapiens
gttttaaagctttatattgatgctgcatagtcaaaggtgaatttgctggttattatgctattctctctacccggcaaacccatccttccatattcactttgagatattggagttgaatctgcaaatcacwttgctgcttttgactggctttctttcagcttaactgatatcaagcactagagagagactcgaggctataggagggaaaataaactgtttcatctggtttgctttgtgattgtttcctgtttgctttgtgattgtttcctatttgcttcctacttccataagcatcatcttatcaatacttctaaaatgaatttctgataagggaagttgcagtacctttcagtagcagtgtttgaatccatttcatattttttccaacacttttagaatcaaccttattatatttcccttaaaaaccctagcactgtccagattgtgccatcctgagagacatcagattcagttcc

SEQ ID NO: 832075 - DNA, 564 bp, Homo sapiens
tgcctactgtgggacaaagatcagyaaagagcagtaagactcagcagacttctaagggatgctcccctccattccactccaacccccacctcgctggggagggaaatgaagggctgccaaagggccactagggggccacacaaatctatctggggctgttgaggaggacttcacaaggcaatgaggcttgaactgactaccagacttggaatctcgccaaactgggaaagtacatcccacataaacttctgcaaaggcctggagagcctagcttgggatgtgaaactgcagcatgaggatattatcctcaacacccacagggcttcccagtgggaaaatagctccaggttctcaggcatatgcctaaaccaagtacaaaagtttctgctctagcaagatcaacagactatgtgatattagaaaatttccacttttctgattataaattacccagtctcagaactatcatattccagtgtttaatgctatctaatatttgaaaggattttttagaagttgcagcaatcctgtatgttcagcctataaatatcattcctttctgct

SEQ ID NO: 832076 - DNA, 531 bp, Homo sapiens
tcttgatctcctgacctcgtgatccgcctgcctcggcctcccaaagtgctgggattacaggcgtaagccactgtgcctggcctttttttttttttatttattttttagtagagagagggttttactattttggccaggctggtcttgaactcctggcctcaagtcatctgcccacctggttctcccaagtgctgggattacaggcatgagccaccatgccaggccatagtgacttatttttgatcagtgatcagagtggatcacaagaaggacaggccgtgatactgaaatgccactcagaaatgccacttctgagagaaggctcgcactcccattggtcctggaacaacctggattaaagggcgaatattttattgactcaagcaacacagaccacytaaatgccaaaccaggctgctagacacgtctcctacccactgtgttcacctttaccagctcaccagccctggaggatctcagtaatgtgtgttaagttttctggtagaaggatcccctgagccttctggaagc

SEQ ID NO: 832077 - DNA, 602 bp, Homo sapiens
gccttagtttattatcccattcaaatatttccttcatgtccccagtcaagcctgrcacatttagatgaagtagttcctctcaggggttggctgtcagtgaacagagtcctgtcttggctacacaccacctcattccatctcctctgacagatgcctgattccctggggttctgccaatgagccgactatgggtcagctcagtcagatggacattacatctctttgtcttagctgagagaggaggtcgagcattaaacattttccctctcactgctattatcttattggatttaatcttttataaaatatgttgaaaagctatttgacttcaggctatgtctgctttctgcagggcaaatatccttgaggcaagaaatacaaaacactctggcatccattttaaaatgggagagagtggaaatgaaaatataaagcaaatcagctccaattagaattgaatgataatattctgctatatcattctggtgggggtgtcataaaaagggtcagaaaataggcccccttttacaacaaatcggttaaaaaaatctgtctacatacacacacatacatatatagttacagttataattaaaggtata

SEQ ID NO: 832078 - DNA, 495 bp, Homo sapiens
actaacaacaatcccaaagactttcttgtgggatggagttaggctatgtccaagtggtcccagatggctagggagtgggagtaataataataataataaaatgagtgtaaagaaaaactatggaatgtatgcccttggaagagaataagctccccattaatggtgacatttagggacattaaggagatgctatagaattactgattagggaaattgcttatacataacacagggagttagactagaatctaatgattagattttttttctttcaagtcctaaatactcatagcaaacccaggaatgttagggttgggtggaatagtgaaggcataagtacttatatttcttaatgtaacaatagatatgtcaatgaggacccaktttagaaaaatccagcttattttctctgctaaaataagtgttggattttaatatcaaaatacttaagactttgacttttttgcttctcttgcagaacacgtttgattattc

SEQ ID NO: 832079 - DNA, 495 bp, Homo sapiens
actaacaacaatcccaaagactttcttgtgggatggagttaggctatgtccaagtggtcccagatggctagggagtgggagtaataataataataataaaatgagtgtaaagaaaaactatggaatgtatgcccttggaagagaataagctccccattaatggtgacatttagggacattaaggagatgctatagaattactgattagggaaattgcttatacataacacagggagttagactagaatctaatgattagattttttttctttcaagtcctaaatactcatagcaaacccaggaatgttagggttgggtggaatagtgaaggcataagtacttatatttcttaatgtaacaatagatatgtcaatgaggacccagtttagaaaaatccagcttattttctctgctaaaataartgttggattttaatatcaaaatacttaagactttgacttttttgcttctcttgcagaacacgtttgattattc

SEQ ID NO: 832080 - DNA, 552 bp, Homo sapiens
tgcagtttctgtcccattaaagaacatttttatgccccacataaaacctcggcgctttatggccaagcatatacagattgagttttcagaacataatttgtgcttgggtctttctgcgatgaccgaggggtggtcagtttccatctgggtgcagctgagacctctgctacaatcagatgggaggcgttcagataacccctgctacagaaccggcgctcagcactatcaaagtctgaaaggtctcagctgctctgaataattgtccagattgtgtaactatagagaggcaaggaggagctgctgggtaattgagaacagcgttcactcagtcctgccccttggggaccactcagtggatgaatagccatcatttctctcatttatctaagtgccgttacctcccaaacgcagcctctcccattatcccagcctgtcccccaaccaccaattgagacaagttgtaatttgcgagtggagaactcaaggccaaggagataatggtgatttcatcccctgcagaaccagggygaggatccaaaacaactgcctcaa

SEQ ID NO: 832081 - DNA, 563 bp, Homo sapiens
atcctttcccgcctttccatgggccagtccttgcatgaccaggacagactgatacagaattctggaaaggcgggccgggcgcagtggctcatgcctgtaattccagcactttgggaggccgaggcgggcagataacaaggtcaggagatcgagaccatcctggctaacatggtgaaacctcatctctactaaaaatacaaaaaattagccgggcgtggtggcggaggcctgtagtcccagctactcgggaggctgaggtggcagaatggcgtgaacccaggaggcagagcttgcagtcagccgagttcgcgccactgcactccagcctgggcgacacagcgagactccatctcgaaaaaaaaaaaaaaaaaaaagaattctggaaaggcggtacagcctatgggttagtgaagatcatgcactctgaagtcagaccacctaggaaccagtcctgactctaccactcactaaacgaacatggaaacttgggaaggtcacatgtgctaattaaggtaaatatcatacgctgtgttaagagakaaactcaatgttagtcagaagaa

SEQ ID NO: 832082 - DNA, 341 bp, Homo sapiens
ctcctgacttcgtgatccgcctgcctctgcctcccaaggtgctgggattacagatgtgagccactgcacctggccttagaatytcatctctttgagggcagtggtgctgtctgtcttgctcccttcagaatccccagcagctaagagtacttggatcacagtaaaaactcggtaaaaatatacttgactcgctggtttcatccaatcttagtaacacatttggtcttttttagtaaatgtgaatgaacagggagcataggaatattaagacaaatatcagagcatgtacagtacaatagtttacttattaattactttatttatgtgcttatttatcgggc

SEQ ID NO: 832083 - DNA, 614 bp, Homo sapiens
agggctgaagatgggaatgtttagggcagtgtttgctccttggaatttctgataagaacgaattcgttagtcaatccttattcactcggctgggagcggattgaatacacagtggagaagcttggagaataacttgcttgcacctcctggatttgatagcaaggcatttttttggaccataattagaaccatggaaacacgcactcaaaccctgggctgtgccttgacaaacacttgtactggaacgctgaatcagaggcctggctgggtgctttaaatttactacagtgtaattttttggcattacccttttcgtttggttccgctaatgaaaatgaaatatgtaatttcaccaaagttccactgtaatttagcaattaatgtgcaattattttaatgcattactttctttttagcaaacaaacaaattaggaggttgcatgttttgcctggctttaaattactaaaactagcctctcattttccacatgggcaaatgttgctcatgtgcctcgtaacacatttagatttacwcaatttcctagaaatgcagacacaggagggtgagcaggcatgcacactttagattgagagactttcaaaatcaaggctct

SEQ ID NO: 832084 - DNA, 550 bp, Homo sapiens
tgggctgcagccgccaaacactttcagacgacactgtgaactttaaattggcactccaatctcccagtggcctgtcagtcatgagaatcgcgtctttatgccagcaagccccttggatggagtctgacattgcaatcttcagtaaattaccctgtcactgacaatcttgcagttatctcgcaaacaatcaagcaggcaatcaaactgttctgaattgccagttcaggacctgagaggtggccgatgtctccattcaacagcagagggaaagcggcctggccctcctatgacaatggacgatttctttatttatttatctacctacttatttgttagtctggttggctttttcctggggaagggggtgaggatggtaggagaggtttgcagagtcctcaaaaagggcccaatactgactcagcggttatgggaaagcgacttaggccttytgaatcagcccacactgcggtgtgctcatgtctgcttaatcttacttcactcagtgaaacggggccaaaaagaattatctaggtgttttctgtcagaacgg

SEQ ID NO: 832085 - DNA, 615 bp, Homo sapiens
ttcttccatgagatattttatgaaaaatagaaatgctgggggagataccttcctttttcctctgggttcacttagctgtgatgatgtaagcctggagtcaactttggctaagtctgcctgaccacccccmacccccgcaatgtgaagaggacattagtctactgtaggagaaaattaggtcaactgccgagagagaaaccctgccatgggatggaagggggctgtgagaaacagaaagagagacgtccatctgatatggtttggctgtgtccccacccaaatcttgatttgaattgtatctcctagaattcccatgtgttgggagggacccagggggaggtaattgaatcctgggggccgatctttcccgtgctattctagtgatagtgaataagtatcacgagatctgatgggtttatcaggagtttccgcttttgcttcttcctcattttctcttgatgccgtcaagtaagaagtgccttttgcctcccgccatgattctgaggcctccccagccatgtggaactgtaagtaagtccaattaaacttctttttcttcccagtcttgggtatgtctttatcagcagcgtgaaaacagactagtacaccatttaa

SEQ ID NO: 832086 - DNA, 615 bp, Homo sapiens
ttcttccatgagatattttatgaaaaatagaaatgctgggggagataccttcctttttcctctgggttcacttagctgtgatgatgtaagcctggagtcaactttggctaagtctgcctgaccaccccccacccccgcaatgtgaagaggacattagtctactgtaggagaaaattaggtcaactgccgagagagaaaccctgccatgggatggaagggggctgtgagaaacagaaagagagacgtccatctgatatggtttggctgtgtccccacccaaatcttgatttgaattgtatctcctagaattcccatgtgttgggagggacccagggggaggtaattgaatcctgggggccgatctttcccgtgctattctagtgatagtgaataagtatcacgagatctgatgggtttatcaggagtttccgcttttgcttcttcctcattttctcttgatgccgtcaagtaagaagtgccttttgcctcccgccatgattctgaggcctccccagccatgtggaactgtragtaagtccaattaaacttctttttcttcccagtcttgggtatgtctttatcagcagcgtgaaaacagactagtacaccatttaa

SEQ ID NO: 832087 - DNA, 568 bp, Homo sapiens
aacagagcctcccactgtcgcccaggctggagtgcacctgacggtgaaaccccgtctctactaaaaaaaatacaaaaattagctgggcgtggtggtgggcscctgtagtcccagctacttgggaggctgaggcaggagaatggcacgaacacgggagacgcagtttgcagtgagtcgagatggcgccactgcactccagtcttgggtgacagagcgagactccgtctaaaaaaaaaaaaatccctagccggtcacagtggctcacacctgtaatcctagcactttgggaggtcgaggtaggtagattgtttgcggtcagaagttcgagaccagcctggccaacatgatgaaacctcacctctactaaaaatacaaaaattagccaggcgcggtggcgggtgcctgtagtcctggctacttgggaggctgaggcagcagaatcgcttgaacctgggaggtggaggttgcagtgagccaagatcgcattgctgcactccagcctgggcaacagagtgagactccatcaaaaaaaaaaaaaaaaaaaatccccatatctcaagaaactttt

SEQ ID NO: 832088 - DNA, 551 bp, Homo sapiens
agagtgttatgctaaaataccaatgcctttttacgtcagttgtctcttyaaagtacatctaaatttctgtctccttaagtatggtcagcagctcattatctcaccatgtaaattttagtgacttctgaaattatccttctttggactgaggcatctaagacaggaacacctgcctttgctgaagtcaggggctttcacagttcctggcagagttgactttgcttattgcttcctcttagatgccaggaacgagtgcttccctgcctggtctcctccagcctcaaaataggattagaactagaattttaagggtgatcactaaggcctgatcaataatcttcttagagacactgaaagccaacttggaggaaagctatgaagatgatagaaaattcaggagcctcagagtctcacagttgagacggcctctgcctatgcactgagtacatctacaaggcagtggagttctattttttgaagtgagtggagaaagcaaatcagaataactaacaaaaggaacacatttcctctgttttaagacttcttttcca

SEQ ID NO: 832089 - DNA, 551 bp, Homo sapiens
agagtgttatgctaaaataccaatgcctttttacgtcagttgtctcttcaaagtacatctaaatttctgtctccttaagtatggtcagcarctcattatctcaccatgtaaattttagtgacttctgaaattatccttctttggactgaggcatctaagacaggaacacctgcctttgctgaagtcaggggctttcacagttcctggcagagttgactttgcttattgcttcctcttagatgccaggaacgagtgcttccctgcctggtctcctccagcctcaaaataggattagaactagaattttaagggtgatcactaaggcctgatcaataatcttcttagagacactgaaagccaacttggaggaaagctatgaagatgatagaaaattcaggagcctcagagtctcacagttgagacggcctctgcctatgcactgagtacatctacaaggcagtggagttctattttttgaagtgagtggagaaagcaaatcagaataactaacaaaaggaacacatttcctctgttttaagacttcttttcca

SEQ ID NO: 832090 - DNA, 525 bp, Homo sapiens; identical to SEQ ID NO: 813940

SEQ ID NO: 832091 - DNA, 592 bp, Homo sapiens
tattagcacctagtagtataatccaactctaaaactccaaaaccacttcagctctttggaacaatttcataatctcttaattttatgaaataactttcacttttagacaaactgagaacaasttcaaagcagttgctcttagtaaaagaatgaagatatggagtcaacactgttttccattggcaaaaggaactcaaagagatattttaagacttactctgtcagaaaaacaattttttttttcttgagtgaaattaggtgccttgatcatagatcccaccactacgttttactgtgtccccatctctccttcatcctgacatatacaccctttctgtttcttaaaatggttttttttctagactggaagaagtattaaaatattggtgacagcctttcttagctgctgagaaaattaatgctttggaagaaggctagacagattcaccactaggctgatatatggcttttctgatatatttagaagtcatatgtgagcatgaagaacttgcaatttgaagttcaattaatgttcaaatatttccttatccatctctttcccttgagttcttactgacaggcccagattaga

SEQ ID NO: 832092 - DNA, 595 bp, Homo sapiens
ggagatagagacaagaaaagaagccatttaaaagatcaacaaatccaggagctggatttcaaaaaaattaaaaaaatagatagacggctagctggattaatgaagaagaaaagagggaagattacaaacacaatcagaaataacaaacacaatcaggaataataagagggacattaccactgactacacagaaataaaaacaaccatcagagaatattataaacacctctatgtaaatgaactagaacatctagaagaaatggatacattcctggagacatacatcctctcatgactgaaccaggaaaaaattaaatccctgaacagaacaataagaagttctgaaattgaagcagtaataaatagcttaccaaccaaaaaaagcccagaaccagatggattcacaggtgtattctaccagatgtacaaacaagagctggtatcacttctactaaaactatttcaaaaaattgaaaaggaggtactccttcctaactcattctatgaggccagcatcatcctgataccaaaacctgacagagacacagcaaaaaaagaaaacttcaggcmaatattctagctgaacatcagtgca

SEQ ID NO: 832093 - DNA, 639 bp, Homo sapiens
ttttatatgggatgtatgtatttcaarggatgcactaaagtttgaccttgtcctctgtattttttttgagagagaatccttcactctgtcacccaggttggagtgcggtgacatgatctcggttcactgcaacatccaccacccggggttcaagtgattctcttgccttagactccaggagtagctgggattacatgtgcccacgaccacacccagctaatttttgtatttttttggtagagatggggttttaccatgtaggtcaggctggtctcggactccttgtctcaagagatccgcccgcattggcctcccaaagtgctgggattacaggcatgagtcactgcgccggccaatcttgtcttctgtattttaacaaagtctgcatttggctttagtgttggcttttagaaagtaaatagtcaaaaaggccaggtgcagtacctgtcataaaagtactcaatctagggaggtcagtaggggctgaatccaacccatactttgttggcccagccatgtgtccctgcagggctgttgccatagagaaaaagatgcctttttccaatccttacaaaagtagcatcagttacacagtgtatatccaagagttatggatcctccagaagggggtgccctttt

SEQ ID NO: 832094 - DNA, 540 bp, Homo sapiens
gctggagtgcagtggcgcgatctcagctcactgcaacctctgcctcccaggttcaagcgattctcctgcctcagcttcttgagtagctgggactacaagtgcatgccaccacgcccagctaatttttgtatttttagtagagacggggtttcaacatattggccaggatggccttgatctcttgacctcatgatccacctgcctcagcctcccaaaatgctgggattacaggtgtgagccactgcgcctggccatgtaagtacttttatcctggttagcagcacattgtacaatagtaccaatgtgtgaaaagcctactttaccgcaaactaaacaacacgtctctatgcttgtcctatcctcctcgtaaagaagctgttctgttgttgatgaagtcattctgcttggctatctctggatgatatatcagaatatactgcccctgacctctgagtaggtgagatgatgtttaatgctgctcrttgtgaaatatcagtggagaaagaaaggcagaccactctaaaatgcagagagatggct

SEQ ID NO: 832095 - DNA, 494 bp, Homo sapiens
tttggggaggctttcctgtttcaggtttgctcagcttcttcaatctgtaggtttatgtgttttaccaaatgtgagaagttttcagccattatttctttaggtagttttttttaggcccaccctctctttctcctctcattctaggactctgatgacttgaatgttagaacttttgctttagcccacaggtctatgaggctctgtttaatttttgcttttagtctattccctctctattgttcacattgggtaatttctatttttctatcttccagatcactgatgcttacctctgccacatccattactctgttgttaccatccgctgagtttttaaatttcgtttattatgtttttccgttctaaaatttttacatgattctttttcatagcttctttttctttagtgagactgctaaaattttctattttttaaaatttgttgtgagcacgttcacaatrgcttatgaaagcattttcactgtggctgtttt

SEQ ID NO: 832096 - DNA, 530 bp, Homo sapiens
gatagatgaaagatgaaggcccaatgtaggtgagaaamtttaatggtacatatgttgcctcatagtcagaaacagagcactggttcactcttcttaacccacatcatgggttaaaaagaacattgccaggagggcttcactattctataagggcatcatttgttaggtcctttttccatggtttggagtaaaagaggcaatgattaaaaatgtatccctcatgataggctctatagcagattctactgtaaaggctatggttacacaacagaccttaaattctcttgtgaaagttatgctaaataatagatttactctagattacttactggctaaacagaagtatctgtgcagctgctgacacttgtggcacatggagaaaacattgggtagtatagagattcggttgtaggggattagaaaagagactgcttagttaagcgagcagactctttatctagctcattgtttgatctatttcattttagatggtttggtttatggggatcctgggtaagaaccatactcca

SEQ ID NO: 832097 - DNA, 530 bp, Homo sapiens
gatagatgaaagatgaaggcccaatgtaggtgagaaaatttaatggtacatatgttgcctcatagtcagaaacagagcactgkttcactcttcttaacccacatcatgggttaaaaagaacattgccaggagggcttcactattctataagggcatcatttgttaggtcctttttccatggtttggagtaaaagaggcaatgattaaaaatgtatccctcatgataggctctatagcagattctactgtaaaggctatggttacacaacagaccttaaattctcttgtgaaagttatgctaaataatagatttactctagattacttactggctaaacagaagtatctgtgcagctgctgacacttgtggcacatggagaaaacattgggtagtatagagattcggttgtaggggattagaaaagagactgcttagttaagcgagcagactctttatctagctcattgtttgatctatttcattttagatggtttggtttatggggatcctgggtaagaaccatactcca

SEQ ID NO: 832098 - DNA, 530 bp, Homo sapiens
gatagatgaaagatgaaggcccaatgtaggtgagaaaatttaatggtacatatgttgcctcatagtcagaaacagagcactggttcactcttcttaacccacatcatgggttaaaaagaacattgccaggagggcttcactattctataagggcatcatttgttaggtcctttttccatggtttggagtaaaagaggcaatgattaaaaatgtatccctcatgataggctctatagcagattctactgtaaaggctatggttacacaacagaccttaaattctcttgtgaaagttatgctaaataatagatttactctagattacttactggctaaacagaagtatctgtgcagctgctgacacttgtggcacatggagaaaacattgggtagtatagagattcrgttgtaggggattagaaaagagactgcttagttaagcgagcagactctttatctagctcattgtttgatctatttcattttagatggtttggtttatggggatcctgggtaagaaccatactcca

SEQ ID NO: 832099 - DNA, 589 bp, Homo sapiens
tctagctcattgtttgatctatttcattttagatggtttggtttatggggatcctgggtaagaaccatactccaaactctcgatattatmttcccaatagtcataatagtagtctccctggtgcactgtgttctctcaaaagttttcaatgtctgcatgcagccatgtctggaatgtctaatggtctctcttcaactagaatgacaagacctgaaagaaatatgtgaccatgaggacaccgtaacctatgaatgacatgctgagaccagaaagccaaaatgatggtaactcagagtggtgctagggccctaagttttggtcacattctcacctaagtgagaacctgattaaaaatggggaattttcttgtctctatctctttcagctctactctgatcttagttattttttgtcttctgctagtttttgactttgctcttgcttctctagttcttttaattgtgatgttaggatgttgcttttagatctttcccactttctaatatgcttatttagtgctatacatttgcctttaaacactgctttagctgtgtcccagagattctggtacattgtgtctttgttctca

SEQ ID NO: 832100 - DNA, 567 bp, Homo sapiens
ttgcctgttaatttttaccccatgttctttcttaaagacttcggacaagccttggcttastaactctacccaaaagtattaagtgttcaggtttgtgagaataatgtcttgttaattattaactcctctaaaacattctcaccccctagaactattccctccttaatccacacacatgcaccagaagcaaaagcaagctcaaacgttcatcatcaaatcagctcacttcaacttgacttctatagtcaaatattgtggtcttctgtagcaactgaaagaggctgtcttgttaattctgagagtttttgttaacaaaaatgctggctgggcacagcagctcatgcctgtaatcctagcactttgggaggccaaggtgggtagatcacttgaggtcaggagttcgagaccagcctggccaacatggtgaaaccccgtctctattaaataaaatacaaaaatgagctgagtgtggcggtgcgtgcctgtaatcccatttacttgggaggccgaggcaggagaatagcttggagtttgcagtgagctgagatcacatcactatactccagt

SEQ ID NO: 832101 - DNA, 544 bp, Homo sapiens
ttggcttaacaatgttgatgaagaaagcccccaaagggaatatagatgaaagtaaattctggttcgtgcttctcactgccccatttctatttatttaaagtaaccatcagcaggtgaaatgacccacaagttatcatgctgtgaaaacataagcagcagattaccccattttttatactgaaagcagtcttgtgagctacacctattgctacaacttttactaaagcatttattgcttatttcatggattgctaactccttggcattggttgggatggctgtgaggatttatggataagtcttcatgggtctctctctggagaaaaaaccaaatgtctctctccctcagttgaacacaggacgttgggcactgtgctcagtctgtcaccaaggcaggcaggagggaagcayggacccatgaccactctttctagaagaaattaaagaggaaatatatctggcatattatcttttcttaaatggatattttccttcagtggtaactaaatgcacataatacaacattctaaaaatataaattggt

SEQ ID NO: 832102 - DNA, 625 bp, Homo sapiens
tttgtatcactcataatgattctattcttcaatacaaagaatttagtaatgatttatgtaataacaataaattctatcytaatttccagaataaaacatgagaaagcatagaatgggagagagtacagtagaaagagctaatctttgctgatatcctcaatttgtgcatgggaaaaggatggtaagtaaataaggacattaaaaataatgttctaaaccatcaaccacacaatgtctctgaggaagtatattctactttgcaagataaaacatagagaagtttttatggaggttggattagattttaagcgaacaaagggaacctttcagtaaggtgatgtgcatgagggaaagagacattctggttgattaagaatgttattttgttattttttaagggagaaataaggtcctctggtttacaatgatggtgcatctggcagacagacagatttgttgtgatgcagccatgcttttcgttggtaacaatgcccccacttctgattgacaaagaaatctctgagctgccagtacatgtatgaggaaatacatcaacccattaagcagaatactctgaaaattttaacacgatttgctgtgaaattttataaacagccttcctgta

SEQ ID NO: 832103 - DNA, 573 bp, Homo sapiens
aagaacctgaaacagaattaccatttgagycaacaatcccactactggttatacactcaaaagaatataaattgccctaccataaagacacacacacctgcatgttcattgcagcactcttgacaatagcaatgacatggaatcaacctcaatgcccatcaatggtagactagataaagaaaatgtggtacacatacatcatagaatcacacacagccataaagaagaatgagatcatgtcctttgcagcaacgtgaatggagctggagtctattattcttagcaactaacagagacacagagaaacaaatcctgcctgttctcacttataagtggtagctaaacaacatgaacacatggacacaaagagggaaacaactgacactggggcccgcttttgggtggaggtaggaggaggaacaggatcagaaaaaaatacctattaggcattacgcttattacctgggtgacaaaataatctgtacaccaaaccccagtgacacacagtttacctatatacaaacctgcacatgtaactttgaacctaaaatgaaagttataataaaaaagtta

SEQ ID NO: 832104 - DNA, 338 bp, Homo sapiens
gcacatgcctgtaaccacagctactcaggaggytaaggcaggacaatctcatgaacctgggaattggaggttgcagtgagccgagatcaaaccactgcactccagcctgggtgacacagtgagactccctctaaaaataaaaataaaaataataaaaaaagctctgatttacccccaacccagtcagaagtcctcacacacatcaataaaaagaaatgagtagagtgaacattttatgtatatccagtgcatttttacacttctctctcggagtccacatgactcctttatttctttgaagaatagacttttatccttgccaaattcagttattgttt

SEQ ID NO: 832105 - DNA, 336 bp, Homo sapiens
atgcctgtaaccacagctactcaggaggctaaggcaggacaatctcatgaacctgggaattggaggttgcagtgagccgagwtcaaaccactgcactccagcctgggtgacacagtgagactccctctaaaaataaaaataaaaataataaaaaaagctctgatttacccccaacccagtcagaagtcctcacacacatcaataaaaagaaatgagtagagtgaacattttatgtatatccagtgcatttttacacttctctctcggagtccacatgactcctttatttctttgaagaatagacttttatccttgccaaattcagttattgtttac

SEQ ID NO: 832106 - DNA, 612 bp, Homo sapiens
aggaggtgatataaaagcagagagagccacgtgaaggatggctagggggcttggggtcgagcagaaagaagtttaagtataaaatccctgagaggaggagaacttgaaaggtttggcaaagaggaaggtcagtgtgtcaggagaaggccgaggggtgaagaagaggggagccaggttagaaggactggcagaggacactgacctgagagctgaccaaggcgaggactttggggggtcaggggcttggcaaatatgatcgactcagtatggccgttcatactgttgccttttccaggccacttctcctgctgggggcagtgaggagcctgccagccctgctgctttggaaagcccagaggaccaagaaactgaggctgcaggggaaaggtggggagaggagaggcaagcagcagcaaactgctggaacgcctgcaaatgggctgctccgaaggctctggggccttggttctgctctgcacagagctggctgtcctggctgacatctgttgtgacctcttccaaagtgacttcgccccatctctctcagaacgagccyggacagtgggtgtgaataagcccagtaatcctcgatgaggaagccccgtgtccacg

SEQ ID NO: 832107 - DNA, 592 bp, Homo sapiens
ttggcactaaaaggaggatgtgacactgaatagggccagatcctttccagaggttaagacagtcaaatacagagcagaaccctgaaccaccaggatgakctattggcatgcatcacagaaaacatacagggtgatgcgggagagttgaaagggtgcaggtggcaggatgcagagaggggaaatctgtgttttcaggtgctcatgggggtcctgtattagagttagagatagggttctcccagggcagacagagcccatgcatggcttcatgagcagacagagcctctggcaaagaaaaaggctctcctttccctggatgggtggagctccacgcagtgcaagggtcttggccagcagaagaaggctcagacatgcagcacctgcagcgaactgcccagacagccctgtgcagaggcctctggtgacactcccggaaaaatgccactggaggagagacttgaagggtggtggcacaggctgaattctgtccctccctcaccccatattcatatgttgaagccctaaccccagaacctcagaatgtcactgtgtttggagataggatcttcaaagaggtgattaagttaaaatg

SEQ ID NO: 832108 - DNA, 623 bp, Homo sapiens
gttctaaataactccttccttatatatgtaccaacctattagcacaaaggcactatcaatcctcaaatgtcagtgatttgcagaccattgtcctaatctttatgtcttctgtatgtcttctgctattgcttacttaattgcttttatatctaaatcagtctacttttcatgtctgcatcagtcaggatatacctgattatgctgcagtaacaagcatccccacaaatcttagcagctgataataatgcaggattctagtctaaggtgaatttcctgtccacaaaagaaaaggtcatgtagaggaggtgaactgtgaacctaagaagtagcacctaagccaaaaggaaaaaaggaaaacactccaggcaaggggaagtcaggttcttcttgaacccataattgtctcacctgtctaatgggtgttagcaattatctctcccttgcttccttccaattgcccttcaagaatccaatgagaatgcgtagtcacttgaaaagattgctttttagctgctgcaggtgatcgcgttgatgttctsaccatatcctgtgggccttcccctttcttctcgccctgatcaactcccaactgctagtacctggatcattctgctcgaaagcgg

SEQ ID NO: 832109 - DNA, 555 bp, Homo sapiens
tgtcatagactagaagccagctttycacaaggggtcagaaaggaaggagggtgaagctcagattcctgtctgcccctagacttccagaaagaaaatttggattctttctgtatttaggagtacacatagacacaagcagcttcagagtcaaaccagaagtcacgtgagaatcccaagctacagtggagagtctcgaaatgctaggctctcaaggatttattggagacctcattgtgttgtcggccacccctcccctgaggccatgcctccacggaaaaattgtcatttgagagacaggttgtcccactaagagggctcaggatatgatttctccttggccttttagtttggttgttcccttgtgaagggctctcctggatcccttcaaaacctaattatggctgtaaaaactgttcagagagcgaagcagtgcttatgtggatgttgggcagtgtctgctctggcacatttgttcacaggtgggccagccaagcagctcggcactgatgggcattgattttgtaatatgtgagcaacttcactggttctgttctc

SEQ ID NO: 832110 - DNA, 519 bp, Homo sapiens
gccaatgatctatccacatttagggcctgacagattgaatgactgccccctggaacggactgtgttagagcttccatgacaaagagttcacttgtcaaaggtttattcttccttcttaaaaaaaaaraggggggtaggttggccagtaggcagaggggtgtcatgtgagcagggaaacacccgctccagcatgaaatatgaaacatcagtcacaaaggtcgggagggcacagcttggttaccaaggctccaggtggattaaatcacgtgcgtcccaagggaggacagggaggcagacaataaaataatatcggaacagagcaccccatgtcccaaggtttgaagacaagccttgttaattcgggaaactgcagggttaaattagtccatgccctggtgacaagcaacactacatattgtgccagcgagataaatttcccctcgcctgctctgatacactggccactgacaggacactgctgtgagtagttcattaaagtgtccaactcctaggaaattt

SEQ ID NO: 832111 - DNA, 493 bp, Homo sapiens
tccccaaggtgacatcacttgacacttgacaccttagatagagttatccctccagggaagggtgggactgaaagtatggccagcctattctgggactcggagactgtttttaaataaagtcytcaggatgcgttgttcttgagtgttttgatcagagatgcgaggtcatggtgagagatggaaagattattagagaatactaattaccaatatagttgtatgaatccacaaatcaggatgaaacccccgatgtctctagaattacggctaacaacagtagaacttactgaattttggagattttcatcaacacacagaaattgtagattaggtgtaggcccaaacgctcccctctttacacactcatggaaaacttttaattcctttttttcactctatgaacaaaatggccatttgcttcaaatgctttcccacatctcttctggccatggacttgcactgcagcacacacctgagaacctggatattgtac

SEQ ID NO: 832112 - DNA, 658 bp, Homo sapiens
tttacaagttgcatccacctttttcaacatgggcttttgtataatggataaaaatatctttctggtaaaaatagaaaacgacttaaatattttaatttgaaattttcaatgtaaactaaaaatatatrtaagccagcataaaatgaaaggacttattaatggattcagacaaaatgaaaaaaatcagagttagcaaagaatctgaagcagtcaaaagaatcattgatttatgggaggaaaacctcctgaatcccaagacgtgccgtgaaacaattaaacctaagcatctacctgcagtggccagaaattctgccctgtggagtgattgagatttgccaggataggtctttcctgatgagtaaactccaattgatcagtaagaacccggttgtggaagttcagcgaccacagtatgcagctggtccgcttctattacatcgttgttaagcactcagtaaatgccttttcaagaatcattctgtctttaattagcacacactggctgtcctattaaaccgaaattaagttcttatttgaagcagttaatttggagacttaaccaaatgtggacatctgcaaggtagtaatttcagttccagccactgtcaggatccaggcattctgtaatcctgcaggcttaaaagctcgccattcctca

SEQ ID NO: 832113 - DNA, 656 bp, Homo sapiens
aataatcagctctcataagacttagtcactaccatgagaacagtatgggagaaacygcccccatgattccattatctcccaccaggtccctcccacaatgcaaaggaattatgggagtgccattcaagataagaattgagtggggacacggagccaaactatatcaatgtgttatattatagctatagtttggttgtttgtcccacaaacatatgttgaaatctgataatccatgttggaggtggggcctaatggaaagcctgtgaaggggtagatccctcttgaatggcttggtgcagtccttacagtaatgaatgagttcctgctctattggttcccatgaaagccggttgttaaaaagaggctggcacctccctccagccttatattcactcacggtgtgatctctgcatacactgcctcctgtttgccttcccccatgagtgaaagcagcctgatgtctttacccaatgcagatagcagctctatgcttctcataaaacctgcagacctgtgagccaaataaacatcttttctttataaatcacccagcctcaggtattccttcgtagcaaaacaaatggacaaagacaattagcattattctttatcattacaggtcatcttcatttgttcccatgcattcaggttaccac

SEQ ID NO: 832114 - DNA, 414 bp, Homo sapiens
aaactttagaaagtgtatagaaaggaaaagaaagaaatggttggtggcccacgtaagagtaaaggagaatcatatggaattgaacagggttgacagagtgacaggyttatggtcatgaaggaaggccagcgtcaaagacaaaaggatgtgttctggaggatttgcgtacactcatcaaaagataggagcagtatgtggccagccaagtgcaagacgacgtaacagctgaaaactgtaactcttcattcaagcaagcagctcaccccatctgaagagaggccagatgggcttcaccttcctacagaacaaatgcttcccattgaccattgcttttaaaccaccagagcctctttcagcagagaatgcccttttgtgctgtgaaattttttgagtccccgtcaaaactcccttgtt

SEQ ID NO: 832115 - DNA, 561 bp, Homo sapiens
gaattgctgttcccaagtttgtatgtttcactgggagcagtttaagctctcacattacacaagatsctaccagttctgtactgcacacatgtggttttggaacagatctggcatcatctcaataacctcatttaggctaagtggaatactttatgttttccttgtctgaaatatttcaagcattatgggaaaagtgcatcatgcttttttttcaagcctgtgagtaatattttggcaatgcagcctgtaggagttatgatccacaggctttatgtaagagccaccagagggagttcactggggcagagccattctttcatactacagagtgagcttcatcatatatgatgtttgtatcatttaagatgtcatcgtagtagtacagagtcaaaattatatttttgaccttaacgtaaaatgtaactccagattgagtattaccatttagggatattaatgtgacaaccacaatgcaaacgaaacaggattgcactcagtagtaaccaaaattacttaatttctgtaaatacaatcaggactttgagcttcacaaacttcaca

SEQ ID NO: 832116 - DNA, 593 bp, Homo sapiens
agcgaattttactttaaattttttatttagggcacataccttaataatttaattgtgaaagctatgcatttgcctttaattgaaattttagcatgctttactttaaatgtgctaaatcactaatttctgttcctttagatgtgatacagttgaaggtatgtaaagcgggggattgtttttccaaagacatagcagttttactatacagggattttaatacttaaatttcgaatttaaaaaattcttttttttctttgagatggggtcctgctctgtcacccaggctgaagtgtagtggcacgatcttggctcactgtaacctctgcctcctgggttcaagcaattccactgtctcagcctatcaagtagctgggattacaggggtgcaccaccacacgcagctaatttttgtatttttagtaaagacagggtttcaccatgttggccaggctggtttcraactcctgaccttgtgatctgcctgccttggtctcccaaagtgctggggttacaggtgtgagctaccatgcctggcctaaaagaagattttaaaacatcattgcatgttttctctgcagtctcttattttcccc

SEQ ID NO: 832117 - DNA, 543 bp, Homo sapiens
aaactgaatgagctcttagaattgatgcaggccactagagactaaaacggcaacacatgatttattatttagtataattgaatagtggagaatggtaatgtttgtctctccttggcccaatataatgaatcaaaaggcccttaagttatttggttatgatacgtatatgattgtgttgaaagtcagcaggaaatgaatctagattagttgtctggcacagtcactgggaatgctgagcagatcgaagctgggtgctaatgacaacttcataaggcttgggagggcaccttcagaaaggttcaggatgaacctggcaagctacttctagagctgagtttgctactaataggcgctttctgagttacaaacataacaagtcatctgattttgaagaaactgaagcttggagtgtgaatgacgtgggttcagtaagaggtaggtgaggaagagctaaggctgattcttgacttgtgccaggacatggtcawtcggctctaccatcttgtctcacccacgtgtagtcatactgcacacacatgtggc

SEQ ID NO: 832118 - DNA, 526 bp, Homo sapiens
agcttttcctgctcatgctaggtattccaccattatttacaacattgtagtgttccagtgggaggaagcagcatgaattttaaataattggcttatgtggaaagtttgtaaattgatcaataacttgtacatattactttgagatgtttaattcagcgcttgtttgttgagtaagactaatgttctgatatattgaaatatttaacagcgagtaatcagatcacattaattagtttgtatgctgtcatatatctgcagtttgttttagttctgcagacaaatatactacactattagagggttatcagtttttgattcctttacttattctgcactaatacagaccagtggcattttatttatacttctctccctgtattttaggagactctaaaggtaggcatttttggaactgtaaagagtatttcctaagttgaacttatcagtgtttatarcataaatacataactatgttaaagttttttttaactaggaaataattatttcacattctttatatagattg

SEQ ID NO: 832119 - DNA, 576 bp, Homo sapiens
tgggaattgttccagagcttgaactcagcattattgacccccaaggctatcctctcttcctgtctgtatgtctcagaaaagctacatattgctttgtgcaaaaggagtccagcgcacatggaaacagatgaactccttgttaaatgttgttagttatttcagtcaccacctactttcaagaacagatgctatttccctagtattcagtggtcttcgtgcttgactacccacaaaagactgtccttagtcacacatgataagtgtctacgctaacatcttcagcagcccttaggtaggccatggggcactttataggccacataatagaaggagacttatgtagtccctggagtcaagcagggctttataaagaggataggtcatcctctgtggccctgctcaggccatgagaccgttttcctgacagtgggcttccaatatggctccaactaaagaaaggggacacgaaggccaactttatggtatgsatgaatctcaggcatccccctggagcacaaggagctccctcaccttcagtgcattggtgcagtgcatgggaaaggttaaaggcaccat

SEQ ID NO: 832120 - DNA, 614 bp, Homo sapiens
gacagaggccagctatttaggaccatacgcacctgtgacaagggctgtgttgaccacagtcacactgtggcatgactggatacccaaactacacttctacacatgaaaagtaagaactgtctttagattttctttactttgataacttgtgattgtttagcttaagacccaagaaatgctgtttgctcatggtaaacagaaacagcatcttcgctacaaccactgacaccagctggcgtcataggtagctagatcattgcatttgttttgaaatgttaatatgttaaatactaaactaatatttcaaaaatgtgtatatatgatttctatatccttgtttttcagatagcctgcttataatttaatataaattaactgatgcattcataagatttcaataatgaaatggttcccttttaaaaaataaaaatactttgtagattaaaaataaatcagaatttcaaatttcaaattgtccacacactaggaaatagaactgtgttaatatataagaaatytggggataattaagaatgaaggacttttctatcatttccattttataaattgccacctgtgaaaatggtttttgcacattatttgtatttttcttt

SEQ ID NO: 832121 - DNA, 596 bp, Homo sapiens
tctgatgacatcttcagtcctattttcactgtaaataagttgagttttgatcaaactattacctcactcaggcaatcaagcttctaatccaacaaaccaaatagtgatctataatatttcacataaatgtgaagtcagaatcttctaaaaacattatatttaatttctagggaaagttgatataatgcctaacgccataaatggcaaccacagtgaggtctttattcctcttattttgaaggtccactgaggaaagaaaagcccaagcacatgccattgaactaatcattcttcagttacagcagccagatacgtgggtgcaatagctcataggttatttctctttatcactacaaaccttctaaaacccttcttagcctgtgtaatcaaaaaggtaacagtgagttaaggtgtcattccacttagataggaaggatcatagagcccaaaggttaagagcatgagctctggagtaaaaggcccgtatatcaaycctggctcaaccactcattagccacgtgaccttgtgtctaggcttccatttatctcatctgcaaaacggggatgataataatacccacctcatagggtccctg

SEQ ID NO: 832122 - DNA, 440 bp, Homo sapiens
tttgtttattataaaggtcacaactcataaatagccaaataggagaaatgcacttggcaaagtatggtgaggggggcacagcttccatgtcctctctgggcacaccaccctcccagcacctagatagctttaccaacttggaagctctctgaactttatcacttagggtattttatggaggtttcatattgattaaataaatcattggccattgggataactcaatctctagcccctcccctctgcccagaggtggggacaagaagcagaggccgaaaggctgaaagttccaaccctctaatcatgactttttttgttttttagatggagtcttgctctgtcacccaggcggctggtgtgcagtggcatgatctcagctcactgmaacctctgcctcccaggttcaagtgattctcctgcctcagcctcccaagtagctg

SEQ ID NO: 832123 - DNA, 570 bp, Homo sapiens
ggttgctttcctgcttctacctacccaaggtcatatgcatttgtttatttatttgacaggcacactaaacaagtytgtgcctgaagtcagggaaagtagagtccctggccctgaggagctcacagtctgcttgggaaaaactgtatcaccaaaaggatgagagttttgactaaagggaagggagacgggacacttggcccctgaagtactttgggagacaggacaagtcgggacagagctgtgaaaaacatgacaattctatcctccaagataacaacagaaaggggtccagaagcagaggtgggagggtggcaaaaataaatgatatataaagttttcgctggggtgttgagctcagagtcgcatgacctatggtgagaggtagtgactgggaaaagagaatgaggaaactctctggggtggtggaaatgttctatgtctttatttggaagatgattacacaggtgtattcatatgaaaaattcaccaggctatacacttaagattagtgcactttatgtattttatgcatcagtaaaaaagtcaaagtatttccccctagggttggcc

SEQ ID NO: 832124 - DNA, 596 bp, Homo sapiens
tatcctgaaggtttcctaacttggatccattctccccatcactttcaggaacacaaatcaaaatggtcttttcacatagtcccatatttcttggaggctttattcatttcttttcactcttttttctctaatcttgtcttcttgcttgatttcattaatttgatcttcaatcactgacatcctttcttccacttgatggaattggctattgaagcttgtgcacgtgtcacgaagttctcgtggtatggttttcagctccttcaggtcatttaagatcttctctacactatttattctagttagccattcgtctaatcttttttcaaggtttttagcttccttgcaatgggttagaacatgcttctttagcccagagaagtttgctattactgaccttctcatgcctacttctgtcaacttgtcaaactcactctctgtccagttttactctgttgctggtgaggarctgcgatcctttggaggagaagaggctctctggtttctccccatctttgtggttttatttacctttggcctttgatgttggtggcctacagatggggttttggtatggatgtgctttttgttgatgttga

SEQ ID NO: 832125 - DNA, 611 bp, Homo sapiens
cataatttctcaggacaaagagcaagatctaaaactttgaccagcatttcatatttttatccttcttctccctaaatgtaatatatattgcttaaattttgaatgtcccagtacttaaggtactaggctctaggaacattagtgagaatttatcaagctcatggttgtccaaatgaagaagagattgtcacatggcaaaaggctaagattttccaatggtcccttggctcctgtgatgaacaagtgatatggcagatatttagttttagagaatgacttgacaggtttccagggcagttgaaagtctggtaaagggctttctcaatcttgagaagagagtagataggaataatattgatgcaagtaacattgacccttctattactttaacttagaaagtatttcactgatgccatcttaaactatctttaaaacatctttctgcaatagaaagtgggagagaggcaaagtgatttgctcatgattatgtagtgaatgtcaatgctggcaaagcaagcatcccrtaatgttttccttgcaggatgaccatagctcgggcaaaccagatactctttccactatcatttaaaactatggaactgtttctatcc

SEQ ID NO: 832126 - DNA, 535 bp, Homo sapiens
tttcaccacacaattccatattatatgaatacaactttgaaaacttacgtrtatatctcctgtcaaggatgaaatcagagccagtttgttaatttaatgttcctaaggcttaagagcttcaaataatgaaggcatgatatataaattttcatactgacccattaaccaaacattcagacagcactttggagaacttgtgcgctggacagcattggatgaacacagattttggccctgtcacacctcttctttgttgttttggcagtctttctctgcacacattttgatgtcatcatctctcagccttctggggatccaccattattgttttcatgttctgtctatactaactctattctcagactatacatatatcaaaatggcacatttctctgcataaggggtagtatgttagaaaaaccaccagcgctctttcagtaaatgaaggaaggcttctataggaggagaagagattgatgagttcatgatgaaggcaagaggaagctactgggtcaagaagggcataaagtagttg

SEQ ID NO: 832127 - DNA, 621 bp, Homo sapiens
tttagatcaacacattatgcctgttgcttaatgttgcttcaaccacaatttttgccaaataatataattcctttgaatttcttaaaaagacacaaccttttccttaccctcagttcyataaactaacacataatattttgtaccagagatctttccacaaaattaggagaagaaatgacagggattccaaaaataaaattagagctatatattcaaatgttggttcctctcagttgagatcatagacagttactcaagaagtaacagttattataggaaaacccttataccttaaaactatttgactgcttttattttgtgatactggaacagtaggtattatttcatagtcatgctggatagcactttcattgaatgataccatcatgttagccaaatagttccatagctgtagattttcacttgtttaataggtaatatggcagtgcaagagactgcattttacctccacctctggcttttcagttatataaaccagcttattgtgacctgtggcaggtgcagtcttagttacattccagtatttcccaagttgggaagcagagtcgggtgactttagacgtaggtgttattctgaaataatttggaaacattacgagc

SEQ ID NO: 832128 - DNA, 655 bp, Homo sapiens
aactattatgaagatgttttcatttcagttaatgtatttcaccctatagttgttattcattatcacaattctgctatgatcctacttgtgactaaaccttccttgaaggaagcctgatagttcttttatcagcatttatatcttatattgttgtcttttacctaattttgtcaagaatatatattatgcttccttgacctgtattctcagatatcttttctgcccaggaaatttttattcttttctcttttcactgttagtttgtttccattcattctgtattttattcaggagtatagatcatctggatgttaggtctctttctctgcatcccagaaaatcttcttaaatatctttcctacctcacagatttgtgttttttaaattatggtcaatgttttcattcctatttcaaatatcattcaaaattctgttatgacatttttccacttctcttaaacttttccaacccctattttattttcattttcaagcatttcacttccttttcatagaaaacatatctgcctttacttccttaaagcaaacagattctatctyattttgcttttgtttcctgttaaatatattattaaaaaaacattgtctttatccacttttaaattactttatatttttatactgcagaatagct

SEQ ID NO: 832129 - DNA, 590 bp, Homo sapiens
attaatataagaaaaagaatggagctgaattacaaactaatcatgggccaaatggtgattttctcagtgacccagataaagaaaagtagctgccatatttyggaggatgagaacaataaaaggggacaatgggtaaaaaaacaaaaacaaaacctgaaagagaggagaggaaaatggagaaggaagagagaaaggggaggaggtgttcttacacactgtcattgccaaaaacaagtttgaaagctttaagacagggtgaaattcgatcacttgttagtcttgactctactaaaacgtatttttaaaaaagaccctctagcctttttggcaatcattttccccaaagcctcccaaaataatcacatgtaagagccaaataaacaccaaatttcaatctctccttggcccagaggatgccaagttggtgttttattacccaaagtttttttggaattggcatattcaaattcagaccctcatcttccttactctagaaaagagaacagacaatgtggattttttttattaaaagaaccctttattgtgtaaaaacagaggttttacccagagaactgttttaatagccctga

SEQ ID NO: 832130 - DNA, 590 bp, Homo sapiens
attaatataagaaaaagaatggagctgaattacaaactaatcatgggccaaatggtgattttctcagtgacccagataaagaaaagtagctgccatatttcggaggatgagaacaataaaaggggasaatgggtaaaaaaacaaaaacaaaacctgaaagagaggagaggaaaatggagaaggaagagagaaaggggaggaggtgttcttacacactgtcattgccaaaaacaagtttgaaagctttaagacagggtgaaattcgatcacttgttagtcttgactctactaaaacgtatttttaaaaaagaccctctagcctttttggcaatcattttccccaaagcctcccaaaataatcacatgtaagagccaaataaacaccaaatttcaatctctccttggcccagaggatgccaagttggtgttttattacccaaagtttttttggaattggcatattcaaattcagaccctcatcttccttactctagaaaagagaacagacaatgtggattttttttattaaaagaaccctttattgtgtaaaaacagaggttttacccagagaactgttttaatagccctga

SEQ ID NO: 832131 - DNA, 624 bp, Homo sapiens
tctcaacaccttcacctgtcagcatctccacagtccctgattctccaaacagactggtccaacagcagttctgatcatgcaatatgctactctatgtagagggcctcactacattctgctgcctcttctccagagccagaatgcaagagtgaatatcctggctctagtactctgtagctatgtggccttgagcaatctactcaactactcttcatctcaatttcctcatcctataaaaattactgaggacaataatagtgcctatgccatagggttgatgggggatcaaatgaacaaatataggtaatctgtttacagcacctggcacatagtaagcactttttacctacgattgttcttattattacttagaatgtcactttcactacatccttccctcttcaggaaagagtaggggctttagagtcggacaaaccttagtccaaatgttggttctcctacttattagtggtgttatttctgactagtagtcacctaatgtctatgagtctcactttgttcattggtagcaacatttaactcayaggattgttagccgaattcaattcagtgagattatacatgttcatgtgcccattcttgtacactcctagtaaacattag

SEQ ID NO: 832132 - DNA, 477 bp, Homo sapiens
tttttagagtggatgatgcaaacatttatatgaataaactctagctctgtatttagtaaccataacatgtccacacaaacargtcttgctgagatgcctgtacttgggagaattgatgctgactttgggttaaactgaagctacctggacatctctttcttcttccttacaatatgtattaccttcgtattattgatcacctgggtgggaccctgatgttaagcagggagcacagcgttggagagtgtagggggttggcccatgtaactgttaaaggttaagttcctctagccctacacactcaacaaacacagccagcactctcagatttccagaatgccttccaggtgagaatcacggttttggggctttcctagagtggcatttcaggctcactaggatacctaccctgcccctgataccaggtgtggtgactcctggagacttctcagccatgcagtgtgggtggactggcct

SEQ ID NO: 832133 - DNA, 656 bp, Homo sapiens
gagagcccctggcaaaccactggtgtaagtctaagagtccaaaaaccaaagaacttggagtccgatgttcgagggaaggaagcatcctgcatgggagaaacatgaaggccagaagactcagcargttgttcattccacatccttctgcctgcttttttctagccttgctggcagccgattagatggtgcccacccagattgagggtgggtctgcctctcccagtccactgactcaaatgttaatgtttggcaacactctctcagacacacctaggaacaatactttgcatccttcaatccaatcaagttgacactcaatattaacatcacaactggtttcatgtaaggttgatatatgattatggtccacactaaccaaactacccccgtgactcagaagacattgatattctcattaaataaaataatttccaaatgaagcatctggtgcctggaaatttgtttccctgaatctctaaagaactgatgggctatttttagtctcactgatttctcttaactggcacattttcagttaatgaataaaattaagagaattaacaatccttatcggtaagaggggtttctcccttcatcaagccaacaaacagctctccccatcacaagacacaagtagtatgagaaattggaactgc

SEQ ID NO: 832134 - DNA, 568 bp, Homo sapiens
cttcctaagagagactgaatggtaaagtcatgtaatgcctttgtaagtgcagtgtgaaaggtcagggaaggtttgtgtgcgtgtgttctaaagctgattttcagaagtccttttsccctaatcaagctctgtcagcataaaatattttaaataaacagcttttccacactgtgaatataatatctagcaagaccaatataacgcttcattttcagatttctcacattttgttttctttttttaaagactgaaaataaccacattcaatttgtaagttaagcgtaatttcttttatgacaagtggctcagtcttcattataagttaggtaatgagaaggcatctagttagaaagctagggcatttcttcatctcacaaatgcagatttgaatgctgagtatgcctgggtgttgtatatcatcttcctaattaaaggtaagaaaaatacaattactatggccaagatggtaaaataaataataacaaatctttattcgttgaggtcggatgagaggtttacttacagtaaaggaactatcttaggaaaggaaaacaaacagtaagaagaa

SEQ ID NO: 832135 - DNA, 601 bp, Homo sapiens
gcctatactcctagttacccaggaggctgaggcaggaagatagcttgagcccaggaatttgaagttacagtaagcaatgattgcatcactgcactccaacctgggcgacagagggagatcttgtctcaaaaaawagaaagacaaaggagcaatgctaagtgaacagccagtcatcctcatcaagtagttgtaccttccttgacttacctgactcagatcttctttcttcccattgttctgattcttgatggaaccccaggtaataacaaatggaatttgcattccttaattaatttactatactgtatgcaatgatggtttaatttttgttgtttttacataatactgcaagagaaatgccttcatctgctatggaacatggaaagaagaaagggagaaggcaagtagaggaaatgaatacaaccaattaaaggcccccagtcaattctgttgagctatttcatcccctgaaagaaagagccagccctgtcctttacaagtacaaagagggtattaaaggcggcagccttttagaagagaaagtgtattagtgggagaagcccatctcaaaggaaatcatgtttacctataagatttcaga

SEQ ID NO: 832136 - DNA, 460 bp, Homo sapiens
catgattttagtgggtagagaaaggaaattgactcacaaaaaaaaatgactagtgtttgtaatagagatrttccttgcacaactgagaattacgtgcaagccaatggttgccagttctcaagaatatgtaacatatgaggtaaggctgcacatacaaacacagattaagttaaacagtcattcataatgctctggttaatcagaagcccagacttcactgaaacaatgtattatactagctagggaaggcagactggagaggagcagcctacccagcactgttctcagctccagtgaactgtcactagcaaactgatttaaaaaagaaatgaatgcatacaatcaatgcataccttagggatatgtaaaaattattttttaaacaaagaaatattctaatagtttcacccaactactctgctctgcttgtttggcagttttcactaatattgaaaatatg

SEQ ID NO: 832137 - DNA, 302 bp, Homo sapiens
tattttgggttttttttttttttgccatcatgaggtaacatttacaggttctgggaattgggaattaagatgtagatatcttcttggggggcagggggkttgtgatttttaagccttcacagggggataaagagagaacttttatcaggaagctgaaggtagcacagaaagtaatcattggaaaaatcctagatggagtagcagccagaggctgtaacagaaatatctaagatcaattttaaatggtatgcctcgctgagataaaaactatcttgatcttcctaaattttcagtgactactg

SEQ ID NO: 832138 - DNA, 586 bp, Homo sapiens
tattatttctgacggctctatttttatgaaatgttgagtgagaaaggtagtaggattggagaatactcagggaatttctatgtcccatttcattattactaagctgsatcctatttcttctaaagaggctcttctaatgagctgcctgccttgcttcttgggagtcagatgggtagcaggcaaccagttaacttaggcatttcttactaagttggtagtatttgaagtggttttaaagaggaaaagcaggcaaaatacataataatggccatatacattgaaggggcaagtaagtatactactgttgagatactaaaaccaattatataattttctacttcaaataagtatgatggtgtagtaccctaaaagatatttgtttttccatttcctttctatataaaaaatgttttagagttaaagaggactgtataagtcataggccataaaaacttacttttaagattaagacactgggacctcaggggcttttgctcaagatcatacacctagtttggacagaactgagacagatacttatcagaacttggttacttttatgaaagcataggtctcattagtcttt

SEQ ID NO: 832139 - DNA, 517 bp, Homo sapiens
caagcaattcatccgtcaagtagggatcaactctaaacaaacttgtygtgggtagtttgtaaactagttgtggggagaaagtgacttcaagggcctgagatacatgctgtttggttgtttgttgtttctttcctttttaaattctgaaaacatcaaatttttttcctttcacttattcaaaaaatctgaaacaaaaatcttgcctttgttatcaacagatgaggtacatatccctgaggaagaccacagcctaagaaaagttcatttattgttcaacttgtttctgtgtgtaattgtgtgcccttcatgccattctttgacagttttctccattgtcagtgactagtataatatagagcacagtgtagacatgcaccaaaatagttccttttgaaagaataaacgaatacttacttaaaaacatattctgggttgacttaaatgcaagttcaggcattaattattacttacttttctatgttccccctaatgatttgtgctttctattcttctagaa

SEQ ID NO: 832140 - DNA, 585 bp, Homo sapiens
caaatgtgatgtcctatacaaatgtatccctcgtgatactgagaaaataattcaatgttcttctctgcattctctctctctctctgtgtgtgtgtgtgtgtttatcatatatatgtggtaaaaaaaaatatggaaatttcccagagagagagagagagattcatctaacttacggctattaccatattcctagtttttagtttacctccacatatgactttggagctttatttacaatcatctttttgatactggaaatacctagtataatgaaattaaatgaatcccttaatccttcttctggattagagtactatgtcacaacaatgagtatttttaaatgaaaaggaattgagaagtagaaggaagaaataacctggtagaatagatgtcctgtcaggaacttgatgagctggtgctggggtggggattgtaagtgagcaggttctgagcaaaaacaacgggagcacaatgaatggaagtgtatatacaggcgagagatastatttcatgttcttggctaatggtaactctgttcctatagaaaatggttatgtagagcaactcggccaccggagaaaacaa

SEQ ID NO: 832141 - DNA, 585 bp, Homo sapiens
caaatgtgatgtcctatacaaatgtatccctcgtgatactgagaaaataattcaatgttcttctctgcattctctctctctctctgtgtgtgtgtgtgtgtttatcatatatatgtggtaaaaaaaaatatggaaatttcccagagagagagagagagattcatctaacttacggctattaccatattcctagtttttagtttacctccacatatgactttggagctttatttacaatcatctttttgatactggaaatacctagtataatgaaattaaatgaatcccttaatccttcttctggattagagtactatgtcacaacaatgagtatttttaaatgaaaaggaattgagaagtagaaggaagaaataacctggtagaatagatgtcctgtcaggaacttgatgagctggtgctggggtggggattgtaagtgagcaggttctgagcaaaaacaacgggagcacaatgaatggaagtgtatatacaggcgagagatagtatttcatgttcttggctaatggtaactctgttcctatagaaaatggtkatgtagagcaactcggccaccggagaaaacaa

SEQ ID NO: 832142 - DNA, 649 bp, Homo sapiens
ttatatcaaaggaatgaagggaaaaaaccacatgatcatttcaattgaagctaaaaaaacattttataaaattcaacattttttcatgagaaaaattctcaaaaaattatgtatatgaggaacatatctcaacataataaaagccacatatgacagaccaatagctagtattacactgaatggggaaaaatggaaagtcttttttccaagatcaagaacacaataaggatttccactttcaatactgttattcaacatagcactgtaagtcctagctggagcaataagacaggaggaaaaaaaataaagggctccaaattggaatggaagaagtcaaattatctttgtttgcagataatataatcttgtatgtggaaacaatctaaaggatcccccaagaagctattagaactgataacaaattctgtaaagttgcaatatacaaagtcaacaatacaaaattcactagcacttctacatgccaacagtgaacaatccaaaaaagaaaccaagaatgtaatcccatttaaaatcrtaacaaataaaacatccaggagtaaacttaaccaaagaagtgaaagatctctacaacaaaaactaaaaaatcattgatgcaagaaattgaagaggacacaaaaaaatggaaaga

SEQ ID NO: 832143 - DNA, 568 bp, Homo sapiens
tctatagcgtcatgttagttattagtgtggcacaagattaatggctcatgttcttcttgctttcacttttctcccgcttaagccagatatttctcctcaaatttttgaccactggagagcacacagtgccctttggttctggctcaaagcagcctgtactctcccctctgggacttgggtccttcagcaatattcttcccaggcctaaactctcagcctctggtctaagcagtcacttgagcctgaactcaactagtggtcagcatcagatcatggaataggatggtgtaagaggtcctggattagaagctaggctgagtttgtgaccagtctgtccaacttggcaaaaccccatctctattaaaaatacaaaaattagccaagcatggtggcacatgtctgtagtcccagctacttgcaggctgaggcacgagaatcacttgaatctgggaggcagaggtygcagtgagctgagatcacaccactgcactccagcctgggcaacagagtgagactatgtctcaaaaaaaaaaaaaaaaaatggagctgagggctgagctggcaggaa

SEQ ID NO: 832144 - DNA, 617 bp, Homo sapiens
aaagtgctgagattacaggcaggatccactgtgcccagcctacccacttaactaccttttaagtgtacaaaacaacaacttcttacacttagcaggcacacatttcttagggcactgcaccaatcactgtcctcaagtttcacttggaaatttgtagaagcaggtgtggggactaaggtcagaaagaaaaatgtcaccttctataagtagccgctctctgatttttttgtttgtatctcagcctgtttatatccccatttttcatttttatctcagcctgtttatatccccatatcaaacaaacagcaacaaaccaaaagcaaatgattatagtgctcaaaatgatgctttactttcatcagtgtcgctatgtacatttctaagaagtggcaaataaatcatctaatcacaggtcaaatacgaaagggacataggtctcatctagcccaacgacccgtctgatgaataaagagaaaacagacttcaaaacacagtagaaattaagggcagggttgaaaaaaaaaaaaaaaaagcccagtttcctctgagggaatcagtatcaacctggaaaaaattatgtacctgttgaragctgatgtttataggttgctttaaaa

SEQ ID NO: 832145 - DNA, 253 bp, Homo sapiens
aacggtgaaaccctgtctttactaaaaatacaaaaattagcctggcctggtgacaggtgcctgtaatytcagctaccctggagactgaggcaggaaaattgctggaacctgggtggcaaaggttgtggtgagccgagatcacaccattgcactctagcccgggcctacgagacttcgtctcaaaaaaaaaaaaaaaaaaaaaggatattggaaaccaactatgctggcattttggttagccaagttttactta

SEQ ID NO: 832146 - DNA, 616 bp, Homo sapiens
ttagatgtaaacagcctctcagcctttcttggagcattctcatttagatataagatactatttaagtaacgaaatatctaatcatatcatttcagtaaatttaaatgaagaatttccattaggatatggaactcacttttttatttttttattatactttaagttctgggatacatgtgcagaacatgcaggtttgttacgtaggtatacacgtgccatggtggtttgctgcacccatcaacccgtcatctacattaggtatttctcctaatgttatccctcccctagtcccccaccccccaacaggccctggagtgtgatggtcccctccctgtgtccatgtgttctcattgttcaactcccacttatgagtgaaaacatgcagtgtttgggtttctgttcttgtgttattttgctgagaatgatggtttccagcttcattcatgtccctgtaagagacatgaactcatccttttgtatggctgcatagtattccatggtgtatatgtgccacattttctttatatatatatatakagagagagagactagatagaaactcttaaatcctaatatgcaaatctaacctgggaaaaccattacactggttaaaagt

SEQ ID NO: 832147 - DNA, 615 bp, Homo sapiens
gattacaggcgtgagccaccgcgcccaccctgagataaattttaaaggaaaagacaaaaaagcacccccttctccttcccccatctcgacctaagaagggtgtttgggtgcatcctcagcccctcagggtgttccagcccccagccggtccgagtaccgaggctcctgccggtcacccctgctggggtctgccctggggagcaggagctgtcctcctagtctgggtggggcccagctctccctgcccacccccggcccagctcccactagccctgaaggccaccgtcccgctggccagggctggactggtgtgggtgctcccttcctcctaggagagggactcctgggtccttcttgggagatagggagcttcttgggacatggggactcttgggagatggggaacttcttgggagatggggagctcttgggagatggggaactcaaagcaccctacccagctgcactcttggccccatggccccaggacctgggatgccgcccccacacagctttgctgggggaggtggtttcccacttagagtggcaggggrcacgtccccttggggcagctggtggccagtctgagtctgttcagaggctgcgactgtgtgc

SEQ ID NO: 832148 - DNA, 615 bp, Homo sapiens
gattacaggcgtgagccaccgcgcccaccctgagataaattttaaaggaaaagacaaaaaagcacccccttctccttcccccatctcgacctaagaagggtgtttgggtgcatcctcagcccctcagggtgttccagcccccagccggtccgagtaccgaggctcctgccggtcacccctgctggggtctgccctggggagcaggagctgtcctcctagtctgggtggggcccagctctccctgcccacccccggcccagctcccactagccctgaaggccaccgtcccgctggccagggctggactggtgtgggtgctcccttcctcctaggagagggactcctgggtccttcttgggagatagggagcttcttgggacatggggactcttgggagatggggaacttcttgggagatggggagctcttgggagatggggaactcaaagcaccctacccagctgcactcttggccccatggccccaggacctgggatgccgcccccacacagctttgctgggggaggtggtttcccacttagagtggcaggggacaygtccccttggggcagctggtggccagtctgagtctgttcagaggctgcgactgtgtgc

SEQ ID NO: 832149 - DNA, 442 bp, Homo sapiens
acagacgacctcggggcagtgacgagcaaagaccagagactgctgagccctcgcatctgggtggcggaattgcctgcggggttttgcccttggtttactgaggggggtcttggttgctgctgaagccccccaccccttctaaagtgcaatgcaaaagggacatcatgtatatgcagcgtttgtttggaattttctttgcttttgttttctttgcggttgttctgtgtgcatggattccacacctctgccgtaggtagatccgtcagcgggcattattaccgtgtcttgtaaagggtcggttttgttatgcaacaygcagaatgctgtttttagccttgttttaccagagttgttttttttttcagttatttcttcaagggaaactaaatgatttagttggagcaaagctttaagtgtgttggcgtgcttctgtgtggctgtc

SEQ ID NO: 832150 - DNA, 455 bp, Homo sapiens; identical to SEQ ID NO: 831869

SEQ ID NO: 832151 - DNA, 319 bp, Homo sapiens
gcttaaattaacctattttctgattattgtggcacagaggaaacagattgaatctgcaagacaaccccaagccccaaaatgaagtgagaataccagctttaaaggttcactcggatttttctttcgcttaagtaggtcatctttgctgttactttagcgctgttgatgacaaaaagccaaatctttctaaggaaactgagtagcaattagtagcgctccctcggggccttggcactggccctcttcctcatgccccagggggcccccccacaatgccagagccaaggggcrtcaaaacacaaagacccatccatccagg

SEQ ID NO: 832152 - DNA, 541 bp, Homo sapiens
tcctaaattcgacatatgactgttctgtgtatatgaaaataagtcaacaggacctgcaatctgaattattttgtaatattaatgattcacttatgttattgtttccatatatatttttaatttttattttatttatttatttatttttgagaaagagtttccctctgtcgcccaggctggagtgcaatggctcaatctcagctcacttccacctccacctcccaggctcaagcgattcttgtgcctgagcctcttgagtagctgggattacaggcaagtgccactgtgcttggctaattcatatatatatatatatatatatatatatatagtgcaacctggaatatattccatgatggctgtgtaataaactccaggctgtattaatggaatcagtcaaagacatttagcttagatgtgggttgaagcctaaagttagttgtcaataatattgtrggggatttaagaatttctaaactttacaatttttgtatggtaaaaaaaattttttttcttttaaaatgggaaggggtgtagagga

SEQ ID NO: 832153 - DNA, 548 bp, Homo sapiens
acacaaacggtacacacaccgtcttgctaagtaattctggttatttaacaatgaaatagaaatattgtcttttatttcaacttatgtgtatttttttcaaatrgctactaagatgttaagagagaaatatttattaagttgtttgggtccagctacttaataaacaaaactgttaagtatttcttttggtcaaagtgtgccattaaaaagaaaaaaaaagtactgactcattaagaatcctgtgaatcaagaaagtttaggaacccaagagtcaactacattccctattcatggccattcagggcttgtttccagtcttttgctgttataaatagtgctgacatgagccaccttgggcatctgacatttttgctagatatttaaacattctcctatatcagagttgtagcctttttacatccctactggcattgtgtggactaccaatttccatgtggcttcaacaacaaaactatagtgtcaaactgttagaccttcaccaatttaacagcagagaactgtcatagcataattcaaaacatgtgata

SEQ ID NO: 832154 - DNA, 616 bp, Homo sapiens
tttgaacaatgaggccagggaaagagtctactagtaggaaatgtctctaggcattgccatatgaataatgcamattcattatttccagctttaggttaccttagctcaagatccaaattcccaggatcaagggacactaattgttcttgcctgcgtcctgtacccatcactttaccagagtgggataagtaccttgactggtagtctagacagactggtaaggcatagggcatatagcagtgcctcatggaaaattgtgctgcagttagcaaaaacatagtaaaggtattatagcagggctgtcaaaatgacacctattttgtacatgtagaactagcatacccactctaagaaatgagctctctgatttctcagttttactttctagcttatctgcaaacatgggtttctttgctcaataagttacactgcaatttgaattttggaaggtggaatactcacatttcagtcacagagtagcaattcagcctcccaatgaaatcattcagaatataaacaggcacaaaacttcaatggtgagcaatgctatgtaaaacggaggaagtttaatattatgtacattatgtgactttatattcagaaaatttatgataag

SEQ ID NO: 832155 - DNA, 643 bp, Homo sapiens
ccacaagtgacaaagggcactggcaaaaagatggcacccgctggctgcactgtcatgggatgagccatcggctggtgccagcagaagcacatgggtctcagaaagayggatttttttgcaaagattttattttattcaaaataaatgctagctaccatttggtgacatggatcctgactagggccaagtgctattccagggccttcccagcactaacccacacaccctccacaaggacttcatgaagtcctcactcttttttttattttcattttttttttttgagatggagtcttgctctgtcatccagcctggagtgcaatagtgccatcttggctcactgcaacctccgcctcccgggttcaagtgattgttttgcctcagcctcctgagtagctgggattacaggcgcgcaccaccacgcccagctaatttttgtatttttagtagagacggggtttcaccatgttggtcaagctggtctcgaacttctgacctcgtgatctgcctgcctcggcctcccaaagtgttgggattacaggcttgagtcacggcgcccagtccgaagtgctcactcttacaatttgcctttcacagttgaggactctcagaaacttgctcaaggggactgggcaagcagggc

SEQ ID NO: 832156 - DNA, 555 bp, Homo sapiens
ttgcaggggagaccccagagagcagtaattctgtgcataaaagcgagcggcagcctcgggcctcagtggtggtggaaagcccaccctgccgagcccgtcccggggatgatgccagggccrgcgtttgttcctgctctgtgcagggacagaggcggctttgtcacctggcccctgtcgtccacccagccccggaatctccgctgcccagcctttgccctgagaactgaagtgcagccctgccccggtcaccgcttagcggttcctttcagcgtctgccaatctatcaagattcagctaccgctgtgaacccatcaactccatggaaaggaaaaaaggaaccctcaccacagcaattatttatcctggcctgaacttcaggtgacctttcccaggtccacagaagttgcagatgggagcaccttggtgtgtaggattttttccccactgtgtccttttaaaaaacacattttttttcatgacatgaacctcttttgcaaaattttcttttgcaaaaagatctttgggtggtctataagaccacaacaggggtggaac

SEQ ID NO: 832157 - DNA, 597 bp, Homo sapiens
gtccttaattttcccggcatgagatgacaaatctcggatattatcccagccaatgacactgcttcactgcmatttgcaacaagaaaaatatttacgacaaggaaaaaagatgaaccaactggaaattaatgacttttttagattcagcagagaactgaggtccaaagcaaaatagtatccccaaatttggagaaacatgtaaacacaaagaatcataagatcagattacctaaagcaaaaacagaaggacctaggaactgatacgaacacgtgtatgataattttgacaaattgcttgaggctcagtgcagactagcttgagagttaaaaactcttgcagcctagtcttaggggagactatacttttgtgagttttatctccaagaaccctatcatgttctcatggggaagtctggagaaaaatctcagggaagagaaaaagtaaccattttggaagtttcccagattgttctctgtaagaaagacacgtcctttcagggaagctattttaccagagttctatctgacttgggagaagggcaattagtcccctccagactcttttagccttcctgtctaatgtcaggggacgaaaaa

SEQ ID NO: 832158 - DNA, 649 bp, Homo sapiens
caaacttttattgagttcctatcagtctccacaccaaagcctctcaacaaatttatttcgtaaaaaacaaacaaaaacgagcaaacctccctgtggaggagtaccgattttatcccccttccgctatcttccagaagacagcactgaggttcacagaggagaatccattcttcctggttccagagtccgtactctaaagacccactacccactatccctcttgtgaaaactgtcccaacctgatcctgatgcaaaatgatggcaaataaaaggcagtagatagatttttacagtaaaagagaaacagaagataattaacttgagttgtgaaaagaattcaagaagggagatgcttcctttcaagacatataatctgctcctgtatgtctttcacttgttcttcaaggaatcttcgaaatgttcccctcacaaagtttctccttatgctcatatccctcctaagccatccatgagggtacccatgaaggcccagttcaccggagctgcctgacgtactgattatccctctctaaagcatcctcttttggacaacaaatkatatgtccacccaaaacataatctccatgagggcagggatgtgccttattctcctttttatctctcaccaggatttttattttattttatt

SEQ ID NO: 832159 - DNA, 649 bp, Homo sapiens
caaacttttattgagttcctatcagtctccacaccaaagcctctcaacaaatttatttcgtaaaaaacaaacaaaaacgagcaaacctccctgtggaggagtaccgattttatcccccttccgctatcttccagaagacagcactgaggttcacagaggagaatccattcttcctggttccagagtccgtactctaaagacccactacccactatccctcttgtgaaaactgtcccaacctgatcctgatgcaaaatgatggcaaataaaaggcagtagatagatttttacagtaaaagagaaacagaagataattaacttgagttgtgaaaagaattcaagaagggagatgcttcctttcaagacatataatctgctcctgtatgtctttcacttgttcttcaaggaatcttcgaaatgttcccctcacaaagtttctccttatgctcatatccctcctaagccatccatgagggtacccatgaaggcccagttcaccggagctgcctgacgtactgattatccctctctaaagcatcctcttttggacaacaaattatatgtccacccaaamcataatctccatgagggcagggatgtgccttattctcctttttatctctcaccaggatttttattttattttatt

SEQ ID NO: 832160 - DNA, 490 bp, Homo sapiens
tctaggtgtttactactagacgtgtatcttctttaaaaggtaactagcaccactataataagctcagaaaaagtttcttcccctatcaagatatttgtaacatcttcacaatgaagagatgcttccttggccaatgtacaaatacattttgaaaggaaagctgtaatacactgctctacaagaaagctctgttggttgcagagggttaggaaaatctataatgacaaatgtattcacagtttgttttataaagtcgttaatatgcaatatcttgatttatattttattaagatcatcaatgattccctttccagattcagaaatatataaaaagggattttaaaatatcctcaaaccactgttgtaagcacctcagttctagtcttcaargatgcatacaatttttaaatgagaagtgaaatatgtggaaagagaaagtaggctaaaactgtagtctttgtttttcatttgttaatactttgggtatata

SEQ ID NO: 832161 - DNA, 618 bp, Homo sapiens
tataaaatatagctcttcttctaccagtgaactgtcggtcaacttggcaggttcaactctgctttatttattactgagatactttatcatttaagcatgcaatatasggaggttcttactgggcaaaatgaaacatcaaaacacaggaggaagatgccatagatatccactggtattactatgaaggtaaagccatagtatgaataatacatattttactagtaccatatttaatttagaggcatcaatttttctctatttgttacaactgtttcctgtagataagttaggaatccctagtgagcttaaaaagaacaatatccattctttatctattatcttctctctgagatgactgatgtagaatgttggaacttgttatggatagaatgtttgtgtcccccacaaattgatatgtttaaatcctaacaacaatatgatgaaaggaaacttggagagctttcttattctctttttgccatgagaggatccagtgataagttggtagtctgtaacccagaacagagaacccaccagaacccaaccatgccagttccctgatcttgtacatccagcctccaaaactgtgagaggtaactttctattgtttacaatcca

SEQ ID NO: 832162 - DNA, 647 bp, Homo sapiens
tgctggtctaattagttttccttggcagtcttcagttcttctttcagatcagaaatagtatccccaaatggaaaggccccataatagatgaatttttataaagggcctaagtatttgaatattactgtaagacatcattattatagcagagtgacacgatgttccaaagtattcccatagtcatccagaaaagttcagcatgtttatgctgtacagtaacaaaaagaagtgagtgctgtaacttagaaaaattcgttttaaaaaagtcagtgttaaaaaaaaagtgagtcctttctccctattaccttccttcctttgtgtaacaaagattaattttacttctgctgtgtgccagaacagtactgaatgctgtggatacaaagatgaataaaacatgttctttgtcctcaaagagcttgctatgtaattgttcaaatagacataagaaaataattagaatatgatgtagtattttgatggtagtgttcaaaatatttctggagagcatagaagaagagataataatgaaatcttcctgacatggtatgcgggggacctatcaggactagcttcaggttcatggtgaattttccagttaatacttcattttccagtggtgtcarataaatgaggtacagctatatttt

SEQ ID NO: 832163 - DNA, 624 bp, Homo sapiens
aagatctgctatttaagaaccatcaacttgtagtatcccttaataattcctgtcaacgtcggctatctttgaaggatttagtggtttttgcttttggcagtgctgcaataatggaaataacttacactgcccatccccatcttacagtgtctgctaacacgttgggttgttggctgccaggcagatttaatttatccacttctcagtttgcattaacctttgaataataaagcacagctgaggctgctgtaagacacaaacagaggaatgaataattaaaaacaccttctcagccttggaaagaccaatccctaaccattaggggagctttaattgtgactgaactaagcattaaaaaggctaattgtactctttatagatggaaacaaatgcaaaggacgtagtacaactacgatatacatagtatatgaaagcaaagctctgaaggcaccaactaattagttcaaatgagaaacgatagcctgattcttaaaaagcaatttccttctaaagatggccactcattgtcttacattcagaaaaattgctackacttgtaaaacgctattactcatctgatgcaggtggacgggatagagtagcatttgaaaggatagaaatgtt

SEQ ID NO: 832164 - DNA, 629 bp, Homo sapiens
aaaggtggaccattgcagcatctgtcattattgtttctcattttgccttcttcttcctgtcttctccccattgccrtctcattttctctgcagccatgagcaggaactgtatgcaaagtacaaaagactgtattcctgaaacagaacttgttgaccccattttcttgactcttatttgacattgctttctaagagaagggttttggattacacactcacacacacacacatatgtacacattcatagtaataaatgtatttatcaactcagttgcaatgagattctgcttgttggaatatcatataataaatagctatattggtatttattgaacattggctttttatatgactgcaataagatttgatgctagtatttttaactgttgctccctctctgcctccatgcttagctgtttaacatgacattcattcatcaaaaataaatgtccaagtcaatggagtgtttctgtaacagatattagtcaccttagacttgttactcatagcccataaactcttatcattctttctcagataacccagttgaccctacattagtagaaattgagagctctgagttcatttttgttgttatttgatgaatatatcacttggctgactattag

SEQ ID NO: 832165 - DNA, 554 bp, Homo sapiens
cttgctgggaaaacccataaggttaatacttgattataaaatcaagtttgccacagttgcaacggagcttatgtcagcagagtttctttaatgagaaggtaattttaactgaaatgtctgcattattgtgtttactcatgatctaagtatgcgagtattttttcatgcttcattcagtcacattaaatgctaactgtaaggcatcttatttgaacagcatttttaatttcaaaaattccaagtgccagcaaataatcattattttattattcttattttaggagttaaaaactgagtctgagattaaaataattacagatcaaagacaagtacacaaaccaaaacaacactatttgggattaactagaggaaaaagtcaatgtaaattaataaacagtctaaatatgtattataaaatatgatattattttcaatgatataatatcactcattcaaaagtagtkttttgatatggtctagattagaaattatttgatcatcagaaagaggaatgtaaaataatttttttacaacattgatcctataagtggaag

SEQ ID NO: 832166 - DNA, 533 bp, Homo sapiens
taaaatggagatggtaataccagagttgcctgaagaattacataaaaaatatgtaaaactacttgggtcatactaaatgtttaatataacatgcttaggttttaatcttayttattaaataaaagtcatggttggggaagtacgtttatcccagtgtctgaaatccagcatagttcaagtcaccaaatttgtttaacaactgtgtgtctgcatgcgcaaagaggtggtaacagtaacaaagaggctgccaagtcccatgcttggtgggagaattcagtcaaagacacatatctaacttactattatgcttttaatcttagacttgctagtaagaactaataaacatcaaaatgttatatatgtaacatttaagagaacatcaaatacactattttttaaatatcaaatatacccatacataataataattttattatctttccttggcttaaattctggtaaatttccaaaaagaaaaatcaagtgtttttcaacagtgttttgaattaaaacttgattatttttgcaagaca

SEQ ID NO: 832167 - DNA, 619 bp, Homo sapiens
aatgctctttaattctgtcactcatcccacaacatataattaacacctacatcttacttttctctgcctttaaccttccattcagtgctatgtacggccagttgtctgcatgggaaaacaggaaagcaaacaatccaagtacagactggatactgttctatgccagttctatcaattatctgggaaatgattgaataatccttttgaaaaaaacataaagtattagatgccatgatagagatcagcacacattgaagtacttaatgatgcaatctgtgacctggctctagcattttggaatacagttctgtgccatataaccacatgtcagtcaatgacagactgcacatatcacagtggttccataagattataataccacatttgtactgtaccttttctatatgtagatatatttagatacacaaataccattatgttccaattgcctgcagtattcagtgcactcacatgctgtacaggtttgctgcctaggagcaataggctacamcatacagcctagctgggtagtagactacatcatctatgttcatataagtatactcttatcatattcacatgatgatattacctaacaacccatttctcaggatgtagc

SEQ ID NO: 832168 - DNA, 619 bp, Homo sapiens
aatgctctttaattctgtcactcatcccacaacatataattaacacctacatcttacttttctctgcctttaaccttccattcagtgctatgtacggccagttgtctgcatgggaaaacaggaaagcaaacaatccaagtacagactggatactgttctatgccagttctatcaattatctgggaaatgattgaataatccttttgaaaaaaacataaagtattagatgccatgatagagatcagcacacattgaagtacttaatgatgcaatctgtgacctggctctagcattttggaatacagttctgtgccatataaccacatgtcagtcaatgacagactgcacatatcacagtggttccataagattataataccacatttgtactgtaccttttctatatgtagatatatttagatacacaaataccattatgttccaattgcctgcagtattcagtgcactcacatgctgtacaggtttgctgcctaggagcaataggctacaacatacagcctagctgggtagtagactacatcatctatgttcatataagtatactcttatcatattcacatgatgatattrcctaacaacccatttctcaggatgtagc

SEQ ID NO: 832169 - DNA, 470 bp, Homo sapiens
ctagaagtcaaagactagaagtgctcagtttctggcatgaatgtgaaaagtgtagtaaacgctggagaaagagttgaaggtgattatggcaactarcagtgcctctgcccggccctccttccccacctcttggggcagctgatacctgccttcctcctggaagcaggcctctgcccagggccacctcatttttgccaggggataaaaggcactggctgccttggtctcactaaggctgtgctgcaattgaaatgagcttcctcttggagagcttgtattttttttttttttttttgagatggagtctcactctgttgcccagactgaagtgcagtggtgcaatctcagctcactgcaacctccacctcccgggttcaagcgattctcctgacttagcctcccaagtagctggggttacaggcacgcaccaccacaccctgctaaaatttttgtacttttagtagagatgg

SEQ ID NO: 832170 - DNA, 615 bp, Homo sapiens
gtgagttcctaccctcttgttggagtgtgaagggctcatgttgtggagtgtgatgcatctggattcgagctctgcttgcttcctgggacaggtcactcagtgccttctggccttggtttccttgccttgataatgggagccctccttgcctcactggcgggaggctgtgatgagatcacatgtgcattagctggcactcagggttgtcgcctcacagtgcctgctggtaccgtcaccccagtgctgtggatgacgcaggaggggcctgtgtgcctggaggtcacgtgtagacagtgccccgtggcagggatgtgcctatgaagaggggctgcaggattcggaagaaggagaaaacccagcctggttgcgatgtcctgcaatggcctcaggagaagtgagaaagcctgtggccccctggagtaagtagagtgagaagtgttagaggctgtgtcatcagaacccggaccacacctggcaggaagtagaaatggatgaagaaattcrggttcatgacgagaggcttgctcagaagcacaccaacaggggaattgcagggctgacccctgaacctcagtcgctgcactttgagttggtggctctgactgtcacactcaa

SEQ ID NO: 832171 - DNA, 616 bp, Homo sapiens
tataatttatgttaatattttatatacatatttacattgcatatatacatttgtttatatctatacattatactttatatgtttattatttgcatatttttacttgtatttttctgtatgtttttatgtgtatasaaatatatagttttttttttttaaatgaatccaggcttaataagtcatatcacatgagaaggaatcaagtttcctgggaaccacagggtttggactacgggaggtcagtgctggagggagaaaagtttccaagagaaccaaaggcaaaagttgaggccactaggaaatgctccttctctttctctctctccgtctcacctgcctgtgcctgtctgcccacccctagcctgacatcttcataggtcccgagtcattttacatctcttcctctactgttacttatcttttacttcttcatgtaatcaaccttcatttcaccagttatcgacttcattatcactggttttttagattatcagttgaaaaagttttatgtaaaatgatttgtaaatcatattttccgttgtcatttcagagatatggtccaacaggggaaaaaaattgacatatgtagtaaaaatcacagacaaaacctacatct

SEQ ID NO: 832172 - DNA, 604 bp, Homo sapiens
ctgatgttaaatctactggctagaatgtcagccctgaaattcctaaaaagaaaagtcctgttgaaacaactccctcgtaccacgcaaagcaatatgtcctgtaattcctggtggaaaccgctaggctyagcaagagattagggaaggcgagtgggtctaagcatttctgaagcttctttcctctgttggtgtttggtggtaaaggattctaaactctgaagattctgaatagtgtcctttggatttctgcagactgatcagcctgcgtcctttgtctcctcctgagttaacttgtggccagaggtcaacatggtgcaggagaagttagagtgcacactccccagtccctctgatcctctaaggcttgtctgccagtgagaatggaggatgtgtgttagaatcactgctacagactggacaggctggactactgctaagagttgctatttctgaatccttaaagggttggcatgacccagctgggtttcacttcagtcccttcagaagagtaggcacaagtgttccactcttccctgatcggggtgctgggagttttcttgggagcagagactgaagtttggcaggacaggggagcagagaggtg

SEQ ID NO: 832173 - DNA, 604 bp, Homo sapiens
ctgatgttaaatctactggctagaatgtcagccctgaaattcctaaaaagaaaagtcctgttgaaacaactccctcgtaccacgcaaagcaatatgtcctgtaattcctggtggaaaccgctaggctcagcaagagattagggaaggcgagtgggtctaagcatttctgaagcttctttcctctgttggtgtttggtggtaaaggattctaaactctgaagattctgaatagtgtcctttggatttctgcagactgatcagcctgcgtcctttgtctcctcctgagttaacttgtggccagaggtcaacatggtgcaggagaagttagagtgcacactccccagtccctctgatcctctaaggcttgtctgccagtgagaatggaggatgtgtgttagaatcactgctacagactggacaggctggactactgctaagagttgctatttctgaatccttaaagggttggcatgacccakctgggtttcacttcagtcccttcagaagagtaggcacaagtgttccactcttccctgatcggggtgctgggagttttcttgggagcagagactgaagtttggcaggacaggggagcagagaggtg

SEQ ID NO: 832174 - DNA, 604 bp, Homo sapiens
ctgatgttaaatctactggctagaatgtcagccctgaaattcctaaaaagaaaagtcctgttgaaacaactccctcgtaccacgcaaagcaatatgtcctgtaattcctggtggaaaccgctaggctcagcaagagattagggaaggcgagtgggtctaagcatttctgaagcttctttcctctgttggtgtttggtggtaaaggattctaaactctgaagattctgaatagtgtcctttggatttctgcagactgatcagcctgcgtcctttgtctcctcctgagttaacttgtggccagaggtcaacatggtgcaggagaagttagagtgcacactccccagtccctctgatcctctaaggcttgtctgccagtgagaatggaggatgtgtgttagaatcactgctacagactggacaggctggactactgctaagagttgctatttctgaatccttaaagggttggcatgacccagctgggtttcacttcagtcccttcagaagagtaggcacaagtgttccactcttccctgatyggggtgctgggagttttcttgggagcagagactgaagtttggcaggacaggggagcagagaggtg

SEQ ID NO: 832175 - DNA, 670 bp, Homo sapiens
agataccactttataccttaggatggctataagcaaaaagacagacaataacaaatgttggtgaggatataagaaatcataaccctcatacacttctagtgagatgtaaactagtacagcaatttggaaaaccatttggcagtttgtcaaaaggttaaacatggagttatcatatgacccagcaattccactcctaggtgtatattcccaagagccatcaaaatacatgtccacacaaaaactcatatacttgttcagagcagcattattcataatagccccaaaaaggaaacaacttaaatacgtgatatggtttggctgtgtccccacccaaagctcatcttgaattgtagttcccataatccccatgtgttgtgagagggaccttgtgggaggtgattagattatgggggtggttcccccatgctgttctcatgatagtgagttctcacaagatttgatggttttataaggggattttccccaatccactttgcacttctctctcctgccaccatgaggacatgtttgcttcctcttcygccatgattataagttccctgaggcctctcctgccatgcaggtttaactgtgaggcaattaaacctctttccttcataaatttcccagtctcaggcagttccttatagcagcccctgagaacaggcta

SEQ ID NO: 832176 - DNA, 559 bp, Homo sapiens
ctgtgagaggccattatattttaggtcattgggctgctcaggctggcacatgctcaaagttaaaagtccatctgtgggaagaactgccacaytggtcctccagctgacacatatcatgttcattttagactccagtgtttctatgccttctttgtcaagatgactgggacaggtggatagaaaggaagaaaggtgagggtctcccaggctgcaggaaggttagggtgagtgagatgagcagttgctgtggcttaaaaatgtcgcccaaaaagttgggttggtattggtattctgttgggagggaagctggctgcagaggaggagggcaaagaaaaaaggagaaatgaacactttcttaggagagcctggagtgcacgctggccccaatgggtggacatttctgccactgtctctcaggtcttcccccagtctccacggtgcagagagccccgtcatctctacccccaggaaagggctgctcagataaggcggcccctttcacctggagctgggatcccacgtgcccatcaggaaatggactggggtggctaatcccctg

SEQ ID NO: 832177 - DNA, 559 bp, Homo sapiens
ctgtgagaggccattatattttaggtcattgggctgctcaggctggcacatgctcaaagttaaaagtccatctgtgggaagaactgccacattggtcctccagctgacacatatcatgttcattttagactccagtgtttctatgccttctttgtcaagatgactgggacaggtggatagaaaggaagaaaggtgagggtctcccaggctgcaggaaggttagggtgagtgagatgagcagttgctgtggcttaaaaatgtcgcccaaaaagttgggttggtattggtattctgttgggagggaagctggctgcagaggaggagggcaaagaaaaaaggagaaatgaacactttcttaggagagcctggagtgcacgctggccccaatgggtggacatttctgccactgtctctcaggtcttcccccagtctccacggtgcagagagycccgtcatctctacccccaggaaagggctgctcagataaggcggcccctttcacctggagctgggatcccacgtgcccatcaggaaatggactggggtggctaatcccctg

SEQ ID NO: 832178 - DNA, 480 bp, Homo sapiens
ccacctgtccagttcccttattaggctgagacactttaactaaattatctgcttccctgactattcctggactacagccacatctcattgcygcacttcttcccaatccaaagcctcctttgcgtcttcctctcatatccccccatcttaacccacaagtatgggacatctctactccttccctggcaacagatcacatgcccattaccatcccattaaaacctaatcacccttaccctgctcaacgccaatatcccatcccacagcacgctttaaaaggattaaagcctgttatcactcacctgttacagcatgggcttctaaaacctataaactctccttacagttcccccattttacctgtccaaaaaccggacaagtcttacagattagttcaggatatgcgccttatcaaccaaattgttttgcctatcaaccctgtggtgcccaacctgtacattcttttgttctcaatacctc

SEQ ID NO: 832179 - DNA, 630 bp, Homo sapiens
ccgcacctgtccgcaggtggagctgtctgccagtcccacgccttgcgcccgcactcctcrgcccttgggcggtcgatgggaccgggtaccatggagcagggggtgcttctcgtccaggaggctccggccgtgccggagcccactgcaggggtgtggcaggaggctcaggcatggcaggctgcaggtcctgagccctgccccatggggaggcagctaaggtccggcgagaaatcaagtgcagcgccagtgggctggcaatgctaggggactgggtgcactgtccacagctgctggccctggtgctaagcccctcactgcctggggccggtggggcagccggccgctccgagtgtggggcccgctgagcccacgcccacctggaactcgcgctgtcccgcaagcgtgcaagcagtcccggttcccgcccgctctctttccacacctccccgcaagctgagggagccggctcctgcctcggccagcccagaaaggggctcccacagtgcaggggcaggctggagggctcctcaagtgcagccagagtgggtcccgaggccaaggaggcaccgagagcgagcgagggctgtgagggatgccaaacgctatcacctctcactttgattaaatttc

SEQ ID NO: 832180 - DNA, 630 bp, Homo sapiens
ccgcacctgtccgcaggtggagctgtctgccagtcccacgccttgcgcccgcactcctcagcccttgggcggtcgatgggaccgggtaccatggagcagggggtgcttctcgtccaggaggctccggccgtgccggagcccactgcaggggtgtggcaggaggctcaggcatggcaggctgcaggtcctgagccctgccccatggggaggcagctaaggtccggcgagaaatcaagtgcagcgccagtgggctggcaatgctaggggactgggtgcactgtccacagctgctggccctggtgctaagcccctcactgcctggggccggtggggcagccggccgctccgagtgtggggcccgctgagcccacgcccacctggaactcgcgctgtcccgcaagcgtgcaagcagtcccggttcccgcccgctctctttccacacctccccgcaagctgagggagccggctcctgcctcggccagcccagaaaggggctcccacagtgcaggggcaggctggagggctcctcaagtgcagccagagtgggtsccgaggccaaggaggcaccgagagcgagcgagggctgtgagggatgccaaacgctatcacctctcactttgattaaatttc

SEQ ID NO: 832181 - DNA, 582 bp, Homo sapiens
gttcacttaatcgcacagtgccttcatggatttcatgctcaattaccatttgctaaattctttatcttaggaaaacattttgtaatactacaaactcatttattaatattaattttatagaacaaataatatttatttaagtaaacattcttattctaatatactttgcattctcaatacttaatgtttggaagatagcaggttttctataaaaaatttagcgattgaggaacatttagtttcattttaaaaatctgtcacttacttttctggtgtcaggcccttagaagagatgacttcgaagacaattttacagattcctgaaaatgtaagctctataagaataagaatattatttggattttcacagctatagccgcagtgctaatggcagtgtgcggtatatagaaagactttaaaaaatgtttgttgagtgaagtggaaatatttattttcacatttaatttaactataaaatatagcaaatrtatgggaaagaatatggcagccatgcatctaacttccacatatgcccatattggatccagatatttttattaatatttgttaaaagaaatagct

SEQ ID NO: 832182 - DNA, 538 bp, Homo sapiens
gtaaaatgtatttaatttaaatcatgatattatcattgagataagtgtgtattcatgctccaatcctaaagcaattcttttagctgtattagctctggaattttarcaagaacaaaaatagcatagtcaaagctctaagtttgtgaacttttgtaagatgaatgcccctaaatgaaaaggtgtgcaagcctaaatgagcatattgaatacaaagcaatttaacacaatgaaattgttctcagatgatgccttctctatgaattaattttttcagcagttgaattaagttattaaagataatactacagttaagatcattacatgttatttaacttttgtcagcatttcaaatttattagacatttacaaattaactatcaagggaaatataataaaataagagagagatctaataatatgtatttgagattgatatttaaaacagaattacattttaaccacattatgtattgttattgattttattattgttattttttgagatggagtctcgctctgtcacccaggctggagtgca

SEQ ID NO: 832183 - DNA, 625 bp, Homo sapiens
accttcgtggtgagtgttacagctcttaaggcagcgcgtctggagttgttcattcctcctggtgggttcgtggtctcgctggctttaggagtgaagctgcagacctttgcagtgagtgttacagctcataaaggcagtgtggacccaaagagtgagcagcagcaagatttatggcaaagagtgaaagaacaaagcttccacagtgtggaaggggaccccagcgggttgtcactgctggctggggcagcctgcttttactctcttatctggccccacccacatcctctgattggttcattttacagagagccgagtggtctgttttgacaggttgctgattggtgcgtttacaatccctgagctagacacaaaggttctccacatccccactagattagctagatacagagtgtcgacacaaaggttctccaagtccccaccagtgtagctagatccagagtgtcgattggtgcattcacaaacccagagctagacacagggtgctgattggtgtgtttacaaaccatgagctagatatacagtgccgattggtgtatttacaatcccttagstagacacaaaggttctccaagtccccaccagagtcaggagcccagctggcttc

SEQ ID NO: 832184 - DNA, 524 bp, Homo sapiens
tttaagaaaatctgagacatttccactttgtctcttgctcctactatcaccacgtgacatgctggttacccctaccttctgccatgattgtaagcttcctgaggccctcaccaaaaggggatgcttgcactatgctttgtgtatagcctgcagaactgtgagccaattaaacatcttttctatataaattacccagtctcacgtatttatttatagcaacgcaagaatggactaagataactatcctcctacctctaatctgttgctggtgtctgccactggtcaaatccagtcagaaaacagaaggtaagggtcttattaaaatagtctataaattgccaaagagcaagagtcagaagggaggaggtgaacttggaggggcaaatggaaaattaccagtgcagcatccaaatgccatgttaagtctggggagaaatgatgaccaaagaaaggtttaggragattatgtgccttcagttgaaccctaaagaaagattatgcatttggtgcaaataaatagttca

SEQ ID NO: 832185 - DNA, 524 bp, Homo sapiens
tttaagaaaatctgagacatttccactttgtctcttgctcctactatcaccacgtgacatgctggttacccctaccttctgccatgattgtaagcttcctgaggccctcaccaaaaggggatgcttgcactatgctttgtgtatagcctgcagaactgtgagccaattaaacatcttttctatataaattacccagtctcacgtatttatttatagcaacgcaagaatggactaagataactatcctcctacctctaatctgttgctggtgtctgccactggtcaaatccagtcagaaaacagaaggtaagggtcttattaaaatagtctataaattgccaaagagcaagagtcagaagggaggaggtgaacttggaggggcaaatggaaaattaccagtgcagcatccaaatgccatgttaagtctggggagaaatgatgaccaaagaaaggtttaggaagattatrtgccttcagttgaaccctaaagaaagattatgcatttggtgcaaataaatagttca

SEQ ID NO: 832186 - DNA, 532 bp, Homo sapiens
agtgtaggaggatcttgtataatatgtcaraagcatgctttctccgtctgagttattatcagagttgggataaaattttctgctacatgtctctagcctcctgttgtccaaaagttccatgaaggaagagaccatatctatcttgatcgcctccatatctttaatgtccaaaacagtgcctggcagagttgccaaataattaatgtgttcatccatcacagttagtctctaattgctggatgactgagctcactggataggctcatatcaagtcaggcagataggatccaggaaaaaggatgatcctaaatgtaaggtgcaggcaagaaaaaccagacataagtaagttctgagttgttagaattatatgactccttagagtcttagatgcttagatgtgggaaaccaacaacaagctaagacaaacatgaagaacccagccaggaaataggtaaggatcatcttccaaatcaatagagaaatgagtgttgccagggaatgtttttcttgattcctaagttttcttctctgt

SEQ ID NO: 832187 - DNA, 612 bp, Homo sapiens
tcgtgcaatttcaggctgtggatttatgaacaatatctcaccagtggataatatcggttgtcaagtgtatgttttattacccctagaactcccttttgtctttgcaagttgctagtggatatctctgtttttttttttttttctcctggcttcacaaaaatttggaaggggttaatttaatttttcttcttttaccaaaaaagttaatattaatagtaaggaaaattaaaaagaataaaataaagatagcagataaaacattatgaataaccatttcatcggcactttaaatactatggaaaggattctaaatgcatattttattatctgcagctagtgtaggaggatcttgtataatatgtcaaaagcatgctttctccgtctgagttattatcagagttgggataaaattttctgctacatgtctctagcctcctgttgtccaaaagttccatgaaggaagagaccatatctatcttgatygcctccatatctttaatgtccaaaacagtgcctggcagagttgccaaataattaatgtgttcatccatcacagttagtctctaattgctggatgactgagctcactggataggctcatatcaagtcagg

SEQ ID NO: 832188 - DNA, 639 bp, Homo sapiens
caagaccagcctgggcaacataaagagacctcatctctacaaataaaaaattatctgggtgtggtggcgcatctctgtagtcccagcttcttgggaggttgagggggaagaatcatctgagtccaagggttycaggttacagtgcactatgatcatgccactgcactcagcctggacagcagagtgaaatcctgtctgaaataaagaaatgaaaggaaagtcctagttttatagaattcttgggatatagtacctaagtaagagctctctatagtaacatgttctgatgacacctgttttgctatggcacgccacctcccacctggttaaaagcatgtattttgcttatattttttaatcaggattgagtgaccaagtctattggaagggaatatgttgatcccttttccaacaaagaagacagggtcatagttagacctagtcatgggaaggaaagaccgcacaggagtctaggaaagtctagccgaggaaagactgcacatttattgtaaataccatgatttggggtaaaactctatagcttccaaattttattataagcgtagacattaaaaaaaaaagatgaaaatcaccccagggtccaagaaaatcaactgagggagtgaggcatctcagtct

SEQ ID NO: 832189 - DNA, 602 bp, Homo sapiens
aaattactctcatttgaattttatatttagaaaatgagcatgcagtattggggattaggcagtattaagaaaatgtatgtagaaagattatctaggatggaatcaccgaaaatcctggaatatttagcagacacttgttgactgattttacctgcagcaaatatgaggcaataacaactgtgtaaattatttagagactagtcatccatatggggattccttaaaatcatttcagaaaacaatttggcagggtattttctttatacttattttttccaagttcatgtacaaaagagatatagatccacacaaagtggattatcactgattcttttaaaatgaaattaaatattttaaaacattcaagtgacgattgggtgatctttcctagctaaagctttctttggtagtttatttatcttaaatattatttttgtctttcaaagggtattatatagtgaatgtaagagatttattaaaaaccttggattgcttgaaagtgctttaaaactttgccttaaaatctgcacataggcaaaattccygatattatgagttgggatttccagtgtaagaggatttcaaatcgctgctgaaaaaag

SEQ ID NO: 832190 - DNA, 591 bp, Homo sapiens
ccagtgtaagaggatttcaaatcgctgctgaaaaaagggcttgttacagatttctaagcatcctgtatcagaaaggcccagctacttacacartcgctgaaactaaaatgggacaggaccagacacatggaatgaaagagaccaatttagaccaagtgaaaggtatcaacttctcttaaaattagccttttattctagagagagatcttacacagctccaaaagcagatagaataatcagtatttacatagttatggatctctttgtatatggagatgggaattattttgtaaagatttccattgtttaaagcagttggagacatagtgttgggaagagcagttatttgggtgtttatagacatgcagttagagaccccaaatacttacttacaagtcacgtgaccttgaagcattcaaaataacctttatttcccctccataataacattttcggatctcagtcctgcactctcttgggattgttctgaagatacagtgagagaataccaaaatactttacacactacaaagcattatgttattaaaatttatattatcactagtaacaataaaaataaaacatgactgg

SEQ ID NO: 832191 - DNA, 600 bp, Homo sapiens
taatttacactcccgccaacagtgtaaaagtgttatttttccacaacctctccagcatctgttgttacctgactttttaatgatcgccattctaactggcatgagatggtatctcatggtggttttgatttgcatttctctaatgaccagttatgatgagcattttttcatgtgtctgttggctgcataaatgtcttcttttgaaaagtgtctgttcatatcctttgcctattttttgatggggttgtttgcttttttcttgtaaatttatttaagttctttgtagactctggatattagccctctgtcagatggatagattgcaaaaattttctccaatgcaaaaagtttctcccattctgcaggttgcctgttcactctgatgatagctttttttttttttttttttggccgtgcaaaaaactttagtttaattagatcccatttgtcaattttggcttttgttgccattgcttttggtgttttaracatgaagtctttgcccatgcctatgtcctgaatggtattgcccaggttttcttgtaggattttcatggtcttaaatcttacatttaagtctttgatccatcttgagttggt

SEQ ID NO: 832192 - DNA, 600 bp, Homo sapiens
taatttacactcccgccaacagtgtaaaagtgttatttttccacaacctctccagcatctgttgttacctgactttttaatgatcgccattctaactggcatgagatggtatctcatggtggttttgatttgcatttctctaatgaccagttatgatgagcattttttcatgtgtctgttggctgcataaatgtcttcttttgaaaagtgtctgttcatatcctttgcctattttttgatggggttgtttgcttttttcttgtaaatttatttaagttctttgtagactctggatattagccctctgtcagatggatagattgcaaaaattttctccaatgcaaaaagtttctcccattctgcaggttgcctgttcactctgatgatagctttttttttttttttttttggccgtgcaaaaaactttagtttaattagatcccatttgtcaattttggcttttgttgccattgcttttggtgttttaaacatgaagtctttgcccatgcctatgtcctgaatggtattgcccaggttttcttgtaggattttcatggtcttaratcttacatttaagtctttgatccatcttgagttggt

SEQ ID NO: 832193 - DNA, 592 bp, Homo sapiens
aaggccttttctgcatctattgagataatcgtgttttttgtcattggttctgtttatgtggtggattacatttattgatttgcatatgttgaaccagccttgcatcccaggaatgaagtcaacttgatcatggtggataagctttttgatgtgctgctggattcagtttcccagtattttattgaggatttttgcattgatgttcatcagggatattggcctaaaatgtttttttgttgtgtctctgacaggctttggtatcaggatgatgctggcctcataaaatgagttagggaggattccctctttttctattgattggaatagtttcggaaggaatggtaccagctcctctttgtacctctggtagaatttggctgtgaatcagtctggtcttggactttgcatggttgataggctattaattattgcctcaatttcagaacttgttattggtctattcaragattcaacttcttcctggtttagtcttgggaaggtgtatgtgtctaggaatttatccatttcttctagattttctggttcatttgcgtagaggtgtttgtagcattctctgatggtagtttgtatt

SEQ ID NO: 832194 - DNA, 597 bp, Homo sapiens
aaaaagcaggaaacgggagcttaaaaatagaaggggttatcttccaagaggctggaaagtgtcctaggggccaaacagccgaatgggatttgctctcaggcaggctggctgtggcacgtgttgattttcttaaactttaagaacccactaacttcagctaatgatgtctgggattatagcacccaaaatgtcacgatctactgtgttcacctgtctattgtcctttctcacatttttgcaccctacatgatacttggcaaaatccttcctggctttctcctttaggtgtcactctcaagaatgtgaagttatactgcaaaatgtgcagcctgaagcatcagaggttagaggcaaaaatctctatcctgctaataaagtttcaaactgaaggactcgccagtccctctgagattttgttttatgtaaatactcctgcctcctggagagtcctcccttatgactttgttagaaaggycatatatttccagatttcatttagggaaagcatttgttcattcagggaaagagaaaaactaattccctgaggcacactgacattgatgagaaataaagccagagcccaacaaggaggcgaga

SEQ ID NO: 832195 - DNA, 616 bp, Homo sapiens
cattttaagtaaatattacaaatatccattttatatgcccatttaaaaggaatacataatttaaggagaggtatgtgtcctttctatctccctagaaactccatagccttttaaaaactttcyataaatgacaggtttttttgagcttttatcttttacatttcattgtcataactttgttattctgaaagtattgtatgaaaggaatgttctaaagatagtagtgcaattaatagtggaaagtgacattaaaaatgcaaaatgaattgtggggtacaaattcagattcttcatttgtatgaagcctgaattgttatagagatcatcaggtctctcatgcttacaataaatgaattaatagtaattacaaattacagtgagacacatagtagtttgccatccctatctgaaatatccatagagacagaaagcagtggttactaatggacagcgagatggaaaagtagggagtgattacgtaaagttcagagtgttctgggatgatgaaaatattttgaaactggaaggaggtggtgattccacagaattctgaacacagtaattgccactgaattgtatactttaaaatagtcagttgtatgttttgtgaatttta

SEQ ID NO: 832196 - DNA, 576 bp, Homo sapiens
taagtatcaagcccaagtgttaattataaaggtaacaatgctctaaagaaagtaaaattctcaatgtcagcaagtttgccacactaagggcagattcctgaaagtagggaaacctgaggcatggaatggggacatcttagctgcatgtacttgaaattcctaaaactagatcccctgaaccctctgaatctgaggattcagatgcccctccatttgctaaagaaataagaaacacactgctgaggcagacaccagcatcattgagaataccagtgttggctttcctcttactgatagggctgacagtaagagatgttgttacttatctgggctccccaaaaacaatcagataaagaggagcctgaaatagaggccaggtgacagctattagcaatcaaatacatagtgagtatgccattattataatgagtgtcaaggtaggagtggtagccacagagtatggatacacattgctaaggagaagatcattgagcacagcgtccctgggggcaagacagatgygcaactaatgaagatatgcccaatctatataatcaaaacaaaaattatggataa

SEQ ID NO: 832197 - DNA, 597 bp, Homo sapiens
aatcaatgagtcgtcccacttcacgctgcctttgctctggagttagtcttgtatgaacggctaagtctttcatcacgttaaaatcattacgcattttatcagttagacctttaaataagacatttaaaggcatatggttaaagaaataataatcaggtctaaataactggagtatagggtgatggtgagtgggaattcccaggagacaaagcagttttaataaaaggttttctggggggagggaaggggaagtaaaggaatgtctgaggactcctaggaaagaaagggtaaatccagtggcttccttccgagtaaatgaaatgcaacagtacctgtaagatagcagagctcaggaatgagcatggcaggccctggcagtgtccccccagggccccgccttctcttgggctggctgaccaagacaggctgcttcaagtcggtgatctcttggttgtattgctgctcaagagacgaaagggtcgctgttcacggcaaatgcctcgagtagcatctcagtgggcaaaaagggtttcattttttaaaaaaataaagarctgatgccaatagcaaggctgataatagcttcagagtaaagtt

SEQ ID NO: 832198 - DNA, 599 bp, Homo sapiens
aggagatgctggggaatgtttctagacatctgacgcttataaggaattctacatattatccgagggtagatacgaaaagtcttttcttgacaaatcatcccaacatttaaaaacatttacctccagaaaagcatctgagtattttctcttagacgacattcctcaacgataacctcattgtgaacaaggatgtaacgcgtggtgatggttacaaatggtaacagagcttccagtaaaatgtgttctattagtaagccctcatggtgttttagctcagcagaaacagaaaagaaggctgatttccctccctacattatattataaaaactttcaaccatacagaaaaatggaaagaactgtagagagaacttgtaatgcccacactgagactgtgcacctggcattccgcttggcctgcttcctcccagcctctcatctccccatccgtccagtcatccatcaatccttcttggtcttttgctgccaggagcctaattggagctgtcggcggctctgtctctgggaggggacaygatgatacatctccattgggcttgtctgaagagcatatggaggacacacaccctggctgccggaag

SEQ ID NO: 832199 - DNA, 628 bp, Homo sapiens
actggaaaaagggaaccaggagagggcatttctcattatgtgaactgtaccaaataaaaagaggcattttaataatttggtaatgaataaaattatgctgtgattgccctaacaaatacatttacacacagctttaaacgcaacttgttccaaatgtgcaacaagtgttagagaattctaccaaagatattttggatttctcctgagatctaaccactggcatcttaccttcctgtagtattctaagaagctgacttcagagccgtcggctttcttaaaggtgctcttgggattctggtcccagtcaatatcatccactctgtatgtcttattgttatacctagggatcagttgagatttgactgcatttgatggaaatgtgaagaactaatattaaaaagagagactagacagcatgtattctctaaaatttcaaatcacctggttatatacaaggttggaaaaagaaggaacagggtttcttacagactatgccagatggatgggggaagtgactaaattacttacagaaaataaaataatttaaaaggataaaaatcactagctatttgtcctctccagatgagttatgtcatcyccaaaactatgatcctgggaaagctgaaaa

SEQ ID NO: 832200 - DNA, 606 bp, Homo sapiens
gagactccatctcaaaacaaaacaaaacaaaacaaaaaaaaggttacaagcctcaacaacttgcaygggatattttcttctcccagcacagagagctccacccaagccagaggatcatctgaaaatggcctaaagtcaagtgcatcttaaaggcaacaacttaaatagtccaaagatggcaaaagcatgacttggcaaacactacgagttcacaaggaaatttgagaatgagatggcctcaataaaggcaaagtcaaatttcaaagtgaccaggcaggatatccattattcatcaaaacgtaaatgtatgttacaagagtggagcgcaagctgtttgagaagtgttattattctcctgaggaggaagacacagttgctggggaaatgatggttgctttcacaggcggcgtaccttatctaatacagtggattgggtgtgatgacttagagatcaatagaggacaagagctggagccagatgatctggtttaaatcccagccccagcatctcacaacaggatcacctccagtatgcggtgcagcctttctgtgcctcaggatcctcatttgtgaaatggaaactataatagcatctatctcttggaa

SEQ ID NO: 832201 - DNA, 558 bp, Homo sapiens
ttctgaccctaaggactgcgagagaatatgtttctgttgttttaagccacccagttggggtgatttgtcagagcagccccaggaactaatagcagtcatgagtgtcagcctcccatggcacagagtagggccctgcagtgggggctggaagggtcttaaccaacagtaaccttacagccctctcccaagggaaggaagctactggattgcttccatacattggttgcaagcaacagaaatgaactttggccagtgccaatgaaaggaactaaaagggagcttgcagaattggggaaaaggatgggaaacaagcactggaaataggcagagactcggaaactcaggggcttggatgcaggggctatagggagcagtgctagagcaggaacttgtaggtcaggacgcaaggaccccagaacagccaacatgatcttgtaaaagaacagccaagttggaggactcatagttctcaattccaaagcttataaagctatagcaatcaaaacagtgaggtgytagcatgaatacagacatatagctgctcactggaatgaatgg

SEQ ID NO: 832202 - DNA, 590 bp, Homo sapiens
ctctgtgctcctttgagtcttctccaggactgcctgctaggttcatacacattgttgcttgtattagcagcccagtcttttaaataaaggaaatattaaaacttaaaatgaggaagactaacagaattctgattctcccagtggtgtctacttgggtgctgtactcatctgttttcatgctgctgataaggacatacttgagactgggcaatttaccaaagaaaaatatttaatggacttatagttccacgtggctggggaggcctcacaatcatggcggaaggcaaggaggggcaagtcatgtcttacgtggatggtggcaggcaaagagagagcttgtgcggggaaactccagtgttcaaaaccaaaagagagagcttgtgcggggaaattccagttttcaaaaccatcagatctcgtgagacttgttcactgtcacaagaacagcatgggaaagacccgcccccatgactcaattacctcctgctgggttcctcccatgatatgtgggaattgtgggagctacarttcaaaatgagatttgggtggggacacagccaaactatatcaggtgccttttttcaatgtca

SEQ ID NO: 832203 - DNA, 590 bp, Homo sapiens
ctctgtgctcctttgagtcttctccaggactgcctgctaggttcatacacattgttgcttgtattagcagcccagtcttttaaataaaggaaatattaaaacttaaaatgaggaagactaacagaattctgattctcccagtggtgtctacttgggtgctgtactcatctgttttcatgctgctgataaggacatacttgagactgggcaatttaccaaagaaaaatatttaatggacttatagttccacgtggctggggaggcctcacaatcatggcggaaggcaaggaggggcaagtcatgtcttacgtggatggtggcaggcaaagagagagcttgtgcggggaaactccagtgttcaaaaccaaaagagagagcttgtgcggggaaattccagttttcaaaaccatcagatctcgtgagacttgttcactgtcacaagaacagcatgggaaagacccgcccccatgactcaattacctcctgctgggttcctcccatgatatgtgggaattgtgggagctacagttcaraatgagatttgggtggggacacagccaaactatatcaggtgccttttttcaatgtca

SEQ ID NO: 832204 - DNA, 551 bp, Homo sapiens
ctgggctgaaatggcaccagcacagggaagccctctgtgaccaccccctgtgagcgtgcagcctagacacctacccttcgcctctcctccccagcttcactggtatcattagctagtgtagtgcccagcttaccttttctcttactcatctcccgctagatgctgagcccatgagggccaggattcttgagtgttttgttcacttttgtcttcccagtttcgatgatccccagtgtatagcaggttctcagatatttattgaacggataggtgaataactagtgccgcccataattcagaaaaacagcccctagtatttcctgggcatgttaaagttgaagggctctgccccaacagtggtccttgatccttgggtgcacatggcggtcaccagggagctctagcaacccctaatgtcggtgcgcacgcagttcacrgaacaatctcagctggagacctggacgtggatatgttagaaatctcccctgggaagtaagttacaccaggcagagaggtggggccgtccagacaggcgaaaaagcaacccggct

SEQ ID NO: 832205 - DNA, 580 bp, Homo sapiens
tatttactatttggactctgtaaattaatttaataggactactttcctcatagattagctgagatcaacagcactactggaactggaaatgcagattaaaggatcactgaagcaagcactggttacrtatgtaatacttgggagtaagtggctaacgtggaaacctggtgataccatggtagcacactgtagcaggaagaacatgggctcctgaacactcctggattttaatctggttctatcacctttcctgtgaccttgggcaagtaacttaacctcttcacatctcaattagctctactatcaaataagataatatttccccacaaggttgttatgtaagatagaatgacacaagtgccttgcatataacagattcttaaaaaaaaaaaaaaaaaaaagccagtttacctcttttccatgttcattattgaggcaagaacaaaaggcaccaaggaagagaaaggagtggactgggtagaaaagaaggatgccaaagagaaactcctgaaaattcctccttgaaaatcaggttcaatcaagagaaggtaagaaaacatttttgttttcttttctctac

SEQ ID NO: 832206 - DNA, 638 bp, Homo sapiens
caaatgcatggtcatgcctatacacacacacacacgtgaaaagactaaaagcacatttacatgctcattccataagtatatattcagatatcctgtctctccccacgtgtaacacaaagggatgctggaagctctactcttctttgcagcaacatgatggaatttgatgggatagaaattgctatttactgagaactgaacaaaaaacttacttgcaaagcagttttttggttttgtttttaaaaaaatctaaatccctaaataatatctacaactttgctcaaagattgagatagtctagatgctcaaaatgataatgaaaatcaatcaatttaagatactttaatatcttgatcggtcacttataatccacatattatgtgtgctctaaatgaaatattaaggcttgtcatggaaaatatcaaaactagcagtttatataattcaaaaaatatatgaaaatctgggccctaaagatagcctctagtacctttcatgactatgtctactaattatttcctaaagatcttaagctagtcatcatcttttaaggctatgctactttgcaaaaataaatttacagtaatagtaatgggaattktaatattatattagattaattctgtattatatccttc

SEQ ID NO: 832207 - DNA, 608 bp, Homo sapiens
agtcaacttattagatcctgtcattacttgaaactgctcccacttttgctatctttttttgtttgttgtttagagacaggctctcactcactctgttgcccaggctggagtgcagtggcatgatcttggctcaccgcagcctcaacctcccgggctcaagccatcttccgaattcagcctcttgcgtagctaggactacatgcgtgtgacaccatgactggctaatttttattttttagagacaaggtctcattatgttgcccagaatggtctcaaaatcctggattcaagtgaccttctgcctcagtctcccaaaatgctgggattacaggactgagccactgcacccggccccacttttagtatcttaaactcgggttactgtctaaccactacttcttgcttctcctggaaattcattcttatctcttcttgtcttgcacagagatttctattccttttaactcttgttttctcccagtttaccagctccctactgtcttctagcccttcyatccaggccctacatgctttatcacgaacctttaatgtctttgttactcaattctattcattccactcttgctaaactttctcagagctgttca

SEQ ID NO: 832208 - DNA, 655 bp, Homo sapiens
gaggtatgttgatcatggctttgctttatatcttgatattaaagctggtttatcatcctggtattttaaaagctgctttggggttttttttttcttttttttttttttaatgtaaactaacctcctgcatgacagaggttaaaattttgtctgcacttgagttcacttgagtttacatttgaaatgtgcatgtttatttatatagatttcaataaagctattcaaggccttatttagtcttttatttcttactcttaatcttttaataaaaatcccctactttatggttagatgactatatgctaaactttttagttataaatagttaatactagaaaggaaattatgtcagagcaaaatgaatcctactattaaggaccttttaaagttgatttttgcccactttaatatttattcattaaacatatgtttgtgtaccaatcactgttgtagagtctggagatacagcagtaaacaaatatccttaccttcacagagcttacattctttctgccatctaccaactaatgaactatatttccatttttctgaagatttaaagaaaagtcaaagctaaatcttttaaacctatattgkggtctccatcctaattcttcagagaccactttctttttaatgcctgtcattaacttct

SEQ ID NO: 832209 - DNA, 592 bp, Homo sapiens
cttcatgcagtcggctggtcctgtgtggggctggttcctcctggggctgcctgcccacctccagcctccagcaggtgggagtcctcctgggtccaggctgtcctggtgggacaggagggcagaggggaagcccgggaggaagaggctgcaggagtggggtccctgatactgccccatcgccaggaaggcctttgtctttcatgagctccatgcaggaagaaggcatgcagctgagaggccaggcctggcgtgtcctcagggactttgtgtggcagccacgggtgcctgctcacggacgcacctggctggccccacccaggcatagtgaatcagaccccaggcaatcccagtgacctctggagcctgagagccctggtgtagagaatgcaggacctggccttgctccgcctgcacacatgtgtgctgtgcacatgtgaaggagagccacggcttctgtacaatgtatgtgtctgtgtaacacgtgtgcccagcatgtgaaaggtctgcgtgcttcctgggctgtgcatgtggagcactggstatgacaggaacacacaacggacatggagtttgcaagtgtgtgtgtgtgctg

SEQ ID NO: 832210 - DNA, 647 bp, Homo sapiens
ggtccccggaggggtgatgctcagtgatttagacttttytccttgttcttccctttatttccaaagttttcaacagagatgatctatgatcaaaacccacggtgacaagtgagaagggaaaaggtgctggccctttactctgaagtgagtggcgtccataagacaaaaggcaaaggcagctgtgcacagcacgggactccagctggcgaggtcattcccctccgggggcggaatgaagcttctgcacggtttaccagaactgaacaagcaagtggttgacgagtgggaggagcaggtttctcgcagatggagagagaggccacaggtaagaagagaggaaggatccaggtggtcatggatgagagttggagaagccggcgtaaatcaaccccatctctacaaaaaatactaaaatgagccaggtgtgagccgagatcatgccagtgctctccagcctgggccccagagctagactctgtctccaaaaaaaaaaagaatgaatgaatggatggatgccttgggctctggagcctggctgcctgtcttcagatcctccctcccatgcttacatgctgcatggccacagacaggtttcaaaatctcctggcctctgtttccccatgtgtggcctaagctagggacagttc

SEQ ID NO: 832211 - DNA, 514 bp, Homo sapiens
tgccgaggtcccaccctcactgcccctggtgagctgtgtggctttgggcaagccagtgcccctctcagggccgcggtggcctcactgtcaaaaatgtcgaggatgggcttctccaggccttggctccagagcccctcagagctgagcctcacctgcctcctcctccagggcttctctccctggcaggggcagtgatcactcaggctgtgccagggctgggctgagtcctcagtgtggggttggctggagcagggccccctgttgccagcagtgtgactcatcaggtgttgatggggtgagtcatcagggggagctggggaacggtctccagggtctgagatgctggctcagagcagggctgactgacagtgcagcctgggaggccgaccctatgccagcaccgtgcactcatcgtggccccactcccacctcatgcttccggtcccctccccgggctgccctggtgagtcaggrcaccctgggtcctggaacctctctagtcctagtgtcacct

SEQ ID NO: 832212 - DNA, 589 bp, Homo sapiens
gagggaaagatggccacagcaggaccagtcagggagggcttcctgggagtggggacacctaggcagtggcccgcagggtggttaggacttggctgggctgagaggcagtgagaggtcactcctgttcagggcagggaacgggccacacccttcatagctgagccagggaacaggcatactgttcacgagcagccagtggagaccgaggctcagagaggacaggcagcccagcagagctgctcagcgtgaggcgcaggggctgggactcatccccacaccctcactccctcacctctgcccccgcatcctctccttctgccctggcaagtgtgagcatggctcccaggcaggctcactttcctgtcatgacttggcagcaagagctaaggggcttgctcttagctggcctggagttggacacactcaagtgctggccagtgaggtgggtatttggaggsacgtggatcccaggagcaggtgctggcaggacacgagtcccaggcttgggaggtcaggggcgacatcctcagacttgatctccatgccccaggcctggaatgtctgctggagctggggatgacccgagtga

SEQ ID NO: 832213 - DNA, 509 bp, Homo sapiens
tggaacatgggatggttgtaacttcttcacaggtgtcctctgaagaccgaagagtgtttgtaaagtgcctggcatttgtagaggttctaaacctggcaccagttattsctgggaatgatcattttcctgcaaacctaatgaaatatgtcccaatgtgtctgtttttgagagggggaaactgaggtttgggggaactgatctgtccagggttacctagcaaggaaggattccagctgggctgttttaccctctagggctgcctggcacccctcctcccactggtcctcctcagaccccaccacagggtcctcccacccaggtggctatacccccaccctggcctgcagctcaggccttggcagagccagtttctcagggcaaccccctatctggagctggcttcctggccgttgtcatgggaactgcttccttgttgccaaatgctgctgaccggggaaactgagttggacggatgggatggatgggacggatggagggaggaccggagc

SEQ ID NO: 832214 - DNA, 694 bp, Homo sapiens
agtctaaccagctaggattgcatgctcactamgaaatcctctagctatgttgtgttaacataagttagcatacaggaagactgtgaacgatggatagatataaatatttgatccacatatataattgtaatcaactgacataatgatttttcagttatcagtttttcattaagtgggctatctttaatctcggcgttgccagcataccacattaacatagcccggatagatctgtgaaatactgtaagaactgttttcctgtaggcactgttctggatggcatgtttgcctcactgcaggactcctcacactgcaacagaatccttatctcttaaatctgtgtaactctctttctatcatgtgtacttttcactaagtttaaagcactgcttacctctttctctaatatcttcaaatctttatcattcttttgagattccttctgtttaaaagccaaaaaaacttataagcaaatttagatgtcacagatatgacagccaaatttgtttttcagttatcagaaaagatgaagggatccaatcagttagtttctattttaaacattacactgttaaacattgtgtaggccactcatctgataaataaaatattctaaaaatctcaagacattttaggtttagaaattttcaacccaataaatcaggattttcctaatcagcccagtgaaaagaac

SEQ ID NO: 832215 - DNA, 597 bp, Homo sapiens
actgctatctgactgctctgtcagacaacagatgaagagaaacccctccaaaaagttgttatggtttctcactggactttcagatgtctgttcacagatgagcttctaattaaccagaaatctgtctcccacgaggtcaataaaaatctgacaccttttcagaagtacattttggagtgactttctggtcattttagagagcattaaaacataaaagcatttcgctttccaatggaagttcttttctattagtaccaaagatgaaatctccatgatcctttatatgtttctaagcagcatagctaaacatctcaaagaattttctcattatttttctgtaattcaaacctatgcaagcttaaagggaacaataatgatacctaggattggcttgtgtagacccagatggcttttgcatattttcattacacatttatttagtaatcagaagaagttattttgattcttatataaccagttcctcagccagagtaaagtcagaataaagtgaactatcaggcgttatgaatatacccatattagaggaaaataycctttcagccctatctttatggaaaaggacttaggaagtgcaag

SEQ ID NO: 832216 - DNA, 555 bp, Homo sapiens
gtatctgattagtctattaacacatgctcaggacktcttctcatagaaacttagcgttttgatgacgctttgtaatttgtaggtgaggtggtggtttctggcatcatattatagcagcaaggtcttttgcttaaatccatgggagtgggatgttcatttgtctggaatgtgcaagggaagacactttctgtctagcttctgtgcctttgaacatgccattcattctgtctacaattccgtccctccatctgcatgaggccgacttctatttgtccttcaaaagtcagcccacgtgtccttgctcaagaaaccttcctgactgcggtgctgctctccttccacctgcgtgttcctctagtgctagggtctatctctatttagcattaattcatctgtaatttctgcgtgtctccccaaacaaccaatctgcaagccccttgagggcaggactatgtcttgttctttaaaggaggattttcccagccagatccttcccgtcccccagctcactccctgcctgggtcagatgcctcttttctgggttttccctcagtg

SEQ ID NO: 832217 - DNA, 555 bp, Homo sapiens
gattctgtgttttgtctctgttcagacagtagtctaagactggtggggagactttttttttttttttggaaaaatgcactgaaagaaacaaaaaccaaagcagcttcayaggaagacaaagaaaaaccctgttgctgacagacacctgcatgaaagacaggaagcatctgacagagtcagaccaggcacccctgcaaggaagcagctactcaacggggtatgcttaaaagtgtgtttcattaaggtgtttacaaactgtgaccaaccactggtgggagctgtcctgcagctcaaaagcctcccttgatgctgagtgggtgctcaggaagatcaaatcaaactgatttgttatttttatagagtgctgtatgtatgtgtgtatgacagacagagaaagagagatcttccttgggcaccattctcttgcctgcagccagagagaaccatagaactcagctttctagagtagtgcctggttgaagagggagaattctaagtttagagcaagagtttgcaaactttctggaaggcagatagtaaatatttcaggttttg

SEQ ID NO: 832218 - DNA, 620 bp, Homo sapiens
cttcagaatcttaggacatggttttcttgcctccaaattatagcactggcccatccagtgaagaatttgttatgctggattgtatttttaaaataaaaagaaagaagataaaggacttgtctcagcatttatgtcagtatttatcagccttcatcagaaataaaaatttgtataaaatgagataaactacataattgataaagcacattataaaagaaattctttatctcattgccactatcgtcagcatcattgtaattattgtccctctttatctatctttgacatttaggtttgtcagtcttttcacaaacatttaatcagcaccgactgtgagcaggtactcttcccggtactgaagtttcggtcacaatggaacagacaaacatccatgcttccatggtatttgccttttagcgagagaagaaaaacagtaaagaagaaagtaaacaaatgaataagttaatttccaacagttataactcctcttgaaatgataaaagagaatgatgttactaagactggggaatgggaggctgtttggattaggagawctcaggaggactcataaggaggtaaagttttaactgagacctaaatggcaaaaaaaaaaaaaaaag

SEQ ID NO: 832219 - DNA, 626 bp, Homo sapiens
agtggcaggactgagttgctaaattaggaattagagggcttgggtttgaagcttggagcagccacttttctgcttctgggttctgggtttacttgatctctctgaatctcatagcctttctcatttataaagtgggtataagatctaactgatgggatggtgtgaagagtgagataaagtaaaatttaaattaaattacgttaaaaagcttactagagcccctgaaatgtaatattattaggttggtccaaacgtaatttttgccattaaaagtaatggcaaaaaccacaattacatttggaccaacctaataacttgaatgtcattcttggatcatggaaggtggaatgggtaccaagtgaggaagtgggtttatctctgtatatgtgtttgcaggcagtgagcctgcagggtcatcattcaccagtcaggagaggtcactggagaaaaaatgtgctcctatccctgggtacatggaggaaacataggaccaaactmtctcttggaagtcagatattctgtggcacagatggcctagatatagcaatgccacccatattagttatcaattgcagtgtaatgttaccacaattgtagcagcttgaagcaatattcatgtattatct

SEQ ID NO: 832220 - DNA, 597 bp, Homo sapiens
tcaaaaaaagacaagactccaggaaataggatccttatggaccaatgtctcagaattggagggaaaggtgagattttaggctcccttttcccatcactctcaataacacatctgctacttggaagggatgatgaaatatgagaatgcattcaattaatacattcaatgcttccgtcacagttaacatctttgaattcgctttggcgtaataaataccctacttgcatgatacataggcaaggtaaagtaagagcaaactgctcaggtcctggagccagactacatgagtttaaatcctggactaaagattactaacttcataaccgtggcaaattaatacacttctctgtgccacagtgtcttcatctgcaaagtggagataataacacaacctctctcctaatgttgtgtgtgaattaaatgcattaaagtaggcaagtgccgaatagtaagcatttagtattagccagtgggaagagagaaggcatccttagtttcataaagtctcctaggagtctgcaagagaatacyaggagtcactgctacgcagagcagagtcctagtaataattcccatgataacaaagcaaggcatttt

SEQ ID NO: 832221 - DNA, 658 bp, Homo sapiens
ctactaaataataaaaataataatccttaaaatactaatatagtttttagacaataatggcacttattaagtgcttaccactrttctgagtattagagcttaggcactattcttagcactttataaaaaattactttatttaattcttacaaaacaacactatgagggtgctactctcattatgcacaggttacagatgaagaaacaggtttcagggagttaagcgacttctccaatgatgcagagctagtaagtggcagacctgaattttgaactaggtttgttgagcgcacaaatctttattgttaaccacacaatagtttctcatattcctggaataatgagatcccaactttatctaaaattatttctgatttttcttcttacctttgcctgtcctgatgtaactgttacctgaactaatcagttagtcatataattagaagaaataaatgagcatttactgaatttctcctttagactaggtgtggaactaggcactttcaacattattcatttaaacctgacaacaatttcatgaagttggtattattgttcatattttaaacttgaacatgttgggactcaaaaagtttatggtactaatacaaggtcacaaaactagtaatgggcaaatccagggttgaatctgagttcc

SEQ ID NO: 832222 - DNA, 658 bp, Homo sapiens
ctactaaataataaaaataataatccttaaaatactaatatagtttttagacaataatggcacttattaagtgcttaccactattctgagtattagagcttaggcactattcttagyactttataaaaaattactttatttaattcttacaaaacaacactatgagggtgctactctcattatgcacaggttacagatgaagaaacaggtttcagggagttaagcgacttctccaatgatgcagagctagtaagtggcagacctgaattttgaactaggtttgttgagcgcacaaatctttattgttaaccacacaatagtttctcatattcctggaataatgagatcccaactttatctaaaattatttctgatttttcttcttacctttgcctgtcctgatgtaactgttacctgaactaatcagttagtcatataattagaagaaataaatgagcatttactgaatttctcctttagactaggtgtggaactaggcactttcaacattattcatttaaacctgacaacaatttcatgaagttggtattattgttcatattttaaacttgaacatgttgggactcaaaaagtttatggtactaatacaaggtcacaaaactagtaatgggcaaatccagggttgaatctgagttcc

SEQ ID NO: 832223 - DNA, 215 bp, Homo sapiens
attattgaatgcaggatcatctgagagaaagaggagaatcaagaaaaacctagcttrgttttgcactgggtggtggtgacttactaaacaagacagaccacggagaaacagatgaagggaagtaacagtggaaatcaaaaattctgtattgactacactaaatttgaggtgtttacaatatccataagtggaaatatttaaaattaaaaactttt

SEQ ID NO: 832224 - DNA, 497 bp, Homo sapiens
gtcttgaattcctgggctcaagggatccgcttgccttggacttccarttgctaggattacaggcaggagccactgcacctggctagaacgtttttatatgtgatgggaagtgtgcctctggcttctttggcttaatagcttcatttgtgcaagaagcatcaaaacacactggaacaaatctaggtttatatctgccctccaaataagtgttactcacatgttttattgatggcagtttctgatttgtaagaagccagttccccttttaaatgttatagctgttgttcctcttacaaatacttctgctaaattcggtgctcctcatttgtcgaccatagtcagataatacaaggggctggctaaacagaaaaggttttctcattaagtgaatctgaaggaggcctctactaattagttattgaattggatctttggggtaggtgcattaaaatgacctgttcttcttgaaaatatatagcatatagccctggacccca

SEQ ID NO: 832225 - DNA, 615 bp, Homo sapiens
atactaaaatcatttaaagataacagttaccattgcaaccaggcataatttgtttgtttataattgacagacaaagaactcacgttttctgcttatatctaatataacaaaagctcagagaatgattctgtgagtcatggaattttgcaactttattaaattttaaataggaaatcagtgaaggcctagagatgaaaatatctgaagcagcaaatggcatgtatagaattaataaattgtcatgctactcagtgtatttgtttagagagtagctatgctaactaggaaagtgcactcgaaacatcctctgattagaagactacctagtgactatttgccaatacctctaattcctgctggtaatcgaaaatagatgtctaacatggaaatttaaagagaaggattgagaatatatacagagccgtaagatattgcatacatttcatgaaataagaaaaaaaaaagaaaattagttttgaaaagaaaaaattaattgtgctttcaattgcttctatagatcagttatgatgaaataaaacagattttaatgaaataaacattttgtctaccrtaagtgtcagtcaaattagagcctatcggtttgtaataacttgg

SEQ ID NO: 832226 - DNA, 602 bp, Homo sapiens
catgatatcagctcactgcaacctccgcctcccaggttcaagcgaggtaaagcgaggtaaaggtaccttttcctccattttcaaattttcacagaatctggggacacttttaggactggaaacaaatttattstcttccatttatgatctaaagtctcccttataattttccagcctaataaacacctgttctaattacttttaatcattttctgctggagattttgtgtgtgtattggctataggcaggtgttttgtaataattaggggaaatagcctgtaagacactccttagttatgctctatatactaataaatgctactttttctatttgtctcatgtcttgaaagccttttgtgtgaatttttgataggtttccaaattctacaaaaatatacacatggattttgtattacttaggatcttagtgcaagagtttttttaatttatgtttttagagatgagatctcactatgttgcccaggctacctttgaatgcctaggttcaagcgatactcttgccttatcttcatgtggctggtactacaggcatgtaccaccatgcatggctttggtgctagagttttgttattttgttctg

SEQ ID NO: 832227 - DNA, 542 bp, Homo sapiens
atttttctgaatcaactattattatatagtgtggttaasgccactgtgctctgtcctgtcaaagtccactgatgattaaaatggttcaagagtatttaaagataatatatatattttttaaaaaatgtctgttcttgtctgtgggagttttgaagttttcagagtttttgtgatcaacttagttgaccttcttcaatgactagaaaattacagtttggggacctcagtagcaactgagtggccacctgtgaaaagtttctcttaccttcttgcacctttaaatgatgtaacacagaccaagcatcttatatgttggtttggagttcatccactataaggcaccaatacaactacatctgaaagtaagaggctcttcctatgtgctttccaacctgattcagcagtgattcccttgagtactctgaggtaccagaactttctcagagtgagggaaaataataaaaatgcagtatgccagccactcttggactttagcattaattccttacacatccttctttttttcccacttcacatcattc

SEQ ID NO: 832228 - DNA, 606 bp, Homo sapiens
attgatgcggtgtacgccattgcccacgccctccacagcatgcaccaggcgctctgccctgggcacacaggcctgtgcccggcgatggaaccctttaatggccggatgcttgtgcagtacattcgaagctgtccgcttcaatggtgagtgggtgcctgcccccctgcagcagtgaaggacagctggggggctggattttgctgttaggcctgggacaacctcagggtggaagggctgggtgaggctgagtggtctaatgggggtgcctggggctgagtgccaaagacatgagacaagttccggtccccaatttttaacactgctccctccccaggcttcagtgttccctgcgctggtttgcacagttcagatgctggggagcttctttgatcccttctgccaggaacccccagtgggtcacaccacactcccctccactgcgcagagcttgagggcatctggaccctgggggtgcacgtggggcacagttaagactgcgtggggcgcctacccagggacatgccgcccactytgagtcatgcgccaggcacaggcgtgggtctgacctgtcccttggcaccaggcttggtgtgtggtcagggctca

SEQ ID NO: 832229 - DNA, 600 bp, Homo sapiens
tgagtaacccaggaggcaaaagctgtattcagtgatttttgctatgctcccaataacactttcctattttttttttttaatgagatggagtctcgctctgttgcccaggctggagagtagtggcacgatctcggctcactgcaagctccacctcccaggttcacatcattctcctgcctcagcctcccaagtagctgggactacaggcgcccgccaccatggccggctaattttttttttttttttgtatttttagtggagacgtggtttcaccatgttagccaggatggtctcgatctcctgacctcatgatctgcccgtcttggcctcccaaagtgccgggattacaggcgtgagccactgcacccagccagttttctattttttaaagttccttggcagaaaaacttagcactttatgaaatgggtcgtttcagcccttaagtgcttgccccctcctgataaacttggctaaactagatgttagcctctgtaaagcccaacaattttgacttgtgagataactgtttttagcttgctaatcttatgattcacattttaraaatgctgaaatgagctaaatcacttgttgaagagtgt

SEQ ID NO: 832230 - DNA, 410 bp, Homo sapiens
atccctcacaacccacaagtgctctcacaagtcacctcccagtcatgatccttctttgcatttctttgtgcttttactacggaagtgtgcatctctacatactgtgatttactttgcctgtttatggatattrtgaaaaatggaattacagtatgcgtgttcaattatatggacgattaatctgtgctattacttgtcattttggctcactcctttttctatataatattccatttcagtgcatggaataccacaagttatttattcattttacaatgtacctttcatttgttccatttttttctctaataaataacagtaccttgaatgttcatatgcatatatctgtgcattcatttctctagggaatatacctacaaatataattgctgagacctagggcatgtgta

SEQ ID NO: 832231 - DNA, 530 bp, Homo sapiens
aatgatagacatgttagaattatctgacaaagatttttaagtagccatcataaacgtttcaaagagcaattatgaaaatatttgaaataaaaactctcagcaaagaagtgagaaagaaaaaatggaaattttaggctgggcgtggtggatcatgcttgtaatctagcactttgggaggctgaggcgggcagaccatggggtcaggagttcgagaccagcctggccaatatggtggaactctgtctctactaaaaatacaaaaattagctgggcatggtggtgcgcacctgtagtcccagctactcgggaggctgatgcagaagaatcacttgaacccgggaggcagaggttgcagtgggccaagatcgtgccactgtactccagcctgggcaacagagcaagactctgtctcaaaaaaaaaaaaaaaamcaaaaaaaaaaacggaaattttagaactaaaatacagtaaccaaaaattttaaaattcactgcataggcacagcagcagaactgagaggacagaggaaagt

SEQ ID NO: 832232 - DNA, 596 bp, Homo sapiens
atttaggctaagctttggttatctccagatttatgctcatggtatttccttgccctagaatgatattgcccaattttcacatggtggtttagtcatctcactgagtcctagtttaaataccaacccacttgggggaatttccaggaccacactttctgaatagaagcgcggtttatgactgtaatccagcactttggaaggctgagtcgggagaattgctggaggacagaagtttgaccccagcccctgaccaagatagctagaccccatctctacaaaaaagaaaaagtagccaggcctgttggtgcatgcctgtggtcccagctacgtgggaggctgaggtgggaggatcgcttgagcttgggagctcaaggctgcagtgagctgtgcttgcaacactgcactgcagcctgagagacagagcaagaccctatcaaaaaaacctcatcaaatataattgtactgtaatataaattttaaatttgtatttatttacttgtttattaactgactgctrgatttaattttgagctcagggcagtggttatatgtactttattcacttacttgttaccagaaaaatacagtgcctagaa

SEQ ID NO: 832233 - DNA, 589 bp, Homo sapiens
atatggtttatatttttaattctgtttatgtgatcaatcacatttattgactttcctatgttgaaccatccctgcacgcctgggatgaaactcacttgatcatcatgamttatcttttgatgtggtatcgcattcagtttgctactatgttatttaggatttttgcatctaagttcatcaaggatattggcctgtagtttgggggtttattatgttcttccctagttttggtatcagagtgatactggcttcatataatgagtgagggtggactccttaatctttcggaatagtttcagtaggattggtaccaattatttgaatgtctggtagaatttgtgaatccatgtggccctgggctttttattgttgttgtttgcaatttatttattactgattcagtctcatggcttatttgtctattcagaatttctgtttcttcttggttcaagctaggagggttgtatgattccaggaatttatcagtttcctcaagatgttcctgtttgtgtgcacagagatgttcataatagtctcaaatgatctttcgtatttctgtggtatcagttgtaatatctcaattttcatt

SEQ ID NO: 832234 - DNA, 413 bp, Homo sapiens
cctgcaggtttgttatatacatgaacttctgtcataggggtttgttgtatacattatttcatcacccaggtgctaagcatagtactcgacaggtattttctctgatgcttacccttctttcacyttccaccctatcgtaggccccagtatatattgttcccctctatgtgtccatgtgttctcatcatttaacacccatttataagtgacaacatgtggtatttggttttctgttcctgcattagtttgctaaggataatggtctccagctccagccatgttgctgcaaagcacattatctcattctttttatggctgcatagtattccatgacgtttatgcaccacgtttttttaatctagtctaccattgatgggcatttaggttgattccatgtctttgctattgtgaat

SEQ ID NO: 832235 - DNA, 615 bp, Homo sapiens
gagaagcagaggttgcagtgagccgagagtgagtgttgccattgtgcagtgagtgttgccattgtgctctagcctagacaacaagagtgaaactctgtcaaaaaaaaaaaaagagttagcaagtcatttatcaccttccaaattctgattccaaataaacatttcattctttcatgtctcctagaacctgaattcaagccacatcatcctacttcattcactaggccctgcatcctccccactcaacatctcccctcgttattttctacttgccaagtgtgctaaccttttccagttaaaaataacatttcccctgtaaagccttagaattactcacactaggggccgaataagcactttgagccatgattatgctcctttatcatattcttttgttttgtatttcagaaggattatcctcccacctttataaacattttgtagaaagtatgtttttttaatttgtgtttcaagtatagagccaattgtgtcgcaccgataattccctgatgcaacttcaaagcggcactactcayataattgtaccccaggtggttccatccatagagcaaaatgtaaatactctttgcaagttggagaactcagctggttctt

SEQ ID NO: 832236 - DNA, 668 bp, Homo sapiens
ggtctgcggcttcactcctgaactcagcaagaccacaaacccaccagaaggaagaaactctggacacatctgaacatctgaaggaacaaactctggacacaccatctttaagaattgtaasactcaccgcgagggtctgcggcttcattcttgaagtcagcaagaccaagaacccactggaaggaaccaactctagacacattttggtgacccagatgggactattgcctatcgccaagcagtgagtaccatcagacccctttcacttgctattttgttctatttttccttagaatttgggggctaaataccaggcacctgttaaaagctggccagttaaaagcgactagcacggccaccagacttaagacatggttgtcaggctttctgggaaagggctctctaacaacccccgactctttggaattgggagtgttggtttgcctggaaccagcttccgcttttcctgtacttctgggctgagccaagggttggcagagacaaaagccattcagctctggggtcccgacaacaagttggttgaccctgcagccatgagcagaactctcaaagtcatgtcgcccaagcgagactcacccatctatcctatctatcctgatgcttgcctcctgggtcctaatgcctgtcagacaaacttcctcccgcct

SEQ ID NO: 832237 - DNA, 543 bp, Homo sapiens
tgtttttttctctcacacctagaaaccattaaactccaaacaggcaaccagagcctcagatgatggcttacctttgctaggaatacttaratagacctttgggaggagtctgactgctgttttcctccaaaacaatgacccctgtcagcaagatgcagctaagacctgtcatcgtccatattctaaaggcagttagatgtacttcttcagaaggggaaaatgatacggaagtgctgggaaaggaagaacggtccctttaaatgatacggaagtggggaagggaagtgctggggagaggaaaggtgtagtccctggctagggctccaccctcagggaaataggtgaggtcaggcactcctgccttcatgcccaaatgttgcatttcccaagaccgccctggcctgccatgtccccatcctgtgcctctaaaaacccgagaccctagcagggcagagacagaagcagctggacgtcgaaaggagcacatcagcggaggaacacacaggtggctggacgtggaaaggaaagcaccagcaccggcat

SEQ ID NO: 832238 - DNA, 621 bp, Homo sapiens
aaactagaattgattttgcatacacttatttcttatatttactaaggkgtgattccagcttctgtataagcatgttaataaataatacatccttttgtcagctttagcaaatctctatagtatacaatatttcctcttctttccattagtccgtttggcaaccatttcatccagcagcgacacacagtcaagtgaaactatcctaagcattgtccttatccaagacgcattgcagcatttcactgtgagggtggcagcactgggtgacctgtggcatagccctcagtgaagtgaaaaccatttcactagctgtcttttcaactatgacaggccttagtcaaaaaaccagagagtgtgacctgccaatcacaggagtgaggggcccgagggccatatgtcacccgattctacagcctcttctgacttgcagtataagttaattcccagtcagcaggcttctctcacccaagctttgcagaaacaagagcttttccatccacacttgtaacttgtttggtcatggtgttgggtgccttcaatgtgaaaattatttcccttgtggtatctgtcattggttgagctatgagattattggtctgctggatccacaattccccagaa

SEQ ID NO: 832239 - DNA, 630 bp, Homo sapiens
ttttaaataaattctggatgctagtcctttgtctgatatttataatgtaaatattttcttctgtctaatgtaaatatcttcctctgttgcttgccattttattctccttaaagtaagaaaagattcttggccrggcacagtggctcacacctgtaatcccagcactttgggaggccaaggcaggtggatcacctgaggtcaggagttcgcaaccatcctagccaacaaggtgaaaccctgtctctactaaaactacaaaaattagccaggtgtggtggcaggcacctgtaatttgtacttgggaggctgaggcaggagaatcacttgaacccgggaggaggaggttgcagtgagccaagaccgtgccattgcactccatcctggcccacaggagtgaaactctgtttcaaaaaaaaaaaaagagtttgttgctcccaccgagttctgaagaacgccagcagctcgctgcttaaaattaaaccacagggttccatgatgggtcaacttgatgggaaagtcatcatcctgacagccgctgctcaggggattggccaagcagctgccttagcttttgtaagagaaggtgccaaagtcatagccacagacattaatgtgtccaaacttcaggaa

SEQ ID NO: 832240 - DNA, 630 bp, Homo sapiens
ttttaaataaattctggatgctagtcctttgtctgatatttataatgtaaatattttcttctgtctaatgtaaatatcttcctctgttgcttgccattttattctccttaaagtaagaaaagattcttggccgggcacagtggctcacacctgtaatcccagcactttgggaggccaaggcaggtggatcacctgaggtcaggagttcgcaaccatcctagccaacaaggtgaaaccctgtctctactaaaactacaaaaattagccaggtgtggtggcaggcacctgtaatttgtacttgggaggctgaggcaggagaatcacttgaacccgggaggaggaggttgcagtgagccaagaccgtgccattgcactccatcctggcccacaggagtgaaactctgtttcaaaaaaaaaaaaagagtttgttgctcccaccgagttctgaagaacgccagcagctcgctgcttaaaattaaaccacagggttccatgatgggtcracttgatgggaaagtcatcatcctgacagccgctgctcaggggattggccaagcagctgccttagcttttgtaagagaaggtgccaaagtcatagccacagacattaatgtgtccaaacttcaggaa

SEQ ID NO: 832241 - DNA, 550 bp, Homo sapiens
tatattctaggtaattttcattttaagtatatacatatgcttaagacaaaaaaacactaaaagattgtaaatgtatgcttcaaaatgagagcaatgtttgcttctgggtggtggtatcattgctgtcttcatttaatatgttagacttttctacatgttatcagtgttctacaacatctatattatttctacactcagaaaaaaatggtaactttaaatgagaatcatctaaaaacgaaatggctagtgtaacatagtaattaaaggaatatactggaattgctgaatcaatattcctataaaattatccctcatcaatttttgtgtggaagagagggcaattaaggctgctggagctataccaattatggaataaagactggaagtgctaacaggtgttttgttgtttaataaaactaaacaaatacacagataatacctaaaaactcatataaaaaagatgtgaattaaaatcctagatgcattataaatgccaatggaacayagtgattcaaataagagtcaacccattttaatcatttttcctaga

SEQ ID NO: 832242 - DNA, 495 bp, Homo sapiens
tatggctatgatcatgcttccagccaccacagccatagttcattgagtagacaatgctccatctctcaggaccatcggtcattctatttttctctctraagcactcttttgcttgcctttaaaacttccactactcccacttagaacagattagtttttacaggttttcatgaaacatgttgctttcctttggatcacttatctccatttttagttgaatattaatttgtgtcatcaacgttgactcctcaactgaactgttaactccccaagagcaggtactacatctgtgtccctgaccgctggctcccctgtgcctatctcagtttctgacacacacaggtttttgaaaaagttaatcacttaagaaaattattgaactgctcagaaacaaaatttcaccaattataaaatggggataataaattacttgttagattaactgagagaatgtgcataaaaactttgcctaatgctctaaaatatagggtggga

SEQ ID NO: 832243 - DNA, 598 bp, Homo sapiens
atactgtaaaagaatataaaatcaaaaacgaaagttcctttctctgttattacttccagctgtaatctacagttgtaaccacttaaaattgctttttgttttcagctcttatgtggttatcattggatctctaagttttatgtttttatttctatttcttgtttcatcaactttagacagcatctactaacttgctgctatgaaagatgagtttagatcatcacactaacttctaccttcccgatttctatatgcaatttttgttatttatattattatgattattcaatattacatttttgactttaaacaatatttttaacaaacgtttcttgcttcatgtaatttaaggtagctatttatctcacattgtataagaagaggaaagtagtgtacacacatttttctttcattattcttgccctttacatttcctaagttctgcccaccgtgccactgtttgattttgtcaacttatgtcctgttttgttctgtcaagtcttatgttatcttctgtgttttttcacyaaaggttgattttaaaaattataaacaaagcaacctcataaacatgagcattatgtaagtgtgataaata

SEQ ID NO: 832244 - DNA, 543 bp, Homo sapiens
acattcttctcctctctttggacatayagcgagtcttacttgctattaggtgtggccatatgacaggcctgtagctaaagaattgtgagtagaagagaagtgtgcactttctgctcaagccttttaagaagactgtgccttctctttcctgtcttgcctcttcacttgctaaatgcaaataacgatgggaccctaaaggatagcaggactcctaaatggaaggaacctggatccttgaaccactgagcaaaactaagctaatactgtttaggaacacttctttggatagttgatgtcagtgaaaattaaacttctatctcgattagctcactataaattttgaggtcgatttgttacagcagttagtttcttctaatactgaagtattaacttggacaattttattaactagatatttttactgataagaaagtaaaagagtaaagccactaaagttgtgaatgtaatattattgttgcacccattttaaaaagccatatgcaggagatttccgaattggtttaattgctaaagaaagaaatg

SEQ ID NO: 832245 - DNA, 579 bp, Homo sapiens
cattaaataaattgtcataaggtgtgcctggaccaccagtggataataaatttcttttcttttctttttttttttttttgagatggactctcgctctgtcgtccaggctggagtgcagtggcaggatctcgtctcactgcaagctccgcctcccaggttcatgccattctcctgcctcagcctcccgagtagctgggactacagacgtccgccaccatgccgggctaatttttttgtatttttagtagaggcggggtttcaccatgttagccaggatggtcttgatctcgtgatccacacgcctcggcctcccaaagtgctgagattacaggcgggagccaccgcgcccagcggataaatttctttaaaatagatttgggctcaatttttcattccataaatatttgttgaaatattactttgtggaaggcactcatcagtgctacttgacaggggatttgtgccccccttcaattagtaggattgaaaattctcwtttcttttattaaaacatcattttttaatttaaaaatctgataaattgaaataatcacttttaaggggctttaatattttaaa

SEQ ID NO: 832246 - DNA, 422 bp, Homo sapiens
aactcaacaccttaagtgagtcattacaaagaaataatttagcaatttacttgtgacctagtgggcgtcatcattattattattacaggcttggcaaattttggcttttcaattattctagaacttagttaatatctgtatagatgcctcttgtggctttaaaatgttgacagctgattaaacttatcttttctgagtaatcagtctgaaagattcttttttatttaatctagaagttttattaattgattttttaaaataggctgacagatgctattatatagccacaggaatagctaacattttacaaattgacaatagtaaatgttgatgagaatacrgagcaactggaactctgatacattactggaagaagtataaattagcacaattatttggaatagtggcattacaaattagag

SEQ ID NO: 832247 - DNA, 598 bp, Homo sapiens
  misc_feature 588: n = A,T,C or G
ccactctatgtgttgtttatytgactcatagatcgccataccaaagagtgggaatgcaagctgcccgaccccactgcactcattcctcaactttgccatttcttccatgtctctttttcaaggtttccagcaacattcacccaattttttgactttgcccatgcaggaagatggtaaggtagaggacaatttaggcagcccaaaagttttacagagtggctgccgaatatgtaaaatagatccttcattaagccttggtggtggtggctagcctccaagagctggtattgctctcagcttagcagctatttttcttcgctgaaagcttcaatatccaatttttagacaacaggaaagatgtcatttgacatttcatattatcttgtatatcagcatgcactgattttctttccctatcacaggaaattttgcctttgattattgtttctattctaatgatgttatctcttcagggatagctaacttctctaagctaaagctctaatattacccattcattccttcattcactcactcaatagttcattcaataaatatttattaagtaaatagtaccaggaatctttnccaggtatag

SEQ ID NO: 832248 - DNA, 480 bp, Homo sapiens
gttggatttattgcctcctgttatctgaggattctgtgtatgtgtgtgtgtgtgtgcctttgtccacaaagatttaattgcaacctccaacagggttcattcagacccttagctccctgcgtcaaaggcaggaaggcagggctggagaggataaagagagggcagatattagcctaagcaaagaggcactggactgtactgttttgcatctgtgcttatctatcatcgaactctttaactcttgcctgggtctgaatacaaattggaagccaagatggaaccagtgtgcagttcctgttccttgctacttagtcaaagtggctccatgtaccccaattagcttcctggaaagaaacaatgtatgttgttctcaagccataaaaacccaacatctgtggcctctgtaaaggcttagattatgcactgtgtcttcacatctcaatactggctcagtgcctsatacatggtagcatccaataa

SEQ ID NO: 832249 - DNA, 623 bp, Homo sapiens
ttaataatcaaattgttgtccattaaaaatgaatgagcastcaacttcctccctttaatcatagaataaaaaaaaaaactgtgagtactgtggaatggaaattcacatacactgttagtagctagggaaataccattcttttagaaagcaatgcggctttctatcttttatcttttaagttataaaatgtatgttgcttttgacccagtaatttcacttccttggaatctatctaaaaaggtatgctaaaatatgggggaagggagggaaatcataggtacaaaatttttgtcataggatttagagaaaaactacaaacatctcaaatgtccaactgtagaaattatttaagtgcatgagcttgaaggactgtcatgtggcccttaaaacagatgtaaaaaaaggttatgatgaagactatatatcaaactggaaaaaactgtatatataaaaataaatatataatttatatttatagattacatatataacctgtaatttatatttatagattacgtatataacatgtaatttatatttatagattacatatacaacatgtaatttatattctataatatgttatacataatatatttaatttatattatatgtatatacac

SEQ ID NO: 832250 - DNA, 522 bp, Homo sapiens
atggagacaggcttgtcaagtggcaagcaaaggagcgtgctgataggcattctggtgatgtatttttatgccatgtaatagatccccctgacttcagtggcttaaacacatggtcatttackgtgcttagggatctgagggtaaggactgtggcagggcagagtggggaacaaggctctgctccccatggggtcggctgcgtcctgggtagtcactcagctgcactcagctggatacgggacctagctgagactctgggacaagtggcccctcctaccctacgtggcctttccagcaaaatgggagggtgggcttcttctgtggcagcttagggctcccgagagtataaaagcggaagtgggccaggcacaggggctcatgcctgtattcccagcaatttgggaggccaaggtgggaggatggcttgaggccaggagtttgagaccagcctgggcaacatagtgagaccctcccatctccagaaaaaaaataaaaaatgagccaggtatggtggtgcatgct

SEQ ID NO: 832251 - DNA, 587 bp, Homo sapiens
tacaaccaacaacctgatgttgaatatttaatttttttcaattttttagcatattgaagagtatcatgatgaagattttattgtacctctgttcttaattctgaaaataaattcttaatagtaacatttytgggtcaaagcatatgtacatttgataatttaattatgtgtattgcaatttcaaggatcatcactaaaataaaaggaataaaatatataaattctgcacaagaaaaggaaaatgagatgattaaaataatcagcataaaagttaaaaaataagagaaaagcaggctagaatatgtatatcaacaaataccaagaggcagatgtaagtctaaatatattaaaacttacattgaatatgaaaggcctaaattctccagttaaatgacaatattagcagattaaaaaaaaaaactaaatgtatgatacttatgtaagtcatttaaaatagaatggttgaaagtaaaaacacagaagaatatataccatgtaaaccctaataaaataatgctactgcaaatattttaatacaaaaaatttaaatttaaaaaactagatataaaaggattactctttaatta

SEQ ID NO: 832252 - DNA, 518 bp, Homo sapiens
tttgtgagcacatatataaatggtgaggcactcagatatgcacatatycttgctcagggaccattttgggcagtggtggatgagagggctttgaaagtcttgaaagccttcagtgggattaaggacctctgaagggtctggttcaaggcttaggtacataaaaaagcagtgatgtagagttgagatcaggagaaatgggatcaatcctggttctgctgtttcctacttgtgtgattttggacatctcctgactgcagtccatagttgggtctagttggttcagataactcccttcaacaacagcttagatgtttattgaaactcaacaatttatagacacaaaggactagttgagatgaatcaaatttacacaaaagatgaaaatcttacagtattgtacatattataagattttaaattatgtacaatattataagattttaaattaagtataaaaaatgtttacagcagcaaaatgaaatgataaggtttgattgtggtattaatttatttttgag

SEQ ID NO: 832253 - DNA, 668 bp, Homo sapiens
gattcgttttcttcttacctgtttgtgtcctccaaaatcattacgagaggagtcttagaaacaaaagtgaactgcaaactgtgtatttcagagcttcacaaactcacctttctattttgtcttgtactgttatgtaaaatttgctccagcattttgctcagcaagatggcaattattaacaatatatttctctaaactgttgctgcaaagctattattcatgcagggctacaaccgagttaattttggaagagagctgttcaaagaggcccagagctgtagcgcttatgaacactgccttttctcttatttctaattagtgtgaaatggttccaaacaggagtcagccccacagaagtctgtgtagcacaaagccaggcttgttaacggacacaggaaacagttttgttttgctgaataaacaaatgcgtcataaaagcttttcaaaaggaacacaatctgatttaccacactctttaaatgttgaatgttgtttatatgcctctgagtcctttttattaaaattcgaaaggcctactcttatgagtcaatatagatgatatgtttgtgatgtttccccgcagtagagcagtagacttacctagtaatacattttcccttcgcttttcattttataawttaacttttatcttttgttttgtgtgtttt

SEQ ID NO: 832254 - DNA, 490 bp, Homo sapiens
taccattaaaacaattttgttatcaataattacaatattgtaagaaaatctgttaattactttacaggatttagcttgttttatcagtgttttcttccaatataaattccccacccatgttgctgataattkgtttgtgtaaatacttaaaatggtgtaaagtatagtttactgcaggagatcttctgatatctgcattagatgaataaattggacaatttcatctaatctaaattgtagctcaaatttctcacttagttttcactattgtcaaacccagagatctaactagtcaaatttgacttaatcaaatcacacaaatcctggtcttgaatttgcacaagatcactcagtaatgatgtgtaaaattatgctaaatttctgtctcgtcttaagaaattaaatatgtcttaagttgtttgcacccttccaaaatgcctattatattttaagtgcccagagtgggtccttaaataatgttatctgagca

SEQ ID NO: 832255 - DNA, 643 bp, Homo sapiens
acacataaagcactatattattatttgaaaatgtgcttcggtaattttcttttttaaatagagacagagtctctctatgttgctcaagctagctttgaactcctgggctcaagcaatcctcctgccttggcctcccaaagtgttgggattacaggcaggagacatcaggcctggcctgcttggttaatttttaaatggatattagaaaaaccacttttagtaacttaatcagaaggaagaggaagaaagaggaagaggaggaagaagaggaggaggagcaggaggaaaaaagacaggaagaagaagcagaagcaggagaagaggaaaaagaaggagacaaggaggaagaggaagagcaagagggaaggagaaggggaaggaaagaaggaaaaaagaagaggaggtaaagatgaagaagaaatgatattaccagagaagatctaaaataaaatcttataaaataaccattcatccatactgatataaacaagtgattttataaacaaattaaacattgagaaagatttttcctaacaaaataatttaaattaataaatttagaatgagtgarggaataggaaaatcaccattagaatacagtggtaataattgctgtagtcaaaatccactggtgaatgccaaa

SEQ ID NO: 832256 - DNA, 682 bp, Homo sapiens
tttgggattatgttaaatgaccaaacctaagaatattggtgatcctgaggaaaaagagaaatctgaaagtttggaaaacatccttgagggaataattgaggaaaacttccttggctttgctagagatgtagacatccaaatacaaaaagctcaaagaacacccaggaaattcattgcaaaatgattatcacctaggcacataatcatcaggttatctaaaggcaagatgaaggaaaaaaatcgtaagagctgtgaggcaaaagcatcaagtaacctttaaaagaaaacctatcatattaacagtagatttctcagaagaaactctgcaagctagaagggattggggtcctatctttagcctccttaaaaaaagaattatcagtcaagagttttgtatccaatcaaactaagcttcataatgaaagaaaaatagtctttttcaaataaacaaatgctgagaaaatttgctactagcaacacagcactaccaaaactgctaaaagaagctctaaatattgaaacagatcctaaaaatacatcaaaatacaacctccttaaggcataaatttcacagaacttataaaacaataacacaatgaaaaaaacacaaggtattcyggcaacaactagcacaatgaatagaatagtacttcaattctcaatactaatgctgaatgtaaat

SEQ ID NO: 832257 - DNA, 636 bp, Homo sapiens
aatttgtgtttctaccatatacatcttaggattgttttttctatttctgtgaagtatatcattgatattttgatagggattgcattgatgctgtagattgctttgggttgtacacatataaactatggattcttccaatccatgaacatggaatatctttcctgttttggtatctttaatttctttcatcagtgttttacagttttcatagtagaactctttcacttctttggttaagttaattcttgggtgtttaattttatttgtagcttttgtaagtaaaattactttatttattttttatactgtttactattggcgtataggaatgctattaattttgtgtattgattttgtgtcctgcaattttactgaatttatcagttctagtagtattttggtggagtctttaggtgtttccaaatataagataatatcatttgtgaacaaggataattcaactctttaatttccaatttggatgccctttatttctttctcttgtctgattgttctagctggkacttccagtacaatgttgaataaacagtagttattcaaaagtggacattcttgttatattctagattttggaagaaaggctttccatttttccctttttggtataatactagc

SEQ ID NO: 832258 - DNA, 614 bp, Homo sapiens
gctaggattacaggcatgcgccaccacacacggctaattttgtgcttttagtagagacggggtttcatcaggctggtctcaaactcctgacctcaaatggtccacccgcctcagcctcccaaagtactgggtgagtacaccacacccggccttgtgagactttcatatgttgatccatatttttgccaagctatataattctgagtctgtgtgggtcgtttgcttaataccaaaacattttcccaatgacaaattctttataaactcattttataaaattctttatacactcatataccattgttccatcatataaaggtgccatcatttaactagtatcattcagctattaatcttcatccagttttggattcttgtttcataaacactgctccttacttaagtctgtgcatttctagttattccttaagatactctctgagaagtagaatttctgagtcaaaggcactaaatttctttttcakttcttggaatttgctaactgtcctgcaaaaaaagcttcattcattcattttttctgttttaatatacctgtatgggctgccatatcatagttggacatttttcttgcttattggtatataaaataaagg

SEQ ID NO: 832259 - DNA, 589 bp, Homo sapiens
aactctttctgatatgcttgcatttaaaatcaggctttttctcccttttggaaaaacacagtccttgtttgctttagggaagartaaaggtcagtgcgctgcattgcattaatttcgaagggaaagatgagaagacatcttgaaaggaatggctggctttctagagaatagtagaggcttaataggtgtcatagaaaaaccagggttggacagtggtagtaaaacggcaaaacagattttattcagaaaaactactgcagtaagaggagagagacctcggtacagaactgctccactgcgaatacaaagaaaagtaggaattgatggcgggggagccggatgtcagtggatggaaaattattacgaggaaacacaggggtgtgcattcttgctgaaggcaggccagagttatcagacatcacctgagggatggagggggatgtggaacctaatcggctgtctagggtgatcagatactgaagttgggggattctggtcaaatcaatttagcaggattcttggtaaaactgggcgatgcaaagacagatgcgttgagtacaaagtccaggccttattgggaagaggattt

SEQ ID NO: 832260 - DNA, 405 bp, Homo sapiens
caccacgcccagctaatttttgtatttttagtagagatggggtttcrccatgttggccaggctagtctcgagctcccgacctcaagtgatctgccagccttggcctcccaaagttctggaattacaggcatgagccaccgcacctggcctgtattttcttttagtacttttatggttttattcttttaagtctttaatctatgaaaatatttttacatatgatatgatgtaggaatctaacttttttctttcttaggtaattaactaattgtatattgttccaatactattttccaagtgattttaatatgttagttttgtcttatattttgttgttctaatttgcatcttttttcctattatatttttataaatgttagaaatggtatattaaaaagatactgg

SEQ ID NO: 832261 - DNA, 405 bp, Homo sapiens
caccacgcccagctaatttttgtatttttagtagagatggggtttcaccatgttggccaggctagtctcgagctcccgacctcaagtgatctgccagccttggcctcccaaagttctggaattacaggcatgagccaccgcacctggcctgtattttcttttagtacttttatggttttattcttttaagtctttaatctatgaaaatatttttacatatgatatgatgtaggaatctaacttttttctttcttaggtaattaactaattgtatattgttccaayactattttccaagtgattttaatatgttagttttgtcttatattttgttgttctaatttgcatcttttttcctattatatttttataaatgttagaaatggtatattaaaaagatactgg

SEQ ID NO: 832262 - DNA, 625 bp, Homo sapiens
gaacagtgatgtattttaagggtacaataagtaagttaaatggtacatgaaataacatgaatgagtatgttgcttttcttaattatttgggacaaaggtaatgtctctaaggatactacwtcttaaaaaattttttctaaaaagatactcttctcatgccttttcctatctaaggatacttctacagacagagtacttgactctgtgcagtggaaggggaaatctgatctaacattataggtagattgatttgaatcttttaggggaaggttaagaggaagacatcaataaaaatagcaatatttattaaagaaggttgtctaattttaagctgaggaaaaagggaagaaagaaaagcagacaaggagacaggtttactattagggtagaaaaaaatcggtgtgtgtgtggctttcccactattatttcagaatggttaaaatgtttatattactaatattgtttacccacagaatgagaaatgtttgttaccctaagctacatctggatgtacatcaagtgacatgcctttacaaagcatgtcactatgatacgatggaacacagcaaacatatcccacggtcttagtttagtgaaggaactcagattctttcctttcagaaac

SEQ ID NO: 832263 - DNA, 600 bp, Homo sapiens
aaatgaactgcaaaaccaatttgagtcatcatgtactattaaagtcatcctatcaataataagaaatataactgcatatcaactccgtwaaattatcaaacatgtaatgggagaaaagcatcttaatttaatcttgaaatgctagcttttataataaccattaagggaggcactgaaaaaccaaacccattggagggcatacagttttctctcatcgtttgtagtttgactgctgaaaagacccatgtcattacagtcctatttttctaactcagggttctctttttctttacacaaaagatattcaccattgttggcgaggataactgaaaggtattcctcatagaaagagctcacatacagcaataagctcggagatcgtgtggttcggaagctcagtgtgatcatttctctggtcaatgttacatctctgtataatgaagaaacgagagagctggagttttcacttaaagtgtaatgttcttgaaaatggtatgtcattgaggagccagttgcaaaatatgcggaaatctctgaaatgataaatacatttttgttatgttaacaaaatgtaagtccaacggtcttgttttaagtaca

SEQ ID NO: 832264 - DNA, 539 bp, Homo sapiens
gttcttgaaaatggtatgtcattgaggagccagttgcaaaatatgcggaaatctctgaaatgataaatacatttttgttatgttaacaaaatgtaagtccaacggtcttgttttaagtacatttagagaatgagaccaaaccttaaatatcctgggagataaagtaatagtgaaatcctttcctgttttattttttatttttcactttttaaagttttttaaaaactacaacttgaagaaaaagtagcaaactccaatatactcataacccagaattgactaacacttaatagagattttaattctctaaatcatcctcatcttatatttacatataactaattcttcagtataaatgtataatttataggtgacttatctcatctttggtttccaattttttcccaaatyattaatttttaaacatctttattcagatataatccatatgccatgtaatagacccaattacagtgtaaaattctatgtcttttagtatatttgcaggcatgtgcaaacattgccatgatcaattttag

SEQ ID NO: 832265 - DNA, 613 bp, Homo sapiens
aacaggaaataaataacagaaayagtttaccacaacaagtaataccctatagtgacatttgttgttgtacagtctctattatctcttagaaccaaaaatacccagatattgtgacctaaaatctaatctttcaagatgcttcaataaaagaattagcaatggtcaagtaaacgtagtaactgctgcatttctacattatttttggagattttaaatgtttaccaggttaagggttcaaagaagacttttgtttcaaattagcatttaccagatgtaattgactgtggacacgtttttacataaaatttattagcacacacatggtagaattagttcagaagaaaagcacatctgtcagtaaatgttcagtacaagcaagccaaatatgaaatatctcattttatatccaaacctctagaatcagttaaaatctggaacttgctcatttagtcgctttaataacctttctaaagatctacattttttttagaattgcatctatcacctggtgacttttgaaatcattttatacattttatattttaaaaatatgagaccatttattgtttttacctacagaccatgacattcaaggttgcctatggctgatcac

SEQ ID NO: 832266 - DNA, 458 bp, Homo sapiens
tttagtttaactagataccatttgtcaaatctgctttcattgcaattgcttctggcatctttgtcatgaaatctttgccattcctatgtccaggatgatattccctakgttgtcttccaggatttttatagttttaggttttacatttaagtctttcatctagttcattgagagtttttaaaataaagggatgttaaattttatcaaaagtctttctttgtctattgagataatcgtggtttttgtctttagttttgtctatgtgacgaatcacattgattgatttgcaaatgtcgaaccaactttgcatcccaggaataaagcctatttgatagtggtggattaaatttttgatgtgctgctggattcagtttgctagaattttgttgagaagttttgcttccatgttcatcaaggatattggcctgaagttttcttttatttttgtgtctctgaga

SEQ ID NO: 832267 - DNA, 525 bp, Homo sapiens
gtaaaaggatttcccactgaagtgtctgtaaagactgtaagaggtgcctacttcttcaaatatgaatacaccaaggcaaagccacaaggaacataaataatcagggaaacatgacatcacaaaaakaatgtaatacccataaccaatctaaagaaatggagatctatgaacttcctgaagaagaattcaaactaattggcttgaagaagctcaatgaactacacaggaagacacagccaaccaaacaaaatcaggaaaacaatgtgtgaataaaatgaaaagtgtgacagagagaaaacataaaaaataaccaaacagaaattctgaagctgaagaacataatgactgaactgaaaaatttcagagatcttcaacagcaaacttgataaagcagcagaaagaggcagtgacctcaaacactgcttatttgaaattaaccagtcagaggaacaaaagaaaaaaagaatgaaaagagtgaagaagaccgacaggatttatgggccaccatcaagcaaacctaatatg

SEQ ID NO: 832268 - DNA, 538 bp, Homo sapiens
gctaacctgtcttttgttataggagtgtcrcctgtgacctttatgatgggtaaggaaagatttcacatctttttacccctacattatcatactgtgaaattttattatatgctgtcttgccctcatagaaagagaattttggagtttgaaagaatcctgctaatcatgaaatctggtcctttatttaacagaaaaattcccagagacatgaaatgattagtactgtttcacagagaagcagagggagagccagaccctcagtcagtccaggctctgctgtctttggaggtggggtttcaggtctccccagcagggttgtgaggtcccaaagaacgggaggcaggccttgggccatagtctcctgcatccctccagagcctgcagcaggagctgggcccaaggatgctgctgagtgagtccacatgactgacatacactgctctggaagcaccattccggcagactaaccctcttcttcccatgtaatccaagaagggtgttatagatagtccagatttttctagataatcttgtaaca

SEQ ID NO: 832269 - DNA, 411 bp, Homo sapiens
ggcgcggtggctcacgcctctaatcccagcactttgagaggccaaggtgggcagatcacgaggtcaagagrtggagaccatcctggccaacatggtgaaacctgtctctactaaaaatacaaaaattagctgggcatggtggcatgcgcctgtagtcatactcgggaggctgaggcaggagaatatcttgaacccaggcagtggaggttgtggtgagccgagattgcaccactgcaccctagcctggtggcagagcgatactctgcctcaaaaaaaaaaaaaaattcattgtatgaatattcaaaattatacatgattgtaattataattgagtcatgaaggctgaaaataaagataaatgaatcaagcttcatttaagtagcaaaatgaaagcctctccatcctccatta

SEQ ID NO: 832270 - DNA, 454 bp, Homo sapiens
tgtgaagctgcactgcaagcaggtgtggccaggctggggccccaggaggggcgagcagactgaaggatgcttaggtcagactggccctgtctcaggggcaagactgccctgcagagttcaggtctgacagttgccctagggctgaagtctcctatgagaacaagtctagcctagggcaatgggtgtccctgaccattctccactacagatgctcccacacaaaaccttctgggctttgcacagtctggagttctaccattaacactttataagcaggtcttcctgacaactcaagtgtccctggtggttgtagggtctcctcctttcaggawttcagggacctgcgacaagaggaggttgccccttgcctgttcaactcacctctcctccaggagattttggggacctggaatgagtcctggtgcacggttgccctttgcagggttcccggctt

SEQ ID NO: 832271 - DNA, 439 bp, Homo sapiens
caacctagtattgaaagtctagctactgcaataaagcaagaaaaataaattaactccctacagattgacgaggaagaaataaagctgactctacttgcagatgacatgattttccatatagaaaatcccaaggaatctaaaaaaaaattaagttcaaaaaagagcttataagattagtatgaaacaatcatatttcatattctaacaagaaacatatgtaaacaaaaatttaaagcacaacagcacttacaatcaatcaagaaactaactaaatgcctaagcatacttataaaacatataatctctggatgctaagaattacaaaatgctgaggcaagaaatcaaagatccaaataaatggaaagatatctcatrttcatggattggaagactcaaaacagtaaaacaccaattttcccttcattgagctattatgttt

SEQ ID NO: 832272 - DNA, 668 bp, Homo sapiens
gcaagctttacttgatggccgtggacttgagaagcagaagcatggctcacaaatcacttctcgactaatgagaggtgaggaggttaaaataaaatacagggtttctctaatgaagggattggacattaaaagcaaggggaagaatattcatgcattttccaggaatgagcagcaacttcacagaactcctagtgccaccttcctttttgaacttttatgacttctggtcagcgtcatgatgattgtcaagtgtcatgacaccagtggaagtgtctttttttcttttctttcctttttttcttggcgatggagtctcactctgtcaccaaggttggagtgcagtggcacgacctgggctcactgcaacctccgcttcccgggttcaagcaattctcctgcctcagcctcccaaatagctgggactacaggcgcacgctgccacgcctggctatattttttgtatttttagtagagatgtggtttcactgtgttacccaggctggtctcgaactcctgaactcaggcaatctgcccgcctcggccttccaaagtgctaggatttcttttctattttaagagatggggccttgctctgttgcccaggcttkagtgcagtggtgcaatcatggctcgctgcagccttgaactcccgggcctaagtgatccac

SEQ ID NO: 832273 - DNA, 527 bp, Homo sapiens
acaccacacttgggtaattttaaatttttttttttttttttgtggagaccaggtcttattctgttgaccaggctggtctcaaattcttgtgctcaagcaatcctcctacattggcctcccaaagggctyggattacggggatgtacaaccgtgcctggccaggagtgccatttagcatggaaatgagattataatgaagcctgaggctttagctatcctggttctaacaagtgttagtgggtctggttacaaagggaacttcctagagcaagtgtcgtgttttttaaagataagcagagttagggcagtgtggaaattcagctatgtcatggcagcatgctaccacttaacagtaatatctgaaaaattagtaacatggaaattttttgtacattttagacagatcatataaaaatacaaagaaataatatatatgtgataaatatcaagttacatataaagtagaataaaaatggctaaattatattggttactttttatttcatgagttgaactcaacaggatat

SEQ ID NO: 832274 - DNA, 527 bp, Homo sapiens
acaccacacttgggtaattttaaatttttttttttttttttgtggagaccaggtcttattctgttgaccaggctggtctcaaattcttgtgctcaagcaatcctcctacattggcctcccaaagggctcggattacggggatgtacaaccgtgcctggccaggagtgccatttagcatggaaatgagattataatgaagcctgaggctttagctatcctggttctaacaagtgttagtgggtctggttacaaagggaacttcctagagcaagtgtcgtgttttttaaagataagcagagttagggcagtgtggaaattcagctatgtcatggcagcatgctaccacttaacagtaatatctgaaaaattagtaacatggaaattttttgtacattttagacagatcatataaaaatacaaagaaataatatatatgtgataaatatcaagttacatataaagtagaataaaaatggctaaattataytggttactttttatttcatgagttgaactcaacaggatat

SEQ ID NO: 832275 - DNA, 591 bp, Homo sapiens
ttcagaagattcagagccacctgcacarcaatgtgctgaagataaagaaacacaggcgttctgccataagataccaattacctccaaaatcccgactcaaacaatgaaagcaaagtgagaaatcccataaaaatggtcttggtggatatcaaaagactcaaccaaagtcacaaccaggaaggaccttggttgtcatcattttaagatgaggaaatcaaggctcagaaaagttggttagggaagtatctactgacaaaatctagctaatggtaggggaatcactaaactctggtctcttttctgccctagaaaatgtcaccttctctttagatgccgcatttctctatagccagtaataaattctctagttgtacaaatcaagcaataatgattataaaatgtgcaatttcaaactactctaatagcttgaaatgtatatatcgtaataaccttcaaaaagcagttgcttcagagcttggaagtcagcactctatcttaagaacaagtaaaaagccaggcaaactgaaaaattaaccaatttttttagatccagcagagaagtgaggtcacagaacaaaccactgcccctca

SEQ ID NO: 832276 - DNA, 560 bp, Homo sapiens
aggatgtcccactggagtctctatgcacatttgcactgatggtggtgttagtttggggttgacatgctggtaggcatgggactatgagtgccctttgagcatgtttttacacgggtgatggtgcctgctcagagtaggggtgggtctgatggtctccgtgcatagtttctcaccaacaaaagtgtttgtgtagggccaaggtgctggcaggtgcttgaccagagtcctctttgtgcacgttcatgcaggcagcagtagccgcacagtgcatgggtggggacattggcctgcatgcctagttttgtgcaagcagcagtgtcagtatgggggtggggagctggtgggtgtgtggctggcagtttccatgcccttggacactctgatggcaatggcagcatggcggggggcacggtgcactcacactggcagcaggggcatggtaggrtgcatgtgcacatgcatgctggtggtgaaggagggggaaagtttcacccccctacacacagacaccagctaagcagtgtaggaggtggccgtgggcaagtgtgtgtaggtaaagt

SEQ ID NO: 832277 - DNA, 619 bp, Homo sapiens
ccaggttacattattctactgtatatcacactttatgtttgtactagatagtatttcacatgaaatactagatttagcctatgaaccaaaaattgcactgtatagctgggaaagggaagtctgatatgattttctattaatacttagtcctctgatgaacaatttggcagtatctttttgcactaagctcccagaatcccttaattgaagttgactttggtgatgctcaagccactgcactgtaattttaaatttcttatgaacaaaaatctattaactaaaaggatagccaatgttttgaacaaatactgttgattcacatttattccaaatgattatttgtatcaccttgcatatgtctatcttaccttatttcttagatctcaaaatgtctactgggtatattttcttttatgttgttgttgtgctttttattattattatttcattcctttttgggaaacaggtagtgtttggttacatggataaattctttaggtatgatttctgagattttggtgcatccatcacccaagcagtgcacactgtacccagtgtgtagtyttaaatccctcagccccttcccacccttcctctcaagtccccagagtccattgta

SEQ ID NO: 832278 - DNA, 644 bp, Homo sapiens
gccctcagtggagaagagagtttattggctttgaggctgtaggactggctgtgctccttatcccccttaaggggcagggtacttttgggatataacttgtaacagactggctgcccatccatctgcccatctctggaggtgtctaactaaatatttgtatgacttttgtattttatgaatttcactactagtgacaacttatttagcagcaaaagtgctaaactagacaaaagactttatcaaaaatgaaaatacttttttttgcaaaaaaatttaaagtgttaaatatgaataagggtttacattttgttctgtgtgtagcgtgcataaactgagtaagaatttccataacagtctctttttttactctaaatctgcatgagaatggactgtagagctattctgttgagttaattataccctaaaatgtttagtattgcctcttatcaatcaagtttgcattttcataaggtatttttgatgactgaatgatttaacatacgcaaaacacatctgracactacttggcatttagttaagtgctcaaaaatattacttcttttcctcttttatcaggaaattatttctgccctcagttccaactctgcaagtgagtctcttagattcatagaaaatactcaatg

SEQ ID NO: 832279 - DNA, 649 bp, Homo sapiens
taataaaatatccatagaaaagatattctgaattaacaaagtaacacaaaataaaaggcataattaaaatttctactaaaaataaaaaaagtaaattactagactctaatagattattttaaatcagaaacaaagtttatgatagtatttccttaatcttgagaataatggaaaaagatacatacatatacacacacaaataaagactagagagagcaggagaaaacacattacatgagagtcccagattagttgttttttatgcagacagtaaacagtattacagtgtatcataatgacactgacttacactaaattttatgggcttataatatgaatgtctgaaattatgtactgtgaataaacaacagttactcagcataggtattgtattattttaatgtctaatcctttaacctctagacatgaacatattaatttatgcaggaagttgattagctgttttacatcatgtagacacagtctaagttcagccatcatttactttattttattcttcctgttttccaggatygataatcaaatgcaaacaaaagctctatgacaacactacctatatcatgtgcagtttatgataagcaaagtgcatctatcataaatattagagaatatcaggatccttatatca

SEQ ID NO: 832280 - DNA, 574 bp, Homo sapiens
actatgttgcccaggctggtcttaaactcctgatctcaagtgatccctccactttggcctaccaaagcgctatgattacaggaatgagctaccatgaccagctttgacttagtcttttgactaattcatgtttatataagaaagctgagattttataagttaatctgacctgagacagagtgaagctggctggtccctttggaagacagaattaactattagttatctgccctattagttaattaaccaaaacattattaatattatcctcttctcataaccattaatggagagaactccatgtgacacagtaactagagggtaagactggacccacagatgttttatatgctatacagattactttaatactgagcatttcagtgaccagcaatgtatttacagtccagggctaggatggaaattgctagaaacaggctcactytgcatcccagcatatacttaggtatcaatgaatgtgaaacatcttacccagtacctgacaccctgtaggcacagaatacatgccagtttccttctacagagcccaactggagcagcccctatgttcttg

SEQ ID NO: 832281 - DNA, 559 bp, Homo sapiens
gctaaagacttagcttaatggattctccaagggaaccttttcagatttagtcagatcgtgaacagaatctcagttcacatactcaaaccatcctgcttatttcaggggtgaagtttattttattttgaagaaagggtttatcagagtttaaacaggagttcgggaggaaggtttaaaccatgtaataaaagtgttacacactttataaatctataaataatatcaattgcaagctatttgctattgattagagccagttttattcttcaaagaattatctagttctggcttatttcatttaaggaagttttttttttgggttttttttttttttttttgagacagagtctcactctgtcacccaggctggagtgcagtggcacgatctcggctcactgcaaccaccacctcccgggttcaagcaattccctgcctcaggctcccaagtagctgggactacaggcacccgccaccaagcccarctaatttttgtatttttagtagagacggggcttcaccgtcttggccaggctggtctccatctcctgacctcgtgatc

SEQ ID NO: 832282 - DNA, 587 bp, Homo sapiens
tgagtgttttcatgctggggctgtaccatttgccaagggagatgagcctattatctttacattaggggaactaatagcccatttcccaggaaatccrtgagcgataaaaataagtgggccgttttattccttttactgagagaagctggcatgaaggacaggggaagcctttgttttctctctagttagtgggagtatcagggctggctgagagcaggccaggggaggcagccacctccactgtctgtccccagcactgcaggggaggatgtctccaatcccaaacggggaagaaggaaagttggtctgctcttccatgcacctcccactaccgacttcccccatcccaagggccctcctgcccctgttcctcccttcaaaagcaggagagaatgcactgtcacttggaacttagcaggaacttgcacctatttgtcaccactcccaggaatggtcttactcagtgctgtgtttctcaatgtggggtgacaggcattgtcccctaaaggatgttgttatagtcatcagagaacagaagttaggagtgtatttgaggggctggggcaggatcaacccctaatactcca

SEQ ID NO: 832283 - DNA, 627 bp, Homo sapiens
gaagagggagctggagagggcagggaaagccttaaaacmtgttgcaggtctgaggcttgtaaaaggagaagggtaaggaaggatgattgtgtgggtgaatagagtctcaaactgtggtgcagctctggaaatgtcctggtcagcctaatagggagctctggcacaaggattgccctcaaaaaagtcccacgttgcatggcagtggtcatgccctagtacccctgccatgctcagtcattggtagagggctgcctgggagaaagtgctgcaccctggatgctggggtggatccagactaaaagctgtcagcgttctgcattccttgcagcaggttctttctggaagggaagtctgcgtggcacgctgccacagctggcacaaccccaacagctgtccagccattctgctcttacctataatcaagctcacagaagggaagtagagtgtttttgtgctccacagaactgcctgagctctttttatgattcctttgggtgaaccctcagtaagtcaatctatgccttaggtttcttgtctgaaatatttcctttgcctggaacgcttttccctcagctacactaataactcaatgcctcatctccttgagggctctgctcatgtgttgtc

SEQ ID NO: 832284 - DNA, 627 bp, Homo sapiens
gaagagggagctggagagggcagggaaagccttaaaacctgttgcaggtctgaggcttgtaaaaggagaagggtaaggaaggatgattgtgtgggtgaatagagtctcaractgtggtgcagctctggaaatgtcctggtcagcctaatagggagctctggcacaaggattgccctcaaaaaagtcccacgttgcatggcagtggtcatgccctagtacccctgccatgctcagtcattggtagagggctgcctgggagaaagtgctgcaccctggatgctggggtggatccagactaaaagctgtcagcgttctgcattccttgcagcaggttctttctggaagggaagtctgcgtggcacgctgccacagctggcacaaccccaacagctgtccagccattctgctcttacctataatcaagctcacagaagggaagtagagtgtttttgtgctccacagaactgcctgagctctttttatgattcctttgggtgaaccctcagtaagtcaatctatgccttaggtttcttgtctgaaatatttcctttgcctggaacgcttttccctcagctacactaataactcaatgcctcatctccttgagggctctgctcatgtgttgtc

SEQ ID NO: 832285 - DNA, 466 bp, Homo sapiens
ctttagttctgttagacaatgccacactctttcaaagtggttgtgctaattcatactctcagcaacagcctatgagaactctcatcaccaatccacattatcaccaaaagactgtgaaccactgtcctagagaaactcttgcaatgtgtactacagacaagtacaagaattttctcagcatcattgttctgagtagcttgaaactggaaacgattcactgtgcttctggggaggcagcaaaattttatatctggatcacagtactggttatgtagatgttcattttataatcattcaaactgcacatatatgctttatgcacttttctatatgtactgcatatgtctcatttgaacttctacaaaggcattatattcttcaaagaaacttcacacacattttaataaatcttmtctgattttacaattaccacttgtggttcctataagaaacttgtccatattag

SEQ ID NO: 832286 - DNA, 433 bp, Homo sapiens
tagctgaaattacagtttggggctcaataakgtaatggttcaaaagattttctgtggaaatctctgcagtcccatctggaaagcaaacactggctggataggtagtagcgttggggtgggatcacatggaaggcatgtagacaaagttatgacccaggatttcagagtgaatatcctctatgtgccaggcacttttacaggtttatatttctagaaccaacctaagatgctggaatgataatttgaggtaatccctgttttatggcttaaaaaaatgtggtttggctgggtgtggtggctcatgcctgtaatcccagcattatgggaggtcaaggcaggaggatcgcttgagtccaggagtacaagagtagcctgggcaacatggcaaaaccccatctctacaaaaaatataaaaaattagccaggcatggtg

SEQ ID NO: 832287 - DNA, 476 bp, Homo sapiens
gcaggtgggggcgaaatagcgtttagtagaggggagcagatgatgtggaaaggaaactagcttgtgatcaaaggttttaggatggaggggagaagaggmcaagacaaggaaaaaaggatagctgggaaaaatgccaaagaaacagaaagagatggagggagagacagtgtcccaagaattattcagagaaaagaaaacagatcttttaggccaggcacagtggctcccgcttgtaatcccagcactttggaaggatgaggcaagaggatctcttgaggccaggagttcaagaccagcctaggcaacatagtgaaaccccctctctccaaaaaaaaaaaaaaaatttagccaggtgtggtggcacatgcctgtagtcccagctacttgggaggctgaagtgggaggatcacctgagcctgggaggtcgaggctgcaatgagctgtgacagcacctctgcactccagcctggacaaca

SEQ ID NO: 832288 - DNA, 632 bp, Homo sapiens
taaatcaagaaagacctaagtactgaatgtgsatttttacaacgttatttcttgtggttattaataataaacccttttggaacattacattcctctcctttccaagagtgctttagggcatgggtgtactgatactattaaattgtaaactctaactgatacatcaggacaagtctgaatcacatctgcaccactcttattgtatctccagcaacaaacattacacctgacaaaaaatcaaaattaagaagataataataaagacttggatgaagttgtaatggatcagaagagacatacagaataatactgaggaatctaaatggcccacaggcccaaccaggccttgtacaataacataaactataaatagatgaataaagatatacttcagttgagaaaaaggtttggtcccattggaagggtagacagaatcacagagggaatgatatacaccaggaatgtattacagggtacagagctgtgtctcccaggataatagctactaaaagctctaacatcatacaacaaattgatcatgctttctgcttatgcttatcaagcatggtctaacaggaaaatctaagttaaatgcagtaagtgtgattcttcgtgggaggtaacacctccca

SEQ ID NO: 832289 - DNA, 583 bp, Homo sapiens
catacagaataatactgaggaatctaaatggcccacaggcccaaccaggccttgtacaataacataaactataaatagatgaataaagatatacttcagttgagaaaaaggtttggtcccattggaagggtagacagaatcacagagggaatgatatacaccaggaatgtattacagggtacagagctgtgtctcccaggataatagctactaaaagctctaacatcatacaacaaattgatcatgctttctgcttatgcttatcaagcatggtctaacaggaaaatctaagttaaatgcagtaagtgtgattcttcgtgggaggtaacacctcccagttgtgtcagatacattttaattctccaatttctgaatctgtcaaaatcagagttatgaacatgttaatgatgaattaataagacaaatggctactgagttttgaaagctcttgacagacagcaatttctttcttctgcagcagcattataacmatatttctattatttagggaaaaagtgcatttaaaatggtgaatgttattataaataagtaaatatcatatatctcaataatacagggaaag

SEQ ID NO: 832290 - DNA, 598 bp, Homo sapiens
  misc_feature 571, 572, 573, 574, 575, 576, 577, 578, 579, 580, 581, 582,583, 584, 585, 586, 587, 588, 589, 590, 591, 592, 593, 594,595, 596, 597, 598: n = A,T,C or G
cagctactgggtatatattcaaaacaaatcgaaatcaagcatttaagatatgtttgcatttctatgcacttctatgtttatttcagcattattcacaatagccaatatgtagaaataacctaagtgtccatcaatggatgaataataaggaaaatatgaatatatgtacaacgaaatattattcagacttaacaaggcaattctgtcatatgcaacatctatgaacctagagaacactgtgataactgaatgaagccaataaaagaattgcaaatactgcatgattccacttataggaggactctaaaatagtcaaaaatcatatagggagtggagtaatatatattgccgccaacattgtatgtgtccccttttctccacagcctcaccaacatctgttatttttttttgaaactttaacaaaagccattctgactgatgtgatatggcatttcattgtgatttggatttacatttctcttttgattcatgcagattaacwtttttcatatagttggttggtcacttgtatgtcatcttttggaatgtgtctgttcatgtcctttgctcnnnnnnnnnnnnnnnnnnnnnnnnnnnn

SEQ ID NO: 832291 - DNA, 512 bp, Homo sapiens
taaattgtgtataatgggagtttggtgtacataatatttcatcatccagataataagcatagtactcaataggyagtttttcaatcttcattctcctctcatgctccaccctcaagtagggcctcgtctctgttgtttgttctttgtgtccatatgtactcaatatttagctcccacttataaatgaaaacatgcagtatttagctttctgttcctgtgctaatttgcttaggagagtggcttccagcttcatctatgttgctgcaaggacatgatctcattctttttttgtggctgcatagtattccatagtgtatatgtaccacattttctttatccagtttacagttaatgggcatttaggttgactccatgtctttgctattgtgactaattctccaacaaacatttgttgcacgtgcctttatggtaaaataatttatattcctttgagtatatagccaataatgaaattgctgggtcaaatggtaattctggcttaagttctgtgt

SEQ ID NO: 832292 - DNA, 625 bp, Homo sapiens
tactcacttccaacatgaatgagggtgaatatgccactaaaccctatactggttatcttttttatattgtgtttgcaaaaaaaaatttttttagatagattctcgccatgtcacccaggctggagtgcagtggcattatcttgactcactgcaacctctgcttcccaggttcaataaattcttgtgccacagtctcccaagaagctgggattataggcaggcaccaccatgcctggctaacttttgtatttttggtagagaaggggtttcatcatgttggccaggctggtcttgaactcctggcctcaggttccaagacattcttaactcggggaccaaaagtagtggaaaactgtgtctacactattatctaagttttgaatgagaaaatatccaaccagaattttccacaatgtcatggaataatacagcagagcataaatagaagtattgagtgccttagatatatgtgctgagacagtctgacagtgtgccttcattatctgactggacatgcaaagcagtcatatatactttttctgtgcagtygaaagcaaagcagtcttgattgataggtgtgtgacctgaggttgtcttttgatcatgtcaactggattattaataa

SEQ ID NO: 832293 - DNA, 665 bp, Homo sapiens
tcattcatctctggtcttcaagggatccacttcacagataaaaacacccataggcacaaaataaagggatggagaaagatctatcatgcaaatggaaaaaaaaaaagagcagggtgcaattattatatcgaataaaagtctttaaaccaaaaacagtaaaagaggacaaagatgggcattacataataataaagagttgaataaaataagaaggcttaactatcctaacatatacacacccattatgaagaacataaaatacttgttcataaacaagtacttctagacctatgaaaagacatagacagccaaacaatcatagtatggacttcaaaaccacactgacagcattagatcattgagacagaaagctaacaaagaaaatattgatttaaattggacacttggacagctgacatctgttgaataagtccacccatcaaccacagaatatatattcctcgtccaggcacagtggctcacacctgtaatcccagcacattgggaggccgaggtgagcagatcacctgaggtcaggagtttgrgaccagcctggccaacatggcgaaaccctgtctttaccaaaagtacaaaaaaattagtcaagcatggtggcaaaatttataaagggttataaaagttttttgcctctttacaatttctga

SEQ ID NO: 832294 - DNA, 665 bp, Homo sapiens
tcattcatctctggtcttcaagggatccacttcacagataaaaacacccataggcacaaaataaagggatggagaaagatctatcatgcaaatggaaaaaaaaaaagagcagggtgcaattattatatcgaataaaagtctttaaaccaaaaacagtaaaagaggacaaagatgggcattacataataataaagagttgaataaaataagaaggcttaactatcctaacatatacacacccattatgaagaacataaaatacttgttcataaacaagtacttctagacctatgaaaagacatagacagccaaacaatcatagtatggacttcaaaaccacactgacagcattagatcattgagacagaaagctaacaaagaaaatattgatttaaattggacacttggacagctgacatctgttgaataagtccacccatcaaccacagaatatatattcctcgtccaggcacagtggctcacacctgtaatcccagcacattgggaggccgaggtgagcagatcacctgaggtcaggagtttgagaccagcctggccaacatggcgaaacccygtctttaccaaaagtacaaaaaaattagtcaagcatggtggcaaaatttataaagggttataaaagttttttgcctctttacaatttctga

SEQ ID NO: 832295 - DNA, 556 bp, Homo sapiens
agggaaaagatcagtaggaaagaaaaggttttggagaccccaacattggtatagaagaaacttctagttatttcagccagatagtcaggtgctatagagcaggatccagaaagatttttacccatttataggacttccccatgttttctcccttaaatcttgtcttttctcttgtaataatggacatgaaagtctcaaaatgaagagggtctgtcagcttgtgttccgggaccacaaggaatggtggccgaaggagaccatcttccctcagcccatcttggagggacgagaaatgccatagtctggatgggtggtgacagctaccaagaggagaggagagcaggggaggccctggggcctgccatggtgaaaagggagggctgtgaggagcctgcctggacctgtgaactgcccggggactcaggagaaaggggttttgcaaatgcagtgacagataagcgttgcatggtaatagggttaaatttgaaactgttacaggtgagatgtgactagcccattcttgtrtcatagagagctaggccttttcttcatttaa

SEQ ID NO: 832296 - DNA, 568 bp, Homo sapiens
ccaggcgtgagcccccacgcccggcctgcatgttgtcttaagctgtatttgggttatctacaggtaacaaatcaccctgaatgcacttgcttgcaacaagtctgtcattttcctcatgaatctgtggtttgggctctttggggagggcttgtctccgacccacacagcatcctccgggtcctctcaaccgagggctgcgggatccatgtccgaggggatacagggacatggctggaaagtgggtgtgtgccacccactgagagctcagccaggactgagggcggggcctctttacctctccatatggcctggggttctcattggcagcggggttgggttctaaggatgagggtcccaagagagagccaaactgaaccggaatcagctttgaggtcccagccttggaagtctcctagtctcttccaccatccccagctggccrgaggggtttgtccaatttcaagcagagaggacacagacttgggagagctgcaaggttctagaagaacatgtgggatgggaaatagtcttgtgatcattttggggtagactctctgcctcaggatga

SEQ ID NO: 832297 - DNA, 602 bp, Homo sapiens
gttgactagtgtcccctaaaatttatgcccacctggaatcttagaatgtgrccttacttggaaatagggtatttgtagatgtaatcaaattaagaggaatcatactggattagggtaactctaactggtgagatgggaaatttggacacacagagaggagaatgccacataaagacacagacactcaggagagaattccatgtgaaaacagagacagagattggagtgatatgtctataagccaagggataccaaagattgccagcaaccaccaggcactaggagagaagcatggaacagattctcgctcagaccctccagaagggaccaaccaagctgatgccttgatttcaaactgctagtctctaacagaataaatttctgttgttttaagttacccagtttgtgaggacttgttcaagacagccagaggaaacaaatacacaaaccaatacctgtacctctttgtgtcaattagggttggctagatgttgtggtagtaacagaaggtgccctacccttcattcttaggggtttgcaatagcacagtcacacttctcactcctaccatatgtcaatcataaatcagctgccactccaca

SEQ ID NO: 832298 - DNA, 585 bp, Homo sapiens
taattgaaaaatacagattatcttacagtgcccccttaaaactaaagctgtattctagcctctgtacttctttttattattattatttttgagatggggtcttacatgttgcacaggttggtgtgatcatggctcactgcagcctcaaccttgcaggctcaagtgatcctcccacctcagcctcctgagtagctgggtccacaggcacacacgagcatgccaggctaatttttctttcttctttttttttttttttttttttttttttagttttaatagagacaaagtctcactatgttgcctaggctggtctcaaactcctgggcttgaactatcctcccacctaagcctcccaaagtgctgggactacaggcatgagcttctgcacctggcctgtacttctttgtagtacattttatatttcttgtaattcacttactctttctaactccagattataagtatttatttacacatgtatatttgtcattatacttaaacttcctgaaaatagagactgtrgtttactcatttgtatgctcctcagatcctaagtgtttaattaaaatcttaattaatgaaatg

SEQ ID NO: 832299 - DNA, 607 bp, Homo sapiens
acattaatttgtgcctaagggaccacatttccatgaagttgaagatgtaaattttattggaagtctttagaaccttcagatccttctgagaatctccagaatttacagtatgagtttcctctaaatacattttaaggccaagtatcaaagattttcacaaagggatttgaggtaaagacgcattcctgaatggccttctcatttgtgggttgtgatttccttccctgggaagagcgtgggaatattaaaaagcagatctatggagtcatgtattaaagggttaagaagggactgcacaccctgctttgggctctgagagcttgagatcactggagtaaagtgcaggaggcttcaggaaccagccatagagtagaacagaggcacagctataacccttgtggggcatgaactatgatatttatcagctgccggatgcagtctactatagacatcctggtaatggcaaaaaacgcctgtgaaaaagctggttaatacgcattttggrggaagaaatctagaagtgtttgaaacttagacaaaaaaaatccagtttttgttttaaaagaatttacggggatgtatgaagtatagaagcatgcaattgtta

SEQ ID NO: 832300 - DNA, 602 bp, Homo sapiens
ttctggaaccatttaggaaaaagatgtgtctctgggtatatttttccyagagacataccaaatgagagtaagaaaggatcagagaaagcaaactggcaggtaccaagttgcttgttttctttagaattttatgattttccctcccaccccagtcaaataataatatcaaaggatggtttacttggtgccaagtactgttctaagcaccttacatgaattaactcatttaatccccacaatgacctctacccaatggtggggtgggggtggggttatttgttatcccattttacagatgatgagactgaggtatagaaatgaagtaatttgcctggtcatagtaagtgacctgggtgagctgggactcaaactcaggcactggctccagtacgcacacccttacccctcatggctctgctgttccacagtggcctcatgactgcctcataatttagaccaaactttgaaagaggcaatgtgtgtcttttaaaccctttgtgtttgaaccctacttcatccacacacagcagtactgttcattctacctgaataggagggaaaaaaagaaaaacaaaaaagaaacacccaaaagttttttcttt

SEQ ID NO: 832301 - DNA, 616 bp, Homo sapiens
aattgagaagaactgaaagaaaatctttccctggggagactgcagccgaaacacccttctgacgaatgtgctgacctaatctaagcctcaatttccttcaacaagggatgcatcgctcacttcccttgagttgtgagaatgaaacaagataatgcgttaaagcccttggcccagttcctggcatgtggcgagctcttggtccataagcaaatcttcgtattagtgtgagttcctggtcctccatgaaagaacaaagcttttggcctgtaaaatctaatctctggaaatgagaagcactaaaaagaagaggagtggggacggagtggggaggcacttggaaggctcctgttttgttttgttttgttgacaaattcattcttcatcttagccagcgccatggagtgagtccagctctctgtgtctggccccgctgtgaaccccctgaggctatccacagttggatatcttcctgttccttccctgccctaccctcttcaaatgcaaacttgggggggctcaagattattccataccctttatctccaagctagtccaygcctgttggtatagacatctaccctacacacacctgcccgcaccctctctattctcatct

SEQ ID NO: 832302 - DNA, 656 bp, Homo sapiens
tatccagtaatttggttgcttgcatgtcaaaacttattagcttcaaattagagctcacatttttagggagaaaaaaaagagtagaaaacagagcaacgatgttaaagtgaattcatgcagaacctgtcatcaaagaaatcattaacttaagcagcagcctgtgggaataaaatgagagagttccctgagctgagtggacagagcacatattagcccatgataagaagcttttcagccaaatgtcctattcccacttagcagaagacaacgcaatgttttcctgttccagtaagcacagcagcacgcacgtggaagagggaacaggatgggtaaattttgtcatggcatcttgggcaactgctgtccaactgacttccagggctacagccaggctgaactatgagacctctgtcaagcctaatgcagtggttccctctgttcgagccaaagaggaccaacctagaagacagtctcaatcagggacatttccggatgaaactcctccctctacctctgcatttaatgggaaaaggagaattacttgcttaaaaaaaamcagaatctatcagcatgtaatcagacccagcataggaacaaggctaatgtgtgaaaacagtgagcacatttctttaggaacacacagctaaattctagct

SEQ ID NO: 832303 - DNA, 621 bp, Homo sapiens
gtatacaaggatccccttctaaagtgtggagcttggcattgagcaagcaaagctggaagaagggaagccagtcaaggagctgttgaaataatttatgtagatgtctgtcccacagaccctgacccaatgatraatcaatacagtacactgacacagatattctgcttagccagtttggctgagtgtctgggccacttacagactcccagaagagtgctgtaaacagttgcgaccaaggcctcggctagccagcaagactagcatttattcagtaaagattaattgacaaaggcttgagtcaacaccactagagtgtaactgacattgcagacttcccaaatagaaagtaattaatcacctgtgataaatcaaaggttagtcttaggaccatatgagtaaacaagctagctagataaactccccacattccttcatttctactctaatttaactaaggggacaaagctgccttcaggcaagtactatatgtaataacccccaggccttccaatagggtttgtgtatattttctataactaaaatttttcccaccagcctgactgaacccccacaaatttacaccgaagatgacaaaggcttagactgagatggtgacagtgg

SEQ ID NO: 832304 - DNA, 639 bp, Homo sapiens
cacattggagctgtgatggaggtggcagccccaattacttctgaatcaccttgagcaacaggttccacttggttgactaatctccttatcagatggtcatttggccgcacccttggtgttctttcccaatgtgccttctcatttatttatttattcttttttaagagatggactctcactatgttactcagacaagtctcaaactcctgggtttaagggatcctcctgcctccacttctctaacagttaggactacaggcatgaaccactgtacccgttatctcattcttcataatatggctagggtgagaattttccaaatctttaagtgctgcttctctttgattaacaattctgtctttaaatcttttctctcttttcacattttaatgtaggctgtcaagagaagccaagccacaactttcacactttgcctagaaatttccttatccaaatatgtaatttcagtgttcaccgctctaccttctgcaaaacactagaatacaggcacaattcagccaagttctctgacgctttttaaaaaaatttkttttcttttactttaagttctgggatatatgtgctgaacgtgcaggtttgttacacaggtatacatgtggtttactgcatctatcaacc

SEQ ID NO: 832305 - DNA, 643 bp, Homo sapiens
cactcatattgtggggctcagagaatgttaattattagggcccagcccacatggagggcttaagatgaaagcaagctcagagtgtaaagtctaatcaatgccccacacttggcgtcagggcctcggcttggtctgcttggagatggatcattaatctagacactccgacttggaacactgggcacaggaagtcctgaaacattcctgaccacccacagctcagcctgtcagccccatgaggcagccagtcctgccactgacttgcagaattttaccatctcaaagttagatcagactcaaagagcagctggtctagactcccacccagggcagaagtacaggttctgtttgtacactcgccattgtccaagagctcattatccggagtgtgtgtgcttgaggagtggcgctggacttagagtggacagatgcatgtgacttgaagccctgccttccccttctgtaaaagtgggatgaggttattgacctcacgggatcgatgttagaaataaattaattttcttgaaagtgttttatttcaagwtttatgagaatgatattcacatgtgagttgctattatcattcttgacattataagctcctatccctgggatatattaatttcttcatccccagagtcat

SEQ ID NO: 832306 - DNA, 568 bp, Homo sapiens
agtaggctcctttccaggcctggagctgtgagactcaggcctagtggtccttgggcattattcccaagcggaataatggggaagctagatcagtcttgctgccctggggcttataytgagatctagtgccttctatcggggaggtggagagacaagggcaaggccatggagtagggaggatgccctctgaggcccctttcagcctggactttctggaattctgagtccatgaatcaccataacgacattttgtctgcaggatcaggaatagaatgttccattctccagcatgggacagagggagtaggaggcagccttcatggtctcaactaagctgggccagaaaggctgtgtccccatcagcctcaaattcctccacatttgctgctaagggatccacagagcatccttcctccggagacataagagaggatgtgaatgtgagagagaaagtttgcccaggggaagagaaagaaagcaaaagacactggggcttcagcagtcagaaggtagaccacagacttatgctgataataaataattgattcttccatagtgtttgccatca

SEQ ID NO: 832307 - DNA, 568 bp, Homo sapiens
agtaggctcctttccaggcctggagctgtgagactcaggcctagtggtccttgggcattattcccaagcggaataatggggaagctagatcagtcttgctgccctggggcttatactgagatctagtgccttctatcggggaggtggagagacaagggcaaggccatggagtagggaggatgccctctgaggcccctttcagcctggactttctggaattctgagtccatgaatcaccataacgacattttgtctgcaggatcaggaatagaatgttccattctccagcatgggacagagggagtaggaggcagccttcatggtctcaactaagctgggccagaaaggctgtgtccccatcagcctcaaattcctccacatttgctgctaagggatccacagagcatccttcctccggagacataagagaggatgtgaatgtgagagagaaagtttgcccaggggaagagaaagaaagcaaaagacactggggcttcagcagtcagaaggtrgaccacagacttatgctgataataaataattgattcttccatagtgtttgccatca

SEQ ID NO: 832308 - DNA, 585 bp, Homo sapiens
ccaaacacccaggagtgatggggcaggaggtaattagcataatggcgtcattaacacatacaatatataactcatacaaagcagctttgcagagtgccacaactgaggcataaacagagaggctgaaggcaaggaagagattaattatgacttgggcactcctagaaagtgtacaggaaagaggtcaagcagccaagaccagaagacatggttggaggagttcgggcgtcaattgagttaaaaatcttggtaaacagcaaaggatggccatggcccatagagtgaataaaagccaaaacaaggaggtcatgcagctagattttccagtgtcatgacgctgatgctgagcagagctgacatgcactaacacaggaatagctcacatctgcagagcacttgccttccaacacattatctcccgcagctcacagggtgattacccgcactttataggtgaggaaaccgaggctcagagggtaaagcccytgctggtgactatacacaacctatcagaagctccaggcctagacctgattcctagtccagtactccttaagacagaaagtcaagcacagagcagcccag

SEQ ID NO: 832309 - DNA, 623 bp, Homo sapiens
tccaactagtgagaaacagaatcaaaatttgaatcccaatctacctgacttcaaaagtgagttccatccrcaatgccatttgtctaaacatttgcacactgaatattgtgtagcagaaagagaagctgcctacttggaagtgattcaataggtcccaaaagcttctgtctgcaattaactctctcaagctagcctttcataatagctgaaattcagtcattcgcctctcttcagttttaagtaacatttacagcatttattacagatcaaaattaaatatttctgtgatcattggattaatgagtgtgtcccccataggctgacagctgcatgagagtgggcggggaccacacctgatgctcccagagcatctccgggaccttgcataggtaccagaacatcacaacatcaaaaatgcatatgtgtacaaataaaatagtggtgactgaagcagttacccagctccctgcctccttgacccctgtgagtttagctgtcttctttctgcctatattcccaccatctaagctgtaagctctatcaaaatagggactatgttttgaagactgttgtatccgctagcaagtggcacaattttggacacattgtaggtatataataaa

SEQ ID NO: 832310 - DNA, 542 bp, Homo sapiens
aaattgtggaggtaactatgatagaggttagcccttcctgaatatatcttgtgacacagttttgactttgaaaccatgtaaactgtagaaaaattataaaacaaaattaaagatttataaagctattttcatacaaagcaaagtaaaacaagtgaatctgattgtgcattgagggggtggcataacaagagatagttttgttttttattttttgatggagtcttgctctgctgcccaggctggagtgcagtggcacgatctcggctcactgcagcctctgcctcccgagttcaagcgattctcctgcctcagcctcccaagtagctgggactataggcgtgcgccgccactcccagctaattttttgtatttttagtagagacagggtttcactatgttggccaggcaggtctcgaactcctgacctcatgatctacccccytcggcctcccaaagtgctgggattacaggcgtgagccaccatgcctggccaaccagagacaggtttttaaagtgaatttgaaacatagtaactggactgt

SEQ ID NO: 832311 - DNA, 585 bp, Homo sapiens
agtgcaacaatgggtcaggatgaagaaggggagctgtagtggtccacggtcaggtgtcagagcccaagcagggtgagaggtattaagcctgggaggcagcctgatgttggcaagaaggaagttcattggactggagctcactgtggagtgtcagagccagagcacaatgaggaatgaggaatgacatgatttgtccaagcaagtaaggcaggcatccatggagaggggaggcccagcatgcagtgttgaagaatgtggaagaggtcattcatgtaggagacagagatgggaagttggctttatacagggagatggatcaaaaattaaacatattaaggataaaaagagccaagattctccctttcagagaagacaggtataaatattgaaatgtaggggaaagaaactaaaatagtccctgctatattggattagaattggaggctttgctatgaacttttggttttcaatacaggcagacatatgtrgaaatatagacataaatgcgtgttccctggtcctgtccactaagagagtctggaaacagcagtagcccaatagtagtgagcacacctggcacttaga

SEQ ID NO: 832312 - DNA, 491 bp, Homo sapiens
ataccaattgaccataagcataatggtttatttctggactttcaattctattctattaatctgtatgtctatctttagatatgacaccaaaagcacaagagatagaaaaaaatagaakgagcttcattaaaatttaaaacatgttactgcaaagaatagtatgaataaagtagaaagacaacccacgaatgggaaaaaaaatttgaaaatcatatatctgaaaagatatttgtatccagaatatatactaactcttacaattcaaaataaaaaggcaacacagttttaaaatgggcaagtgatttgaataggcagttctccaaagaatatatacaaatggccaataagcataggaaaagatattcaacttcattggtacaaataaaacagcaatgagttgtgactttatattctctgggatagctaaaataaaaaagacaataacaagtgtcagtaagaatgtggagaattgaaacactcacacatttctg

SEQ ID NO: 832313 - DNA, 643 bp, Homo sapiens
ggcactgtgctaggatggattatacaagtacgaccctgaaggactaaagaatatttagatagaactaatcttaagtaaaagtagctgcttccatacttggtggttagatactgcctgcttacatgaatgaatgaatgaatgaatgaatgaatgagtatttacgttccaattactacatttgcctttttgtttgtttgtttgttttggagacagtctcactctgtcgcccaggctggagtgcagtggcatgatcttggctcacttccacctctgcctcccaggttcaagcaattctcgggcctcatcctcctaagcagctgggattacaggcatgaaccaccattccctggctaattttttttatttttagtagagacagggttccaccatattgtccaggctcatctcgatctcctgacctcaagtgattcacccgccttggcctcccaaagtgctggaattacaggcgtgagccaccgcgcctggccttcatttggatttttaaaagaacaagtgttctgatcacatagatttttatttgaattctggctgccacttacmactgagtgtgagctcgagcaagttgtgtaacccctctgtttcctaaactataacaaggtgataatactgcctacgcctcttt

SEQ ID NO: 832314 - DNA, 623 bp, Homo sapiens
ttctaaaactctgaaatcaaattyttaatagagttaattagaacccatgcttttaattcgttttgggaaacagaaatcttaaagattcaaggatcctagatgaaaaatgccttcctgcatctggagttagagagagagggtgatctttgtatttttcagggaaaatagtttttactctcaatcattgacttctccctactttatgtgctcagagaccagccaatgccagaaatgtggaaagtcccttcaggtggtaaaacatttgagatacaaactttccgttcacatccaatgtaaaaacaaatcattttcaagccaattccaagataccaaacccaagttttaataaaaataggtcatctctcactggataaagagtatctgaaaaggcctataaatcctagaactatcctatctgactatcctataataaatggcttagctaccttaagaacatatctaagctctatgtcagtgcctgatgtctaagatctaaaatcaaagaatgatattcctttttacaaaatcaaggacgtttctggctcttacctgcttgctgctgctgggcatgagttgtaggaaagcctgagagaaagaggcaaaagacggccactaagggcaag

SEQ ID NO: 832315 - DNA, 647 bp, Homo sapiens
cacaactgtagtttcagctactcaggaggctgaggtgggaggagctggagcccaggaggttgaagctgcactgtgatcacaccactgcactccagcctggaccatggagcaagatcctstctcaaaaaaaaaaacaaaaaaacaactagccataagagctaaaactataaaaactcctagaaatagatataggggtatatcttcacaaccttagattagccaatggttttttttttagatatgacacataaaaaaagcaacaaatagaaaaatagaaaaattggacttcatcaaattttaaaactattgtgtttcaaaagacacttttaagaaagtgaaaagacaccccacagaatgggaaaaaatacttgcaaatcacatatctcatgagagatttgtatctagaataaattatgagttctcacaactcaataaaagataaaaaaaacccaatctgtaaaatgggcaaagcgcctaaatagacatttctccaaaggagatgtacaaatgaccaataagtgtatgaaaagatgcccaatgtcaccagtcatcagagaatgacaaatcaaaaccacaaagaactaccacttccaattcactaggatgacttagataacaagtattaatgagaatacagagaaactgga

SEQ ID NO: 832316 - DNA, 545 bp, Homo sapiens
gtagtttcagctactcaggaggctgaggtgggaggagctggagcccaggaggttgaagctgcactgtgatcacaccactgcactccagcctggaccatggagcaagatcctgtctcaaaaaaaaaracaaaaaaacaactagccataagagctaaaactataaaaactcctagaaatagatataggggtatatcttcacaaccttagattagccaatggttttttttttagatatgacacataaaaaaagcaacaaatagaaaaatagaaaaattggacttcatcaaattttaaaactattgtgtttcaaaagacacttttaagaaagtgaaaagacaccccacagaatgggaaaaaatacttgcaaatcacatatctcatgagagatttgtatctagaataaattatgagttctcacaactcaataaaagataaaaaaaacccaatctgtaaaatgggcaaagcgcctaaatagacatttctccaaaggagatgtacaaatgaccaataagtgtatgaaaagatgcccaatgtcaccagtcatc

SEQ ID NO: 832317 - DNA, 610 bp, Homo sapiens
cagagaatgacaaatcaaaaccacaaagaactaccacttccaattcactaggatgacttagataacaagtattaatgagaatacagagaaactggaactcccacacactgctggtgggaatgtaaaatggtgcagccacctcaaaaaaaaaaaactttctggcagttcctccaaaggatcaacatagagttatcctatgacccagcaattccacccctagctatacactcaaaaggattgaaaacaaatgttcacacaaaagcaaaacaaaaaaaatgtttattttagtagcattattcctaataggcaaaaagtagaaacaacccaaatgtccatcaagtgatgaatgatcaaaatgtattacatccatgcaatggaatattaatcatctattaaaaagaatgaagtattgatacacgctacaacgtggatgaacctcagaaacattacgccaagtgaaagaaggcagtcacaaaatatcatgtgttctatgattccattcctatgcaatgtttgaataascaaacctgtaaagacagaaaggtcagtagttgcctagagctggggagcaggaggcaagcggaatacagtgagatgagatgaagtgaaa

SEQ ID NO: 832318 - DNA, 563 bp, Homo sapiens
agagggaaggaaacatattgaacacaaggcatcatagtagctggaggccttaaaaattatgcacgaccaaaaagaatgatttggtgagagatgtgtagctgattgacaattttagtgtgaattcatattcatttaacccagcagcaatctacataagctatgctttttcccgcctgtatttatgtttcttagcttataaagtcccaatatattatatcttttgttgctttggcagttttaatttagagctctgcgttcacagagatgccacctatagcaaaaactatctttaagaattggaaaataaaatgaatgttttagataaaatattgcaagccattatgtgtagagttaatgtatggaaatttgcatttgtttttctgaatcatggtgtacattaatcactcattgaattctatttctaagcaaataagagaatcaaacatttctaaaaggaacatatgtcttgctattaataacaaggagacaggaaaaatagtaaggtaatataagcaaaaaaaraaatgtaatgaatttagctatcctaaattggaatttttaca

SEQ ID NO: 832319 - DNA, 477 bp, Homo sapiens
gagccaccattttgaacatgcctagtcccaggcagccttttcttactggcacaactgctggcattcacccctgcaagcttctagcttgcttgtctatgtctgcagcttgattttgcaggctgctctttcttagaaaagaaaatgatttgagggctgcttttcattaaaaggaaaacattactgaggactcctgtaccctcattatctgcctaaataatttcttcttaactcctatatcaatggttaatactgagtgtcaacttgattggattgaaggatgcaaagtattgttcctgggtgtgtctatgaaggtgttgccaaaggaaattaacatttgggtcagtgcactgggagaggcagatctaccctaaatctcggtgggcacaatctaatcagctgctagtrtggtcagaataatattaggcagaggaacgtggacagactagagtggctgagtcttctggcctttatttttct

SEQ ID NO: 832320 - DNA, 521 bp, Homo sapiens
ggtctcttccatgtgcctttcaggtacatatttcctgactctcttcagcttcagcgatgtccaaccctttgaatgagaggaactttttgctaatctgtggtgatggaatacwcaaaaaatacgcactgaccttttttttaagctcaatcagccatcattagtgtattttatgtgaggcccaagacaattcttctttcaatgggcccagggaagccaaaaggtcagacaaccgtgatctacatctttaaaaagtatatgatctctcagtgcaaaatctcttatagttctcttttaaacttttattttaggttcaaggtacattcaaagtttcttcagcaatataaaatgtatttctctgaactctacaggtcagtggttgatctcatagtaataaaataaaaatgtaagaatattgacttaggttgtcctgtctatacaccaccattctgtgacattagaggggcaaaatttaagactcgatgaaagaagagttggaagttcatgttaaaggggaaataaga

SEQ ID NO: 832321 - DNA, 394 bp, Homo sapiens
ataagtgcagaaaaaccaataataaatgatttcttgataccatgcaaatctcccgaagttcatgctatggagatttaggttttaacattagtttkcgttgcaatcctgtaatgagtactcatttgttatcttgcactgcatccttcgttctttgtctctttccctccgttttatgtgttactttggttaataaaattcacatagatgaatggtaggggggaataagatggattttagacaagtatttaattctgaaaaatctgaagagcttactatttttattgtgttcttatacccttaagtagtttgtaataccttgccactcatatgccaatcatctgagaatttttgctaaaattttatctggctatttttttgaactccaactttttaa

SEQ ID NO: 832322 - DNA, 520 bp, Homo sapiens
aaaaaatgttccttaggatgtgctctattctaccttgcatactgagataccgtagtgttttgtggtcatcccaagagcaagaacaaccttcctcccaaaattggctaggatgttgagaatgatgacaccacatctcactaatagggtgtgaaatgttgattattcacataaaaaggctttctggggagagcagggcagctggtggtccaaaatgattttaacaaaggaaaaggtgagtggtttggagttttattgtggttagggaatggggccaggtgaaggtttccacctgaagtccaggtcttaggtggtgtgaacttctggccaacccaagagaaggagaataggggctttctgatcatctgccaggtttggagcaagagaggaagaaggaatgttgaggcttaaaggatatcaacagtcaagtatcaaaaatggagtcagattsttcattaaaattcaccctgaagtttgatggatgatggaaatgtgtcacgtctcatttatttgaattggaact

SEQ ID NO: 832323 - DNA, 623 bp, Homo sapiens
tggctcgtccaaatgtggggcaagaagagaagagaaagaaatgggcctcaaaagcagtcagtagctgagaaacaaaacagaagtcagactctatcaaacctagcttaagaactacgatattaaaaccttttyttcgtttattcagtaataaaaatttttcccctcgtttccctggaaaagtaatgtctaagggatctatcctttgattcctgaatctccagaaatattcctagtgccaggagcagagattcaatctctacatgtgcaaaagataaatggttagaaaaatatctgaaggcttcagcagagtgcaactcggtgattttaaataccccaaattgatttaccctatgcttaggctagaatcaggagtaattaggaattgcttttgcactttttctcaatcaagagtgaatacatttttttaattttaaaaggaaagttagaaacttactattttttgtaatctagaatctggatgcaaaagaatgcaaaaactttcagagaaataatacattttgttgtcattaaagcgattacccttttcagggggggaaaaaaataactttccaaattagatacctcaataaagacagaaagttggtctgtaaagaacacaagtc

SEQ ID NO: 832324 - DNA, 551 bp, Homo sapiens
gatttttagtgacttatacaagctctgtatacatcctacacaataatcagtcatccattaaataggctacaaagagttttctcagcacattactcatcttttaactttatcatgctttttattgtgcaaagatgatttttaatttttatggggttttatttgtcgatcatttcttttatggcttctggtacttatgtcttgtttaagaaggcctttttcacctccaatcttataaaaatgtgctccaatataatcaccaaatacttttaaatttcttttatgttcagctgcttaactcacctgaagtttatttttgtgggtgatataaagtaatagtctactttcccttttttatctacccgtaactaattttcctaacactattaattgcataggttatacttacctccatggatttgaaatatcacctttattataacctaaatttctactgatgatgcatggatctctcttggtctctctattgcattgatttccactccagtytaccacactattttgatcacatctctagcatacattttaatgta

SEQ ID NO: 832325 - DNA, 593 bp, Homo sapiens
atctctctgacttgacacttctactttcctccctcttctacttctcaatgctsttgtgattaacattggacccactcacatactccaggtaatctccctattttaaggtcagctgataagtaaccctaattccatctgcaaagtccctttcctgcagtatgtaagttagtgtttgattgaataacggggtaggaatcttggggatactgctttggaattctaccacagcatttatttgcttataggaaatattttgttttattaataataacaaattaaatgtactcagtgccactgtgtggtttacatttttcccttctacacagtcccactgtcctggcctcaggaagattaaagtccttctataaatatagagcatgagttttcagaagatgggaaatgtgcaaaaacagttacaatcaagcaattttttcaagcaggtaatttagaaaaaatacaactttaaaaaccagcttctacattaattttcatgatatttctttttggaagtctttatttttaataatttcaacttgtcttttagctttagggggtataagtgcaggtttgttacatggatatattgcctgatg

SEQ ID NO: 832326 - DNA, 617 bp, Homo sapiens
tcttctcttggtttctctgtttaccttcggtacataagactctagatatagtagaaatgatgaaatgtgcacacagggcagagaaatttggtatgtttgccacttggtgtatccctttctggaggtgaaaccctcttccagaagtgtattaattgactacagagaagaaagagcaggagcattttatcacattgcgtaggaatggagagggcaaggcactagaaggtgctctgtgggggcagtgcagcctgtcaggatgacttcagcggtgtgagtcagccttcgtaaatgacaggagcaggacctccttggtcaaggcgtccagtgtggtgagccttggggcccagccatctgtcgaggaagatggcgccatttatttcctgtgcttggtagttgcagggaactcctttgagcaaaaaatcttagaggcataaggtaataggataagtaaaagcaacagagacattactagggccacagctggggcagaggcagaccctcacagagatgaaaagagcagacagggctctcccaacagcattcttggtgcagaaattgccgatgtgtgaccttggggaaccaaggatggatccsatctcctcttttccaacagcctt

SEQ ID NO: 832327 - DNA, 529 bp, Homo sapiens
aaggatttcattctcttcagcattagatggaatggataacatattaatcttagcatgttctraatagtctcaacacagtgttgcattaaagaagtattaggctaatatccaaaaaaatccctagaaaagccatttagctttcactgatgtctttcaacaaggctcctgatggaaatgcctttatatgtagcaaaattgtctaaaatcctctttctccattctctcccagcaccttgcatatcacactgtggcagctacccctaatatcttctcttctctgtctcaaaattctttaaagtctcaactcgtgctagctcctatctttctctttccctcaggctctattccactcctccccacccccagacccattctttcattctttgcctcttttcctatgaatatagtctctcctctttcaactttcctgatgaacacaatccaggaagcaagtgactcttcctctcttgaatctggggaaaaagtactcttgcatcaatattttcaatcttcatcacagtggaaaggg

SEQ ID NO: 832328 - DNA, 595 bp, Homo sapiens
ttacagatgaggacacggaggctttgagaagttaaataacctatcccagtagttargattggaaaccttccgatcccatatccagggctgtctccccactggagagtcctaccaccctaaagagaagacaattcccaattcctggccactaatccagtgatatgcttcagtccgcaaagccagcatctcataaaaggtcgcccctttcttatttcaacgtgcgctaatttccttcctcccctcctcttcacaggtaggatggacaggcagccaggtgtctgccagggagctcagttttcttcttctccaggcacatcaactctcactttgcctttgaatttctggcagcaaggactggagaacccacagaacaggaatacccctgtctcaacactgagttcccccttagaataatggaggggtggtaggggccagcccccatgcgctccttcccaggtggagagaggcagagcggaagacctcccccactccagcgcaggctgaagcctctgtcacctgaaccctcacctggccctccgcttcctctcagcaccccatctcctggccgcttacctcgctccagacaacctgatca

SEQ ID NO: 832329 - DNA, 595 bp, Homo sapiens
ttacagatgaggacacggaggctttgagaagttaaataacctatcccagtagttaggattggaaaccttccgatcccatatccagggctgtctcccyactggagagtcctaccaccctaaagagaagacaattcccaattcctggccactaatccagtgatatgcttcagtccgcaaagccagcatctcataaaaggtcgcccctttcttatttcaacgtgcgctaatttccttcctcccctcctcttcacaggtaggatggacaggcagccaggtgtctgccagggagctcagttttcttcttctccaggcacatcaactctcactttgcctttgaatttctggcagcaaggactggagaacccacagaacaggaatacccctgtctcaacactgagttcccccttagaataatggaggggtggtaggggccagcccccatgcgctccttcccaggtggagagaggcagagcggaagacctcccccactccagcgcaggctgaagcctctgtcacctgaaccctcacctggccctccgcttcctctcagcaccccatctcctggccgcttacctcgctccagacaacctgatca

SEQ ID NO: 832330 - DNA, 534 bp, Homo sapiens
cactgataagggacagactgcctcctcaagtgagttcctgacccctgtgcctcctaactgggagacatctcccagcagggrccgacagatatctcatacaggagagctatggctggcatctggcgggtgcccctctgggatgaagctttgaatgtttttttgcgtctcaatctccagttcagctctgattttaattatttactgccttttgttagctgtggagttagttttctctcatttctgtagttcttttagtgtggtgttagattgttaatttaagatctttctaactttttgatgtagacatttagtgctataaatttcccttttaacactgccttacatgtgtcccagagattctggtatgttgtatctttgttatcattagttttaaagaactttttgatttccctcttaattttgctatctgcctaaaagtcattcaggagcgggtggtttaacttccatgtaaatttatagttttgagtaattttactcatattgaattttatttttattgggctgtggttcaaa

SEQ ID NO: 832331 - DNA, 637 bp, Homo sapiens
gttagctgtttattgtgccaacttctttgtgtgattgctatacagtgtcaccggtctgtgtaccaagtgtgtttctgtattggctgctaatggtctttctttttgatatttagtgcttctttcaggagctcttgtaaggcaggtctgatggtaatgaattccctcagcatttgcctgtctaaaaagtatcttatttctcctttgcttatgaaacttagtttggctggacatgcaattcttggttggaatttcttttctttaagaattttcaatataggcccccagtctctcctggcttgtagcgtttctcctgagaggtttgatgttagtctgatggacttccttttgtaggtgacttgttctttctctctagctgcctttaacattttttctttcatttcaatcttggagaatctgatgattagtgtcttggggataatctccttgtgcagtattttgcaggggttctctgtatttcctgtacttgaatgttggcctctctagctaggttggggaagttctcatggatgatatcctgaaatatgttctccaagttgtttccattctccccatctcagggacaccaaagagytgtagactaggtctctttacataattccatacttcttggaagtta

SEQ ID NO: 832332 - DNA, 337 bp, Homo sapiens
ctagttctggacttttttttttggctggtaggcaattaattaccgcctcaatttcagaagttgtgattggtgtattcagggatttgacttctttctgatttagtcttgggagggtgtrtgtgtccagaaatttatccatttcttctagattttctagtttatttgtatagaggtgtttatagtattctctcatggtagctgatatttctgtgggatcagtggtgatatcccctttatcattttttattggatctatttgattcttctctctttttttctttattggtctggctagtggtctacctatttggttaatcttctcaaaaatccagctcct

SEQ ID NO: 832333 - DNA, 337 bp, Homo sapiens
ctagttctggacttttttttttggctggtaggcaattaattaccgcctcaatttcagaagttgtgattggtgtattcagggatttgacttctttctgatttagtcttgggagggtgtatgtgtccagaaatttatccatttcttctagattttctagtttatttgtatagaggtgtttatagtattctctcatggtagctgatatttctgtgggatcagtggtgatatcccctttatcattttttattgkatctatttgattcttctctctttttttctttattggtctggctagtggtctacctatttggttaatcttctcaaaaatccagctcct

SEQ ID NO: 832334 - DNA, 337 bp, Homo sapiens
ctagttctggacttttttttttggctggtaggcaattaattaccgcctcaatttcagaagttgtgattggtgtattcagggatttgacttctttctgatttagtcttgggagggtgtatgtgtccagaaatttatccatttcttctagattttctagtttatttgtatagaggtgtttatagtattctctcatggtagctgatatttctgtgggatcagtggtgatatcccctttatcattttttattggatctatttgattcttctctctttttttctttattggtctggctagtggtctayctatttggttaatcttctcaaaaatccagctcct

SEQ ID NO: 832335 - DNA, 646 bp, Homo sapiens
gcagtgaggtcccatgcctggcccatgaaaccattctttcttcctaggactctatgcctgtgttgacaggggctactacaaaggtctccaaaatgccttcaaggtctttttctcattgtcttggatattggyagttggttcccttttatttatgcaaataacatgctaaacatgataaatatcctgacttcaaaaatcatgcatattccatggcagacgggaggcaggactagattgcagctccagacagagcagcatgtggagttttgcattgtgaattttagctccaggtctactgcaagaacaaaccagcaatttcgagagcacccagagaccctctgaaagaagagaactgttcttacaggacccaggagacactgcaaatactgtgagtgccccagctagggaagtgggaaacagagactctcctttactaacacacacccccactggagaagctgaaggtctgtttgtgggagaagtttccaactttatatggagctgaatcaagttagccaagcgaaatacaggggtagaggaagcagcaaaaaggccctgggggcttgctgggtccccaagcagcccattcctgcctgacaccacagggatccatcaggagggtggccagaggagcagcgcataaaac

SEQ ID NO: 832336 - DNA, 637 bp, Homo sapiens
tttgacaaaatccagcatccctttatgattaaaactctttaaaatcagcatccaagggacayaccttcatgtaatagaagccatctatgacaaacccacagccaacataatactgaatggggaaaagttgaaagcactccttccgagaactggaacaagacaaggatgcccattctcaccactcctcttcagcatagtactggaagtcctagccagagcaatcagacaagagaaagaaataaagggcatccaaattggtaaagaagtcaaactcactgtttactgacgatatgaacatttaccttgaaaaccctaaggactcctccagaaagctcctagaactgataaaagaattcgacaaagtttccacttacaagattaatatacacaaatcagtagctcttctatgtacaccaacagcaaccaagcagagaatcaaatcaagaactgaacccattttacaatagctacaaaaaacaaaaaaaaaaatacttaggaatatacctaaccaaggagtcgaaggacttctacaaagaaaactacaaaacactgctgaaagaaataatagatgacaccaacaaatggaaacacatcacatgctcatggatgggtaaactcaatattgtgaaaatgacca

SEQ ID NO: 832337 - DNA, 625 bp, Homo sapiens; identical to SEQ ID NO: 831322

SEQ ID NO: 832338 - DNA, 326 bp, Homo sapiens
cgagcccccagcccgtgtcccaagccccatcctaagcctgtgtgtcgcaycccaaatgtgtgccccacctctccaagcctccaccgtacatccgaagtccccaccccgtgtcccaagcccccatcctaagcccgcactcctcaccctaagtctgcacttcaagccccaagaccgcaccgcggccctgagcccacaccctcagtctcctctgcgtgccccaaagcctccagatctccgcctcgcgccccttgggcaggagcggctgcaggggccctgggtccgaggatccgcgggagcggtgcgggagacgtccgcggtcagagctc

SEQ ID NO: 832339 - DNA, 605 bp, Homo sapiens
atcaaatggcatatggttggatggggttcctcactttgcagtgagtggttatagrcagtcaaggaaggaaggctagaaaggtccatgtggtagcataattgggtagagagaccagtgtgttctcacttttaatgtaatcaaattacagaaggttagatacatagtttactaggccagtcagttgagaggtcctacaagtacttataccacgttaacaatgcacatacccagtattacaattttttaaatactattctttaacatcagaaacaagcagtctttagaaaaatggctgattctatgtacgaaaaagataatatagaaaatgagtttagaatttattataatagcaggaaacagggaagtgttcaaaaacaaaagcatgaggtgagctgtaaggatgcaggatccaaactaaatgagctcccagcacataataaagctgtggtggtttgaaaaataaaatgaataatgtagcatggatcttcttcagagtatgaaatagacatccataaaccaatacacatattaataagtgatcaaataaagaaataataggaagaagaacacatctttttacagaagtattccaactatgttaggtt

SEQ ID NO: 832340 - DNA, 574 bp, Homo sapiens
ctcagcttaccgcaacctccacctcctgggttcaagtgattctcctgcctcagtctcccaagtagctgggagtacagrcacgcacaaccactcccatctaatttttatatttttagtagagataaggtttcaccatgttggccaagctagtctcaacgtcccgacatcaggtgatccacccaccttggcctcccaaagtgctgggattacaggcctgagccaccattttaactaaggcactgggagctgccctctgagaccttttgagtcctggaattctttctgagaccttaggagagactcgtgggacatatcttcatcattctcaatgtgtgaccctgaggatgtggcctgacctctgtacacttctgtgtgaaagagtagattgtgaattgcagtgacaatttcatatgtaaactctataataggccagcactggaggatattctcatcaccaagattactgcagttacctttcctggaaaccagagaggaactctgtgagccctcacctctgagtgcacaaggaaccctggtcctgactgacaggtctcacatgcgacatgggggaaaa

SEQ ID NO: 832341 - DNA, 574 bp, Homo sapiens
ctcagcttaccgcaacctccacctcctgggttcaagtgattctcctgcctcagtctcccaagtagctgggagtacagacacgcacaaccacycccatctaatttttatatttttagtagagataaggtttcaccatgttggccaagctagtctcaacgtcccgacatcaggtgatccacccaccttggcctcccaaagtgctgggattacaggcctgagccaccattttaactaaggcactgggagctgccctctgagaccttttgagtcctggaattctttctgagaccttaggagagactcgtgggacatatcttcatcattctcaatgtgtgaccctgaggatgtggcctgacctctgtacacttctgtgtgaaagagtagattgtgaattgcagtgacaatttcatatgtaaactctataataggccagcactggaggatattctcatcaccaagattactgcagttacctttcctggaaaccagagaggaactctgtgagccctcacctctgagtgcacaaggaaccctggtcctgactgacaggtctcacatgcgacatgggggaaaa

SEQ ID NO: 832342 - DNA, 378 bp, Homo sapiens
tttcctgtgatcccgggatttgttttttgtggctgcatagcaaatgctcatctgctaagtcacttaaaagaataagcatttattctcccacagtgctgcgggacacaagtgtggcattaaaaggaccatgctcactcctaaggctctgtgccaggacctttgtagcctctcccagcttctgtgggctttgggcattcctgggctttccttgtttcatagacgcatctcttcctccatcttcatgcgccttcccctctgtgtgtctctgtgtcctcttcttttcaagacaytgtcattgtatttaagccccatcctattccagtggaacataatttttaactagctacacctgcaaagaccctatttccaaatgaggca

SEQ ID NO: 832343 - DNA, 378 bp, Homo sapiens
tttcctgtgatcccgggatttgttttttgtggctgcatagcaaatgctcatctgctaagtcacttaaaagaataagcatttattctcccacagtgctgcgggacacaagtgtggcattaaaaggaccatgctcactcctaaggctctgtgccaggacctttgtagcctctcccagcttctgtgggctttgggcattcctgggctttccttgtttcatagacgcatctcttcctccatcttcatgcgccttcccctctgtgtgtctctgtgtcctcttcttttcaagacactgtcattgtatttaagccccatcctattccagtggaacataatttttaactarctacacctgcaaagaccctatttccaaatgaggca

SEQ ID NO: 832344 - DNA, 402 bp, Homo sapiens
tctgcatttagtgcctgtaagaaggtttcctcctggtacaacaaaactgtggtatttcagagacgtagagctaggcacagcatcatgaaataagggagggtccctggaggaaacatgtagatgtagaggcagccccacaccctggcagtaaaccagcctctcatctccacccacacctgctctggggctggccctgtgcttcctgcaacctgctcttcccctggtggtcttgagtcccccttgtggtcctgagtcttgctggcggtcctcagtgccctgasagcaagttttgtgtcagggctcacaaggacacctcctcactgagtctttcacagtaatactcagccatgtcctagccagccatggagctgagcttcagaaagaactggctcttggttgagt

SEQ ID NO: 832345 - DNA, 402 bp, Homo sapiens
tctgcatttagtgcctgtaagaaggtttcctcctggtacaacaaaactgtggtatttcagagacgtagagctaggcacagcatcatgaaataagggagggtccctggaggaaacatgtagatgtagaggcagccccacaccctggcagtaaaccagcctctcatctccacccacacctgctctggggctggccctgtgcttcctgcaacctgctcttcccctggtggtcttgagtcccccttgtggtcctgagtcttgctggcggtcctcagtgccctgacagcaagttttgtgtcagggctcacaaggacacctcctcactgagtctttcacagtaatactcagccatgtcctagscagccatggagctgagcttcagaaagaactggctcttggttgagt

SEQ ID NO: 832346 - DNA, 623 bp, Homo sapiens
cctgcttgattgctctggctctgacttccactactacgttgaatatgaaatggtcagagtgcttgcctttttttcagttctccaggggaatgtttccagcttttgcccattcagtataatgttggctctgggtttgctatagacgactcttattattttgagtcatattattttgatgtctagtttgttgagggtttttatcatgaagtgatgttgaattttattgaagtttttctgcattttttgagatgatcagatagtttttgtgtttaaatctgcttatgtggcgaatcatatttattgatttgcatatgttgatccaaccttgcatcccaggaataaagcctactttatcgtggtgaattaactgttttatatgctgctggattcagtttatcaatattttgttgagaattttttgtctgtgttcatcatggacattggcctcaagttttctttcttcattgtgtttctgccagagattgagtttgaaaggattccctcctttttttgtaatagcttcagtagaattsgtaccagtttttctttgtatatctggtagaatttgactgtgaatccatctggtctaggacttttttggttggtggtagtttttttttatt

SEQ ID NO: 832347 - DNA, 543 bp, Homo sapiens
tcatgggaatttaggatgtttccatatctttactattttaaaagatgctgcaatgaacatgaacatggagtgcagatatctctttgacatgttgatttcatttcctttggatacatagccagtagtgagactgctggattctacagtagattttgtttctttattttttgaggaacatttatagtattctccataaatagctgtattcatctacattttcactctccatattctgagttctgtttctgtcatttcagccatctcagccccattcagaacccctgttgaagaggtgctgcggttgtttggaggaatgagggcgccctttttgttctcatgacttttgcactggttctttctcatctttgtgggcatatccaccttcagtctttgaggttgctgacttttggatacatttttattttcttttatcctattggatgatcttgakggtttgattgtggtataaggtggattcagccaactggcttcatttctggaaaaatttaggtggtcagtgctcagctcccaacacctggactg

SEQ ID NO: 832348 - DNA, 607 bp, Homo sapiens
agagttctgaaaatgtgagcgccagcagctgctgcttttgcattgtggtgggcttggcagaggagcagagactggaggcagtgggccaaagtggattcttgaatgggagggtcacaggaggaatgcaggatttaraaacattatcctggcagcaagagatgagggaaggaaaaaccattttgcattgggggtgaattttcaggaaaacttctctcttcatggttcctaataattttggtgggtactcaattataaataacaacaatatttgtagcctgagggcttttgtatctataaggtgaatttcaagctcttcagaatgcccagcaacaatgcctactgtgtgctaagtgctagggaacaaggaaaaataggatttggcctccactttcaaggtgctctgaacaagagagaagacagacggtaaagacatagcacacgtggagtgtgcctgggacagtggaagatgcctgggcatgtaccagcacataggtttcaggatgtgtggagcgtgaggggaagtgaggtggagaaggaaggaaacttgtgtgagtttgcagggatcagctcaggaagcttcttccatgcttaggtggtttgcatgttt

SEQ ID NO: 832349 - DNA, 601 bp, Homo sapiens
aagcaagggaaaaggacttggagtggaaaagtattgagtattcagtcagagtgaaaaaaagtatctttagtgtttccttcctcctytccccaataaggaatctctgcagaggtacccaaagaaggcctctgctatggctccaaataaagagacctctgaatgggggcctagtccaggaatgctgacatatgtaagagcatgacaggtcagcgaggtcttagttcttgactgtaactctcatcagagatggcaatgcaccaactgtgcacaaaatctggggaggcaagggggcagctttctccctttaggcctgccagtaaaagcctttccctgtggtgtctgccttcaaaaatgatacaaaggtttttggctattaccccgacttctcactttcaaagaactaactcgttttctcgatcttctctattatctttctattctttatttcattcatttctgctcttatctttttctgcttgctttgagtttactttgtttttctttttccattttcttaaggtggaaggttatgttgttttttttttacatgtgcatgtttattacattgatctattgcttaatgctggaatttgagtttcta

SEQ ID NO: 832350 - DNA, 574 bp, Homo sapiens
tctctgtgaatgaggtgggttgtcacagggagaatattcttggagttatctctatctggattcatgctggaaatctagcagtacttttttttttatgtcacccttataaatagaaactgagggtgaaatacttctcccattcccattattgtgaaggtgcagttctacccaggaggcctgcagtctcctctccctgcagcgcaggctccactctctgatgtgacactagagtactgctgtggcattggggttcatgtaagatgtgaaccagcagctttgagctgtgtgttgtgggctgtgtttcagtggaagttggtaggcgtaaagagaggacactggccactaggagaacgcaagcagggtgctgcatgttctacattctgtgagaggttccgagagtaaatagaatctgatggccaaatctgtaaatgtaaacaagcatcttaggagtgaaagatcaagrctacaaagtatccagagcgataaccacaactatacctaccagtaaaatgcaagactggaatacagtattgttgtccttcctcttactgaagagctagaatcaggacaggtg

SEQ ID NO: 832351 - DNA, 650 bp, Homo sapiens
tcgggatccaattattcccattgtatttacattttttagctgagtgactgcggttcccattgttggacctgacatgcaragaagagcaattacagggctcttcaaagattcaggtgctgccctcacaaatctattttgcaaggcaatggtcaagggtatatattttggaccttccctgctggaattagtaggtctaaagtgactaatccactccagtatcgcaatctccctaagccttttgatctctccctctacattaaaccaagggacatcaggcatttccagctcactcacagtgggctatcattttttttttttttttttttttgagacagagttttgctcttgttgcccaggctggagtgcaatggcacaatctcggctcactgcaacctccacctcctaggttcaagcgattctcctgcctcagcctcccgagtagctgggattacaggcatgcaccaccacacccggctaattttgtatttttagtagagacagggtttctccatgttggtcaggctggtctcgaactcctgacctcaagtgatccacctgcctcagcctcccaaagtgctgggattacaggcatgagccaccacacccggccagtgggccatcttttaatccatatttcagctaaccaagca

SEQ ID NO: 832352 - DNA, 588 bp, Homo sapiens
tatgatatttcttttggtatggctaaactaatatttattcaatgatytctaattgtaaaacacttaattttggttctttgtttttgctgttataaacaacactgaaatgaatatcttggaacatgcaaataattattttctaagagtaaattcctagaagtgggactgcagaaatcaacaccattaaatttcttttaaaaatctacctttgataaaatttacatataaataaacatatttttgcatgttcctgcatgagagtgatatactaatatttgttgatgaaaattatgtaacaagtaaattattgataatttagtaatgcttttttactaaattttagtaaatttacaaatttactaaatttactaaaattacaaattgcaatttacaaatgcaatttactaattgcatttgaactgcagtggtgaacccagtgtatatagaagatattatgcattcaatttatagagaatgtgcctctgattgtggattcaggaactccttgtgtgttagctccatggctctctatgagtttataggctggcgaccacagctttggtgattatttaaagaagcaattcattt

SEQ ID NO: 832353 - DNA, 631 bp, Homo sapiens
attgggctgaagcatgtgcttggggaatagaaagatggactcaatagttgataacaaggaatccagccaggtggataaagttattcaaggagtgtgatgacaggcagcaggtaggggcagcagacaatgcttctgaaagttgggctctgtcagggtagttcataaagggagcataagtaagctagacagggcatgatgtacacaagttttttttttttttttgagacggagtctcactctgtcacccaggctggactgcagaggcgccatctcggctcactgcaacctccgccacctgggttcacgccattctcctgcctcagcctcccaagtagctgggactacaggcacccaccagcacacctggctaattttttgtatttttagtagagatggggtttcaccatgttagccaggatggtctcgatctcctgacatcgtgatccgcccgcctcggcctcccaaagttctgggattacaggcgtgagccactgcacccagctgtgtccacaagttttgaagcaagagacctcaagcttagaatcattgatttacttattcattaaacattaattragtgccttttgtgggacagccattatattaggcagtataaatacaagatgaataa

SEQ ID NO: 832354 - DNA, 566 bp, Homo sapiens
ccgttgcccttccggatctatcccgtggatgcagagcaagagcaacccatctttgttcagcatcccaggagacaggcctctattgacagcatcagtctggctcctttgccctctgatttcccattgaatgtggccagtgggagggcccagcagatggagggccaggaggaggaagagcctgcagcatttgttctcctggctcccaccctgccaggtctctgtctgacagtggctcacgcttttccacagcccctgtcaggtggcctctcccaaagtgacagtgttcacttggttctgtaagtgttttctccattgcctcttgccagggagggtaatggcttcctagagccagatgccagcacctgaggttgcccaccaccccatgctgtttcccttaaccctgcctacactttcaagaattgaaactctttgcagcctcctttttttttttttwaaaaaaaggtactatcgatttcctaaaggaccgtgagtgatatacactcagagattcttttgtcatgttactttccgtagctcaatatggctgttatccacattatacaaag

SEQ ID NO: 832355 - DNA, 622 bp, Homo sapiens
catttaagtgaataatttaaattaatgaattgtctggtgggtgaattatatctcaattaaaatgtaaaagaaagaagaatgatggactgccagatcctgaaacaraactgcctgctctgtttgattgagaagatcacgaggctcagggtgcagactgtggaaggcattccaaccacatctcaatgatagagacagtgacctaagtgaccttctcaggtcatttagcattattctcttcttgggtagaaaagtggcattagcacctaactttgccaattaataccttactactctccatgggcatggccgtgctttgtggtctttgacaaagggtaccagcccctcaaagattatccagcctcgacctcaattcttggagaatcaatgggatctgaggcttcttacagtcattcgtgaatttaagtcccaaaccagcctgcctctcaaacaaaaagtttagctcacttcattgaaatctctttttggttctataacccacagtgcatactaaacacagggtagaaagccctcatattaaataattttaatttcttgacttcaaaggttgctatttctcatgcatctgagttttggaatagcagactcagacttgctacaagaa

SEQ ID NO: 832356 - DNA, 510 bp, Homo sapiens
ttatgggaattatcatcaggagggggagactgaggatgcagaagagagagatgagaatggcagaacctgtccttgagcatgagtcaggggtgactctaagtgcacaggtggtgggacttcaccagcagcagagacaggtgattcctaagaagaagggaaggttggagtgtgggcacaggtgcagatgggcagttataggggagggaggtggggatgatttcttctgattgcttcaactatctcagcaaagctgtagggaggaagtgttaaataagggagaggagaaagtataaaataatctaggggagaatgtgagagagaagggattagggaaacactgtatgactgctgggcagcatgaaagactgcatgaaaattcatggtcccaaatttaataggagascagctagcacagttttatgtcttttaactgcatggctgcaggcacggagcaggtggggagttgcagttaactaggggtgtgatctatccaagcaagtatgatgtgag

SEQ ID NO: 832357 - DNA, 464 bp, Homo sapiens
tacatgtggtttggtcacttcatggctgaggtaagaacatgcttgtggaagacaagtctgtggcttggtgagtctgtgtggccagcagtctctgatctgtgcagggtattaatgtgtcagggccgagtgttctggaatttctctagaggctcgcatgggctcctgaaccaattgtttctgtcctgctggtctgtctgtcagggttggaaaagtccaagccataggacccagttttctttcttagctgatgttttcctgctagaacaccatggactgttacttgccttgagttggaagtagtttgcatttatacctgtaaatatatttatccttttaatttatgtaaggttttttttttgtatgcaattctggattctttaaagagatgacaatgaattttggttttctactgttatgtgagwacatcagtccccagcaacatgtcattgtgtaagtagaaataa

SEQ ID NO: 832358 - DNA, 570 bp, Homo sapiens
ctagacaaactcacaaagataagaaagaatcaaagaaaaaaatgctgagaactcaaaaggccagaggacctcttctcctccaaatgatcacaacatctctccatcaagggtgcctgaatggaagawcagatggatgaactgtcagaagtaggcttcagaagatgggtaataaaaaactgtgatgagctaaaggagcatgttctaacccaatgcaaagaagctaagaaccttgataagaggttagaggaattgctaactagaatagccagtttacagaggaacataaatgacctgatggagctgaaaaacacagcacaagaacttcctgaaacatacccaagtatcaatagctgaatcaaccaagcagaagagaggatatcagagtttgaagaccaccttactgaaataaggtatgcatacaagaaaaagaatgaaaaggaatgaataaagcctcccagaaataagggacttcaatgaaaagactgaacctacaattgattggagtaccagaaggagatgaggagaatggaaacaagctggaaaacacgcttcaggatattatccaggaga

SEQ ID NO: 832359 - DNA, 571 bp, Homo sapiens
gctaccctggggatagcagggcgggtgccttaatggggccccaagctgatcgctttctctgggagggaaccatgagggtccaaagcttgatggaggttcttaragtggcaataatcctctggaaggaatttcaaaattgcccggcaacaatacccattgccgtgtgcctgggaacaccctctggagtcttgtgaggggcagatgtatcatcttgttttaacttataaataaagaaatcactggggccttagggacacccaacagcccctgatagattctgaaatacatcaggaccagggaggaagttactattgctgaaggccattgctttataattccacaatgcctcagcctctcagtggccagttgacccaggccaatgctaacagctggatgggtcagaataggaggttccagccattttctctatcccaccaaggcctttgagccttgcattagccgttctcttttgtggtccttgctttgcacctacaaatagcaaacttttatctttttaaccagttacagtgaaaaggagtccaatatttggcactaaacaccatttctaata

SEQ ID NO: 832360 - DNA, 571 bp, Homo sapiens
gctaccctggggatagcagggcgggtgccttaatggggccccaagctgatcgctttctctgggagggaaccatgagggtccaaagcttgatggaggttcttaaagtggcaataatcctctggaaggaatttcaraattgcccggcaacaatacccattgccgtgtgcctgggaacaccctctggagtcttgtgaggggcagatgtatcatcttgttttaacttataaataaagaaatcactggggccttagggacacccaacagcccctgatagattctgaaatacatcaggaccagggaggaagttactattgctgaaggccattgctttataattccacaatgcctcagcctctcagtggccagttgacccaggccaatgctaacagctggatgggtcagaataggaggttccagccattttctctatcccaccaaggcctttgagccttgcattagccgttctcttttgtggtccttgctttgcacctacaaatagcaaacttttatctttttaaccagttacagtgaaaaggagtccaatatttggcactaaacaccatttctaata

SEQ ID NO: 832361 - DNA, 547 bp, Homo sapiens
atatatatttttacagttaagattgtatcttaacatcacctttctcaagctctaaaatattatagtcttcctcaaaactatttggtctctccatgttaaatacattcttctggtaaataaggtaagaactggaagtaagttcacataaagctgataaatatcagttggttacagtctcacccctggcaagtagggaaatggaaactgtagcttcttgatcaatgtaattatctcctacccatgatgttggggtcattgcaagttgcttatgtggtcagtggaagaaaatatacagtttcttttttcagactctccatacactattacatacctctctcatacacacctttcctagtcagggactaacaggtggaagagcagttatctgtgttacactcctagacctgggttcaagtaaatacattacaggtttttctcactttatttgacttaggaggtgttgctcttcctacrtctctgcttcttactcttttaaatcaagctggaaagaggaagtgacaatgcactgtcacttactggctgaatg

SEQ ID NO: 832362 - DNA, 606 bp, Homo sapiens
tcacatattcttactatgtgggagctaaaaacatagatttcatggaagaatgagagaatggtagaatgatagtctctggtaactatcattctgctctctactaataccaaagaagactggagaggaggaatgaagacaggttggttaataggtataaaaatgcagttacatagaagaaataagttctaatgtttgatagcccagaggatgactacagttaacaacaaaatattgtatatttcaaagtatatagaaattttgaaatgttctcaacaaaaaaatgataaatgttcaaggtgataaatatcttaaataccctgatttgaacattacagattgtatgcatgtatcaaaatatcacatgtacgccataaatatgtaatatgtaaaattgtgtatgaataaaatacttttttaaagcacaccagtagagacatcaacatgaacaaaagccttaagtggccaagaactttacttgctccaagaactaaaagaagcctagtctgaccagagcattgtaggcaatggaraagcacaaggggaggatggatcagtaggtagtgggctactgattgcattgttaaccaaagggatttttgtactgta

SEQ ID NO: 832363 - DNA, 565 bp, Homo sapiens
catatgtcaccatctatcatggaggcttgataaggtttggctgtgtccccacccaaaccacaccttgaattgtaataatcctcacatgtcaagggcagggccaggtagagataattgaatcatgggggtggtttcccccatactgttctcctggtagtgaataagtctcaccttgatctgatggttttataaatgggagttcccctgcacaagctctcttgcttgctgccatgtaagacatgtcttgcttccccttcaccgtccacaatgattgtgaggcctccccagccatgtggaacagggagtccattaagcctctttttctttataaattacccagtcttatgtatgtcttcatatgggagattttaaggacagcttgtggtaaatattctctcaggtaagaactttgcaatacttgtacattgtgagtaaygtgagaaaataagaaaggagaacattaaatatgaggtatacttactgcttggattatgtttcctgtttgtgttactacatttcaaccataacataattcaacatttagatttcacatcttatttgtttc

SEQ ID NO: 832364 - DNA, 643 bp, Homo sapiens
aatagatggaccactagctagactaataaagaagaaaagagagaagaatcaaatagacacaataaaaaatgataaagggaatatcaccaccaatctcacagaaatacaaactaccatcagagaatactataaacacctctacgcaaataaactagaatatctagaaaaaatggataaattcctggacacatacacccttccaagactaaaacaggaagaagtcagatccttgaatagactaataacaagttctgaaattgaggagctacttaatagcctatcaaccaacaaaagcccaggaccagatggaatcacagtcaaattctatcagaggtacaaaaaggatctgacaccattgcctctgaatctattagaaacaatagaaaaagaaagactcctccttaactcatatataaggccagcatcatcctgataccaaaacctggcagagacacaacaaagaaagaaaatttcaggccaatatctccgataaacattgatgtgaaaatcctcagtaaaatacaggtataccaaatccagcagcatatcaaaaagcttatccaccaacgatccagtcggcttcatccctgggatgtaagtctagttcaacrtatgcaaatcaataaacgtaattcatcatata

SEQ ID NO: 832365 - DNA, 620 bp, Homo sapiens
attattgattcaacccaagggcatctgaaatgccacttgctagctgtgaccttcaacacatcttttcagggtctctatttcagtaacataagaattgaacttagtgacatstaaggtcacattcagctctaaaagtttatggttcaatgaatcagtactattttaaagatttacaaattgataacttgctgttccaagaaatgtcagtgccttccagtcttttctaaggcgcgtattaaatcttggcatattaaccctgtgagtggaaatgaaggtgacagtgggaagatgtccttcccactgtgtccctgaaggtttctgacaattccactatccatcacaaggtcatgtaggctattttgagggaggctattgagatcttctaattagcaaagtgcaaaatcgaatattatgcttacttacttagaagcaaaatgctgagacaagcatcctttcattttaaagtttgagtgccatatcagtggtcaccatcagtgtgaaaaaagatgcaacttaatggatactttccatctggctggataaatttcattagtatccgtatccatcactttggggtatgagaatgacatagcccactcatgtcctcttatgagtgtagg

SEQ ID NO: 832366 - DNA, 283 bp, Homo sapiens
gaaatgttctcccaaaggaaccagaaagtctcagcrtaccataaggattcagaagatgggcctaacccagataagacacaaacagacttttcccaaagcctcagccaacacctatcacccctactcctaagacaaccatttgcctacagggtaggcaggaaacacaaagggaaaggagataggaactgtggagcaagtataaaattcagagccaactgggccctagaaacttaccggatcccctgggaagcccttctctccatactgcccaggggcacctctg

SEQ ID NO: 832367 - DNA, 617 bp, Homo sapiens
agtcatatggcagcagaagagcacaaggagtgcctcagattgcagttctggtcacccacagaccatcagatgatgaggtgcatgatgctgcgctgaaccttcgactggaggatgtaaacgtgtttgccttgagcatccaaggggctaacaatacccagttagaagaaatagtgtcttatcctccagaacagacaatttccacgctgaagtcctatgcagacttagaaacttacagtacaaagttcctgaaaaagctccagaatgaaatatggtcccaaatttctacttatgctgaacaaaggaatcttgataaaactggtatgttttttaaaatacttttctaattataaaattaatataagtggttacctaggactagggtgggagtgaggatcaactgtaattggataaaggaactttcaggagttgtgggaatgttctaaagctggattttggtgatgcccatacaacttcaaacatttgccaaaaatcattgaacaatacacttacaagaggtcaattttataayatataaatcacacctcaataaaatgtaaaatatgtgttaattataaaatattgtaatagtatggcttgacatacagaagaaaatagaa

SEQ ID NO: 832368 - DNA, 595 bp, Homo sapiens
tgcctttgccaactaactctggcaaaatctttcccctctaaagtgtaggatacagtacttagagcaatacaaaaatattttagagtcaaatcaatgttcacatccttaactgtaaatggttttaaaatggttacatgtatatttatttgtgcctttgtgacttaaggagaatactgaggtttacatttgcaagactaagttggtttgtatattctattcttcttccctcccctctaccagttgagcatttggggaaaaattttctcatcattccaaaattaaatgagtacatctccttagacttgttcttcgggactgttaaatgcattagtttttagggttatgtcagtcaatcaaaatagctcataaagataagatttagagtcagtagtgatagaccaggtgttttagtaagactgaacttcagaagtagagacacaaagatgatactgcctcctttatcttgtcccgagatttttcacgttaggaattttccctgagattttgcatgttattggattttcaaagtgcaactgctacagctttacatgagatscataatttagccagaattttgaaattttaagtccttcac

SEQ ID NO: 832369 - DNA, 663 bp, Homo sapiens
atggtcaaaagggcacaattcagccctatatcatgccaattcccattaatctttggggtagagatttactggcacaaagggggactgaaattaatattccacataactcttatagtgctcccagtcagcatatgatggaaaacatggggtttgttcctggactcggtctcagtccaaagcatgaagggattactaaacccctcccagttactataaaagaaaacagggctggtttaggttatcctttttagtggcggccgctgccacgcctccgaatcctatccctttacaatggaaatccgacatacccatttggatttagcagtggctgctttctaaagaaaaactggaggctttaactcaattggtttctgaacacttacaacttggaaatgtggaatcttctcttttctcttggaattctcctgtgtttctagtaaaaaagaaatcaggcaaatggcggatggtaaccgatttaagggccattaatgctgtaattaaacctatgggggccgtccaacctggcatacctgcccctgctttaatacctaaaaattggcctctcatagttattgatcttaaagattgctkttttcatattgctttacataaatcagaatgtgaaaaatttgcttttactataccatctatcaataatcagga

SEQ ID NO: 832370 - DNA, 616 bp, Homo sapiens
tatctcacctgtaagatgaaaatgtaccctagtgagacacaaaagtctagtgagacacattttacttaaataaaaattttaaatgtttatgtcatgacatatgtgtagcattttatttgccatttgccctattctttaaataacggttttgaagtcatatattccttgagaagcatttgctattttaaagggattccaatcagttattactaatcttttggggaaaaaaatatataataaaaaggcaatttaggatctatgtgagctaaaaaatagatggaccatattcacttcagttatctttataactgtgtttcaattgtctctcttttaattactgccaatttatttaatgtacatagcatgggggagtcacagggaaatgattatccaataacccaattaggtgcaggtgcaggcatatatacacttcttcataagaaaaggggagagatgcggaaaatttggcaacttgaaggatggtaaattatttttacagggaaattaggaaaaccaggcttgtagactatgcagtttgctgytgtttttatcaacctaaataacaaatggacagggatatgctaaaagaaatgatgtttagttcagaataggaact

SEQ ID NO: 832371 - DNA, 604 bp, Homo sapiens
actcttattagtagttctgctttttgccctttgaagcatgtgatctttgtacctactcctgttcttataccctctccccttttgaaamccttaataaaaacttgctggcttggggctcaggtgggcatcacagtcctaccgataggtgatgtcacccctggcggcccatcggtaaaattcctctctttatactgtctctctttatttctcggccagccgacacttatggaaaatagaaagaacctacgttgaaatattgggggtgggttcccccagtactgcatagtctctttcctcctccatacatccatgtataactccctacagtcctccacttagcagtcatccacactcacaattttagtctctttcctcctctatgcacccacacataactccctacagtcctccactttgtactcatccacatgcttacaattttatacatatatacaaacagatatagatacatatatacacatacatttgcacactcatccatctggtttcttccagttaatttcctcagggctagtaccatgctttcttcaattttatattaccaaaccttagcttaatatctggcctcggtgagtaatcaata

SEQ ID NO: 832372 - DNA, 612 bp, Homo sapiens
atagaaataggggtgcaatttgttctttttgtttttgttttgttttgtttccataatggaggtaagaggagaaaataaaaatcccgaggagaaaaatgatgccctacccataactgtcatcatcatgtaattraaatgattaacaactaatataaattagttttccagttgaattgattattagaattttttcatgtgtggcaaaggaaaatagtttatgacaatgcttgtaaaatggctaatatggattaaagtattagtattcactagcatttgtagtgtaaatttatattgccttaatgaagatctaacagcaaatgtttaaatatttcattctacaattgtcttgtaaagcaacatcatactcataaataaatgattaaaagatagattttgcatcaggaccaatacaagccagtcatgaataggtttggtaattcctcctgtaaacaaacaaataataaacaaaaccatgctcagagaaagtgactttgctgacttaatataaattcggaataaattgtcagcaaagaagtatttattatcactagccattgacacattgagacagatagcagatgtaatactcaggattacataagaatcattttt

SEQ ID NO: 832373 - DNA, 463 bp, Homo sapiens
tagagaaatttgttttaaaggaatcattgtctatcaaataagtagaatttagggttgtatagctgttcagtatattctgaaataaactaagtcaaattatgaataaaattggcccactgacattggcasatatttctgcatttcacttgtagcaagacaaccattggtacatggtaaaaagtaaggaaaaagaaaatgttattagcaatgctaggtcaatgcaaaatggcttgtaccaggtcccagttaattgacataatgtagatttgaatgaaaactctaaaaacaaatttttaatttgacaattattctttttctttcttcattcacttttactatagcaaggttaaaatctcagaaatctcaaaagtcactactaaataatttatacgtgtaacccaaaaccacctgtacctcaaaaactactgaatttttttaattggctagctagaaaagtagctaa

SEQ ID NO: 832374 - DNA, 463 bp, Homo sapiens
tagagaaatttgttttaaaggaatcattgtctatcaaataagtagaatttagggttgtatagctgttcagtatattctgaaataaactaagtcaaattatgaataaaattggcccactgacattggcagatatttctgcatttcacttgtagcaagacaaccattggtacatggtaaaaagtaaggaaaaagaaaatgttattagcaatgctaggtcaatgcaaaatggcttgtaccaggtcccagttaattgacataatgtagatttgaatgaaaactctaaaaacaaatttttaatttgacaattattctttttctttcttcattcacttttactatagcaaggttaaaatctcagaaatctcaraagtcactactaaataatttatacgtgtaacccaaaaccacctgtacctcaaaaactactgaatttttttaattggctagctagaaaagtagctaa

SEQ ID NO: 832375 - DNA, 508 bp, Homo sapiens
aagcagcaatcaatttaattttatgtgtcaattccattaraaaagtgaacaaaacaaaaataaaaaacatgtacaccgacaactatctgaactttgataagataatgaagtcgatgacatcttaaatctctttatccaaaatgatttgtaaaacttgataggaatacttacaaatagaaagaatattctaatgtttctattgcttacttttaaaatgtttggattgcctgtaagttattaatttctctcaaatttaccttccttgaattactcacttctactacaaactaagtaatatagtcaaaactgacctcattttttccatcaccttcaccttacctaaaatgctagaacctatagaatcattctagatggcttcctttcaatcatttccttcatttctattctctcaacaaatgctgtatgctctggtcatttactgtctatcatgtgcatccctacctctttactttcactgcctattcctaaattcagaattcagactatg

SEQ ID NO: 832376 - DNA, 508 bp, Homo sapiens
aagcagcaatcaatttaattttatgtgtcaattccattaaaaaagygaacaaaacaaaaataaaaaacatgtacaccgacaactatctgaactttgataagataatgaagtcgatgacatcttaaatctctttatccaaaatgatttgtaaaacttgataggaatacttacaaatagaaagaatattctaatgtttctattgcttacttttaaaatgtttggattgcctgtaagttattaatttctctcaaatttaccttccttgaattactcacttctactacaaactaagtaatatagtcaaaactgacctcattttttccatcaccttcaccttacctaaaatgctagaacctatagaatcattctagatggcttcctttcaatcatttccttcatttctattctctcaacaaatgctgtatgctctggtcatttactgtctatcatgtgcatccctacctctttactttcactgcctattcctaaattcagaattcagactatg

SEQ ID NO: 832377 - DNA, 588 bp, Homo sapiens
atcttcaaatattcattttggaatcaacaagtaatagctaactttctgatttagcaaggccatcatatcctaagtttcctattaatgtatttctgctgctggttcattaattttgttaaattgtagcatttattagctggcaccaaatgtttatgattgaaaatgctttcatctagtagtttaattatccctgtgaattgggaaaaatattaaacattcaattttttcagcaaatatatttcgttcgagtcaaggaaaccattaaatcatggctttaaatacacatgactaatccaaggagatatgaagcagtggcataaagggtcccacctagatgagatggaaacaatatgaaactacagcctaagaatcctactggcctatgttaagaatgccaacttcaaggcttagattcagagatacttggaatcccacctctacctgtttataggcaacatgtctttagggaaacgatgtaaatcatgaccttcagtttttcccataaataaaatgaaaatattattcayatctacaacattgagttgtcacaatagttaaataagataatgcatataaattacttaggaa

SEQ ID NO: 832378 - DNA, 558 bp, Homo sapiens
ttaattaattaaccagtctgtggtttgctattatagcagcgaaaaaaggactaagagagttttgccttctgcttttaaagacacttcatagaagcccccgtgttcctgacctctaaatttttgagtgccacaggatttagacctatgacttcatctgttctccatccatactcacccaatatagcaaatttgcaatgtgtcaacttggctaaactgaaccacctttcctagagttcccttttgtgtttatttccaatttggctgagtcaaaaaggagattcttgggagaattgaagggtggaaaacaaacaacagtcatttttgtaaaacacactggttgcttacacgttggtttcagtggcagctttccggcctgccactgctacaccttccaaggaacctccttcagcgtctctgtctcctagaccaggcgtgtgtctttaactccatgactaagggctccagcttytgcaggacacccacatcaccaaaatcagaggcgacaagacctgatactggttttcgtctgtcttcattgggttcttattcattgttcat

SEQ ID NO: 832379 - DNA, 599 bp, Homo sapiens
ttaattatgttatacttttattactaatgaggttgaaaactttttatatgtgtattgaaatgtatgtcctcttttgtgaaagtctaatcatatttcttgcctattttttctagtgggatgtttgcatttttcttgttgatgtgtgggacttctcatatatttaccaactctcttgtacagtgtcacagattaatgattccaggaaatggttggagtttctcttggtcatcttatcagaacttcttgatatagaaatgaattttctgatgagtagatgataaaataatggatacaataatagagtaagatgctaaaactggtggatattctgtaatataaacaaaacaaaacaaaaattctctttaaatggcatgtgttttctcaataaatgaatgtcagataataacttctcatttacatttagaatgtattattttgtttaccttttgaaaaagatatgccacaattttttaaaaatcaayaatagtgaagaaggaagagcaacaaccctaatttcccctaattggagcagactcatataaaatgttgaaatgaagtaatgcctgttcatgccttactatatatgtcagcattccact

SEQ ID NO: 832380 - DNA, 524 bp, Homo sapiens
accaaagtatgtctgaccacagcggaccagctcaactaaactaccacgagttaccttccttatttaggctgtgaaatrtggcagaataagtgattccattgttaagggaaatcacacccataaagaaaatcagagttgatggttttcttacatagatttgggcttcgtgttaaaattctagctgcaattttgccaactggagaaaaattagaaaagtttatagagcaatgattctactaacagcatctcgatgaactagtctcagattgttagacttgtgtggtatttatgggtgaataatatgaagtcccatcaactgtgatgtctgactctgcctaaatgctaattaataataacttaaaatattacttcataaagattaccaaaaggtgttattcagaaataaaattataatgtttattaaaatacacttacgatgttaaatcagtattctaagaaaatttggctccagttaacatttggtggtttttcaaaactctcaggatgtatcacataggcaattg

SEQ ID NO: 832381 - DNA, 657 bp, Homo sapiens
caggtcagggaacatcacacaccggggcctgtcaggggctgggggattgggggagggatagcattaggagaaatacctaatgtaaatgatgagttgatgggtgcagcaaaccaacatggcacatgtatacctaggtaacaaacctacacgttgtgcacatgcaccctagaatttaaagtgtaattaaaaaaaattactgctatcgatgatgctctgcaaagtaactctcccgtgtaagaaggctggttagtaatcgagtcagagggggagctggaagtaggtcaacatggttaattagagaaacagtgaaaaagctggtcctgtataccatagtgttttgctgatgtttattcaaaaggctaatgaggcagtaaaagaaattgtactttaatcagattatataaatgctcattaccaagttaaattttatatgatttaatcatttattcagcaaatatgttttggaatttttccagacaatgagaatactgcagttaacaagacagagaccctatctcatagagttaaattctggtagaaaagacagaatacaaagtaaatatataactttaagtagtggtaatagctattaagaaaagcyttgtaagggatgaggtaacaactggtgctggttgacaggatgagcagaaaagacca

SEQ ID NO: 832382 - DNA, 682 bp, Homo sapiens
tttgcatttccctaatgattactgatgctaaacatctttcacatgtctgttggccattatttttttatatcttcttttgtggaatgtctgttcaaatccttggcctactttttaataggattttktattattattcagtttgtgttctttgtctattctggatattagtctttgtcagatgaaatatttttttccctttcagcaggttgtgtcttcactctgattctttccttagctgtgaagaagctttttaatttaatgtagtcccatttgtctatttttgttttagttgcttgtgctttggaggtcttagccataaaaatctttgcttagaccaatgtcatgaagcgtatgttttcctctagtagttttacagttttgagtgttccatttaaatcttcaggccatcttgtgttgatttttgcatatagtgaaagttaggggtccagtttcattcttctacatatggattcccaattatcccaatactattcattgaagagtattttctttccccactgtacgttcttggcacctttgtcaaaattcagttggctgtaaatatgtggatttgtttctgtgttctctattctgttccattgttctatgtgtctatttttctactaatatcatgctgttttggttactgtagccttgaaatacattttaaagtcaggtagtg

SEQ ID NO: 832383 - DNA, 548 bp, Homo sapiens
tgtatttttagtagagacggggtttcgtcctgttggccaggctggtctcaaactcctgacctcggatgatccacccacctcagcctcctaaagtgctaggattacaggtgtgagccaccgtgcctggccagtgattaagtaaattaagtgattcagaaaagctctaaaatgcccaaggatcgtgaacacagggtgctagtcttgaggctgctatttgccctttgctggctcagcagagaggcaagacatagtcccagcctgcatgagcttatgtctgggcagcaaggcatagacacatgccacaccgacctaagatgacatgtaatcaggaaataaatacatgtttggggcatagcacctcagtcatatggatgataaaaaggaacaggtagaatccaaggagactcaatagggaaggtgggtctccaccgactgtgaagaaccgataagacatgggcaaattgtcggcccagtctttcttgraacactaccatcccacaaggaagactgagagttttcaccactaaatagaataaaagaagttccaa

SEQ ID NO: 832384 - DNA, 485 bp, Homo sapiens
ctcagctctcctctggcctggtctagaacactgccagcaccagagaactccctcccacgtcagccccacagggagggaggccaggagtggagccctgtgtgtgggttgcccctgttaaaatggactacctgaycctgggaagggggagggagaaggtgcacactgacctagtttggttttgcttttgtatatggttattcctatgactgaagatgtatgagccactgtggctgcctgcatctctggctgtgtgtgtcttatgtctcatgccccagggtccagcagtgaaccttgctttccagaacagagggctataggcaagtgcaatggagaagaagtaaaatgggaccagagccacatgcctgtgggagagagggagcgaaggaagcaggagaagaccagaaaggatgcagccgcagttttgtgtctggcctcagccagatcccacaggggaactcacagaggaactcaggggcacgcatagt

SEQ ID NO: 832385 - DNA, 646 bp, Homo sapiens
acacgatgggtgtgccctttgttatgaagggtgaggctttcctttggagggcagggccaagcctccctcctcgttgtctgcccccatattccctgctaagtagaaggtgctcactcagccaggayttgaaattaaatccctcagcatgtgcgatgcaaatagagatggtggggaattgcaccctcaaaggtctgcagctggcctccagtctcacccatatgggctgagctttcacagtctcaggcattctagctcagcctggcagcctgggttggggggtggaggggatgagagtgcagatggagagttttcatgctggtttaatcttgcagacatcatagataacttgcaaatgtcagatgtgatgcacacaatttagaaggcaggaaggaatctggagatattaagatatttactggaccacatgaggaagtaggctcagctcagaggcggctcatattttcattagctgaagctgagtgaacttgagcagcttaaagtcttcatagaagcttcccattttcttattctggatttgagtacagttgtttcattatgcagagtaatgttgcctaatgggtactggctccactggtgtctgtgaggtggagaaacatgggcgacgtggggaaagtggccactcaga

SEQ ID NO: 832386 - DNA, 287 bp, Homo sapiens
agtacaaaaataggccaaggtagtacaataagatattcagagagagagagagaccacattcacacaactttcattgcagtatattgttataattgttaattgtattattattgttgttaatctcttactgtgtctaatttataaattaaactttatcgtargtatgtatgtataggaaaaaatagagtatataaagaattcagtaccatctgtgatttcaggcatctactggggtttttggaacatattcctcctgggtaagggaggattactgtacagatgtttgt

SEQ ID NO: 832387 - DNA, 549 bp, Homo sapiens
tgcatttttacaagctcacaattgaytgttaggcacccaaagtttgagatttggaacactaactccatgactgtactgtataactcactgcatcagggtctccatgctttgcaagccaggagctcttctatatggagagataaaatgatgctatcattcacccacaagcccctctgctggttcagtagcaagttccaatttcttgttagcaaaactgttcagatcctggactcaagtggaccttgtttctttcctgggacatcattggctgaattaaattgtccacacaattttgtctctgttggggattgtgccttctcacttgccccccttgtttgatacagccctctgtggcttgcgacatgtcatcctgaatgctctctgaaaacgtcctttgtcctcaccagccgtccacttcagaagtggtggtgttattctgaggcagggcttgggatgccatatagaataaagctatgattgtactaaaaaccaccagaggataagcggctaacacaaacatgaagaaggcctaagcacatgctgtaccag

SEQ ID NO: 832388 - DNA, 582 bp, Homo sapiens
tgacctcaagtgatccgcccgccttggcctcccaaagtgttggaattacaggtgtgaccgcacgtggcctgcttctgtcttgtaggttctcactggcttagtgcatggtgttgccatgtgaggaggcccagttagactgtgggaatatggggaaaagttgtttcccatctaacatccaaatgactgcacccatatgagtaccccaagtgagactagtaggggaggtactcagctgagctcagtacaaaacgctaactcactcatcaaatcatgaacaaataaaatggctgttgctttaggtccctatatttttgagtggtttgttatggagccgtagatgaccagtacacaccctatttctgtaacctgaccttttggttccctttgtactctattttccagcttcatcgaacttcttgccataactagaaaccataagaccttttcatgctacttcctctgccaagaatgyttttttctactaaccttctctatttggaaaatctctattcattcttccagaattagctcaaattttactttctacgtcacctaagcaaagttattctttcatatgggatc

SEQ ID NO: 832389 - DNA, 584 bp, Homo sapiens
ctgagatgggaggatcgcttaagcttgggaggtctggagaaggtgccactgcactccagcctgggtgacagagtgagaccctgtctyaaaaaaaagaactatcatcctgtagttcagaaagaccactattgcactactgtggcagacagtgttggtcacctcctcaacagttgtttgtctcctttcctccttgctgatggaacccaaacttggttcaattatcagtagtcacatgcttcaaggcaggccaggctcatgccccagggggtagaccttgattgatgtaagacaatgtcattcccctagctggtttctggtttaggcaagagaaaggtacataatctgggcaaccagacttgatgggtgtctacaggaaggcttctgagagtgttctcctcactcttacaaatgggacacaccataggaacctttcaggctttttcctctacaggtggctcagtgcggggtgatgcctaagccactgcagtcatattctggcctgagggagccactgacccatggggtaaagcagaaaggaaagatgaatgaagctgcatcactaatgatattgtggccactgaatt

SEQ ID NO: 832390 - DNA, 452 bp, Homo sapiens
atactctctctcattatcttctattctccatgtaaccatattttccaaatcctttgcctcaagaggctttaaacacatgtaaaggctgaggttctgttgccgaagtgaagcaaataactgagacaacttaatgagacagtttatagattgttcaggaaaacaaatatgcctttgaaatcactaagtcatttcagtttttattccagggtcaaagcactgacatctgcattatttagaagcggctttcaaaactttttttgccataactcacagtaaaaaaaaatacattttatattgcaactcaagtctataaattctttcattccttcaacatattgaacacctactatatgccaaatatattttatgtggaatacagtagtgaaygaagtaaaagaggaagaaaggaaaggaggaagagaaagaaataaacaaaaattcttgctctctaa

SEQ ID NO: 832391 - DNA, 611 bp, Homo sapiens
ttttacactttttgacacattgtgtattttatctgatttaagtttggttatttctactctcttttggtttccactgcaggaatatattttttcactcattcacttaaagcccatgtgtgtctctacaagtaaagtgagtctctttaggcagcatatagatggctcttgtactttaatccattcagccactcagtcttttgattagaaaatttaatccatttacattctagataattattgataggtaagtacaaactaccaccattttgtccattttgttaggtttttttagttgtttcatagatcttttgcttttttacttcctctcttgcttttttttttttttttcctttttgagacagtctcactctgtcgcccaggctgcaatgcagtggcaccgtgccgtgtcggctcactgcaacctctgtctcctgggatcaagcaattttcctgcctcagcctccaaagtagctgggattacaggcgcccaccaccacgctcggstaatttttatatttgtagtagagacaggatttcaccatgttggtcaggctgatctccaactcctgacctcaggtgatcccaaagtgctgggattacaggcatgagcc

SEQ ID NO: 832392 - DNA, 622 bp, Homo sapiens
tcagttcagtctcccgggacggagtgtaragcgcaaggtcaaagaggttttggatatccattaaaatttttggccgctgaacgatcatgctatgcctttagttcatgttatagaatcttttattttaggcaaaatggggaatctttgaagtggtgtgcttttggaacagggagattataatacttttatgaggtggattttgctttgaaaatggcacacattgtagaggcaattgcacaaatggagtggggagatacaaagttatttggtagtttatatggtggctttgattacagatgcttctcaacttacgatggggttacatcccataaagccaccataaattgaaagtatcctaattcgaaaatacatttaatccacctaacctgccaaacatcatagcttagcctagcctaccttaaatgtgctcagacacttatattagtttacagttagcaaaatcatctaacacgaagcctattttataataaagtttgagtatctcatgtaatttattgaatactgaactgaaattgaaaaacagaatgttgtataggtacttgaagtacgacttctactgagtgtgtattgtttttgctttatattatatagaaaaatctta

SEQ ID NO: 832393 - DNA, 622 bp, Homo sapiens
tcagttcagtctcccgggacggagtgtaaagcgcaaggtcaaagaggttttggatatccattaraatttttggccgctgaacgatcatgctatgcctttagttcatgttatagaatcttttattttaggcaaaatggggaatctttgaagtggtgtgcttttggaacagggagattataatacttttatgaggtggattttgctttgaaaatggcacacattgtagaggcaattgcacaaatggagtggggagatacaaagttatttggtagtttatatggtggctttgattacagatgcttctcaacttacgatggggttacatcccataaagccaccataaattgaaagtatcctaattcgaaaatacatttaatccacctaacctgccaaacatcatagcttagcctagcctaccttaaatgtgctcagacacttatattagtttacagttagcaaaatcatctaacacgaagcctattttataataaagtttgagtatctcatgtaatttattgaatactgaactgaaattgaaaaacagaatgttgtataggtacttgaagtacgacttctactgagtgtgtattgtttttgctttatattatatagaaaaatctta

SEQ ID NO: 832394 - DNA, 564 bp, Homo sapiens
ctcctacctgttaaactctatgatgagtgctttacatagattatatcatttattcactaaacagtcctttaaaatggtgctatattcactaaacagtcctttaaaatggtgctatattcactaaacagtcatttaaaatggtattattcttcttcatcttacaggtaaacaaactaaggcaaaaaaaaaagtgaaataataagtgccagtacacagagctagtaaggaatagggtctgccaggtcccaaaaagcatgccatcacctttgccccatactgcctctggtacagatagaggtaatgtcttatttatcactgccatccactggacccagcttagtgcctgacacacagaggggctcagtcaatgctgattggtttgaggtggagcaaaaatgcttagcagggtgagcacctttgctgtgattgagtatctgattctctatgaagagaaggggagtcctgarccaaacacattcctctggctcctggctgtcatctttatttgcccggcttctttgctcttcctccttcctaactgcaccgtttggattcaaagctgga

SEQ ID NO: 832395 - DNA, 619 bp, Homo sapiens
agatttttatagtttgatttttaaacattcaactcttaaattcagctgaaaattattttgtgtgaagtaagaagctaaacaaattgtcccagcatgaactggtgattagttgtttctttttctrtgttaattagcaccttcggtaagaagttcttatatttacagtttctttcttggagactgtgtctattgttctgtgtgtctttctgtctgttcttgcagcagcacctcaatgatttaaatgctttatcttttccatataccttaatatatggtgatactaattctcttcataatttatttatgttccatttgcagggtattattgttgcactagtaattgtaaagtatactgagctgagaaaatctgttgtgttatcaagaaattcagactccaatggaggagataatacatgtcttgccatacaagaaaaagggacaaatgtcacaagagaagttcaaataaaatgataaagaaaatattacttgtttctgaggataaaatagttttgatttcacctgccaagctcatataaaaaatatgcttcatgttgaactcatggaggtggagagtagaatgatggttaccagagactggaaagggtggtgaggggattgg

SEQ ID NO: 832396 - DNA, 541 bp, Homo sapiens
aaatcaaagctacaatgagatatcatcctatycccattaaataggcttttttttttttctgagatggagtcttgctccatcaccaggccagaatgcagtggcacgatctctgctcactgaaacttccgcctcttgggttcaagtgattcctctacctcagcctctgaagtagctgggactacaggcatgcaccaccatgcccagctaactttttatattttagtagagacggggtttcaccatgttggccaggatggtctcaatctcctgacctcatggtccacctgccttggcttcccaaaattctagggttagaggcgtgagccactgcacccagcctaaaatgtcttttatgcaaaagtcaggcaataacaaatgctggcgaggatgtagagaaaagggaaacctcatacactgttggtaggaatggaagccagtacgaccactatggagaacattttggaggttcctcaaaaaaattaaaaatatagctaccatgttatcctgcactcccactgctgggtatataacccaaggaagg

SEQ ID NO: 832397 - DNA, 724 bp, Homo sapiens
caggcaataacaaatgctggcgaggatgtagagaaaagggaaacctcatacactgttggtaggaatggaagccagtacgaccactatggagaacattttggaggttcctcaaaaaaattaaaaatatagctaccatgttatcctgcactcccactgctgggtatataacccaaggaaggaaatcagtatattaaggagatatctgcactcccattttattgcagcactgttcacaagagcgaaaatttggaagcaacccaagtatctatcaacagatgaatggatgaagaaaatgtgcttcgtatacacaatggagtactattcatccacgaaaaagaatgagatcctgtcacttgcaacaacatggatggaactagaagtcattatgttaaataaataaaccaggcagagaaagacaaacatcacatgttctcacttatttttgggatctgaaaatcaaaacaattgaacttacggagagagagaatagaaggatggttaccagaggccagcaagggtagtgagagggatggaggaaagtgaggatggttaatgggtacaaaaaaatagttagaataaataagacctagtatttgacagcataayagggggactataatcaataataattatgcactttaaaataactaaaagagtataattagattgtaacacagagaataaatacttacggggatggatacctacttttccatgatgtgat

SEQ ID NO: 832398 - DNA, 516 bp, Homo sapiens
tcccaccctaatactgcgcttttccaatggtcttagcaaatggcacaccaggagattatatcccgcacatggcttggagggtcccatgccaacggagcctcactcattgctagcacaacagtctgagatcgaactgcaaggcagcagcgaggctgggggaggggcacctgccattgctgaggcttgagtaggtaaacaaagtggccagggagcttgaactgggtggagcccaacgcagctcaaggagccctgcctgactctgtagactccacctctgggggctgggcatagctgaacaaaaggcagcagaaacttctgcagacttaaacgtccctgtctgatagctttgaagagagtagtggttctcccagcatggagtttgagatctgagaacagagagactgcctcctcaagtrggtacctgacccctgagtagcctatctgggagacacctcccagtaggagccgactgacacctcatacagccatgtgcccctctgagatgaagcttccaga

SEQ ID NO: 832399 - DNA, 627 bp, Homo sapiens
taataactttttaaagaatgtcaatcacattctttaataatttataggaacttgacatcgagagcatcctcatgaattctattgccatgttgtgtgctatggactgaagtttcgtgttccaccaaaattcacgtgttgaagtctaatccccagtgtgattgtatttggaggtggggcttttgggagatgatttcactctcttgaatggggttagtgccattataggaagagacacaaggtgataattcattcagtcatgtgaggatacagagggaaggtggctgtctacaggccaggaagttgcccttcaccaggcaccagttctgttggccccttggtcttgtactccccagcctccataactgtgagaaataaatgtctgttgtttaagccacccagtctgttatgtttggtatagcagcccaagcttattgaacatgatgatagacggaattctaagctgactcccaagattccagctccctggtgtacatgccttgtatgatcccttatgcttacatggcttggggatggaamctttgaatatgatgggacagccactccatggattaggttgtgttacagagcaagtgctgatggaatagtcaggtgtgtgatcatctgaca

SEQ ID NO: 832400 - DNA, 531 bp, Homo sapiens
ttattaatgcacatgggcatgatggtagcaggttaattgcatcatcctagtgcagaccagtagtcatttgcttcacagatagctccttccatgactcacttaaagataggcttgtggtttttcatatgagcagggaccacacgaaatgcagatccctggccactggtgtggtcactctcccctgactaggacctgggctttcctgccttggttttgatgtgtcatcattcacctggaatgccctcctcatccttccaatccaaactcaacttctaccttgattgtaaaaccctcttcaaggatccattgcaattattatatttgtaatttgtttggaattagtcgttgcatctgtagagtccgggaagggattgcggagaatatgtaggcctatgccctcactctacrgctgaggtcctgagagtgtaccaaggtcacacaatgaggtcaccatatgaggtctgagatccaggtctcctcagtctgcagtaagtagcccctactatgagttttatgctcattggattcagt

SEQ ID NO: 832401 - DNA, 640 bp, Homo sapiens
ttcaacaatggtgagaactctctcattctgttctacagactrtgcaggaacctccattctacttgttctttaagacttaggtgctattacctccacaagcaaacctttcctgatgctctctgcccaagccacctctcccttaagttgccctcttctaagatcctggcagcatgtttctcatgtgtttcatattgttgaatttattgttagctttttgaaagctttttggagatataattgacaagtaaaaattgcatatattcaaggtgtacaaaataatgttttgatatacatatacattgtgaagtagatgaccacaatcaaactaattaacatatcaatcacctcacatagttattctttttgtggtgaaaatacttatgttctagcaaatttcaagtgtacaatacagtattgttaactatagtcacattgccatacattcaatttccagaacttactgattttggatagctgaaactttatactctttgaccaacgtctaccagtttttcctcattccaccccatgcaacccccatataagtcagatcatgcagtatcggtctttgtgtgtctagcttatttcacttagcttaatgtcctctgggttcatccatgttgttataaatgacaggatt

SEQ ID NO: 832402 - DNA, 532 bp, Homo sapiens
tctcaaggaaacgtgtattgctctgcggtgaagccctgaggggcagcgggatggacctggccatcttctgaggggcccttcgtgataacgggctgctcagcagggggaggtcctgcaggtggtgctgcaagsggtcggctggccgcagggggactgcacagacacaggctggcagcaggtggtggctcagcaggaggaggtcctgcaggtggtgctgcaaggggtcggctggccgcaggggggccggcagcagggggactgcacagacacaggctggcagcaggtggtggcccagcagcagggcctgcacaccacagccgtgcacgacgaggggcagcaggtgatggggcggcagcagccttcctgcagggagcaggggtcgcagcacaccgggcggcagcagggctcgcagatggggcgcgtgcagcggggcacgcaggtcacggggcggcacacggtggtctggcaggtcacggggcggcagcagcaggggtcgcggcagcagcagggctggcagcagcctcccccgtag

SEQ ID NO: 832403 - DNA, 532 bp, Homo sapiens
tctcaaggaaacgtgtattgctctgcggtgaagccctgaggggcagcgggatggacctggccatcttctgaggggcccttcgtgataacgggctgctcagcagggggaggtcctgcaggtggtgctgcaagcggtcggctggccgcagggggactgcacagacacaggctggcagcaggtggtggctcagcaggaggaggtcctgcaggtggtgctgcaaggggtcggctggccgcaggggggccggcagcagggggactgcacagacacaggctggcagcaggtggtggcccagcagcagggcctgcacaccacagccgtgcacgacgaggggcagcaggtgatggggcggcagcagccttcctgcagggagcaggggtcgcagcacaccgggcggcrgcagggctcgcagatggggcgcgtgcagcggggcacgcaggtcacggggcggcacacggtggtctggcaggtcacggggcggcagcagcaggggtcgcggcagcagcagggctggcagcagcctcccccgtag

SEQ ID NO: 832404 - DNA, 345 bp, Homo sapiens
gcagcggggcacgcaggtcacggggcggcacacggtggtctggcaggtcacggggcggcagcagcaggggtcgcggcagcagcagggctggcagcagcctcccccgtagctcagggaggagaaggtggagccgcagcaggagccggtcatggtggtgtctgaggctggtgtgggttgggctgtkgagaggagctggatgttctcaggtgtgaatgtcctcctccccctctgggccctttatatacgctggctgggagctgatgaaccccaggacacaaggtcatttccttgttttcacttattcttcctgaaataacaccagcagattagtaagttttgtagaca

SEQ ID NO: 832405 - DNA, 562 bp, Homo sapiens
ggtcatggtggtgtctgaggctggtgtgggttgggctgttgagaggagctggatgttctcaggtgtgaatgtcctcctccccctctgggccctttatatacgctggctgggagctgatgaaccccaggacacaaggtcatttccttgttttcacttattcttcctgaaataacaccagcagattagtaagttttgtagacattgtttagatgctcaggtacacataaaagtctattttccttatttagtgtagacccattatattttgctatttatggttcaaatatgaatttaatgaccctaacttcaaagtctccaattatcgttataattcaatgacgcttttgctagttgctgttttgatagctcaaagcagctgttgtgctctgcatgctctgagggttattacttgctagcagttgaagtaaagcgagcatctcaagttgttagyattctttgccactgctaagcttcctgggcaaaacaagttgaggataatactacagggatagtttaaaagtcaggatttctcagtaaaagaagaattttcctgtcccctttt

SEQ ID NO: 832406 - DNA, 237 bp, Homo sapiens
ctctgttgctttttctccccaaattaagctcrattcagcttgtctgtgtgcatttgcatgaggaactgaactgttgttttcagtggtgacccactgtggagtcctgcccacaaatggcacatattgatccaccacagaaaacctctaagcctcagctcagttcctctttttaagaagaaaactgggaaacaaataatctaagaatgaggagaaagcaaagagaatgattccctttca

SEQ ID NO: 832407 - DNA, 237 bp, Homo sapiens
ctctgttgctttttctccccaaattaagctcaattcrgcttgtctgtgtgcatttgcatgaggaactgaactgttgttttcagtggtgacccactgtggagtcctgcccacaaatggcacatattgatccaccacagaaaacctctaagcctcagctcagttcctctttttaagaagaaaactgggaaacaaataatctaagaatgaggagaaagcaaagagaatgattccctttca

SEQ ID NO: 832408 - DNA, 621 bp, Homo sapiens; identical to SEQ ID NO: 829725

SEQ ID NO: 832409 - DNA, 542 bp, Homo sapiens
acatgaaagccctcgtggatcttgagttaaaagratgccaggccgggcgaggtggctcacacctgtaattccagctttgggaggccaaagcgggcagatcacgaggtcaggagttcgagaccagtctggccaacagggtgaaaccccgtctctactaaaaacacaaaaaattagccaggcgtggtggcatgcgcctgtaatcccagctactcaggaggctgaggcaggaaaatcgcttgaacccaggaggcggaggttgcagtgagccgagattgcagcattgcactccagcctgggtgacagagcaagactccatctcaaggaagaaaaaaaaaaaaaaaaaagagagaatgccaggaactaggagaaaggtaaaataggcacaagctcaagaaggagaagactgccttgccctgatgagaataagtaatggacagtcaaaagcaaaataatagggccctggcatttcataaaaatgcagttcctcactcataatctaggacaaggtgactccccagcacaacccaaagacgggagagctg

SEQ ID NO: 832410 - DNA, 658 bp, Homo sapiens
atatcataattttaatttccaataacttatttttattctctgattgctttttagttgttggtgctgatgttaaacygtcacttttttatttcattgatgtagtttattctcttatatttgaggattttaattataattttaaaaattctctgtaacatttctgtttcttccaagtatctttgtgtcttttttggcctttgtctttcatttgtatttattatttacccattaagtatttattgagcacttctgtgtaccgggcattgttataatagcttggcctagatccatgaacaaatcccacaaaaatccttgccctcttggagtttgctgaggaagccagaaaataaacaataagcagatgatattataagaaaataatataagctgggcatagtagctcacacctgtaatcccagggactcagtaggcccaggcgggagaactgcttgagaccagaagttcaagagcagcctgggcaacatagcaagagccccctctctctattaaaaaaaaattaaaaaattagccacatgtgggtacatacctgcagtcctagctacttgggaggctgaggttggaggattggttgagcccaggagttcaaggcttcagtgagctatgatcatgccactatactccagcctgggcaacagcg

SEQ ID NO: 832411 - DNA, 645 bp, Homo sapiens
taaatgacctgtgcttattaatgctttcactctagcttccaagcccccattcstatcacaatcaaccccaaagcttgttgacatgtacaaaatgtatattttattgtaccccatatctggtcatttggcttgcattgagtattagccatcaaggaattaatttcaagaacattacttcagagcgtcaaggaaagaacacaaggaacacatatgcaaacatatgcatgccattctttcctatgtatttaataggtattagtatctattgttttggatttatagtatatgtggtgtacatacaaaaatatgaagacatattctcataagcattctattgactctagacataataagtggaggcgaataattaacaggagaaaaaccttaaagtagttcatagaagtgtattttatatacttgtcaagattagtctcctttatacattttccacaattgtttccataaagaaatgttcttagtttttaagaaatgatccctcttcgtaaatgtcagctttattgaaatcaaaacaattttattaaaccataaacaaactcagtgttctcttaggtttttaattatttctttctttatgaaaataaaaagagtattaacacaaagaaacaaaatatgaggaaacagagt

SEQ ID NO: 832412 - DNA, 556 bp, Homo sapiens
ctcaaaagtattttttatggagaggaatgttgggaattagatacgtttttttctttaaaattgtgggtaaatatcaatatccaagaatagccaaggaattttaaaaataatagtaagacttacctgatcaggcattgaaacataacataaaactacaatcaaatttgcatagtttttttaattgtaatagacaaaaagaagagtgaggaaaaatattgaatcctgaagcagactgcaagattcatgataattaactatgattttgatggttttagttaataggtaaagaacgggttatttaagaaaaaaagtgcaggtaaaatgactatccttctagaagaaaataatattacagtttattatattctatgtgtaaaaatgaacttcatttggattatttaagtgtagaaaattaaactacactacaacttctgcaagttaatctgaaagactatttgtacaatctagaggcaaggagtagggaaagttttyttaagaagtccagaaaagacatatatggtaatttatgactgtatcgtaatctaaacattttata

SEQ ID NO: 832413 - DNA, 602 bp, Homo sapiens
ctcagtctcccaagtagctgggactacaggctcctgtcaccacgcccggctgattttttgkatttttagtagagacagggtttcaccgtgttagccaggatggtctcgatctcctgacctcgtgatctgcccgcctcagcctcccaaagtgctgggattacaggctacagccaccgcacctggccaaagtttcacttttctttatatccttgctgacattcttaatttttgtctttttgacaatagccattctaacaagtgtgaggtgatatctcattatggtttaaatttgcatttccctgatgatttgtgatgatgagcatttttttaatatacctgttggccatttgtatattttcttttgacgaatgtttatgcaggtcctttgccaattttctaaatgagttgttttctcattattgagttgtttgagttacatacatattttggatattatccccttatcagatgtatgatttgcaaatacttccaattcatgggttgtctcttcatgctattaattgcttccttttatgtgtagaagcctttgatgcaatctcatttgtttatttttgtttttgttgcctatttttttggggtca

SEQ ID NO: 832414 - DNA, 602 bp, Homo sapiens
ctcagtctcccaagtagctgggactacaggctcctgtcaccacgcccggctgattttttggatttttagtagagasagggtttcaccgtgttagccaggatggtctcgatctcctgacctcgtgatctgcccgcctcagcctcccaaagtgctgggattacaggctacagccaccgcacctggccaaagtttcacttttctttatatccttgctgacattcttaatttttgtctttttgacaatagccattctaacaagtgtgaggtgatatctcattatggtttaaatttgcatttccctgatgatttgtgatgatgagcatttttttaatatacctgttggccatttgtatattttcttttgacgaatgtttatgcaggtcctttgccaattttctaaatgagttgttttctcattattgagttgtttgagttacatacatattttggatattatccccttatcagatgtatgatttgcaaatacttccaattcatgggttgtctcttcatgctattaattgcttccttttatgtgtagaagcctttgatgcaatctcatttgtttatttttgtttttgttgcctatttttttggggtca

SEQ ID NO: 832415 - DNA, 520 bp, Homo sapiens
ataatctctaaaatatgagattagacttgatttctttttycttttgctttttttttgagatggagttttcacccttattgcccaggctggagtggaatggtgtgatcttggctcattgcaacctctgcctcctaggttcaagcgactcccctgcctcagcctcccaagtgctgggattacaggcatgagccaccgcaccggccaacttgttcaattttttaatcatgagcatgtattcatttttacatacatgaaaaaatttatgtaaaaatgtaattacaaataaataagacaacccaatagaataattggcaaaacactgaacatactttacaaaagagaatatctgaaagatatgaaagtgctcattctcattagtcatcagggaaatgaaaacttaaaccacaatgaaatagtatccagacacccactagaatggctagaatgaaacaccaccaagggttggccaaacgcggaacaaccgaacttccgcacactgctggtgagagtgtaattgttt

SEQ ID NO: 832416 - DNA, 561 bp, Homo sapiens
acatgaaaaaatttatgtaaaaatgtaattacaaataaataagacaacccaatagaataattggcaaaacactgaacatactttacaaaagagaatatctgaaagatatgaaagtgctcattctcattagtcatcagggaaatgaaaacttaaaccacaatgaaatagtatccagacacccactagaatggctagaatgaaacaccaccaagggttggccaaacgcggaacaaccgaacttccgcacactgctggtgagagtgtaattgtttaactgccctggacaactcacaggaggagctgctcaaactgaacatgcacatcctatgctcaccaagagacttctactagaatgttcattcatacagtaccatccataatagccccaaacttgaaacaacctaaatgtccatgaacagaatgaataaattgtggcgtrtttgtgcaatgaaatactgtgccacaacgacaatacacatacatgcgacacccaacaacatgaatcaatctcacaaatataattgatacccgtgggctgggagagatccccaaacaccaatg

SEQ ID NO: 832417 - DNA, 588 bp, Homo sapiens
tactagaatgttcattcatacagtaccatccataatagccccaaacttgaaacaacctaaatgtccatgaacagaatgaataaattgtggcgtattygtgcaatgaaatactgtgccacaacgacaatacacatacatgcgacacccaacaacatgaatcaatctcacaaatataattgatacccgtgggctgggagagatccccaaacaccaatgggacctcaaccccagctggtgtccaggctcttgacactgtcgtgagaaggaatttaaggataagtcagaaaatagtgaaagcacagtgatttattgcaaagggaaaagtacacactcaagggaatgcgggcggactcaaaagtcacgtgtaagggggtttgaggttgctacctctataggtttctttaaccaaggactgggatattcatgaacattcctgggaaaaggtggagatttcttggaactgtggtgccacccatttttacatcaaacctgggtgttcttggaactgtcgagacacgggtgggtgtgtgtttaggatattaatgagtgtatattgaggtcctaggagaaacctggtcacatccagtg

SEQ ID NO: 832418 - DNA, 603 bp, Homo sapiens
agctgaatcactttcaagaagaaaaaaagacccatttaaagaggaaagaaaaaagatggggggagaaaagcttagtcatgaagcctgctctgaccttacagagcccagtgacctcatatttacaggaatctggaacacattaaggcagacagaggcaaagatgatggcggggaggcgggagagagctgtaaaggaggggatgatgacaagcagctgagtaaagctctatctggaggccgggtgcagtggctcacccctataatcccagcactttgggaggccaaggagggaggatcactcgagcccaggagttcgagatcagcctgggcaacatagtgagaccttgcctctattcagaaaataaaaaaataaaaaaacattagctagagatgaatgatgctgccctaatcacagaattttagatctagaagattccctggatttgataatcccggttctgggccgttccgccacaaggaaacagcttgacaagatcacacagcctgctggcagcagaagtgggaccacagtcacattgtctgggtcaccatgwccccaaaccctggacaaccagagggaacagacaatgttctgcaggatcca

SEQ ID NO: 832419 - DNA, 563 bp, Homo sapiens
  misc_feature 545, 546, 547, 548, 549, 550, 551, 552, 553, 554, 555, 556,557, 558, 559, 560, 561, 562, 563: n = A,T,C or G
gtggcttttgcctgtgccttgatgaacacctgaagcgagacccagagacgctcaactccccgacagccctggttccaaaccggagctgcagcagttgctgagcgcggctccttcacgccttcctgccgtgagygttcctcaccgccgaggcttcctcctcctgctcccaaaccgtgtccacttttaggaggggactttctagaacgtgcttccgaacggtacctatgtgatgaggggctgagcatgaaataaagacaagggcatgagtgtagaggccaggcagacctgactcgcccctcactccccaggacccggacctctctggatctgcatcctccccctagtaaaatgggagacacaccgctatccagacaactgggattcctggaccagacttttcttttgaggtgagcacacccgccccgcaacccagatggactagggtgaccttctccccaccccactcgcacctcaacaggcacatttccccatctgcccttgggctgagtgacacagtggctgggccagggatggtttgacaccgnnnnnnnnnnnnnnnnnnn

SEQ ID NO: 832420 - DNA, 459 bp, Homo sapiens
cttcaccgccccagggtggagttcagctccccttcagctccccccagmcactgctgcgggaactcatttgcagccgccgtttctgcaggccgggggctgtggaggggcgtttttgctcaggcggggctggagggctgggctggatgcccttggctctccccgtttgccccgcaagcctcaaaggccctaaaactggacccctctttgaggaacagcctcacacccgccttctcagagcctctctcttcttttcataactaccatctcccctgcccccaccagtctttctgtcctcttcaaacctctttccctgtgatgctgaagcattctgtagcttgctttgaccaggaaacctgcggaggcccttgtctgtccaggagttcaaaacggtgccattgtttcttttaataacatacaacgtttatgtcccttttcaaactataacacgactccgagact

SEQ ID NO: 832421 - DNA, 465 bp, Homo sapiens
gtctgccttcaccgccccagggtggagttcagctccccttcagctccccccagacactgctgcgggaactcatttgcagccgccgtttctgcaggccgggggctgtggaggggcgtttttgctcaggcggggctggagggctgggctggatgcccttggctctccccgtttgccccgcaagcctcaaaggccctaaaactggacccctctttgaggaacagcctcacacccgccttctcagagcctctctcttcttttcataactaccatctcccctgcccccaccagtctttctgtcctcttcaaacctctttccctgtgatgctgaagcattctgtagcttgctttgaccaggaaacctgcggaggcccttgtctgtccaggagttcaaaacggtgccattgtttcttttamtaacatacaacgtttatgtcccttttcaaactataacacgactccgagact

SEQ ID NO: 832422 - DNA, 563 bp, Homo sapiens
tggcatccaaggctctgctgtctgtccacagcatccggacctctcatctgtctacacccattgcttcaggcttggtccctccgccktcagtaatgtccagcttcactcaggccgctcacctgcgctttacattccaacatctgctgtgagtgtgtcctctctgggcagccccccaccctccctcactccccaggggctcctcctctgaccctgtgcgcttcctccatgcttcccccacagttaggggcaccaccatccatccagtcacctgggaatgatcccagggtcaggtgatctgaggatggagaattgaccactgagcttggtggcgaggctggtgcccttgacctgacttgattaactggctgtggctccagcttggagaatccctaaagccagtgagcctggtggaaggactgctaggaggcagagcaagcattccaggtgggagtggagcactcctggtgccaggccatgctgagggaggggtgggtgttattctaggagccaagaggattttaagcctggtgtcctagctgacctcccgccccacacctacccag

SEQ ID NO: 832423 - DNA, 731 bp, Homo sapiens
caacttgtccaaagtcacacagtgggatcctgtccaactcycaagtccacattctccaccactgccctcagctgcctctcaagtcccctctgtattgctgtttcctggccccctctcaattggtggtttgaagacatcacgaaggatgagatgctgctctgctcagcatcactggcagccatcacgaggaccagacactccagagcacgcttcctatggtgtgcctggcactgtgcctgtcccactccaccctttcagggactccctcttctattatgcccgtatctcaactgagcaaatacaggctcagggagggaggtcacccacccagggtcacagatgtgaaggccaggtctgctgggtcccgaccccacactcctaatgctgaggcctaagaggttcataagccatagaggatctgtcataaatgggtctgcacagtcacccagcctgacggaagtcagaggaggaaaggaaacatgagggctgatgggagcggtcaaggagggcttcttggaagaagaaactggagtcagcccttaaaagatgagtatgatttagataaggggagaagaatctcacagaggctcagatcatcagggctggaacagagtgagacactgggattctccagacttgagttagagacctgactccacctcaaactggctgcacggccttgggcaagtctctaactcggcttcctcatcggcaacatgagggaagttgaa

SEQ ID NO: 832424 - DNA, 589 bp, Homo sapiens
attttactgttaaaggcagtgagacccagagagtttttctgccagtgtcccaaggttgggatctggcagacgaacttacaggaaggagtactgacttsggagtcaggcagtgctgggctcaacttcctgctcctcttttccaaggttagagccatatttgggactagagaaggttggcaaactataacccataggctaaattcagcccacagcctgttgtgtgcagcctgctagctaagaatggtttttacatttttaaatggttgaaaaaaaaacaaaaggaaaatattttgtgacacgagaatattatgtaaaattcaaattttagtgttcataaagatgtattggaacatagccatgctcacttatttatatattgctcatggctgttttcatgttacaaaaagagggctgaatacttgcaacagatgctgtatggcctgcaaggcctaaaatatttcctggttgcttacagaaaaaggaggcaacccctggtctaaagcagtaattcccaagcttggctgcatcagaatcacctgggcaggtgactgctgggctcctgcgtccaattttctgattcagccagact

SEQ ID NO: 832425 - DNA, 634 bp, Homo sapiens
ggataagaaaatagaaggacctctgattccatcacaacataatcatgacatgggagttcaaaacaattgcttctattgccaactggtgatcattcctttccacttttacagtcagaaactctatgaatatattttttaaagataggtgtgagagaaagcaggtttggtttccatttttcctttggtagatagtaagctatgaatgctttctttaagagtatttgtaaatgtgcccggaggttaatgaaaactgagaacatttgatgcggcaaaataatgccagctttgtgtgttctcccggaagttccctgagcttggatcttaagttggaaccattttctccaacatcttaaaagattacatgacataaaaagcagagaaacttggtatactctagaaaagtaatatttacaagcaaataaaggagtgcctcaatttatctgtagataagtgaacattcagaaaaaaaaatctctgaggtgctaaaacagttatgacaaagcccaagcacttaygtattgctaactaggcgagcgtcccttcgatgatgcttcgaggctattgtttccacctcatttctacaagacttagttatattagaagttatctacagttatctgtagaagacagatcc

SEQ ID NO: 832426 - DNA, 487 bp, Homo sapiens
aaataaaataaaaataaagtatcgctttagatgctgtgttaggaatagactgaaggagtcacgggtagaagcagagagacttgttggaaggcgattgcaataatctagaaaagagatgatagtgacttggaccagggtgatggtagtgggcatggagagaagtcatgagattcttgacttttctgaagttagggcctgtctatgcaaggtaaatatttgtcagatactcactgtatttgtgacaaaggccatggaattaaaaaatcttgctgtttgcagcctcatttttcttattccatctttcattttctttaagccactgagtatggtaatagtaagatttcagccctcctgctctagaggtaccatgtcaaaacctgattgggtttctgagtggtttcctttctcttattttcaggagaatgaatctgtgccttaccttcaagctgccactacaagtgtwgggctggaataaagatgcacattt

SEQ ID NO: 832427 - DNA, 505 bp, Homo sapiens
aaccaagataggctgggcgcagtggctcaagccaataatcccagcactttgggaggccgaggtgggtggatcacttgaggtaacgagttcgaaaaacaaacaactgcaaatggaggttgcagtgagccaagattgcgccattgcactccagcctgggcaacaagaatgaaactccgtctcaaaaagaaaaagaaaaaaaaaagaaaagaaaattggattcaggcagacttgggctctgtcctgacactggatgtaagatcttgactgaattagccttgctaagcttcaatgttctcatcattataatagaggtttccataactactgttaaataagataatgtatataaagtgctgagtgccatgctcagcacatacagtaaatgaacaatacatagtacatcagaatgaattttagatggatcaaagattgacatgtaaagagtaaaataataaaaataattgaagacgtccaggcwcggtggttcacacctggaatcccagca

SEQ ID NO: 832428 - DNA, 621 bp, Homo sapiens
atataggaacgtgttgtttttaaaccgataaaaaggtaaatgacaaatttacaaacaataatctctccaacaatgttgtgaaaatataggacagagatgagcagataactcggaaagcactaaaattataacaatttaaatagcatatgatagaataacaatgtattttaaagtacattgtacaaatatgtcacaaagtacatgttcaataaacattaactgaatctgattttgattttgaattcagaaagaactatcttattataaaagaaacaattttcttttcactaaagagtactgcattcttaattactaaataattaatcactaaataatcaaaaagagtactgcattcctatgctacatgccaggaacagccttaagcactaagtaatgtcccccagtcactgggatttttcaattcatttagttatgctgccatttatttctctcacatccatcaaaccactcatttttttactgcttgaatcataaatcaagtaagattcagccacatctactytccttagtgattcagaataacaatgatttatgaaaatttaatttattagatacccagtttctcgacggaaggaacaaaaatttataagcacttcatct

SEQ ID NO: 832429 - DNA, 568 bp, Homo sapiens
ggtataatatgaagtgggggtagagagtggtagttgaactattttatagggtgcttggggaaagcctttctgataaggcaacttttgagctgagacacataagaaatgaagagctgagcaatttggaaatacaggaaaggggatcccaggcagaagttgcctgagaggttccatctctgccaccagagctgaagtactggaccagtgccgaagccctccttccaagtgtgcttgtctctgacccattttctacactggattcaaaatgatctttctaaaacatacataagtttatgtctttttctaaaagtccctgttagcatccattgctcttagtataaaatatgattaaatcactctttgttaagagtgtcaagtgcattagctgtccgccttttccaatactaccatggtggagtgaatagtggctgggtattcttaatgcaggaaagatcctttytaacttttttttattattttactttaagttctgggatacatgtgctgaatgttcaggtgtgttacataggtatacctgtgccatggcgatttgctgcccctatcaacc

SEQ ID NO: 832430 - DNA, 553 bp, Homo sapiens
gttttgaccactgtccaatgaaggacagtaaaagactctgagacctgcctactctacatgttctcattttccagttaaagaagagagatgaaagaaattgtaataagttcgttcctaacaactcatttcagkggttgttgttttttttttgcttatttttacttaatcattatttaatttacaaggggaaaatttcaactccgtttacgtgctgctatattagtccgttttcatgctgttgataaagacaaacctgaaactgggtaatttataaagaaaaagaggtttaatgtactcactcttccacatagctgggtaagcctcacaatcacggtggaagagcaagggacgtcttacatggtggcaggaaagagagaacatctgcagtgaaactccctcttataaaaccatcagatctcgtgaggcttattcactgtcataagaaaagcacgggaaagacccaccctcatgattcaattacttcccactgggtccctcccgcaacatgtggggattgtgggagctacaattcaagatgagatttgggtgggga

SEQ ID NO: 832431 - DNA, 617 bp, Homo sapiens
cctccaaactggaaagagttaatttctcaaaacttaaactggttggcttaggactgggctcaggggaagggaacccagaagcccaacatgccagcaaaagggtacaagttttttttaaccagtcaggtttttggcttccctctccctatgcaaactggtaaaaggcctcataatttttgagctgtccttatgtcccctttgttttgttttgatacgtgttttctaataatctggtttgtctgttcttgccttcaggccatcaaactccaaacagtcatgcaaccagagcctctgacaatggtcccttctgctgggaacctgttggtaggcctctggggaagctctgactgtggtttccccaaaacagtgccctctgtcggcaggaagcagttaagataggtcttcatccttacccttattcgaagggcagttagatgtacttctgtgcaggcgggaaagagacagccaggtgggagggtgtccctggagaaactctaaccagccttcccactgaggtggagcctcgggaagttaatgacatttgcagcagggaggagcctggtttctcctcttcctgggtggaacccgggatccragctttgggcgggaagcactct

SEQ ID NO: 832432 - DNA, 606 bp, Homo sapiens
ttgatggattgagattatgtcttttttatctttgaatcttgggcatctagtgcctgaaatgcaatataaatacaatgggtatatagacggagaaaaacaaagacctcgggtagttgacacttgagtataaaagaaaaaaattaagaaacagattgtggtaagagaaaagataaatgattataaagtttcagagaaggagatcacatccaactgggaggaagttacatgtgaagtaatctggcaaggatacatagggtttaaccacacagagatacataaatggaatggcctgggcaaagtcactgtgaggcaacagggacacaatcaagaaggaataagttcttctgtttggttgttatttaaggtacataaatggcaaatgtctgggagaaaaaaaaaaaattaaagcagctagcctaaaattgttcctctcctggtatctggggaatgtccccagaaaaagaaagacaggtaacctattgtgatttccttgtaatcatgttggtaactggggctcctggcaaataggyttaatatttactagcaagagagtccttgtctatgcaatgctcctaccagggtgtcctggtttaggactgctatagt

SEQ ID NO: 832433 - DNA, 625 bp, Homo sapiens
gacaatgctatagcaatatttgcaatttaagaggaagttrcaaataatatttcaagcaaatgtgtagatgggctatatagcctatactaagatggtcttagcttatgaaaagggattaaatacaagctttggaagatgcttcattttaagcactgtatttacagggtaaagttgtaggatatcatgagcacattggtggactgatatttttacttcaaattcttgtttcacagtgacacttcagcttaagcttctattatcaagagtttacttattatcttattccacttagagaatagtggtgtggctacttggagaagagaagacttgcaggcaactcttaagcagaactcaaggacttcagaaaggatgagcataagtgctgaagaaggttcagtccacactcggagctcttcaccaaagatttctgtgttatttagagattgctattcagacaacttcctttggcttgtatatgcccactcccaatgtcaaatgcactgttacccttcctggatgcagccaggaagcaactctcagaccacagatgcttctaaaaggcccaggatgaggctgggtccttgtaatacagtagagaggtcaaaagaaaatgtggaataggggc

SEQ ID NO: 832434 - DNA, 633 bp, Homo sapiens
caacaagtaaaataagagatccttgtcattagaataaggctctctaggaagagtcagaggaattcaggatgctattaatagctccactgggccccaatcaaacacagccatctcagagccttagtgtttgtggggctcctacctgggttcttccttcatcttcagcacctctctcctctgcctaagattttcagggctgactcatatcttcgcttccttcaattgtctgttcaaatgatttatttccaggaaggtcttcctcagcaccatttataaaacacaaacacacatgaacatgcacattactctcacttctcctgctctgctatatttttatgcctagacttatcaccactcaacacagaatatatttctttgcccatctctgtatattattcagagtaggttaaactgatgttataccaaatagattcaagcatgtaatgtctcaatacagtaagctttgtttcctgctcacctagtagtcctaggtagatactgaagttggcaggttggttctcctccatgcagtcattcagggatccacactccttccattctgtggctccatcatktctgaatccagtaagcagaagctaatagtcatgaagggatataccatggaggtgttca

SEQ ID NO: 832435 - DNA, 594 bp, Homo sapiens
attctttctgctactgtccaaatgtttatgtccccccaaaatttgtatgttgaaacctasttaccaatgtgatggcattaggagatgggggcagggagtcttttgggatgtgattcagtcatgagggtggagccctaataaatggaactagtgcccttataaaagagcctcagagagctggtttgcctctcccatcatttgagggcacagcaagatggcactgtctgtgaaccagaaagtgagtcctcaccacacaccaactctacctgtgtctttatcttggatttctccacttctggaactgtgagaaataaatttctattgtttccaagctacccagtctatggtattttgttacagcagcccaaatggactaaggcactttccatttctgtattgtattgtgtgaatgtgcgcttctgtgttcctagagctaaaagctagtctgagtgcctgtctgcatgtccaggctttggtttgaatcttggtttattcctttcctggttgtttgatttggggcaagttatttttcctctgtggcccccctataaaatttggctaatagtaataccctccttataagattgttgtaaa

SEQ ID NO: 832436 - DNA, 672 bp, Homo sapiens
aaaactcctgggaaattcatcacaaaaatatcatcaccaaggcacatagtcattaggttacctaaagtcaagaggcctctccctctccctcttcctctcccatccccctccccctctccctccctctgttgccgaggctggactgtgctgccgtgatctccacttgctgcaacctccctgcctcgggctcccgtgattctcctgcctcggcctgctgagtgcctgggattgcaggcatgcaccgccacacctgactggtttttgaatttttggtggagacggggtttcgccgtgtcgaccgggctggtctgcagctcctgacctcgagtgatctgcctgccttggcctcccgaggtgctgggattgcagacggagtctcgctcactcaatgctcaatgttgcccaggctggagtgcagtggcatgatctccactcgctacaaccacctcccagccgcctgccttggcctcccaaagtactaagattacagcctctgcccggccgccaccccatctaggaagtgaggagcatctctgcttggccgcccatcatctggaatgtgaggagcccctctgcccggctgccccgtctgggaagtgaggagcgcctctgccyggccaccaccccatctaggaagtgaggagcgtctctgcctggccacccatcatctgg

SEQ ID NO: 832437 - DNA, 624 bp, Homo sapiens
tgcatttctaataacttctcagacgttgctggtgctgctggtccatggactatgagaacactgtttcaygctgcccttatttacatactgagaatggtacacagtgctcttatgaatagaatgaaaaccttttgaaatcacattattccttactccatcaaattctcagctatttttgtgcaccataaagctggaatagctgattataaaactttgttatgtaaaaaagtacttaaccaatacagtagattctgtttgcaaagcattattacagtttctaatatctggtcattgttacttgtaaaattcagccaaattttctccagggcctgtagtttgataacttggacaaaggaatttaaaaaaaaatctaattcaagacctttggttttttttctgaacatatcttttttttctttatgattcttatttttacattttacttatcatataagccacttaaacccatatggttccggaaaatttaaaactatatgatacatttagagcatgttgaatgcacagatatggaaattaagtattcttgactcattctagactagacctggcacaattaaaatttagggattcaacgtacacacacatagattccgagagaaatgt

SEQ ID NO: 832438 - DNA, 603 bp, Homo sapiens
tttagaatcacgaacaacaacaacaacaacaaaaatcctagarttgtttcattggttctgattgaccttacttggaaccataagtccatctttgaattaaccactaaagccagggagatgagttaaaactaagtacacaccatccacagagcaaagagaggtctattgtgggaaaactgcacaaatggaaaaataacaggggaaacacaggagaaggaggtagttagttaatgttcaatacacgcaccttctcagggacttttcttccatctggcatcatctttgtcttttgaccattttccccaatcaatacctatattcatactcaagttttccatatttgggaaaaaacttctcttgacaccaaactcccctctgacttccttcttataatgatctatggttggatagtctacaatttactgtccttactttttcataggtattttttaatctcctacagtaagatttctaccactgcactgaaatcattttgtgtatggtcttcagggaattccatgtggccaaagccaatggatacttttggcatgggctttggaggtctaacttcttgaatccaagtgtcggctctaacaatcacta

SEQ ID NO: 832439 - DNA, 593 bp, Homo sapiens
ccaggatgggaagggatttagtagtggctgctaatgggtacagggtttctttaggggcaatcacgttctggagttaagatagtgctgatgatcacgcaactttatgaatatattaaaaatcaccgaattgtatactttagaaggtgaattttgtggtatatgaattgtttctcaatttaaaaaacctaccgggaattagctcagattttctacaaattctcttaattctttgcttatctgtttatatcgatagaatttttaaaaattaatttgaatttccttttacgaatggtaaggagatttgccctttggggtttcactccgtccagtgctcttgctgtcgattctgtctgtttgccttttttgttgttttcgtttgtccactcagcatctcagttggccttagctgcagccgtctgcagccgcctcctccacttgggggttaggttgcaaatctgtcccagagtagctcatctcaytggttatcacattagcagtcactcatgtcagcagtccccgaagaaaagatagctggttggctggggataaagcatctgaaactttgctggtctgatgatatctttctgttgttt

SEQ ID NO: 832440 - DNA, 565 bp, Homo sapiens
ggagaaagcacatatttccatttaaaagatgctacaggacttcgcaacatccttgatgctttcacaaagtcattgctacttgagggtaaaagcaagtaacccagagacctggggactctgcagggaaaggaggtgggcagagcatcctgctggggcagggtccgcagggcccaagggcaggggaggtgtttgggctggaaggagggcactgctggtagacaggagtgggtgcagaatgtccaggcccccggatgcctcaaggtgggcacttggtctgtggatcaggagccagcagacatttgtccggatgggatggtggctccgcttactcagccagagatggggaaagaataactttggaagagcagggtcatgaggtgtgggacaccatggcacccacagggtcatgcagcaggggctggggacatcagcctgaaaaggaggagctgcctctgagggaggaggagtgaagggagagtgcagtccatcctcaggcagcttccctgtcccccaggagcctytattatacttgggcagctcccaagaccactcagacacagtctgt

SEQ ID NO: 832441 - DNA, 696 bp, Homo sapiens
atcctctggccccgtgagtcagctcagggagaggagccggtaggagacccacatctccagaattcaaggttgtcactgaccacgagagtgttcttctgcatctcagctttgtttctgtctcactygattggaattccatctgttcagcagaattcagcccaccccattaggtggatgagatgctgtgatgtaaaaagaaacaagacaatttccgaaagtttggggttatgagaatgatctgggcctaggtgcggatggtccccatcagaagcaacaaaaacgtgtgctattatctctcacaaggtttttagccttccttgccaaaagttacttagcgagttgctgggtcacagggggtagcactgatccggagaagatccgtgagccttttgaccactgccactttgcaggtatacatactgaccctcaggctgcgggtccagacaaaccccaactcagccaagacaaacccctcccacctccagtgctgataacgacctttcaatagtctcatgctggagatgctttgggtctagatttattattattgttaataataatcaaaataaagattgtttgtttccccccacagtcctccacaaagattgattttcctgaggtccgcatgggtgcgcaaagccttccttttcttgagtctgcaaggtggatggatattttattgcatctatttcttag

SEQ ID NO: 832442 - DNA, 632 bp, Homo sapiens
gaggtggagaaagacaagccgcccaatccccgggaactctctgcggcgctcgacccccatcacgtgaccgttctttcatcgttctgttcctaaaccggaatcggagtccaagagagggactggrcttaggcgtttaacagttgacatgctttaatgcatagtacacacagtgcagtcctggagcttgtagaagtcacttcgagctaggtctttgttttgtcaaccaccttcaccccttaaattcactgaacgtaatgtagcagcatggctggggaaagaaactgtagctagtacgccgtgttcatttgcaactcatggctccttcgcatgcctagtgtctaacacaggctgcagaaacttttcctgccgctttgttttaggagatgaagaattcttttcccgaacaactgctgctccagggcactgtgctcacttttctaggggaagtgactctgaaacccaaaattccctggataccaccagagaatggctgaacaggaagttttcttctttatttaaattagtaaattcgactgttcatgcgagccaaaggcagtgtcataggtgtctgtgtggacccgaaggtgaccttgtcccatgagagggatgctgtccaccagggaagggaccat

SEQ ID NO: 832443 - DNA, 632 bp, Homo sapiens
gaggtggagaaagacaagccgcccaatccccgggaactctctgcggcgctcgacccccatcacgtgaccgttctttcatcgttctgttcctaaaccggaatcggagtccaagagagggactggacttaggsgtttaacagttgacatgctttaatgcatagtacacacagtgcagtcctggagcttgtagaagtcacttcgagctaggtctttgttttgtcaaccaccttcaccccttaaattcactgaacgtaatgtagcagcatggctggggaaagaaactgtagctagtacgccgtgttcatttgcaactcatggctccttcgcatgcctagtgtctaacacaggctgcagaaacttttcctgccgctttgttttaggagatgaagaattcttttcccgaacaactgctgctccagggcactgtgctcacttttctaggggaagtgactctgaaacccaaaattccctggataccaccagagaatggctgaacaggaagttttcttctttatttaaattagtaaattcgactgttcatgcgagccaaaggcagtgtcataggtgtctgtgtggacccgaaggtgaccttgtcccatgagagggatgctgtccaccagggaagggaccat

SEQ ID NO: 832444 - DNA, 626 bp, Homo sapiens
gcccctttagtaccccacgctggtcacacagccccttagtatcccaccctgttcacatggccccttaaaaccccatcctgttcacacggccctttagcaccccaacctggccacacggcccctctagcaccccaacctggtcacacggcccctttagcaccctaacctggtcacacggttccttagcagcctgctcctggctcctccagggtttctcccattaacatgaaggtgtgggaccttttctgcagtagtctgtcctcccaactctgcatatgcctttcttccaagctccaggttcccttccacccagtgtcaccgacatggatgttttggagagagttgggctgagggagaagggaggagggaggaagaagcatataccgggctgtggccacggccggtctggcactggcggtggctcatttctgcaccatagctacagctgttgggagatgggatcgtgtaaggatctggtccttctggtgactcggccctgagccaacccttggacgcaggattctggtggagttgatggccrggattggtcctgtgtgtctctctcggagcagggcacagtcccagctgaaccccagggactgactgcacttatgtgtgggatgggg

SEQ ID NO: 832445 - DNA, 721 bp, Homo sapiens
tctccattttcttgcatgccacctttgacaatgtctctatttgaagtttatgatgagactcacagaggagaaaacatttccctaaagacattagggcaccagggcataggacttctgtttcacacacargcaccagtttttcacaaaaagatggcttttgagcatcagtgtaaatatgtgtcacatctggatatgttatgacctgttcattttcttccactctgatcttcccctctactttgacgatttggcagcgaagacatcctgccttcaggacagggaagatgcagagagggcgagaggccgttcctttctacgtgtcagctttctagtttaaaatctacagtcagtgttcagtctattcagtcatgcaggtaagtagccttgtttctctgtatagatatcaaccctttagaaactgcttttgctgctggtgctgggcctgtgtgggtgggagggagaatgccctcttggcattggctgcttttagttatctccaggttaacttagcctctctcaggaaactaagagtcttgcaaagtgtctgcctctgctgtcctctcttcgttttcttctttttctctgctgttggtgaatgtacccagctcctgtgactccacatgtcttcccctgctcccatcccacccctaactcaggtggctctgtttgtgctggggtcccggcacagtcagttcctgctggcagctcatcccatggctac

SEQ ID NO: 832446 - DNA, 525 bp, Homo sapiens
atgatccacagatttctcaagacacatgaactgtaagagtggttctgagttggtgcttattatatgttactagtcattgagtaacatatttttcaatgtttaattmtttttgaattaccctgtatgtattggctaaaaactataagtattcagtaatgcttttgaattaatttgcattttcctaatcatcaaaacatctaaacatgccataaaacagacacacatgtatttcatgccacaataatgggtcactttataagatggcatgcctttttatatttacctcaatttggacctcagaacaaccctgtaagatagatatctcatctcattttatagatgaggaaactgaggctcagaaagatcaagtcacttgaccaaggccttgcaaagagcagcttgtagaactgggattccatctcaggcctggctaaatccgtagccttggctgtcagtcctaaatcatgttgccttctctaataaggaaaaagctctactaaaaaaaaatatatagtgcttttattt

SEQ ID NO: 832447 - DNA, 613 bp, Homo sapiens
atatacctattccacttgcatttctttgaccagaacttagctccatggtcacacttaggtgccagggagactgggaaacaatctttattccaggataataagaatgcagctaagtatccaagactctattatagagcacagaagacaaaggagacatttggtaacagtaattggtctctataccacgtgcaatatgtgtgcagagatcattgaaacagggatccttattgtgttctgttttgtttgtttgtttttctggtggggaaactgagcttttgtttcttcttcaagggatatacagctcagattgacctaacccccagtttctcatggatcctaaaatctctctacttaacaagtaagagtgactgatctttacacagtccaggaacctcaaggtgatggtgacaaactcccccaaatgtccactgctatctgatgaaagacatcaactttggttgcaatttcttaagccagataygaagaagaatgttttaagtctcaccacagtgatgcatggaaatgaatcctgaagtaaagtataatgtcaccttgccatccctaggagatgcttagggataagcaagagacagcagtctggggtgtatttgga

SEQ ID NO: 832448 - DNA, 628 bp, Homo sapiens
tcagtgttttggatttttggtaattctaatgggtgtgtagtggtatctcattgttttagtctgtawtttcctgatgacatgtgatgtggagcatgactcttaattttcttacttcattttattgatttttggtttggcttagtagtgtctttattgcaaaaaataatacttgcctcatgggattattatgagaaataaggaaagaatctgataatttcaaatacagaggtgaatttatagacttcatttctatatcttgctcaagtttgataaggctagagctagaagccacattggtagaaagttagtgcccagcaatggtgtttaagttgcataggacagtggatttcaaatattttggtctcaagatccttttacagtcttaaaaattacttaggaccccaaagagctgttgtttatgagaaataaatccctttatatttaccatataagaaattaaaaattagaaaaattatatgtattaatttattaataacaataataaacccattacatgttgctataaataacattgtatgagaaaatgtctatattttaaaaacaaaaaaattaatgagaagaatggcattgtgtgactttttttggaaatctttttaatgtccagctc

SEQ ID NO: 832449 - DNA, 628 bp, Homo sapiens
tcagtgttttggatttttggtaattctaatgggtgtgtagtggtatctcattgttttagtctgtaatttcctgatgacatgtgatgtggagcatgactcttaattttcttacttcattttattgatttttggtttggcttagtagtgtctttattgcaaaaaataatacttgcctcatgggattattatgagaaataaggaaagaatctgataatttcaaatacagaggtgaatttatagacttcatttctatatcttgctcaagtttgataaggctagagctagaagccacattggtagaaagttagtgcccagcaatggtgtttaagttgcataggacagtggatttcaaatattttggtctcaagatccttttacagtcttaaaaattacttaggaccccaaagagctgttgtttatgagaaataaatccctttatatttaccatataagaaattaaaaattagaaaaattatatgtattaatttattaataacaataataaacccattacatgttgctataaataacattgtatgagaaaatgtytatattttaaaaacaaaaaaattaatgagaagaatggcattgtgtgactttttttggaaatctttttaatgtccagctc

SEQ ID NO: 832450 - DNA, 602 bp, Homo sapiens
gaacacttacttcttctgtgttctaatcaaggtgatgactagttgataygatcatatgagctcagctaatctgctattcggtaaagggctacagagaaagttagtcagatcttcaggctccttactcttctcccaggcaattttttcttggtggccctctgaaagtaatgctgttgtttaatctgatagcgactgagattaggtgatatcagtcaagagtggactcagctgcaagtagcaaggaactcgagaagattggcataaggaaggaagagggttatttttctcctattaagaaaagcagaggtacttaagtccagggctgatacatctaatcatagtgtcttcaactatgcagagtccttccaccttctgagctaccattctttgtggcttttatcttcatgattgcaaggtgactgctgtaccatgaggctttgcatctatattccagacaggaagaacgggagagagggaagggcaaatcagtgaagaaatgtgccagccaaattagagttattttagtaaggaaggaataagagaaaacagctttagggttgggatctagcagtgtctgccacagagcacttacatcctaacga

SEQ ID NO: 832451 - DNA, 435 bp, Homo sapiens
aggggattgtaaaatgcaccaatcagtgctctgtagctagcaagaggtttgtaaaatgcaccaatcagcgctttgtaaaatcgcacccatcagtgctctgtagctagccagggtttgtaaacgggaccaattagcgctctgtaaaatagaccaatcagcgctctgcaaaatggaccaatcagcactctgtaaaatggaccaatcagtaggattctaaaagtaaccaactgtggggaggattgagaaaggggcattctgatagaacagaaacggaatataggaagggacaaataaggcaataaaagctggccaccccagccagcagtggcaacccactygggtcccctttcacgctgtgttctttcactgttcacaataaatcttgctgctgctcactctttaggtctgtgccatctttaagagctgtaacaccca

SEQ ID NO: 832452 - DNA, 507 bp, Homo sapiens
ggtagcaagggagtgaagtggactgtgtgaaggtccctggctgtgtttttgtttactgtgctggttttgtgttggttggtctccagccaggaggtggcgctttccagagcacatcagctgtggtcctatacrgagaatgcagacttgccctaggaatacctggttaagtattcaggtttctcaagtggtgggaagggccccatagggctaccaagagattatgaccttttcttcagctaccagggtgagtatagaaagactaccaggtgggggcaggaataggcatgtctgagctcagcctctccttgggtggggcttgctgcggctgctgtgggggatgggggtgcgattcccagtccagtgaaatcatattccctggaagatacagctgcctctgctgagtcatacaggttactaggtaagtgagagacgagacgctggcagtcataggcttcaccccactcccacatagcccgcagtcctaaagatctgtctcacttccaactg

SEQ ID NO: 832453 - DNA, 531 bp, Homo sapiens
tttttaaaaagtaatttagataattatgtaattgctttttaaatgtctatctcttccactaaaatatcactttcatgagggaacagactgtatatttttcactgctgttttctaagcatttctttgtacgtttgaagcattcagtaatattttggatggatggatggatggatggatggatggatggataagtgagtgaagagtaactcactagttgatatctgccggattctgtcctccatctctctttctaaacttctagaaagttcatgatagctatattttgagcactgcatctgtgggagtctttttcccaatagtgaagaattaccttctttcccttcgcaggtatagctgtaagttaatcagtaattttcaaatgctcgtaattttgtaaaataatgaactttgcatcctttcagctgttagtrtgatatgctgatatgaaatatgaagcctggatattgaggagctaaaagcctgagagagccccttccctgagaagctttaggtgaaaaaaaatgtcagagg

SEQ ID NO: 832454 - DNA, 556 bp, Homo sapiens
gctgtatccataggcattttactctttttgtggttattgkgaataggattgtattcttgatttggctctccacttagagattattagtgtatagaaatgctactgattttttatattaattttgtatactgaagatttgctaaaattgtttattagatgtaggaggatttgggcagagattgtgtggggttttctaggtataaaattataatgtctgtaaagataaatagtttgactttctctcttcctatttgaatgcctttaattaccctctcttgactgattgatctggataggacttccagtactatgttgaacaggagttgtgagagtgagcatccttgtcttgttctggttcttaaggggaatgcttctagattttgcctgttcggtataatgttggctgttgggttttcatatgtggattttattattttcaagtatattcctttgatgccttgttttgttgagggtttttaacatgaaaggatgttgaattttaacgaaagcctttttggcatctattaagatgaacatgtggtttttatttttattt

SEQ ID NO: 832455 - DNA, 614 bp, Homo sapiens
aatagattaatcattttaatttttttaaaaatttaaaatttctctaaagttttcttttgctttctagatacacaaattacacacacacacacacacacacacaaacacacacacagtggcaattaaatattcgtgccttgaaaagtgagaaaggatacagatgtccttctgcctagtagacctgtttatgagaggtcctgtagactccctgtactcacttgactcccaaattcattacctctatcaacccaaatatgctccttttccttctgtgtatctacttcattaaacatctgtgcaatcagccagacacaaacttgcagaccccgcctcaccactctcctgcctcttatctgataaatctcccagtgccgcaaattctccctctagcccggcttgttcatctgtacacttgcctttattacagctctcataccatagcagatcaccactgcttttctcctagattactgcagccatctcctgtttgtctctcattttccagtatcactctcttctaatttgctgcagctrgagttaggttctaaattccaaattcattcatgtatctactttaaataactcagtacttcttttttgtttgtttgtttttc

SEQ ID NO: 832456 - DNA, 614 bp, Homo sapiens
gctccctgataccctttctctggggattgtctcctcaattgtttctgagacaaaagggaacgacagcagggactaaaatactttatcaaataaagtctggattttgtgccattaaactgagtgttcgtttcctttttactaatcaagttctgtcaagccacagaaaactgtccatttactctgaaatcctgaggtcagtatctatgcaataaaataggcttccagttaatttgatgtagaaatatttttaccttgatttacataaagtagttttcttcattatatatccaaataggcttcttttctttcatagattttgaatttctagccttagttgaaaaactcttcgggtcaatgtaatttcctagatttttttccaagattaaaaagagatttatatttttctatagtttttctatacaggatttgtttttatacattctaatatatagtttcctcagctttcaaggatgagtagatatgagaaaatatatttgtggttatgwaaaaggttggtatctacaatataaatagagtttttataaagcccaagaaaaacacaaataacacaattgaaaaaatgctaaataatatgaccatatacatactgtgaa

SEQ ID NO: 832457 - DNA, 612 bp, Homo sapiens
ttactcttagctaagaagttgatcagcatcttcggagtcactgtggatgataacraagcatccacaaaggctaaactcccaaggaataagtacattgggatatgaaggtgagggtctttccagatgagaacaattagaccaagattccccatgatggtgatgagatatattaccaagaatgccaggaagagcggtattttacagtcaggttgatgtaaaaatcctgtgagaacaaactctgtcagcaatgttgcattttcctcttccatctcctcactgcatgtcctctgaaaaatgaagcaaaggtaaaggaacatttgcaatggaattgtgagttgaaattggggaagaggtgttgaaataaactatgtaattatcgagccctcttaattttttttgatcagtgctataattgatgaaccctatatttgaggatttaaatacatggaaataataatgaatttggtttgaaaattgtgtaggagttaacagactgagagttaaaaagacgcattatctgaatgtactaaatttttgtggactctactgaatgtaatgaaaaaaatctgtctgggacatggatgtagggtgaaggaaaaaagatatttgaaa

SEQ ID NO: 832458 - DNA, 662 bp, Homo sapiens
gtgtctttatagtagaacaatttatattcctttgggtacatacccagtaatgagattgttaggttgaatgatatttctctgtctttaggtttttgaggaatcaccactgtgtcttcarcaatggttggactaatttatttacatttctacaacagtaggcaaatggcaaatgttgttcacattacttggagtgcagtgctgtagttcattcccctcatttgttgtgccatttgtttcccattcacttcttatttttttctgactttaattctatcagaaaatgcaaactgctctcactgaagccactaaaaatctctaatttccacaatcagtgatctctattcatatttagtccaaccagagcatttcttctggcattttgccctgtactttgtccttcttgagtatatttcctatctttatgtctacaacattcagctttccagtttccctcctgcttctttgatcactctgctcagtatttttttctgacatcgcccttgtctctttgtttgagccaggactcttggttgcattgggcaatgagtttattgaacggaaagctatgtaaaatagaaatgccagggaaattggaagaatcagctgtaaaaatgggcaggaacagaatgaagtaagacagccagtcaacagcccaaattatg

SEQ ID NO: 832459 - DNA, 691 bp, Homo sapiens
tgaataaagtcgtgtaccacataatgacattttgattgcctatgggatggtggtgccataagattacaatggagctgaaaaattcctatcacctagtgacatcatagccatcattatgtcacagtagaacacattaatcatatgtttgtgtgatgctggtgtatacaaatctgcactgtcagtcatataaatgtatagctcatatatttatgtaccgtccataatacttgatagtgacaataagcaactgttagtggtttatgtatttattatgctattaatcattattttagagtatatgccttctaattatataaaaaagttaactataaaacagtctcaggcaggtcctccaggatatattccagaagaaggcatcgttgtcataggagatgagagctacatacatgttatttcccctaaagaccttccagtggcacaagatgtggaggtagaagacagtgatattcatgatctcgaccctaactaggcctaagctaatgtgtgtgtttgtgtcttagtttttaataaaactttttaaaaataaaaaatttaataaaaattctaaaaatagaaaaaagcttatagartagaatttaaagaaaaatattgtcgtatagctgtacaacatgtttgccttttaagctaagtattattacaaaaaagtcagaaagttttcaaaagtttaaaa

SEQ ID NO: 832460 - DNA, 692 bp, Homo sapiens
taataaaactttttaaaaataaaaaatttaataaaaattctaaaaatagaaaaaagcttatagagtasaatttaaagaaaaatattgtcgtatagctgtacaacatgtttgccttttaagctaagtattattacaaaaaagtcagaaagttttcaaaagtttaaaaatttataaggcaaaaacattacagtaagctcagttaatttaattttgaagaaagaaaaatgttgaaataaatttaaggtagcctacatgtacagtgtttataaaataaagtccacagtagtggacagaaatgtcccaggccttcacattcactcatcacttactcactgactcacctagaactacttccaatcctgcaagctccatttacggtaagttgtataatttttaaacttttaggttgttttattactctaccttttatatgtgtggatatatttagatatacaaatccttaccattgtattacaattgcctacagtattcagtatagtaacatgatgtacaggtttgtagcccaggagcaataggtgataccgtatagcctaggtgtgtgggcaataccatctagattttttgtaagtacactctaggatgttttcacaatgacaaaatcacttacttcttgcaagaacactataggatgtaatcataatgacaaatttctcagaacatattcccatcat

SEQ ID NO: 832461 - DNA, 453 bp, Homo sapiens
taatcattttaaagcgtgtggttcagtwgtactaagtgtattcgcagcaaccatcaccatcatccatctccagaacccttttcatcttgcaaagcggaaactctgtccccattaaaccctcacttctcattccctcctgctcccagcccagccaatcaccattctatgtcctgtctttatgaatttgactgctctagagacctcatataaatggaatcatgcagtatttgtccttttgtaatgggcttattccacttagtataatgccctccaggttcatccatgttgtagcatgtgctagaatttcctccctttttatggctgaatactattctactgtatgtatgtacctcattttctttatccattcatccacatgtggatgtctgggttgtttccatctttaggctattgtgaataatactgctgtgaacatgggtgtacaaatgcctc

SEQ ID NO: 832462 - DNA, 513 bp, Homo sapiens
tctctgcaaaatcgtgcagttttgtttacctccctgtagtctaagtaccactyacagttcaaagtagccctcctccacacagcccttgtagtcctcacggcatttagccgtggctttgtaagacaggcacaggtgctgatgctctcaggatgggttgcattaagttgacatgcttgtcttccccttaaagttccttgatattctcagttgtgcttaattgaactttgaggtctcacagaaccccaccacagaggagatgcctgatccatatttcttaagagtataaacatttttctagctaccacccgttgtctaagtttgggaaaaaagaaggaaagatcaatggaaagtctggaggagaagagaggagtagatggagcaaaaccaaatgaaagataagggggtggggaaagggacgcagtaacttcttcagttctaagatgtgcatttgtttcacaaatcaggttttttgtgtaaaaaaattggcccatgtaatgtattttgttacctcct

SEQ ID NO: 832463 - DNA, 624 bp, Homo sapiens
agtcctaaactgaaaaacaactgagatgtccttcaacaggtgaatggttaaatggytaaacgaagtataacatatctaacatccatgccatggaatactacttagcaataagaaggcatgaactactgatacactaagaataagaaagacaagagagaaacacacacacacacacacacacacacacacacacacacacagacatacaccctgtatacacactgagagacgcacagaaaaagagagaactcacaaaggaaatacagaaaaatatctaggatatttttactaggctatatctttgcagtttagttattttaacataaaagtccctaataatctgagattagcaaaggtagtatttcaggatactgctgatttttataaacaaaagcaaaactatagcgttttatgtacaaatttaaaatattttcaggtttcattatgtctcatgttctttaaaactatttgcttttgagcctaaagacgaattacttctttgtggtttaaaattcaaacaatgctataaacctaattctttgatcaataaagccaaactttaataagtctgacctgacttaataaaacaataactcactgtggttgattcttacttattgttca

SEQ ID NO: 832464 - DNA, 628 bp, Homo sapiens
tgaatgtggcagtttgggagttttcttgctacattcttggtttgttagtaattttctgtcctggagcattatttttaaagccaagtggcaataaattgttaatacacccttagatttgtgcactgatattttttaaggctttgtatatgtctgaatatatgatgcggattttttccacatcattatttatctgtaggccccactcgcacagtctaattgttctgcagtatattctgaatgttagcatagtttaaacctccccacgatttgaatatgtagccagggctgggaatcactgcagtggaattgagcttactgtgtttcttacgtattttctttgagagtctgagagtctggcagagctttttttcttctgcctccttgaccatacatttgtactgaagggtggatgaaccctcagaggtgacttctcatggaggggtaggtcctggcctgtggccagcactacctgggggactctgcatcttcagaagctccttcctctgtttccagcaggaagtgagccagagagaacacagtaagcagtgycctgccagcgacctccctgttctgtctacccagctttggcccacagtggcaaatggtaaaagcagcagtaagcactctc

SEQ ID NO: 832465 - DNA, 602 bp, Homo sapiens
aattatcattatcactgcatgtccactagaatggctaaattttaaaaagacggaagaaacaagttttggtaaggatttggactaattagaacttacatattgttggtttaaaatggtgaaacacttgataaaatataaatattcttgtacatatcatttgtgaatatgcctaggataaattccttcaactgggaatgttgggtaaaagggttttaacttttatagtgtcaaatgactttccacagaagttgtgccattttacattctcatcagcaacattatgctcccaagttgatttccctcacatccttaccaagatagtatactaccaaaactttccatctttgctgttctaaaaaatgacatttcatgtggttttaattagcattatgtatcttcatatatttagaggaatttgcatttttctttttcataaagttggcccattttattgttaaattgctggcctttccttattaaacaattctttatatattaagaactctttatatattaagcccttggtttgtaaaatatgtcayaaatcttttccaagtttatatatcttctgactttctatgccatactcttacgccatatga

SEQ ID NO: 832466 - DNA, 584 bp, Homo sapiens
tagagaaattggaaactttatgcattgctgtttggaatgtcagccccctgtgggaaatggtttggcatttcctcaaaatactaagcgtagacttatcatatgatccaacaacaccctttaagggtatatgcccaaaaaaactgacagcagagactcaaacaggtatttgtacacctgtttaatagcagcattattcacagtggccaaaaggtaaaaccaacccagcccatcagtaggtgaatgaataaagaaaatgtaatatatacatacacagaatattattcagccataaaaagaaaaaaaatctggccaggtttggtggcttacacttgtaatcccagcgctttgggaggctaatgtgggcaggtcacttgagcccagaattttgagaccaggctggacaacatggcaagacctcatctctacaaatatatatatatatatatatatatatatatatatatatatatatatttttttttttttttraaggaaattcttttagtgttataaatgagccttgataacattatgctaagggaaataaaccagacacaaaaggaaaaatattgtacaagtctact

SEQ ID NO: 832467 - DNA, 585 bp, Homo sapiens
tagttaacagaaaacctatagttattaaatggtagagcttataaacatgtcccaagaaggaaaactccaggtccataccacatayagactttgaaataattatgattaacatgttccagtttccctagactatacagcagaagtctttgacccaaagatagataccaagctcgagtttagatacttcttgtgagaccttaattaacaaggaaatgtcaaacaccacttgacaatcaacctttccaggttacatttagatatatgtggatgaaaaggtacatagggataagtagattcttaaggctgagctgtctaatactgtagccagtagaaacatatggctgtttaaatttaaatagaaattaattgcatttaaatgaaataaaaatatttcttaaccacactaatcacatttcaagtacagaacagccacttgtggccagtgcttccaaaaatggtcaatacagaacaacatttctatcatttcagtaagttttaatgaacaatgttcaccagtggttctcaatgagaacaccatgtcgcctgtaaattattttgaaaatttctgggcagctgtttgtgttc

SEQ ID NO: 832468 - DNA, 458 bp, Homo sapiens
ctgagggcagcctctcagagaggagggcaggggaccttcctcagctcagcaccaacagccgccctgcagagagccctgccttcctcaggaggccccgctggacagagacctgctaagggtgcctctcaaaccttcaggaaggagatgatccaagtggtagctgggagtggtggctcttgcttggaatcccagcactttgggagtccaggcaggaggatcactggaggccaggagttagggaccagtctgggtaatatggcaagaccccctctgaatttaaaaacaacccaagtcttatgctaaggatgtgtcctgccatccttatacaagacagatgacgtcacctcatcctagtccccatcyctgttcctcccacaccccccttccttgtcatgtatgcacacacctgtcttcccccgtgcatcataagtgcccccaaggacaggaactgactggtg

SEQ ID NO: 832469 - DNA, 641 bp, Homo sapiens
atcttaatggtagtgttgtgaattataatccatttcaggagaaaaaaaatgaattttgttaccaggttttgatttagccaaatattattttaaaaaaaacttcagaaccctatcttttctgtccacttcctgatcctttctgctgtctctctgtcttcttgagttggatagaaacattttatttttagagctacaaaagaacttaacagctatccagttgagagtcttatcattttttatgataccctttaagaaataggtatgttatggacactgttagcaggaaaatgcatccatacatgcaaaaataagatttgcatataatttcagtgttctctgagtctcaaaacaagaacattttaccttatccaaccctgtagtttcataaataaataaagtcactaaaagtgtgtttttactcaggtaaccaacaaactgatatgtagcacagtggaaattcagttatgtatgtaaaaacgctattgaatactctttctacaatgccaccttgattctctttaagcatgtctcatgcaaaagtgattatccagtaaattttagctgtatccagattagagtacacacaagrgtttgggataggtacacaaggggtttagtggagaacagcttctggagccaag

SEQ ID NO: 832470 - DNA, 711 bp, Homo sapiens
gatgtcttccttaaacaagaaggcagggctgcctgaaaaatctagagtgtttaggaaagttaggcaagagaattggagaagataagagatgacttggaacttaagttatagggaacagactaatctatcctctagaaatgaataataagatagtcaagtagctttgagaactcacttgaaaataggcagcatgaatttctgataggccagtcagcatggttctatgattagcaaagtcaaatgagaaaaatgttcttaactatccttagcagacattgtggaaaatttaactatttgagcaaaaagtctattttgaactataataggtcattcatcttcactgtaactgctgaggtcattaaacttttacagagagcctgactgcaatatttaaaaaactgtatgtttcaatttgtttctgcttttagagtgttgaaatgtaaaataatagaggactcagactttgtctcatgcttgaggtgctgttggttttctatatattacataacaagagagggtaatgtcctgcatggttgtattttactcagaatacaatatatgttccaagtggttacacatgatttataattgttggtaagatggttctgtcaggcaaactatgttgcggcttattttcactaatcacatctcataaatcactataaaaacaggtcayggcatacatgaagtactgcaaaacagcacttaaaa

SEQ ID NO: 832471 - DNA, 473 bp, Homo sapiens
ctacaaccctataaagtaggtatatcattattattgcctttatagggacaaagaaactgaggcacagagaaattaaatgacacccmcgataacttagctgacaagtatagtcggcattcaaatcaaagatagtagcacatttttagaattcccctatctacaatgaatgccatattccaaggatgtaaaacaaaacgtattagtataagggaatttgcggcagatacattcaaataaatgttgctagttacctctgctagtcctgccctaaaatattattaaatacattgataaccctgattaaaccactctacgtaaagaaggagttaaggaatcagcaaagggtctctataaggtagtacaaaacaaaaatgaagaggagaaaaccagctaaaggcaatgcacaaaatatcagaaaaaattatcaagaacatactttttaaaataaaaatccctaataaaagatacactag

SEQ ID NO: 832472 - DNA, 469 bp, Homo sapiens
agggttatagaaatctggcttcttcctaagtactttcaacagagaagaatagtgaccaatagtttgtagagaaaaaagccaaagagaagagttttatgtaatgtaactaccatgaattgatgctattatggtgtcactttctaaaaataagtcttcattaatatttttaaatagtttgctgtgagtaaagtatggtaggcccattaatgccccccccccaccaaatgtggctacatgcttatccctggaacctatgaacatgttatcttacatggcaagatggaattttgcagataaaattaaggttgctaatagctgacattaaaatcaggagactatcctaaattatctgatagatccrctgtaatcacatggacccttaaaagcagatgataaaggcagaaggctcaatgagataaatgtgatgagggaacaagaggcagaagaaatttgaaatttgaaagggact

SEQ ID NO: 832473 - DNA, 556 bp, Homo sapiens
ggggaacggcagactaaaaacttctaaaaattctttcctctgaagtagcaacaagaacactggcaaaaattgtcaaaatctacttttcagaattgtggaaattaacaaggcttgcaaccttctgtgggaaattgactcccagatgtttcacattatattatttataatgtctatttttaacaagaaaatcacaagatatgcaaagaaataagaaagcatggctaatatacaggaaaagaaaaaaaaatagttaatagaaactagtccgtgggaaacctaagatgatgaagactgagacaaaaattttaaatcagctatcatagaactaacaaagagtatgaaaacaggtgtcttctcaaaagaaaatatcaataaggaggtaatataagaaaaaagaaaagaaattatgcagttgaaaagtagaataaaataaaacttttactacatatttgtagtaatttgaagaggcagaataaaaatctgcmaactggaagataaggtaattgaaattattcagtttgaggaacaggaagactaaaaaataaaacaccacaga

SEQ ID NO: 832474 - DNA, 625 bp, Homo sapiens
catctaaggaaattagagaggctccaaagcctggtaagtctcagtcctgcttttctttagcctgcatataattagtcagtatcgtgtctsatctctgcacctagctcaggaactgaatgaagtattcatggttaattggcagagaaacccaaaattaatctgtctgctcattgcttccgtgcagagattatataatttgactttttcttagtaaattagacaagattttctttctttacttgtttcttactctttctcaaaacataattacttaaatttgaatggaataaaaacaactctttaaacatatgtaaattaaagtgattttagttggcatcagaaactttatgaatgaaaataatgaaaacacttactcatagaaaggcaaaaaaagttcggtgaatctgaataatgtatcatttagagcaaaacatcaataattttagaagatcctttatcttttaaatataataaatacttttttgttcattatagaaacacttgaaaattcagagagcaacataaattaagaaaactgaggcaagcctaggcaacatagtgataccctgtctctacaaaaagtaaagcgaaacaaaacaatttgtatgtggtggcatatgtctat

SEQ ID NO: 832475 - DNA, 500 bp, Homo sapiens
tccttttcctagttgtattctcctaagccgcagagatgccactcacagacaatgctcttaaatccacctytgcaatctttggacatgtggggcaggtggtggagggagaggtctttgtgctcacatggttggtgggtggggagagaagaaggtggcaggtgtcaagactgctagctctaattctgttcactgagaggtgtttggtgtattctttttggagatgtacccaaactgtcttgatgatatatttggctctccgttttggagaataaaaacccaatatgtcatgctatgtataacaatacaagttttcgtgccctttttctccttcttaaattagtgttcttcaatataaggacagcggaaacagtgtgaaataataaagaccacaagcttttcttagattcttttgcatgcctcaacagggacaccacattctgcttttgacacaaaataaaattacccaaagaagtctcaaagcaagacattagagagttttt

SEQ ID NO: 832476 - DNA, 619 bp, Homo sapiens
agaatatgcatatagtttgcttactacagaaattcttgtttttgatgtagacaayccaaaggagtttttatgtatatagattgtgaataaattgggaaaagaaatagagataagtagagattatttcacttcattaaacttttgaagtcctaatttagttcatgtgattatttgtaaacttttctttattagtcttcctcaatcattgaagaacccaggattcaaatacaatacttaatggaaacactttttcatcccaaactaaatcctgccctgaaagccgaattcactatgaaatctgagatgaaactccaaggctattatgctggccagtggaaggttggttcacccctcttgaggtgacattagggtggtctgcagacatcactggagtggacaaagagatgcctgggtggttggggaaaggacagatcatagacaacagtagcctctttctagagctcagttgcaataaataccacagttactcatcagacacattggcagttctacttattcccatgtttcaaaactagagaattctagcaaggactaagcactgcttctgtagaccatcggtatttctccatggctgtttgaatttttgtcaaagcttctg

SEQ ID NO: 832477 - DNA, 619 bp, Homo sapiens
agaatatgcatatagtttgcttactacagaaattcttgtttttgatgtagacaacccaaaggagtttttatgtatatagattgtgaataaattgggaaaagaaatagagataagtagagattatttcacttcattaaacttttgaagtcctaatttagttcatgtgattatttgtaaacttttctttattagtcttcctcaatcattgaagaacccaggattcaaatacaatacttaatggaaacactttttcatcccaaactaaatcctgccctgaaagccgaattcactatgaaatctgagatgaaactccaaggctattatgctggccagtggaaggttggttcacccctcttgaggtgacattagggtggtctgcagacatcactggagtggacaaagagatgcctgggtggttggggaaaggacagatcatagacaacagtagcctctttctagagctcagttgcaataaataccacagttactcatcagacacaytggcagttctacttattcccatgtttcaaaactagagaattctagcaaggactaagcactgcttctgtagaccatcggtatttctccatggctgtttgaatttttgtcaaagcttctg

SEQ ID NO: 832478 - DNA, 579 bp, Homo sapiens
agtggcttaaaagcaactaaccgaccaracagaatcctacccaaatactgcattacatttaccacatgaggaaatttagcattataaataattcagcccaagtggcacttctcagtgcagatgaactcaggccattttgcagcattaactctgatgatttttgttcaaacttattttctagtacaatcttggttcatctttaatgggctacttacatcatccatttaaaatagttaggttcatcctgctctcccacagaaacaatgcctatttctcagaatgatagttgcaaggagaggtctaatttcccaacatagattgatttgtgtgtgtgtgcaatgaaaagaatctatgtgcttttcgaagtggccagggtcacagtggctgtaatctcgttgatctagattaaaaacagactcttgtcctggtatgctgagtatgagtcccagttgtgtaacaagtggttattccacttttgtgagtaggcacataagactgaccaatatctcagggaagcagaaaaaatgaacataagattgttaagtgtttttggtcaagatagaatattatagtaaaatg

SEQ ID NO: 832479 - DNA, 567 bp, Homo sapiens
aatacagtggtgaacacatgatacatggattcagctatataattgcactcacacactgtaaaggagatargcacttaataaatattcacaaaatacacattaaaactgtgatagcagctatggggaaaatctatgggtgctattaagggcatacatataccatgttaaaatttgtattagtcagggttctccaaagagacagagtcaataggatatacatgatatatgagaggagatttgttaggattggctcacacaattatggaggctgagaagttgcaggacaagccatctgcaagctggagaccctgcaatgctgaaaacatcaaactcagtccaagtcagaaggcctcagagccagggaagctgatggggtaacagtccaaggccaaaggcctgagaacccagggggccactggtgtaagtcttggaatttaaaggccagggagcctggagttgttgcatagggacaggagaaaaagagtgtatcccagctgcagcagacagatcaacacattcaccttttctctgtttttgttccctccagacccccagcagattaacgac

SEQ ID NO: 832480 - DNA, 637 bp, Homo sapiens
tcttttcattcaacagtttggaaacactctttttgtagaatctgcaggtggatatttggagtgctttgtggcctatgacagaaaaggaaatatcttcacgtaaaaactatatagacrcattctgggaaacttctttgtgatgtgtatgttcatctcacagagttgaacctttctttggattgagcattttggaaacactctttttgtagaatctgcaagaagcaatctgtgaaacttctttgtgatttgtgtattgatctcacagagttaaccctttcttttgattgagcagtttttaaactctctttttgtcgaatctgcatttgtacatttggaaggctttgagacctatggtgaaaaaggaattatcttctcataaaatctagaaagacaaattctgagaaactactttgtgatgtgtgcgttcctctcacagagttgaaactttcttttgtttgggccgtttggaaacactctttttgttgaatctgcaagtggacatttggagcactttgcggcctgtggcagaaaaggaaatatcttcacatacaatctagacagaagcaatctgacataattcttattgatgtgagaattcatctgacagagttaaacttttttttgatgaagcagtttt

SEQ ID NO: 832481 - DNA, 608 bp, Homo sapiens
gaaaatttatgagaaacttctttgtgatatttgctttcatctcacagagttgaaactttcttttgattgagcagtttgggaacagtctttttgtagtatctgcaaatggatattaccagtgctttgagacctatggtgaaaaaggaaatatcttcccataaatacaaggcagaaggattctgagaaacttctttgtgatgtctgcattcatctcacaaagttgaacctttcttttgattgagcagttttgaaacactctctttgtagtatctgcaagtggatatttggaactctttgagacctatagtggaaaaggaaatatcttcacataaaaaactagaaataagaattctgagaaacttcctaggaatgtgtgctttcttctcacactgttgaacctttcttttgattgagcagcttcgatacagtcatttagtagaatctgaaagagaatatttgagagcccattgaggcctcttgggaaataagaaatatcttcatctaaaaactagacaaaaactatctkagcaacttccttgtgatgtgtgcatttatcacacacagttgaactttcttttgattgagcagtttggaaacagtcatttgta

SEQ ID NO: 832482 - DNA, 547 bp, Homo sapiens
cacagaggtgaacctatcttttctttgagcagttatgaatccctctttttgtacgatccacaagtagacatttggarccctttgcagcctatggaggaaaaggaaatatcttcaaataaaaactacccagaagcattctgaggaacttctttgttatgtgttcattcaactcacagagttgaacctatcttgtgattcagcagttttgaaacactgtttttgtagaatcttcaagtggatatttggagcgttttgaggcctactgtggaaaagcaaatatcgtcacataaaaacttcacagaagcattctgggaaacttctttgtgatgtctgcattcatctcacacagttgaacctgtcttatgattgagcagtattgaaacaatctttttgtagaatccacaagtggatatttggagtgctttgaggcctattgtggaaaacgaaaaatcttaacataaaaactacacaaaagtatcctgataaacttatttgtgatgtatgcatttatctcacagatttgaaactatcttatgatttagcagtt

SEQ ID NO: 832483 - DNA, 547 bp, Homo sapiens
cacagaggtgaacctatcttttctttgagcagttatgaatccctctttttgtacgatccacaagtagacatttggaaccctttgcagcctwtggaggaaaaggaaatatcttcaaataaaaactacccagaagcattctgaggaacttctttgttatgtgttcattcaactcacagagttgaacctatcttgtgattcagcagttttgaaacactgtttttgtagaatcttcaagtggatatttggagcgttttgaggcctactgtggaaaagcaaatatcgtcacataaaaacttcacagaagcattctgggaaacttctttgtgatgtctgcattcatctcacacagttgaacctgtcttatgattgagcagtattgaaacaatctttttgtagaatccacaagtggatatttggagtgctttgaggcctattgtggaaaacgaaaaatcttaacataaaaactacacaaaagtatcctgataaacttatttgtgatgtatgcatttatctcacagatttgaaactatcttatgatttagcagtt

SEQ ID NO: 832484 - DNA, 547 bp, Homo sapiens
cacagaggtgaacctatcttttctttgagcagttatgaatccctctttttgtacgatccacaagtagacatttggaaccctttgcagcctatggaggaaaaggaaatatcttcaaataaaaactacccagaagcattctgaggaacttctttgttatgtgttcattcaactcacagagttgaacctatcttgtgattcagcagttttgaaacactgtttttgtagaatcttcaagtggatatttggagcgttttgaggcctactgtggaaaagcaaatatcgtcacataaaaacttcacagaagcattctgggaaacttctttgtgatgtctgcattcatctcacacagttgaacctgtcttatgattgagcagtattgaaacaatctttttgtagaatccacaagtggatatttggagtgctttgaggcctattgtggaaaacgaaaaatcttaacataaaaactacacaaaagtatcctgataaacttatttgtgatgtrtgcatttatctcacagatttgaaactatcttatgatttagcagtt

SEQ ID NO: 832485 - DNA, 525 bp, Homo sapiens
aaatatcttcacatgaaatctccacagaagcattccgagaaacctctttgtgaagtgtgcattcatctcacagagttgaacctttcttttgattgagcagttttgaaaaactctttttgtagaatctgyaagttgatatttggagcgcttaggttcctattgtggaaaaggaaatatcttcacattaaagctgcacagaatcattctgagaaagttctgtgtgatgtgtgcattcatatcacagtgttgaacctttcttttcattcagcagttttaaaactttctttttgtagaatctgcaagtggatatttggagctctttgaggcctatggtggaaatggaaatatcttcacataaaaactacaaagaagcattctgagaaacatctctgttaagtgtgcattaaagtaacagagttgaaactatcttttcattgagcagttttgaatctctctttttgtagaatctgcaagaggatatttggagccctttgccacctacggtggaaaaggacataccttcac

SEQ ID NO: 832486 - DNA, 605 bp, Homo sapiens
aaaaattgtgcaacaaaacacaaatagcattccaacagcttggcaagtgatgcattcacctgagattgagtggttttaggcggtcagtaacaaaakgcttctttgctgtctcagtagaaaggcaacaaattcttcaaagaaaccaagaaggttactaccttgacaacgtctctcattaccgtcctcctcttatgtcctttctctccacattatctgttgtgtgtccactatagaaggctacaaaacatacagcagaaaggatggcttgaaggcaattggtgtttgtaaataaattcacaacaaggtccaagctgaagaggtgaacacatcagccgggtgggacaattctcagcatgtgcaaacataggcaaattctagcctatgttacattgaaaacaatgtcagtgcatttttttcatgttaaagattttttaaaagctaaagcgtgttctttgctgtgctgaccacaaacaagttttaagagtttcggaagtctggcaaaaatagaaaaaaaaaaaaaaaaaaaaagctgaagcaacattgaaccgcacaatgtaagctttgggcatgcacaaattttcaaaacaaaggaaggaaatcatccc

SEQ ID NO: 832487 - DNA, 390 bp, Homo sapiens
actgtgatgtttcccttcctgtgtccatgtgttctcattgttcaattcccacctatgaatgagattatgcggtgtttggttttctgttcttgcgatagtttactgagaatgatgatttccaatttcatccatgtccctacaaaggacatgaactcattattttttatggctgcatagtattccatggtgtatatgtgccatattttcttaatccttatcattttcttatcattgttggacatttgggttggttccaagtctttgctattgtgaataatgctgcagtaaacatacstgtgcatgtgtctttatagcagcatgattttagtcctttggttatacacccaataatcggatggctgggtcaaatagtattttttgttctagatc

SEQ ID NO: 832488 - DNA, 390 bp, Homo sapiens
actgtgatgtttcccttcctgtgtccatgtgttctcattgttcaattcccacctatgaatgagattatgcggtgtttggttttctgttcttgcgatagtttactgagaatgatgatttccaatttcatccatgtccctacaaaggacatgaactcattattttttatggctgcatagtattccatggtgtatatgtgccatattttcttaatccttatcattttcttatcattgttggacatttgggttggttccaagtctttgctattgtgaataatgctgcagtaaacatacctgtgcatgtgtctttatagcagcatgattttagtcctttggktatacacccaataatcggatggctgggtcaaatagtattttttgttctagatc

SEQ ID NO: 832489 - DNA, 615 bp, Homo sapiens
cgtaattttctaattaatttaagaaattcacccatctaagcatatggttgtcttctttgttatatttgaatcaatatttgccaataaagtgacactcagttgtatactgatcttttactggacatttgaaatrtcagagaatttggaaaggaaattctgatctggcatggcatcttagagaatggccatgaaactgagctctgaagtgcactgacctgtgtcgtttataatatttaaaaatattctatagagcttattttaataagatttttaaggggtgggtttaagtttcctaattaggtaaaccagtatgattatgctcaatttagattattttcagaatattacatcactaagatagtttagaacaaattagaattcttgtcattgaatataagctccccaagccatgaatttgaggaatacataagacccaatctcaatccttagaacaacatgtgagttttaataggacataactaaggggagcccagcaaaatgatatcctacagatgagtaactgtacgtaaatattttgtgtctgattttaagtgcactgtaaaactttaaacatagctgttttcaatagtagttgctgaagttatgaatgagcat

SEQ ID NO: 832490 - DNA, 647 bp, Homo sapiens
ccatgttcttctgaccatttagcatgcagtgaaaaaggaatttactattgttagaagaacgtatttctatcccacacccagaggccaccaatggcaatagtagccgaagcgtacctgtagttcagcttttgacatgtgtctaaaacatgtccattaacatgtgcttaatctgttctgtgaaagtattttcagaaatgataaaaagtaatgatggttacatctgaatataagttagatcatgacactcactccttttttcagaaactaccaatggcatcacatcttactcagagtaaaaaccacagtgcttactgtgggctgcaaggcctcgtaggatttgctccccatgactttctgacttcatctcttgtcacacatctccttattcgctccacgccaagcacagtggctttttcactgattcttaaacatgccaggtacactggcctcagagcctttgcactggcttttccaggcactggcttttcactctgcctggaaagctctgtccctagatatttgcatggctagctccctcacattcttctggtrtttactcaaaagttgtgatctcagttaggccttgtatcaccaccctaactaaaattatacccatttattctttgtcttacatctccctgctttat

SEQ ID NO: 832491 - DNA, 558 bp, Homo sapiens
gataatgtcatccccaaagaaacgcatctactatggatttatcctttgcgcctttttctctgtatcctttttgcagtctttgtcactttgattattatgtggggattggggcttcctatctcctgaccgtcttttgtgaactaaacattattttagggaattcgtactaaaattctgaaagcactgcttggggatggcagtcttatttgggattgtgtcacatgttgtttgttttgtgcttaattggttcatgataacttggacaatatataaatgatcttggtttcatcatgtaactcacaaaatgttttcttttacattttttttctttagtgctttctccttttcctaccaaatatctaggctcacttttaccatcagatagagatttagttgggcttttagaactctctcatcaagcagatgctttktgtgtgtgtgtgtgtgtgtgtgtgtgtgtgtgtgtgtgtgtctgtagtttgtgggctgttagaagccatttgctcatcttgtcaaagccatagcagtcttttcattctcagttgcttcgctttctcc

SEQ ID NO: 832492 - DNA, 600 bp, Homo sapiens
gaagctgcttctttccaactctaactctgcctatttcttctatcatgtcatcagaattccttaaacatcttatttaacagaatatacaaatttaagccagttctacagtgaaaaacctgagagtgagtcacgacaaactttaactgtaatcttgtataatggaaatggagagagacaaatattggggaaagatcttaagaaaactgatgaatccaataggtaggtcagataagtgtttcttggctttctgctttccatttgtaagcatgtctctgtgtgtgtatgtatgtgtatgtttatacccatgccccttatttagagctctaaatctcctaaggacgggaaccatctgccacctgacaagagagaagtaaactccatgcattcgttcttctacactcaagagggatcctcttcagcctaggatggtatgggcatagaatattttggaaacaaagggatagattctgtggctttctgtccccttttttccttttctctttccacattcctggctctaacttggttctttctgttgycatggtaaccaacagtctcagaacacagacttctgacagctggacttttagccacggagac

SEQ ID NO: 832493 - DNA, 614 bp, Homo sapiens
attttgtggcagtcattaaggctgttcacaaatacaccgattcttctctcctgaacacagagtaggattatagttctctaaccctgttgaagttagctgttggccaatgtcttatttgacaaatgaaatatgagcagaactaactaacataggtctcattcaggcagaagccttaaaagccagtgcatttattgccattttcccattttcctgcctcaggaagtgtggaagcatctatctagatggagttcctgttaaccagggtctatgatttataaggagcacacacccacccttccacaaccacttcactacaatgaacatgtagcataagtgagaaataaccattgttgctttaaataactgagcttatgggattgtttgttactatcatatacactagcctatcctcactgatacaggattgaacaggtgactcctgacattatttccaaatccaaaatacaaggtttttaagaatatttctatttagcctcttgtatkaaaaacaatccacatatttccatccacagaaacattattgattgtaatgatggtatgaatattaatttatgaatattaataccaagcctaaatttagcaacttatatcag

SEQ ID NO: 832494 - DNA, 646 bp, Homo sapiens
tgtttgtttaacaactctttctttgattctttcatgaaaataagatgtttacttatgggacmgtacagtgagcagataaccaaaaccacaaaacaaaactgaataataaattggcctatggaactgaataaagcactagttattctgctgtggatataactgcataataaaagtaaaatgccagggaggctttggagaacaacttcgttattgaacataggagagaaaattcaagcttagtagttaagaattattttcagagctgcaggtagccaccatgcagcaatgtcagtcatttttattatgtttacacattcctttaaagatttccctgaaaccccattaatgatttctatgaccaatatttaattcgtttttatacttaataatattttgtatttattgatttgattttgccttaaaaattgtgtgtatatatatatatatatatatacatataaacacaagataatataaatatgcatctacacatatatgtcagatttctgacttctattttattggttttattttccttcttggagaaaagaaacttaatcagggttagcagacatttggtgtttcatcaaaggatgtttatgtgcattttctcatttgacagagatgaactcttatcttcttcatc

SEQ ID NO: 832495 - DNA, 643 bp, Homo sapiens
aactaaaaagcacagtttaaaaaatataaatatagagctgaaataacattatttatgagaatttttctcctgtatacaatgatatgttaccaaggatgcatttttttttttttttggaactcaaaaggcagacaaaagagtgaatgctgacaacattttgtctagatcccctttagccacccattgccctcatgtctaacttctttgggttagtctctaacagctcacagctgctctctcttctgaagaattttccttgactgtatggtaggttcctcacccaggaggtgaaattcaccattcaggggaaacctacaaccaatgactgactgatggaggtataaacagaacagccctcttgtccaaaggggtattttttcccccagagtttgccatgaaattttaatggagctgaacgcactcccactgaaataataattttgtttagtttttattctacttcccttactcttttattccttggattattctctacaaattatgcacacctgaatttctgtctcagccctcgctgctgtagaacctgacctaaaataattaacctatctctctttcactatgagagagaagctgacttaacygaatttgataaatcatcttggtttgtccaaacagctatgac

SEQ ID NO: 832496 - DNA, 600 bp, Homo sapiens
catgtatacgtatgtaactaaccwgcacaatgtgcacatgtaccctaaaacttaaagtataataataataaaaaaaaattatagaagaaaagataggagaaaagctatgagatcttgagtttggcaatggatcttaagattacattcaaagcatgacataaaaaattgataagttgtactttattaagattgaaaacttctccatgaaatactgttaagagaataaatagatataccacagattgggagaatatatttgcaaaacacatatctgatgaaaaatgtggattcaacatataaaaataacttaaaattcaacaataaaaagaaaaacaataaattttttaaattcacaaatacacgaattgaccttttactaaaaaatataaagatggaaaataggcataagaaaagatgctttagtttgcttgtaattagagcattgaaaatcaaaataacaaggtgaaaccctacacacctgttagaatagtaaacatgaaaaaaaactgtcaatactaaatattactgagaatgtggagctatagcaacacttattcattgctggtgggttgcaaaattgtacagccactttggaaacag

SEQ ID NO: 832497 - DNA, 643 bp, Homo sapiens
tagaagctacattgaacataacaaatgcctcctatttatgccatgcttctgatgaaaatctactgctttttaaattaaaaacaatatattttgtcattstaatgatttgaattatgtcacatgtgatcatttcataagatactactagtctatcatcaaattaaaatatatagaaaagttcatcatgtggagaggtttgttggagaaggaaatgcagatttaggactatagtgagctggaattctttttgttggtgattaaaattctactccacagtcattgtgtatggagatataattttgttatgaacatttggtttaaaatatttatttgaaaggtatttatcctcattagaatgctcaggttatgtctgtaaatacaggctggatacagctataaagatgaaacaaagtgttgggattctgccaatgttccctaaaattcatgtcttcataaactgacttctggaaaataagaatttaataggcacagacttaagaaacatgaggaactcaagttctcctgctcataatataaattgtgtggccccttatttatttcatgcacttacactttctccatctgtggtcccagagctctcctgtaccaggcagtcatattccccagggctccattacacttt

SEQ ID NO: 832498 - DNA, 643 bp, Homo sapiens
tagaagctacattgaacataacaaatgcctcctatttatgccatgcttctgatgaaaatctactgctttttaaattaaaaacaatatattttgtcattgtaatgatttgaattatgtcacatgtgatcatttcataagatactactagtctatcatcaaattaaaatatatagaaaagttcatcatgtggagaggtttgttggagaaggaaatgcagatttaggactatagtgagctggaattctttttgttggtgattaaaattctactccacagtcattgtgtatggagatataattttgttatgaacatttggtttaaaatatttatttgaaaggtatttatcctcattagaatgctcaggttatgtctgtaaatacaggctggatacagctataaagatgaaacaaagtgttgggattctgccaatgttccctaaaattcatgtcttcataaactgacttctggaaaataagaatttaataggcacagacttaagaaacatgaggaacycaagttctcctgctcataatataaattgtgtggccccttatttatttcatgcacttacactttctccatctgtggtcccagagctctcctgtaccaggcagtcatattccccagggctccattacacttt

SEQ ID NO: 832499 - DNA, 613 bp, Homo sapiens
tgtatctggatattgaaatcaagtaatgtggcagggaggatgttgagggtcaacatggagacagctgctaaaatcttcaaggaatgaaagggaagacgtatgctcggagtcagtagaaaaatatgctaaagaagggcaactgggagatgtagtctggggatgagatttaaactgaagtgacttctttttccatcatgaaaaatggggttgacaaaagaattagagagccctgtggggattaggaaactaagcattttgtaataattaaagtaaatgggaaaaactagtataatcactgaggcaaaaataataaggtcaggagttccataaataaaagcaagagaaaaaaagataataatatttacttaaaaatatacttgacagaattaggtggcagaatggatatagtgaatagagggtgatgaatactatgtttggcctggaagatgtgacgtttgagatgcccgtagtacatccacaggctgacatccggtgcacagcctgaagcctgtgtcyaaagctcaagccaactgatacaatattggaagtcactggtgataactgaaaccatagaaacttatgaaaaattctaagtgaagcatagtatttgaga

SEQ ID NO: 832500 - DNA, 474 bp, Homo sapiens
cattctttcaaactatttttggtacccattaaccatctccatctgtctcctattttcccactacccttcccagcttctggtaatcattctactacactccatctccatgatttcaattgtttttattttcagatcccacaaataagtgagaacagacaatgtttgtctttctgttcctgggttattttacttaaattaatgacctccagttccatccatgatttgcaagtgacagaattccattcctttttatggctaaattgggtaaatgtgccacattttctttactcattcccctatgaatggacacttaggttgctttcaaatattagctattgtgaatagtgctgcaacaaacttgaaagtatagatatctctttgatacattgattgcctttcattgggtagataaccagcagtgggatttctggatagtatrgtagctctatttttacctccaaacttttccccact

SEQ ID NO: 832501 - DNA, 605 bp, Homo sapiens
ttggtaaatcgtaaaaccctgaactgctctagactgctaagcttttatagttttatgtttgctttatwtggattttctgtctctccctgcgcaatcaagctgtcggctcttatttcttgctgctcccagtatgtctgagatcttctctttatttgtttcccatctgctatgctgtttctaatctgtatgtgcgggggaagcagatactcatgtttgttagaagcatttgtaatgtaagagtaagtaggttctgagtgagtattgagggtcataaaattagtgagcagacttagggacatatattttggttactcagaatcctcgttaactttattttctttttagattggcaaataaatgatgtctagataaatgatacaggacagtactttaaaaaataggcataaaaaacacagacatcctttgcttatttatatacatcagtctttccttgggaagtgaaccaaatctccaagcaacagagtgggtcccgggttttttaagttatttctttcatttcttttaaatttctaaaatcaatttccaacttaaaagtggtcttttctaaactcaaatggagagtaaatggaaactcagccaaggta

SEQ ID NO: 832502 - DNA, 574 bp, Homo sapiens
tcaaatgatgtttcatcaggagaatgaataaacaaactgtggtttattcatatcatggcatactactcaacagtaaaaaggaacatacatgaacctcaagaatattatgctgagcaaaagaagtcagacagagtacatattgtatgattccttaatatgaagttctagaacaggcaaattgaatctatagttatagaaaccagatcagtagaatgttctggttctaggcacagaaccagagggacagaaataggcacagaaatagaaatgttctgtgccttgattggcaaggcagttacatgggtccatatatttgtcaaaactcaatgaactgcacatttaaaatggatgtattttactgttaaattatacctcaataaaattgtttttttaagaaaagtgaaaggggaggaagacatgggaaagttataaaatagtatgcagttattaaaaggaataaggtagataaatatttctgaattgaaagatatagtgttaartggaggataagagttgttaaatagtacacttgatctagtttacattttcaaaaaaagtagtagagtgtgagggc

SEQ ID NO: 832503 - DNA, 575 bp, Homo sapiens
tcagttggttaaatccctgcatttgccttaactgaatctagtttgaacagttggccacctgccacaggctgaaattcggctgctataattggctgagactcagttgtygttacaaaggcaaattcctaagttaggttttctgttggtttatttgctaagttaggttgcagttagttacacggacttgtacagaggcttctaaagcccaaatgtagtttgatttagaaattttttcatacattttcagctggtcattctaagaaactgcacacacaggagtagctctaaaaagctgtccttctgtaaaggaaatttacatctagaacagaaatctacattattggagtatctgtatcaggaaaagggctgctgggagatatattacctgagagagacttcagctgcatgacaagacaacctttattcactgtacaattcctcccctcactttcccataacttgtgctgtctgccactccccgaacccacaaactcaaagcctctatttctttctgtaactcaggatgctacagaaacttcaatcatctgacccttctttgagtctcatattttgtg

SEQ ID NO: 832504 - DNA, 303 bp, Homo sapiens
atgagacttattcactattacgagaacagcgtgagaaagacccactcccatgattcaattacctcccactcgatcccccccactacatgtaagaattatgggagcaacaattcaagatgagagttggatggggatacagccaaaccatatcagtgcatgtgtgtgtgtgtgtgtgtgtgtgtgtgtgtrtatatatacacacaccacattttctttatccactcattgattgatgggcattttggctggttccatatttttgcaattgtgaattgtgccactataagcatgtgtgtgcagata

SEQ ID NO: 832505 - DNA, 303 bp, Homo sapiens
atgagacttattcactattacgagaacagcgtgagaaagacccactcccatgattcaattacctcccactcgatcccccccactacatgtaagaattatgggagcaacaattcaagatgagagttggatggggatacagccaaaccatatcagtgcatgtgtgtgtgtgtgtgtgtgtgtgtgtgtgtatrtatatacacacaccacattttctttatccactcattgattgatgggcattttggctggttccatatttttgcaattgtgaattgtgccactataagcatgtgtgtgcagata

SEQ ID NO: 832506 - DNA, 619 bp, Homo sapiens
tatcaggaagaaatgtcaacctagagacactgtccttcagactatagcaaagtacaagcatctggtaaatgtatttcaagccccatggggaatcactttaggcattggcactttatatttttgcacatatgctaaaggctaaatgttaaatcaaattcatgcaggtatttgtttatatgtatacaacaatctaaattatttgggaaaagatgaagctgaatcaaatatagagagctgtaacacatatttaatgctgtgacaagggataagtactggcctccttagcagaatcagactaccatgttgaacctgttctccccttgcagctcaaaggggctgttcctagtgggggtaggaatggataacagctctgctaactgcacacagtggaaggaggaaaacaccaaactcttctgctctgtcttctgaagaggccattctttcaagcagtagctttagaaattcacttcgatttggaagaaattagtttctgtcacttgactatcccagtctcagaaatamcttcagcgtgtcaatgggaaagatccatttggggtgcactcactgcataaaggaggttttacagtcacaggagatccttacctttcaatagaactac

SEQ ID NO: 832507 - DNA, 480 bp, Homo sapiens
taagaaaaacaaaaagctagcaaagtaggaacaggaaggtatacataaagcacttaaaatgtaaactccagttattgaaataatgattgaattaatgctaaaataattttattactaattaatgaaaacattcattaatttataatttgaatgaaataaactagttataaaatttgatatagccaccgtctgtgtttaggaatgtttaagagaggaaagaaaacacaagtatttcaatatgcttttggagatagttatccatctattgagtacatttatcgacaatcttttttttttttttttttttgagacagagtctcactgtgttgcccaggctggagtgcagtggcgggatctcggctcaatgcaagctctgccttccgggttcacgccattcttctgcctcagcctcycgtgtagctgggactacaggctcctgccaccatgcccggctcatttttttgtatttttagtagagag

SEQ ID NO: 832508 - DNA, 441 bp, Homo sapiens; identical to SEQ ID NO: 823564

SEQ ID NO: 832509 - DNA, 497 bp, Homo sapiens
tataaagctgagttgtatactagtgtactgcaattgggtagattccaaatgcaggtttgaacaaggttatttcaaggtctttctccttatrtggattagtgagcctgtggaagaggtctcgacccaaaagcttcaacctgtaaaagtggtttcagctggagtaattgtgttctcaccgtgggaaaaagcctttcagtccttgcaatagcaaatttcaggagctgacatcttttaaatcctctaaacaagtcaatataaattagggtagtaggcagaaagataatactgatttcattcattcagaaaatgtttgttgaggccagacacagtggctcacacctgtaatcccagcattttgggaggctgaggcaggagaattgcttgaggtcaggagttcaagaccagcctggccgacatggcaaaaccccatttctactaaaaatacaaaaattagctgggcgttatggcacacgcctgtgatcccaagtactcggggg

SEQ ID NO: 832510 - DNA, 541 bp, Homo sapiens
gatgtgagatgggaggagagggagcgaaaatggaagagagatggatggagtgagactgacagcaagacagagaggaagagaaagggaaaggagagagcgatgggagaaggaggaggaagaaagatggggagggggctctcagggtgcaggcgcagagacgcccctcttgagttcaggagcaaacccttgagttttctaaaaatagctcagtctttcccctagcagggttggcagcagggaccaagagaggcacgcttgcccttttatggtaagaaaaagtccagatcctcaaagggggagctaggctggagcctgtaattctggatgaagtccagcctcagggtctggggtgggacagggctgaatgaggggggaagacttagtgggatttcctggcctgagtggccctacccttggggaagatarggctgaggtaggtgttggcatgggcctcccaggaaagcactggggtcctggtagatccttagtgttatggcagaaagtctagagacatttggtccacgctgtgtctctgttttat

SEQ ID NO: 832511 - DNA, 592 bp, Homo sapiens
ctcaacatcaaagtggggtgatcataactgccctccctacctccacaggcctgttgtgagactcaaggctgatgatgctgttgagaagcaggagcaccctgtatactgaaattttataaatcagtaaattgtgattaatataaatgtgccatcctcttacctcccacttccaatcaaacaacggaactcatttagaattcagaagagactgaatagcacctcattcagaaaaacaaagcattaggtggacaatcggcttgcagaaaactcagtgtgatcaaggaatcagaaaatcatcagcagatgccacaggctacactaataggagtatgtggttggctttgttctattcaatagagtttaaaaattattttttactatttctgacctatttgcaatatctgagaccctaccctggtgctgtttgtttgcggcatttcctctgcataatctgttcyccaactgctacctcctggtagctgtgtgacattgggcaagtgacttctctgtgtctgtttccacatctgcaaaatttggataataataatacttattcctcacagggctgttgtgaggatccagtgaggtgtta

SEQ ID NO: 832512 - DNA, 596 bp, Homo sapiens
gggaaattaagtccagtaaagggaccttaaggcttagaattctaagccttcctcaccacaacctgtaaggcttttaggagacctgtgctgagaaaraaattcccacctataaataagatcaagtcaatgaaatacttatacaatactatatgttactgccggtgaatagacacaggtgaaaatagatctttgcattcaactagttatgtaatctagaattttgtacagctaaactgttttgacatttagttcagtttacacagaaataaatttagactaggggctagtttacagcaaatcttgggctgtggcagtcctgacctggcccagttcaaggaagtttccactgcaactcctggatcttcgtaatttgactgtaagtaaaattatcttgaaaatcaatctgtgagtacatgagttctttaaaacaatttttatggactggcatatactgtagagtggtcctcacggagacagctgagcaaaggcttaaagagggtaaaggagtcagctttagaaaagggaagagcatcctgggcagagcaaatagctagtttaaaggtgtaagcaagaggacttttatctctcctactttc

SEQ ID NO: 832513 - DNA, 596 bp, Homo sapiens
gggaaattaagtccagtaaagggaccttaaggcttagaattctaagccttcctcaccacaacctgtaaggcttttaggagacctgtgctgagaaagaaattcccacctataaataaratcaagtcaatgaaatacttatacaatactatatgttactgccggtgaatagacacaggtgaaaatagatctttgcattcaactagttatgtaatctagaattttgtacagctaaactgttttgacatttagttcagtttacacagaaataaatttagactaggggctagtttacagcaaatcttgggctgtggcagtcctgacctggcccagttcaaggaagtttccactgcaactcctggatcttcgtaatttgactgtaagtaaaattatcttgaaaatcaatctgtgagtacatgagttctttaaaacaatttttatggactggcatatactgtagagtggtcctcacggagacagctgagcaaaggcttaaagagggtaaaggagtcagctttagaaaagggaagagcatcctgggcagagcaaatagctagtttaaaggtgtaagcaagaggacttttatctctcctactttc

SEQ ID NO: 832514 - DNA, 612 bp, Homo sapiens
tcgatcttttggaatagatgactgaggatcacatcccakcatcccacgctttccatgaacaaacgtgcagatgagagagtggagcccacctctcactggccacggttacacccggcatcaggcaggcctgccccagtctctcatgtgtgaacctgggcgaatcttggtaacctccgagcctcaggtttctcctctgttatgatggggacactaatgctgtctcacaagccggtctgtcttccaggagatgatgccaatgggctcgtccagcacaatcagtgggccccctgcagtagcctcttccctgaaaggaccaaggcctcactgtatgagtcagatggcaccacaccccagcctgcagcacagcagcggccccgctgtcctgagatacaatccttcattctggcctaaaggccctgcgtgatgagcccggtcccccttgtatccctcctggtgccctggcctcctgccagttgtccaggcaggctctttctacctcagggcctttgcaccacctgcctctcctcctggaacacccttccccagatagtctcaggcctggatctcctcctctgcaggtcccagctccactgtcactcctcagcgaggccc

SEQ ID NO: 832515 - DNA, 621 bp, Homo sapiens
agcaaacttctgaaaagtaaagacaagtaaaaaatcttgaaagaagctaaagagaaataacattttacctgttggagaacatcaattcaattgcctgtggattttttatctgaaaccagagaggacagaaaagagtagcacaatatttttcaagtgattgagagaaaagaagtgtcaaccacaaattttatatccagtaaaaatatccttccaaattgaaggggaaatagattctcaggtgaagaaaaactgagagaatccatctctcaacaggctcactcttaaaaaatgactttgggaagttgtctaaggaacttaagaagggaaagaagaatggataaacgtaggagtaaatataacagatattacttctcttcttgactttcttaaatcttatttgatagttaaagcaaaaatcatagcactatctgaggtggtattcaatgtatatacaggaagtagctaagacaattttatcttaaaagtggggagcataaggggacccaaatggaagtaagttttctaaacttcactcaaagcggtaaaacctcaatactaatagactttaataagttagttgatayagtatctaaagcagccactaataaaaataaaaaagtc

SEQ ID NO: 832516 - DNA, 644 bp, Homo sapiens
gcagtggagcagggatggggacccttctaggatgtgctcacctcttcaggtctgacctagggctgggactcrgggaggcagaggcagcactgaggagttatggcaaccatgtcacccagtcttccctgagactcctacccgcttctctatccatcccttgcctgctggctgccagtgaatacccctcccagggtgtgtgtgcatgccactcagtgactcctggacatgcagaggccaccaggaacgaagctgggctgaggagtggtgggaggcactgggaggtggacagagcctccttagacattgaacaggctttgcaaaacttcttaagagccagacccaggagctctgaggcctgggtggaggtatgtgtggagaaggctacattcctaagtcaagcccctggccctgccacctaggccccaagccaggaccaaggtatctcttcatcctctcttcttagtgaagtcagacgtggagcagggacctacctatccccagcttctcgacacttcccagggttagagcaaacttacaaatatcaaaagcagaatgcaggtttctttcagcatggctaggcacacacatagtcccccacacatgtgcctacatgcatgcatgtgcacacacgaacacgggcctgt

SEQ ID NO: 832517 - DNA, 518 bp, Homo sapiens
ataaggcaaaacaattcagctcatcactcctactaaatattgtactggagatcctagctagtgcaataaatcaaagaaagaggtggaagggagagaaaggcagattagataggaagagataaaattgtctttatttgaaggaagtctatgaaaaatatcacaaagggtgatcaaacatattacaaaagcttataatttaccatagcaaatttatgggtacaagttcaatatacagaatcaaaaaccttcaaatatattagcaatgagccattaggaattaaaatttaaaagcttcatttattatagcatcaaaaacatgaagtacttttgtataaatcaaatatatggaagatccatatgttgaaaactacaaaacattattgatataattcaaagatggcttaactatygagatataacatgttcatggattgcaaaatttaatattgttaatgaaaattcaccccaattgacctatagaatttatatcaaaattatagtaattgtatataaataaa

SEQ ID NO: 832518 - DNA, 588 bp, Homo sapiens
ttgacactgagctaagagggattaggaagatttggggcattctaggatcccagctggaaaagaagaggtgaccctgttagattctcctacctgggtaattgctaaactttgtctactatcctctgggtctcaaaaggctggaaaaactttgagatccaggcttgatttagttaagtgccacaaagataaaaggtgcttcactgcgctgtttacatctttggtttctatttccacttagcttcttttatttcttttctttctttctttctttctttttttctgatgcggagtttcgctgttgtggcccaggctggagtgcaatggcgcaatatcggctcaccgcaatctccgcctcccaggttcaagtgattctcctgcctcagcctcctgagtagctgggattacaggtgcccgccaccacgcctggctaatttttgtatttgtaatagagaaggggtttcaccatgtttgtcgggctggtctcgaacccctgacctcgtgatctacctgcctcggkctcccacagtgctgggattacgggcgtgagccacggcgcccgtcctccacttagtttttaggctaaatatt

SEQ ID NO: 832519 - DNA, 620 bp, Homo sapiens
ggccaataaagtggaaagactgaataaatgatgtgagacaatagatatcaaaaagaaagatgtcccctttatcaaaccatacacaaaaatcaattacaggtgaattaaggaaatataggtggtagccaataataagactgtcagaatataatcgaagatgatatcttcataaatttctgcaagaaggaatctcttaagcaaaacaaaaagcatactaaccatacaaagaaattacagatacatgatacacttgactaaatacatatcaaagacctctattcactaaatatacacgttagggtgtgaaaagcaccgtaaaaataagacattttaaaatgtgttattgataagaaataatatctataatataaaaggaatttgtatatattagaaataggcaaagaaaaatgggaaagtaattgaatatgcacttcactccaaaaaaacccaaaagccattaaaatttgcatcacagcccaactgctgcttctgtctaaaaataatatgcaataataytaaagcaaaaggaaattttttaagtggagccatatctattagatgaaatgaagagccaaagttttgcatatataactcatatattttactatgtcaattatgaa

SEQ ID NO: 832520 - DNA, 558 bp, Homo sapiens
tggaaaagaagtcttaaaacagaggaaatgtgttccttttgttagttattctgatttgctttctccactcacttcaaaaaatagaactccactgccttgtagatgtactcagtgcataggcagagsccgtctcaactgtgagactctgaggctcctgaattttctatcatcttcatagctttcctccaagttggctttcagtgtctctaagaagattattgatcaggccttagtgatcacccttaaaattctagttctaatcctattttgaggctggaggagaccaggcagggaagcactcgttcctggcatctaagaggaagcaataagcaaagtcaactctgccaggaactgtgaaagcccctgacttcagcaaaggcaggtgttcctgtcttagatgcctcagtccaaagaaggataatttcagaagtcactaaaatttacatggtgagataatgagctgctgaccatacttaaggagacagaaatttagatgtactttgaagagacaactgacgtaaaaaggcattggtattttagcataacactctaaggtca

SEQ ID NO: 832521 - DNA, 558 bp, Homo sapiens
tggaaaagaagtcttaaaacagaggaaatgtgttccttttgttagttattctgatttgctttctccactcacttcaaaaaatagaactccactgccttgtagatgtactcagtgcataggcagagcccgtctcaactgtgagactctgaggctcctgaattttctatcatcttcatagctttcctccaagttggctttcagtgtctctaagaagattattgatcaggccttagtgatcacccttaaaattctagttctaatcctattttgaggctggaggagaccaggcagggaagcactcgttcctggcatctaagaggaagcaataagcaaagtcaactctgccaggaactgtgaaagcccctgacttcagcaaaggcaggtgttcctgtcttagatgcctcagtccaaagaaggataatttcagaagtcactaaaatttacatggtgagataatgagytgctgaccatacttaaggagacagaaatttagatgtactttgaagagacaactgacgtaaaaaggcattggtattttagcataacactctaaggtca

SEQ ID NO: 832522 - DNA, 558 bp, Homo sapiens
tggaaaagaagtcttaaaacagaggaaatgtgttccttttgttagttattctgatttgctttctccactcacttcaaaaaatagaactccactgccttgtagatgtactcagtgcataggcagagcccgtctcaactgtgagactctgaggctcctgaattttctatcatcttcatagctttcctccaagttggctttcagtgtctctaagaagattattgatcaggccttagtgatcacccttaaaattctagttctaatcctattttgaggctggaggagaccaggcagggaagcactcgttcctggcatctaagaggaagcaataagcaaagtcaactctgccaggaactgtgaaagcccctgacttcagcaaaggcaggtgttcctgtcttagatgcctcagtccaaagaaggataatttcagaagtcactaaaatttacatggtgagataatgagctgctgaccatacttaaggagacagaaatttagatgtactttraagagacaactgacgtaaaaaggcattggtattttagcataacactctaaggtca

SEQ ID NO: 832523 - DNA, 582 bp, Homo sapiens
ggagaaatgatgcacagtcaaaaagctgtttatatttaactctttctggtaataaatgaagaaaggaaatcacattaggctgagagcttattgggggcaggaggtatgccttacttatctctctatctccgtcatccaacatagtccttagaacagctgcattcagtaaatgaacacattaatgaattactccatacgaaggtcaacctgtggagaagcagagttaccaaattacgcaggttaccagggatgatattttgtggttataataaaaactcacaatttcctagagggtggtcttaaattcacaaactagttgtgtaatcttggccaaattatttatgtagtctacatcagtttactcaatctacaaagtagaatacattatctgccaaccttacagatttgttgtgagaaataaataagaacaggttatgttaaagcaagaagaatgctagaartacaaaatgttatttattcccaagaagtctgaaaatgaataagtcacatgtgggacactgaggcttggctgctgtttcattcctgggaggacaaaagcattttaagattattttattattc

SEQ ID NO: 832524 - DNA, 562 bp, Homo sapiens
aaaagtttcttgagatatggggattttttttttttttttttttgatggagtctcactctgttgcccaggctggagtgcagcaatgcgatcttggctcactgcaacctccacctcccaggttcaagcgattctgctgcctcagcctcccaagtagccaggactacaggcacccgccaccgggcctggctaatttttgtatttttagtagaggtgaggtttcatcatgttggccaggctggtctcgaacttctgaccgcaaacaatctacctacctcgacctcccaaagtgctaggattacaggtgtgagccactgtgaccggctagggatttttttttttttagacggagtctcgctctgtcacccaagactggagtgcagtggcgccatctcgactcactgcaaactgcgtctcccgtgttcgtgccattctcctgcctcagcctcccaagtagctgggactacaggsgcccaccaccacgcccagctaatttttgtattttttttagtagagacggggtttcaccgtcaggtgcactccagcctgggcgacagtgggaggc

SEQ ID NO: 832525 - DNA, 627 bp, Homo sapiens
ggcaaaatgttacctcattgttattgaaatttttcttgattattagtgaatttcaaaatttttcacatattgatagcctttcctatattgtctatgattttaaaattcatgacatactgcttttattgaaccgttctgttgggatattttggaagtttatttaaatatctttatacttacaaaacaatgccaaatctacttagcttcatctgaaggcttgcacaaacttgaataaatgaacttgctcctaaaagtttgtgtttagtcactgattccccctgactttggatggctctaagacttctcatgtaaactaggacacttttgagagtgaaggagggtgccattaataattatgccaggacaacaagtataaagcaggaccatcctgcccaagccaagatgtacagtctccctgactctttcatgttcatgtagacttggaactctggaaatctggagctaagagctggggtccaagtggtgatctagggatgaattgaggatgaaacctgcttttcattccgatttttaatttggatgctgtattagtccgttttcacactgctgacaaagacataccggagatgsgcaatttacaaaagaaagaggctggccgggtgcggt

SEQ ID NO: 832526 - DNA, 628 bp, Homo sapiens
tttccttttgtttaatttttttttaactaattatgtgttcaatatattgtggattrtgatagcactaactcaacatttctttcaggaaaattgtgttttctggaccacagtaatttgaatagctccttcaacttagatattctcttgaagttcattacatgctgtgctggaggatgggacatattggaaataccctcctctatattcttaggttcttcctcctatgatggatgttcatgggttttggtacccagcatgagttacccttcctaagagctcccagcttccgtttgggggactacctcttccgcgtcatgtgtgattttggtggaagagtaattacaagtagctgactcatgttctgggaacttcagctccagttccttctcctcccctggctctgctgcaggtagaagagctcccgggaaatttatgtctagagcatttgcagcaaggtcctcagggacagtcggaggccctcgcagtgttgactgctgccaaacccatgctatgaagggaccatggctgtgacttctgcttcctgaccttgtttctacttgtttccaaagtgctgctccagtgtctgcctcctgttgattctgtgggtttgttagccagcattggtttt

SEQ ID NO: 832527 - DNA, 541 bp, Homo sapiens
tgaatgaacaagtgagcagggaaaaagtgcagggctttaggacagaagtgggcctgcggtagaggggaaccaggtgtgaaaacaggagtcrttaagggggtgagaagtgtgggatggggactggggaccctaagaatgtccaagccagtggggaggagaggagagaggatggcggaggggctcagggagcactggagtacccccgtcagcgctctgttaccgcctagctttgtgactctgaataaaggacttcctttggctcagtttcctcttgggtatcatacaagtagttagctgtcttctggggctgtcgggaccattaagttcaggatcgaccgtggaggagagagcaccgaatactcatctcctccgaagctttggtggagtcgtactccctccacgtccaaccctacccccaacacacacactcagaaggaatgagaacggacacagcttcccctacggtggccccaagctctgtgcgtgcctcagtctccctgaaagcacaggcaccaccacagttaccaagtttattggatcc

SEQ ID NO: 832528 - DNA, 583 bp, Homo sapiens
catatcctgaagggcatttgttgtctacaggatgtacttatgttttccattttcaatcctccttttacaggttcccctcatttgtaaatctaaaaatgaaacattagcaatctgtcagcggttctgttccattcatttgtcttggggtttattatagaaatactttttatatcagcaacttaggatcttatgatgataaatattctgttgtcccatttcacaatgatttctcaaatagtgggcatatgactgcaacatgtacaggaaataatagctgaaaatttgagatcaccaaggcatgagttgattaccattgtttaaaatttctttggcttaaagatgatactatatatgctgaagcaattttgaaatgatatatttaactttcaatctcttaagggacataatgactctattatgtgttatctggttgaaaaccattgaatgaaaactatttgcacctattcagagccatccatccatcgtcaaagtgatcactctgggaaggaaggccaagtgacaagccatgaggctttttatyttatttcaaattcttggacattccaatgtgaaaccaatgaga

SEQ ID NO: 832529 - DNA, 535 bp, Homo sapiens
atagaagcccaccttcctcatttaatgggtagttggcttaaaagcaaaggttgcactaacaaagtttcaraattccttgcagcctctctggtgagaattctccttcctttcttattttcctccctctatccctattcccctcatttccttccttaggcatagtttggatgtgcttcattttagtgtatctaattcatctagcatagcagaatcctccacttcagcagctcatgttcaagtatggaagctttaaaaaatatatttatactaatatttgtatttacatattaatatggtttggctctgtgtccccacccaaatctcatcttgaattgtaatctccgtaatccccacatgtcgagggagggaccaggtgggaggtgattggatcatgagggtagtttcccccatgctgttctcgtgatagtgagttctcaagagatatggtggttttgtaagacagttttttttttacctgcttttgcttgctctctcttgccagctcctgtgtaagacatgcttcttccccttctga

SEQ ID NO: 832530 - DNA, 579 bp, Homo sapiens
actggtcaggaatttttttgaatattcttcaatttggatttgtctgattattttctcatgattaggctgggtttatgggtttttggaagaataccacagaggtgaaatacccttcttatcacataaggaagtatatgagaccaacatcacttaccaatattgatgttaaccctaatcacttagttaaggtgatgtctgctcaatttctccattgtaaaagtactaatattttttcctacactaatcattggcaattagtcactgagtccaatttattgtcaaggggaaggaaattaaactctgtctcttggagggaggaatatctacagatattatttgaatctcttctgtaaagatttgtcatttcttaattaattgattagttcatgtctttatatcagtattgacccaagagtatttatttcactcttttggttataacacaatactatttttgttaattttgatactcaaacaacagctttgaccagtgggagcttttttaggttggctcctatatcctttatttagtgatacataatagttktacatatttatggggtactgtgaaatttgtta

SEQ ID NO: 832531 - DNA, 539 bp, Homo sapiens
ctgtgtctagaccctctcagtgaatagtgctagggaatattttatgcatactaacatacacatttacatttgtgtatctttctagtgatacgttaaaagaaacatgaatttatactatttgtaattctaatgcagcataacatggttcactcagatctccccctctgctttgtttatttgtaatctcttcctgctataatgagaaacctggctcccattatctataaattatttatttgttcatataagtgaataaattcaaataagcaaggtatatgacatatgtataattttagaattgctaacccagtcccggtgtgaaaaatggttagagaacaatggctgtgttcagttctttttatctttagctttgccatctcaagtaaaattaccatttccacagttgcttaggtcagctccccacctcctgccccaatcccccaacccygcaccttagtgagtttatatcatagacatgtgtgatacaattagactaattttttacagtctgcattccatcctgaatccctcaacatcct

SEQ ID NO: 832532 - DNA, 614 bp, Homo sapiens
gtctcacagattattttaaagcatgctgtttaatttccaaatatttggtcatttccaggtatctttccattatttattttttgtttaatcaattatagtctgagaccacattttgtacagtttctattccttcaagtttattttcttgtttcatgcccccactcccgacccaaaaacaaaaagcaaaatctatcttggtgactgtttcacatgcacttgggaagaatgtgtattctgctgttgttgggtggcatattttataaatatctgttaggttaagttggctgatggtgttggttaagtctccaatttccttactgattttctgcctacttattctgttaattactgaaagaaaaatgttgaagttcctaactctagttgtgagttcatctattgtctatttacttttttccccatctcttagtacttgcctcatgtactttgaagttctattgttaatacacatttacaatttgtgcccyttgtagaattgatttcattattatccagtgtccctccttatccttaataatatcccttgttgtgaagtttatctgaaattaatatagtcattccgggtcacttttagttagtggttgcatgctataatt

SEQ ID NO: 832533 - DNA, 621 bp, Homo sapiens
aacatgcatctaggcagccccatagaaatgcacaggaaaggccttgcaagcaggctgctggtccaaggagctgggtggacaggaacaagagacgagtcacccacaaactgtgactaccagccatggctctcttcctactcacaaggtcttttcaaaataccccgccctatgcagatctcctcgaacactaactaaccttgaggaagaagaggggaagcctccccaaataggaagattaaatcttctgctaactaggcagaatcaaggataaagcttgaaagagaaatgaagttggcttatggaaaaataagaaaatgtctatttcttatacctggaatttttggactgtgatttctacctgttgtaaattctatccttcattcatatccattcaaattgtctccaaatctctgcagctctggactgttctatgacttgtctcctttctgctgtccacagggtaccacttcttttgcagcttactattagtagagattgtggcacctgaaaattattgctatgtaatctagattcttaatagaaattccaggaagytcagttctgggaagcatatgtgaaccgaagggaaataaatattcttttttgaggtcaagaggagtc

SEQ ID NO: 832534 - DNA, 644 bp, Homo sapiens
ttaagcttagcgaatatgttggtgcttgttaactcattctaggacctagataatttgagttggtcctgctgatggaatttcagtggacataactgtaggtactctagtcctaagagaaaaggatggcgcaatccattctctggatttcaagtgagcacagggaggtaaccacttgtgagtgggaagggttgagtggcaaatgacagcaacagatataggagaacaaaggttaagaaaatcatttaggttcttgagagctcttgaaggaagataaaaacaaaagatggcattaccagtctccagtctggaatgcatctgaccctaactttccaggggctagtaagatgtaagccatggtatgtctccccctcaccacctcattgactaattcattcattcatccctcatatttttcagccattatcatgtaccagccttggactgacaatgaggaataagatattcttcttactcataagaaaagggcctacgtcagctttttccctagcagaccaagtgattaagagaatatagagtgaggtagttcccagttgawtagtcttcagatgcagtagggcaagactactccatcttgcatcctaaaggcttatatgctatactgaatgatgcgttaacctgaattt

SEQ ID NO: 832535 - DNA, 424 bp, Homo sapiens
gtgtgtaactgaagggtgaggattgtgctcgcgaatctgctgctttcccagcattccatgctgcatctcagcaccttactcwcatcttcccttgttaagttgaatgccagatgagggcagaaagaaaactaaatgaacagattactctccaaatctccaaatactgacagggtttacatgaacgtatagcagccccaaacatttcccacacagatttaaaccctcaattttatgaatcattgtttaccttgtacatgtatccaaatcccgtcctggttaaccatgttccataaaaatgaccttaggctcagcagatagacaggttgcccagtgatcaaggacttgggaattcagttactagcaaagcatttggattaaacaaaattcaggaaggactccgctgccaggcagggtcaacatggat

SEQ ID NO: 832536 - DNA, 424 bp, Homo sapiens
gtgtgtaactgaagggtgaggattgtgctcgcgaatctgctgctttcccagcattccatgctgcatctcagcaccttactctcatcttcccytgttaagttgaatgccagatgagggcagaaagaaaactaaatgaacagattactctccaaatctccaaatactgacagggtttacatgaacgtatagcagccccaaacatttcccacacagatttaaaccctcaattttatgaatcattgtttaccttgtacatgtatccaaatcccgtcctggttaaccatgttccataaaaatgaccttaggctcagcagatagacaggttgcccagtgatcaaggacttgggaattcagttactagcaaagcatttggattaaacaaaattcaggaaggactccgctgccaggcagggtcaacatggat

SEQ ID NO: 832537 - DNA, 596 bp, Homo sapiens
ttaagggctggggcatggtttctgtgtatgtctatggtttgaatgtgtttctctaagtttgtgcattggaaacttaatccccaaaaaaacagtgttgagaggtggaacctttaagatgctctggcttcatgaatgaattcatgttgttatcttgacagtgggttagttaacatgggagtgggttcctgataaaaggatgagttcatcccccttacctcctagaactctaggaggtagaactataagaaataaatgtctgttctttataaattacccagtctcagatattctgttataacagcaaaaaacagactaagacagagaattggtaccaggaatggttttagaagaacagaatttttaggatgagttttcttaattggtttgggggtttctagaattggctgcctaatctgattagacctaaaagtgctgagaactctacttataatagcacagacagcactgatagttcatggtataaactgtttatcaggatacacaaaacatctgtatttgatactyctaactaaccacttataaaaggcaaggagcttggtaactgtgtatatgatacctttgaacatttgtggaaa

SEQ ID NO: 832538 - DNA, 598 bp, Homo sapiens
aaaacttccaccaggagacaataatgattccactgaactggaagtyaagactgccacctaggctctttgggcactttatgcttctgagtcaacagactaagaaagaagttgtagtgttggctgggatggttgagccaggcttcccagaggaaattgaaactactactccataatggatgtaaggaagagtatggctggaatacaggagatcacttagaaagtgtcctagtattaccatgccctgtggttaaggtcaatgggaaattacaacaatccaatccaggcaggactacaaatggtccagacccttcaggaatgaaggtttgagttaccatgccaaataaaaaacaatgaccagctggggtgattgctgaaggcaaagggaatacagaatggtttacagaaggtagttacaaatatcaactatcacagcatgaccagttacagaaaagagaactatttcatgactatttcttccttacttggttaagaatatgtttgtgtgtatatagacatatattaggcaaatatctttgttttcattcttttcttattcctttatcatgtaacataagacatattgactttataacaatat

SEQ ID NO: 832539 - DNA, 520 bp, Homo sapiens
ggttccattagaaagcctgtctgaagactctctccagaaaaagcaagttttgagagttgcagcctattaaagagttgctaaggcaaccattgcttgctactaatgtagtgattagaaaagaaaaggcaatttgaggaacaatgcttctcaaaattcagaagagaaatatagctgaacaaacctccaattgaaaaaaaaagtagccatgggcagctttgtttcttgaaatagcagagagagagagatggcattcagcacgatggaaagcaatagaggccagcacatgtttgacctctttttaattccattgcattgatttttcatcattagtttctcatgattttaaaagcaaagaaattagagacccaccataataatcttaacaccagattcttgcattttggtaatgatattaaagtatctattgccatatggttgtagcataccccaatgatcagtttatttyttttaatgaatcaataaatacttagaggttggatttaaaaaccgaaacttgtac

SEQ ID NO: 832540 - DNA, 527 bp, Homo sapiens
accaaccctgcttggaagacgggaggataagccccagccctgcctctatgtgactgcagcctcagacaagttccccaccctctctcagcccgactcttctcctctgccaggtcctgtaaaaatgggaaccgactgcctgcctggtgaggttgtcaggaggctgaaacaagagaggaaaagcattcagcatagcccaggcacacaagaggccctcaaagaacaggatattttcaacacccccccaccaatcagctcttcccactctagtggaaggcttgaatgcccatcaggcaatgggggccatgagagctccagcgggaggagggagagtgggagaagctgggctgggagcgttcaggcaagactttaaatctggtcttcaatttatttatttatttatttttaaagggcctgagcgtcttcggcaggaggcccaggaatcaatccagctggacagrgaggcaacctaaggagaaggttcccccctcatttgaaggttttaatttttaagactaagtggggggcta

SEQ ID NO: 832541 - DNA, 607 bp, Homo sapiens
ctttttttatttttatcttttagagacagggtctcgctatgttgtccgggctggccttgaactcctgggcttaagcagcagtctccctgcctcagcctcctgagtagctggtactacaggtacagcaccaccaaacctagctcctcccttctttttaacgaacattcttgctgtggttccctgtaggggctgggagtgtactctctgtgtgactctcagcctcctcatttcaatttcctctgaccatggtttatttcctaagcctcgtggccgactcaatggggaactcctactaatgcttcaaagcccaactcaaaagtgccctggaagtagagagcttttcctgcttcagccccttgggcagaatgagttcctgtttcctgaaggcatctgggctttctgtgcgttctgtagctcaaacgtttgcatagtttaataagcaggtgtgtaccggaccagtggatgtggttattctcacagtatctagtttatctatcagaccctttctatctctgtcggggggattaagatcactmcttagcacacagggaatgctctggctcagctaaatcagctaaagactcgggtgaacagtgaaacaggatct

SEQ ID NO: 832542 - DNA, 529 bp, Homo sapiens
aactttttgactacttttattagttacgtacccmtcctttcccttaattattaaagctctaatctctagcatgtaatgttttgcttttaatctgttgcttctcaccctgttgctttaggtaaagtttaaggggttttattttaataggcctgagtagagaatgaaactatgaagaatctgactataaaactagtaacagaaattcacttggttatttcagataattcctttatctaatatcttcctttcctcttctttccttctaggtcttttgagtattgcctggaatttactatttctgacaaatttctatagaacatgtgggtctatgaggaaggtttcattttaaataggtagttacctatttctgttattttattgtccttgtttttagatgaattttgctatgtattgggtctatattttgccctagtaaatatagaccaaaattactctgaattttaacacagttaaaattcagtctttgctgattagtagacttacttctttgtagactcactgtgtttcc

SEQ ID NO: 832543 - DNA, 310 bp, Homo sapiens
taggtatggcatgtgataccaaactatatatgcaagacatgcatagaagagagacctggaggaataaatactaaatstaatgggaataggatagtttcctatatttcagacttgtttgattgtattgtaatgttttacaatcaggaaaaaaaactaaaaccgtgagacagtgatcttacttataactagctcttttaagattttgaagcagtcctttgtattagtacatagctaccgatctttctgcagttctgtttttatattaataaatacctaaaattggccagagattcctagggcattgttcttc

SEQ ID NO: 832544 - DNA, 596 bp, Homo sapiens
aatcatcaagggcaacaggtccttctatgtgtctataacaggaaacacattttccaaaggtatacacttcttcttggttctcttctatcactgctcatagtgctgaaattctcgtgcatggcatttattttttgactgtcactaaacaggccgaacaactcaaaattgcggctttgaaactctgaaaaccaaaagtattaatattggtgcttcttagttaaaccataattaatgttcacaattacttaataaaagtgtaaatgaacaagcagcacttggatgcttcatcatctttaaaaatattttagcacctaacaggtaacttaggtccaaaatcctgataaaagcaattggcaataacaaagcatttctaccataaatatcttccttaaccaaggcatttttttaggcacttaagaaaacttaggctctgagaactctaaaaatccttcctcacatagctgcgtttgtgattaaattagacaatgtatccttcctttagtcaactaaagttagcatgaaaactggaatcaaaaccctyaaattatttttaacactaccactttccagttatgttaactttttgaaattaccta

SEQ ID NO: 832545 - DNA, 596 bp, Homo sapiens
aatcatcaagggcaacaggtccttctatgtgtctataacaggaaacacattttccaaaggtatacacttcttcttggttctcttctatcactgctcatagtgctgaaattctcgtgcatggcatttattttttgactgtcactaaacaggccgaacaactcaaaattgcggctttgaaactctgaaaaccaaaagtattaatattggtgcttcttagttaaaccataattaatgttcacaattacttaataaaagtgtaaatgaacaagcagcacttggatgcttcatcatctttaaaaatattttagcacctaacaggtaacttaggtccaaaatcctgataaaagcaattggcaataacaaagcatttctaccataaatatcttccttaaccaaggcatttttttaggcacttaagaaaacttaggctctgagaactctaaaaatccttcctcacatagctgcgtttgtgattaaattagacaatgtatccttcctttagtcaactaaagttagcatgaaaactggaatcaaaaccctcaaattatttttaacacyaccactttccagttatgttaactttttgaaattaccta

SEQ ID NO: 832546 - DNA, 215 bp, Homo sapiens
accagtctcaccagagcaagaaatcactcactgccacaaggacagcaccaagatattcaggaaggacctgtccccatgacccaaacacctcccaccacaccctacttctcaacacagacacacgggggaatcaaatttcaacatgagatttggtgaagacaaacaaaccatatcctaaccatagcacttyccaagaatggcataagatttaactg

SEQ ID NO: 832547 - DNA, 641 bp, Homo sapiens
taccacgcctggctaatttttgtatttttagtagactcatggttttgccatgttggccaggctggtctcaaacttctgacctcaggtcatccacctgcctcggcctcccaaagtgmtgggattacaggcatgagccactgtgcccagcccaaaggacagtcttgaattgctgatggcactgctcccccattccatagcaacagctgtgtggcccagagagaatcagtgtgcttgggagaaggagagcacagtgattgtgggactttgcattagaactcagtgctgccttgtcacagtggaaagcaaccctgggcagaactcagccagtgctccacagggagcatttagatcaatcctcaccagaggggaattgtccataccagtggttggaaacagttcacattagtctcaccaccccaggccaaagtgctctggagttctaagtaaacttcaaagacagtcaaggccatgaggactgcaattctggggacagtcctgatgctatgctgggcttgaagccagtggacatggggggcacatgacttaataagacaccagctggggctgccaaggtagtgcttttgccatcccttccccaattgcaggcagcatagcttgcagttccaggagaaagtcatttc

SEQ ID NO: 832548 - DNA, 568 bp, Homo sapiens
gccaaggcaggaggatcgcttgattccaggagctcaggaccaacctgggcaacatggtgaaaccctgtctctacaaaaaatacmcaaaattagctggacatggtgatgtacgcctgtagtcccagctactcaggaggctgaggtgggaggactgcttgagcctgggaagtcgaggttgcagtgagctatgttcgagcctttgcactccagcctggatgacaaagtgagaccctgtctccaaaaaaaaaaaaaatggctcaaggctgtggatatcctccacagggacatcaaggtgctgaaaagctcaataagaataataatcggtcaaacagctgtcaaaaagtataatgtctttttagcctcagagtctctgatcaagcagatcccatgaatccttggcccaggcctaaataaggtgggtaagttccctcccctgctgacacacaacaaaaacatggtggccaaagtggatgaggtgaagtccacaacccagtttcagatgaagaaggtgctatgtctggctgtggctgttggccatgtgaagatgacagacgatgagcttgtacat

SEQ ID NO: 832549 - DNA, 594 bp, Homo sapiens
ggtcaataaaaagaaatgacatgtctatttcagttgagtatgcatctgttggttgcatttgctctgaattcacaaactaaggttgtatttatagcattttgcaaagttctacaggtggctaggtaatatcaactaacattgattaaatggacacaaaatgtttttaagtgatactgataggtaatctccaatttgtagactcgtcaaagtagatattatgatcctaatattattgaagatgatcacagtaactatagtaaactaggatttactgagtgtatactacaggacactccctgtgctcagtgcattatctgcgcagcctcaatcagtcttctgagtttattgttcctgttttttcatgaggaaattgaagcctgagagcttgtgcaacttgcctaagattaaacaagtagaaaaagttagaggtaagactggaatctggatgactccattgcctggacaattacccctgtatcacacttccagagtaccttcataagggctgcrctaaagtcaagtgttggccttgagtttggctccaatttgtagttcaagtttgctttgactttgggctttggaaggccaagtagc

SEQ ID NO: 832550 - DNA, 559 bp, Homo sapiens
ttttggtgaaattttggggttttttagatgtaagatcatattacctgtgaacagagatcatttcagttttttttttacaacatggatgccttttctttytttttttttttttttttttttggtataattgccctgactaggattttcagcactatgttgaatagaagaggggtgagtggcatcttgccttcttcctgattttggaaaaaaagctttcagtctttcacgactgaatatgtttgttgtgtgctttccacataaggcttttattacgttgagctagtttccttctattccagtttattgagtgttttttttttttatcattaaggggtgttgaattttgtcaaatgctttttctgtatcatttgagataatcacgtgattttcttccctttcattctgttaatgtagtgtattacattgattactttttgtatgttgaaccactgttgcattccgcccataaataccctttggtcatggtctataatatttttaacataacattgagtttggtttgctagtattttgttgaggatttttgaatcaatgttga

SEQ ID NO: 832551 - DNA, 621 bp, Homo sapiens
tctagcctgtaccatgtgacatcactgcaagaattttggcctggaaaaaaatgttaaagttcatgtaactcaaccccttccttggattaaaaaaamaacaacaaaaacagtaaaaaggtttaacagaagtttaaccttgagaagcgtagaaatatttttattcactggtaccttggatacatgtcatcagcctacactgaaggcattataagaaatcgttttttatgacccctctaccctgcattgctctaaagatgctgctgagggcatcgttcacacaatgactgactgtcctctttgtacaggcccgtgggagaaattaatctttgttgtcaacaccgggaatagtagtgctgctcctgaacaactggctcatctgatcacgtggacactgaatgttactgattgcatctctctcttgctgagctgacaccaaaaggcttagatccaaattgatggccttcctctggcaaagacagaattgtacagcatgtgttttgtataaattcagtcctgccatcatcttattttacctattcttaatttttctctgtcctgattttcttacccacttattttttttcattttggtttatcttattatagtgcacatattttata

SEQ ID NO: 832552 - DNA, 585 bp, Homo sapiens
ctaaagcccgatttaagtccagtgtttctttgttgattttctgtcttgataatctgcctagtgctgtcagtggggtgttgacccaccattattgtcttgctctttctttatttcaatctggtaatgcttgttttatgaatctaggtgctgcagtgttgtgcatatataattaggattgttatatcctcttgcagaagtaatccctttatcattatataataaccttctttgtcttcttttactgttttgatttaatatctcttttatctaatataagtaaagctactcctacttgcttttggtttccatggaatgtctttttccacccctttactttcagtatatatgtcttttccaataaggtgagtttcatataagcagcatattgttggatcacattttttatccattccaccatctatatgttttaattgggtcgtttgatccatttacattcaaacttatattgatatgtatgattttgttcctgtcatattttcaactgttacctagttggtttataaattatttcttttttttctctgtgtggtcrtctgtgttttggtagaattctgttatgttgcc

SEQ ID NO: 832553 - DNA, 599 bp, Homo sapiens
ttagaatcaaaaatatttcttacccactgatattatatgatacattcatttatatgatgttaatatggccatatttagattgctcaaatatttaaattaatttcatatgctgaatagcaaaagaatacttttaaaattattttccaaggccaactaatccttaatcaatactcttactacattttgattaatgattataaattacctattaatttttacttctttttttccctacattgttagaaagttattgttagcagtaaaataatttttctgccatatttggagaaaatcttatttttgcaaattgtgaaaaatacatttattcttctctcatgtaatgaactcagttctaaagaacactatcaaaataacagcatgcaatgtcatgcagaccatgaaatgtaatagataatccaataaattgtaatactttccaaatgctgtttgcaattagcattttggtgatacaaggaatagtcagatatggaaaaactattttgaagtgtcctaaaatacataacactgtttatgttcttatgcttaacatgtaacacagattgaygttgaaggtttatattgtgcacaaagaaaagaat

SEQ ID NO: 832554 - DNA, 524 bp, Homo sapiens
acccaggttcaagtataaatcctcctctttgttatgttgaccttctctttctcataatggcctatttacacttgtggattgtttttagcttgggttatattttaccaaagattcctatgtacattgggttgtgaaagtaaccctacaaagtcatttcacctgtgctttagcagattgatccagctatttcacagaaatgggtggagtttaattgctaatttttgagtttagattcccaatgcataggctgtgtaagtttggcctctaggcctacggagtacaggattgaacgtgcaattcctactcctttccgtctctacccacaaacacctaaagcattgctatattacttctttaccacttcccagtttcatggatagagttatttacctttttttttttttttttttttttttttttttttatgaaggaggctatccctgtagggttctggcttgcttcaagagcctttattcctatatcctgtctcctatayagggatctataataaacccagatctgta

SEQ ID NO: 832555 - DNA, 490 bp, Homo sapiens
gctgtgttagtatagagtagagccattaggcttgatctcaggggggttttattagcgaatatgtgcccaggtgtcttcattgttcggtgataataaaatgttttgtgatatcgaacatcactgaaatgtaattttatctccttattgtgcattgtttcttttttgttttaaaataaattggcctcaaaagtaatacttaaatgctagagggatggaaagttgtacattttcattcacatacttcctagtctaacatttgacgatacaaaaatacaatcccagtgcacatgatttagtcatctttctatgtttataaaataaacctctaggtggataaagaggaacaataagttttggttgatataaaggtggaagctagatggttcagttttttwaaaactaacaaataacaacaaaaataataaatccatgctgggtattgattaggctttagctgtcttcttttcgatacacactaagataagactcc

SEQ ID NO: 832556 - DNA, 593 bp, Homo sapiens
aaatttattatatttagctaaatgtttacagttgctcttcaaaaaaaaaaaaaaaaacctaacagcttttgaatgataatgcaactttttctttcttaaatttgttgtaraattaaatattggggctaatataatcatcctataatattattcaataaaaaaagcaccattgaatctatttttaaatatgtaatttgcaaaatacactgaaacattgagcacatgtttaaaatagtgtaaatcagtttagtaaccttcgttgctatttgttttcagatgcaagtatgctctgaaaatttgatagttgagcaaaaataaaatgttatataagtaactttccagatataaggacaatacagacagacaaagtaaggtcagagggactggtgaagccgttagcttgtattcatatagaaatataacaacagaaacagtgtcaatatttactcatatacctccaacctggcaataaataaagataagccctgatcgctaggaccttctaagtgcctcaatctgtgtagagtttaatagatctcttttcaactgctttttatgcagatacatttccacctacaagttttttgaagtta

SEQ ID NO: 832557 - DNA, 591 bp, Homo sapiens
ctgaatggctgtgaatgaaacagggaaataaaatgagcctagtcacttatatattttgaaaagatttacttaatatttctataaagaagaattcaatcttcacctaataagaatgacagttttatattcattttcttcctaatccaaaagttttacatgagaaagtattactatagtagcaagtacactatctttggagacaatcagaattagaataaaatccaggctttgacactattttagaaactgcaaattaatcacccagattttcactgtctttgtctgcaaaatgaggataatatctatgtcatacagttcttttgaggattcaaatatctatgtaaactatgtgtgtatgcctaaaatgcccagtgcattctctaccattggatcacaatacatgactgtagggaaaagaaagagagatcagactattactgtgtctatgtagaaagggaagacataagaaattccattttgacctgtaccttgaacaattgctttgctgaratgctgttaatttgtaactttgccccagccactttgccccagccactttgccccatctttgagctcacaaaaacatatgtt

SEQ ID NO: 832558 - DNA, 532 bp, Homo sapiens
gataataatagggcaagaaaacccaatcttggcttaattcctgattagatycacctaacaccctccttcatacacataaatacactaataacctaacacaagagatgcatccgtttccagacataaagtctctattattgcatacataatgtcttattttaataaaaaaagagacacaaaaaggcaagaaaaataaaaacaacactgctaagagacaaaacaatcaacagaacagactcgagcacatggcccctatgtttatatcaaatggaatttaaaggaactacgaatttaacattgataagttaaaggttctagtgaagatgtagagaatatgcaagaacagatgggagatttcagcagataaatggtgttatggattgaattttgtttttctaaaattaatgttgaagtccgaacccccaatgtgatatgtttagggaggtaattaaggttaaataaaccatagggatgcagccctaatcctatagggctggtattcttataagaagagtaagagacactggagctc

SEQ ID NO: 832559 - DNA, 617 bp, Homo sapiens
ttatgagaagtataggatgatgtaagcaaagcattcagaggcagaattgcattagaaaattgttttaaaaatatgaatcattgttaggaagctctctaacatacggtcacttcaggcattctagcaaaggaggtcttatttgcttgaattgtacagaaattgtttctcatctaataattttatctttagacaaagtgtctcccttctccttttaaaaatgaaatctacttatttttctacttatggaagctatctacaaatataccaactttatatatgttttaaaatattaattatgttaaaataaaattagatgagtatcaattccacaagggcagcgatgttttatttttctatctccggaaacttatggacacaaggttacttaataaaactagacccagattattgcgataaaacattctgcacatttctcagtatggtgtttctttgttcttgttttagttttataaagtttgaggaattaaaaaattttaaaacagtttgataaccatggaaacttttctaagttaatagtctgtccacaaattatcattttcctctatagtatcctaaactgagagctctaggaaagkgtgggattgattacatctatt

SEQ ID NO: 832560 - DNA, 634 bp, Homo sapiens
tcagcaaggaacaccagcaactcaggtaagtatttataccagaaacacatgtacctaaggaaaagcagcaaaccttatcattaacaatctagcagttcctctccttgtagaaatctctttaggaaagacaaatgctctataagctacaattgctaagattttacaaatgaggaagcatccacaatcttaatacgaagaacagcatttctgtgcatcctaagatagtccccaaacaaatcaaaatctattttaaatctattaaaaatcataatctgttcactgacattgggaactcacaataacatttaaaccttccttcatgtcctgtttattaagctttataagtctatacatagaacaattaaactattacccaagaggatcccgtatcaaaaggagttatatgacctgctaagaaatacgcagacagaaatatattgatgattcctgtgaatttcactagcacaaaccctaggaactaaaagaataagacaagagactatttcttcctcctcttctccagccctcccctacctgccragcggcatgaagcccctacctagtgctgcagctgctacctcacctcacttgaaaagctaatttgtgtaataagaacctataggaattctgctta

SEQ ID NO: 832561 - DNA, 578 bp, Homo sapiens
gtggctatgtgaagaaatgggcaccaattgtgggagtgtacattgcttgatatgatttagctgtctccccacccaaatatcatcttgaattgtagttcccataattcacacacgtcattggagggacgtgatgggaggtaagggaatcatgggggtggttacccccatgcttctgttctcatgatagtgagttctcaagagacctgatggttttataggggctttttctgcttttgtttggcacttctacttcctgccatcatgtgaagaagaatgtgtttgctttcccttctgctatgattgtaagtttcctgaggcctccccagccatgcagaactattggtcaattaaacctctttattttataaattacccagtttcaggcagtcctttatagcagcatgagaatggactgatacagtagactggtaccaagtagtagggcactgctgtaaagatacccaaaaatgtggaagtgactttggaactggtaacaggcagagattggaacagtttggagggcttagaagaagacaggatgatgtgggagtttkgaacttcctagagacttgctgaat

SEQ ID NO: 832562 - DNA, 510 bp, Homo sapiens
cactttaaacttacttaacacacatttgcaaaggggtggttgcaaatgccaaatgcactctatacttggagtgtgtttgtgtgtgtatgtgtgtgtatgtrtgtgtgagagagagagagaaagagagagagagagagagagatttccctatctttgaaattttctcaacatcttcttgctcctaaaatgtgggctaggggctgggtgcagtggctcatggctgtaatcccaacactttgcgaggctgaggtgggaggattgcttgaggccaggagtttaagaccagcctgggcaacacagaacctgtaaaagtcaaaaaaaaataaaagagagagagagagaaaagaaaaagataatgtgctgtataggatgacctgcccaagctgtctcttgcctagtaggctgcttatatctttagctgattgttccaggtgcttatatactgtccctcactacattacattattctatgaaagaataagttagatagacctccgtctttgattaaga

SEQ ID NO: 832563 - DNA, 510 bp, Homo sapiens
cactttaaacttacttaacacacatttgcaaaggggtggttgcaaatgccaaatgcactctatacttggagtgtgtttgtgtgtgtatgtgtgtgtatgtgtgtgtgagagagagagagaragagagagagagagagagagatttccctatctttgaaattttctcaacatcttcttgctcctaaaatgtgggctaggggctgggtgcagtggctcatggctgtaatcccaacactttgcgaggctgaggtgggaggattgcttgaggccaggagtttaagaccagcctgggcaacacagaacctgtaaaagtcaaaaaaaaataaaagagagagagagagaaaagaaaaagataatgtgctgtataggatgacctgcccaagctgtctcttgcctagtaggctgcttatatctttagctgattgttccaggtgcttatatactgtccctcactacattacattattctatgaaagaataagttagatagacctccgtctttgattaaga

SEQ ID NO: 832564 - DNA, 576 bp, Homo sapiens
aggctcaagtgatcctcccacctgaccctcccaggtagctaggattacaggtgcctgccaccatgcgctgctaattgagctttttaaatgatcggtcataacaaaaatgtttctgtttggcctgtgtgctcatgtcatttaacattcatcatgtgtccctgattaagttgaaatcagactttattttaatatatattttcacaaaagggtaaaagaacatacattaaagcacatttcaagatcgatctatctatctttatatatattagatcttacactattgtcataaaaaagtacacaaaattgcgctccagtgtaaaattctatgtcacattgttctctgttttaaacttttcacaagtaattgttactggcactattgtttttgagaggaaaaatgcatgtataaaggaaggcacagtatatgtaaggttttgataaagccatttgcaaatatcctttmtaaatatattaaacatttggccccaggcaaataataatgttttatgggatggaggaaatagggagagttaatatttttataaatatacaagaagctgtctgatcttgagtcac

SEQ ID NO: 832565 - DNA, 589 bp, Homo sapiens
aggcctggaggggcacggtggctcatgcctgtaatcccagcactttgggaggccgaggcaggcggatcacaaggtcaagagattgagaccatcctggccagcatggtgaaaccacatctctactaaaaatacaaaaattagctgggcgtggtggcatgtgcctgtagtcccagctactcgggaggctgagacaggagaatcacttgaacctggcaggcagaggttgcaatgaaccgagatcgtgcccctgcactccagcctggcaacagagcgaaactccatctcaaaaaaaaaaaaaaaaaaaaaaaaaattctaggcctgtgggacagctagaaatccaacaccagaaattcctgaattagaccatagatctgaggagataattcataggtgattatagaattacagattgagataaagagtatatgacacaacctcacagattgggagcagagaaaagtcaaatataagaaagtcttatcatgaagycatgtcctcccaagattaggaattatcagaagtatcatttgccaaatcttaagccaaatttcagatcatttcacttcactcataacagggcaggacacg

SEQ ID NO: 832566 - DNA, 621 bp, Homo sapiens
ttgtggtgggcacctgtaatcccagctactcaggaggctgaggcaggagaatagtttgaacccgggagacagcagttgcggtgagccaaaatcrtgccactgcactccagcctgggcgacaaaagtaagactctgtctcaaaatacatatgttttaagctttaggaccaggaaagttaatttctgtatatccaaaaacaactatttatgggactactgggtggatttcaaacagaaactgtgcaaaccagaattgagtggaatgacatccactaagtgctaacagaaaacaaattgtcagtctagaattataagcttggggaaaatatattttttaaatgagggtgaaataaagactttttcagactagcaaaagttgactgaattggtggtaagcagacttgttttaaaagaaatgtaaaaaaaattcagactgaaagtaatatcagatggaaatgtggatttatacatggagagttttggaaatagtaaccgtgtacataaatataaaatactgttatctaattttaaattttatttaaaagattaaaaaatcaactcaagatggattaaagacttaaatataagacctgaaactataaaaatgctagaagaaaactta

SEQ ID NO: 832567 - DNA, 512 bp, Homo sapiens
tatcttaagtgaaacaactcagaagcagaaagtcaaatattgcatgttctcatttataagtggaagctaaatagtatgtgcacrtggacatagagtgtgaagggacaggcatttaagacttggaagggtaaggagcagaaaggggaaggtgatgatgagaaattacctaatgagtacaagatacattatttgggtgatggatgctaaaagtcaagacttcaccactaggcaatgtatccatgtaacaaaattgcacttgtgccccttaaatttatacaagagaatgtagtttaggtgctgtgctagggggcaaaaaggacaaatataggtgagatagttgcaggaaaggggaagatatcaaagaagatttttgcaacatttcatgacaacgtgaggtgggaaattaaagaaaaaattgaaagagaaataagcttttctgtattaggctgacttgacccagaggcggcaacaagcacaggccagacccaggaaaagtcttaataatattatct

SEQ ID NO: 832568 - DNA, 487 bp, Homo sapiens
atgtggaagctttccaggtgatcattaacctatatgtccagcaccttccaaaagaacttctgggcccttctgtccttaagaattacctacccatttaatatgccaacttgaaattgttctctaatttactatattgactgaaaactattctctgattatatcgtgtgcaggaaacatcttgcctcctcaacaagataaattccttaatggcaaaaaccatttggtaagcatctttataaccactagaattccctagtaccaggcaatttgagtacttaaaaaaaaaaaaaaaagtgtgaaggagcaagggtttaatgagcttctaaaccagcagtaggggataggataaatcctcagggcttggtgggcagagggagatgcagctgataaacaagggactagatacacttcactatgagcawcatatacacaaccaactcatacccagagaaattctctaaaccaatcctttcgcctttaacatttt

SEQ ID NO: 832569 - DNA, 580 bp, Homo sapiens
atcagggcatggatcccccataatcagaggacaaagtcctctttgcctaccctggctcccacaagctgtttgtaagctgctgcaggaacatgtgcaccgctgtctgccatatrgctgagtggtggtggatgagtaactgctgctgtgctaagagctgaaatgaactaaaattaaccacaatttaccatccttgccttcttctggatgttgcagcccttattagactccggagtcccataatagttacatcagacggattccgccagcacaatttttgtctaggtgagaagccatattcccggtgcttcctactctgccatcttcccagaatcctctccacccaattttgacaattttgctagtattctcattatttttatggaagattatatttcagaggtccttacttcacctttccaaaaaggacaattccagcataactttcacagtgtatttagaattaatattttaccactttcagtggactgtagaaagcttcctgccttatagatcccttcacccttccccatttatgtagtagttatcatatgtgttacatttacacacactggcaacttta

SEQ ID NO: 832570 - DNA, 405 bp, Homo sapiens
ctaccagggctgtcctgggcaggatgtgaagccccaggcttggaagcttggagcctgtgtctttcacagaaggtccccacaagcgaaaatttggccacaggatggcrtaagtggaccgcaaaaaatcagggggacgttgaggcaggaataggatagaagcgtcgagaccgcagggaatgctgggcgtcttccaaggaggcctcttgtatcccagaagcacctagaatcttcccgggtgggtggtaaatccccaggctttggagcagggtgcctgtgtctctcacataaagcccccacaaatgaaaactgggcagcagggtggcgtgggcgggccgaaaagactcaggggaatgttgaggcaggcagaggggagatgcatcaagaccacaaggagtgctgggatcc

SEQ ID NO: 832571 - DNA, 469 bp, Homo sapiens
ataaaaaactagaaagaagctgtctctgaaagtactttgtgaagtgtggattcagctcacagagttaaacctttctattgattcagtagtttggaaacactctttttgtagaatctgcaaatggaaatttcagagcccactgagttctatagtgaaaaaccgaatatcccatgacaaaaactaaagagaaactatctgtgaaactgctttgcaatgtgtggattcaggacacagggctataactttttaaattcagcagtttagaaacactatttttgtagaatctgtgacaggacagttttgagaccactgatgcctaaagtgagaaataaaactttgcaacaaaaattagagagaacctatctgtaaaaatggtttgtgattgtgcattcagctcgcaaagttaaaygtttctttaattcagctaaggagaaacacactttttaaagaatttgcaaagggacgtttc

SEQ ID NO: 832572 - DNA, 620 bp, Homo sapiens
acagcacaccagttgcaagtccaggtctcaagaatttctgaatgaccagctcaagttggggttcccacaactcccacttttggttctgttaacttgctggagcagcacacagaactcagggaaacacttacttacatttaccgctttattatgaaggacattacaaaggatacggatgaagagatgcatagggtgaggtatgagggaaggggcgtggagtctcagtgtcctccctggggtacaaccttctgggaacctccacatgttgagccatccagaagctctccgaaccctgttctcttgggtttttatggaggcttcattacggaggaatgattgtttaaaccattgccactggtgatcaacttgatcttcagtccttttccccttccctgaggttggaggatggggctgcaagttccactcctctaatcctgcatatgtctttctggtgaccagccccatcctaaagttagcagtcaacattagtataccaaaaagacagccttttggagaktccaaggattttagaaattgtatgtcaggaaatggggatgaaaaccaaatatatatttcacaatatcacagctatccaaagtgttaataccttttaatacact

SEQ ID NO: 832573 - DNA, 636 bp, Homo sapiens
tcaagtgtttcttattaattgaaaccaccaccaccatcactactgtagtatcaacagaatyccgcatttgaacacctctatctactcttcctattactactggcagatttcttgaaagtcatatcaatgtgctgtccccatttccttgcctcccactcattcctcttctccctccagcctgacttccattccataatgccatcaaacagttcctgttaggtgataaaaaaaacttcatgttttaaaatacattcgaataactattttatcttcttagaaactttataattgatggctattccttttatgtaatatgtttccaggtttttgtgacccaattcactcctgattctacttttgcctctttaattgctcttcattatcctctgaagactcacctttctccatccgtcaccatggactctgctgaagtgccacatggcttttcttgcttgattttctcttcctagaggatttctttcactcccagaattttagttaacactcacactcagatgactctgtatcttcagcttaaacctctctcctagatctgaaattgtatatccagtttacctaacgtcttctgtatgtcacaacttcatgcctaactcaacatctataagattaaatgca

SEQ ID NO: 832574 - DNA, 613 bp, Homo sapiens
taagtgaatctgtcagatatttgcctaagaacttaaaataacccacactgtattcccttatacatacaactatttgccacatgccctgtctctctgcctgactccttcatttctgcctcacatgaccctaggacagaggactgccatcccaccttccttgcccaagatttgtaagtacaatcttttaattgtttccttttgtgctggagtattgaattcccaccttccatctgaagaatcaggggctacgccaggcctatctttccctgacatgggacggggaagcacaaagttgagctcccagaaccagagcaatggtcaggcaggcataaactgaacacaggtcagacaagagccaaaagggcatctgccagtataaacaagtttcctgtgtgagaaatcttcctggtcacaggttagacaactagacactaggctgtctgccaggtaaaagatgtgtcccgtgaaagacaccttgtaaacaaccatatccagctccccttcatttccccttagctatccacacaggtgctggaaccccaatttaactggmggctctgaaaacaatctgtaacataacaccccatcttgaattaaatattttaaacaaata

SEQ ID NO: 832575 - DNA, 626 bp, Homo sapiens
ccatattaataagtacattaaatataattggtccagacagaccaattaaatgatagagaagaacagattgaataaaaatggaatattgaactataacctatcagcaacccattttaaatataaagacataccttcattaaaagtaaaaagaagggaaatatataccatgcaaaagaaatcaaaagaaattcagaatgattatgtcaatactagacaaagcagaaattggagcgagaaatgttaatagggataaagacagacatcacttaatgataaagggttatttctctaaagagacataacaatcttaagtgcatatgcacctaaaaacagagcttcaaaatacaggagacaaagttgacataaaagaaaggagaaatagaaaaatccaaaattatcattggagattttatactcatttcttaatatttcatagaaaaaataagcagaaagtcagtaaagatatagaataactgaacaatgctatcaagtaacttgactaagttacatttacagaayactccacccaacagcaggaaagtacataatttgaaactgtattaattctatctactatatttctctctctgtgaacaccatgttcttctccacttactcatctcttg

SEQ ID NO: 832576 - DNA, 613 bp, Homo sapiens
ctttacaaaggttgaatcctggcttgtctgagcccgtgtgatcccacggtcattccaatgtgtgagaaagtgggtactgggaataccctggaaagtgtagttgctcctcataaaggcacacaggaaagagtagtatccttttcctgcctttgggacttgttgtgaaagaataagaaacctaaagctgctgcgagggtcctcccaccatctcagctgatgtgctgcttgtgatggagagatgagctatgaagttccaggatcactggtgatgccaccggcctgctgagttgagcaaacctggagatgcccagccttggatctgttaggctatgcggataatgggttaaagaaaaataaaggtcggatttcctgctattcgcagcagaagtcatcttcattgaaatattcatcccacacattttagttctaccttataattccacacaacaagtctgaagacaaatcatttcctcagcttagggaacaaagcctatatgttgcaamgctggaatcaaacagagcagacataattatcaggttaatatattcctataggatttacattcttataggatttatatgtacttgtactgctatgtatgtacaagtaaca

SEQ ID NO: 832577 - DNA, 568 bp, Homo sapiens
atgggccagcaacaccccctgagccatgagggactagaacrcaggacccagccagtctgactccacgctgggcagtcaacgttcacagtgggcactgggagcccctacccagcaggtggggccatccaggaggcttcctggaagagggtggggcctaatctgaattctcagaggtggccccgataggggagggagggcgagtttccaggcgggagaggctgagcggctccttctgtttctggttcccacggctggtgaggagcggaggatgctcacagcagctcacatagagcctctgctggtccctgggctgagatgctgggattctccctgccttctgccatctggagcgtgtccagctcagcatgaaagggccatgtaagaaatattctgcactaaaaagctccagggtgcagagtaatttgcttctgattaagtaaaatgtcataggtcaccgtgtgaccatttttaatattgaatcttttctgagtgccctcactcccacaacctattaattgccaattttctcctctgcctccagttctaatttgcatcggaagcaaggcca

SEQ ID NO: 832578 - DNA, 534 bp, Homo sapiens
atgtggaaattaaacaacacatttttaaacaaccatgggtcaaagaatagctaacaagaaaaattagttaatatctccagatgaataaaaatgaaaacacagcataccaaaacttatrggaagcaacaaaaacagaactaatagagaagtttatagctgtaaatgcttacattaaaagaagaaagatctcaaatcaacaacccaactttacacctcaaggaaaaaaataagaacaaacaaaacccaaagttagggaaggaaggaaagaataaagattagagcagaaataaatgaaatagagaatagaaaaacaatagaaaaaatcaatgcaactaagagttcattttttgaaaagataaacaaatttgcaagttcttagctggattaactaagaaaaaatataaaaaatcaaataactaacgttagaaatgagaggccattgcaactaatgcaacaggaattcaaaggattataagagaatactatgacaattatatgtcaataaattggataacctaaaagaatggataatcc

SEQ ID NO: 832579 - DNA, 546 bp, Homo sapiens
ggctgtgcagttctcagctgatgaggtgctttgcagcaattgtctgtgtggctggtggggctgactggctgatggaatgtggtctaatggcctcatcagaagcacttgtgagaccatggtccccctcacagcagatgggcaaaggcgctgctcccattcaggtgcacctggtccggaaaccaagtgaacaggaagttcccagtagctcctgctctacccaacccaccacctctacctgggagctgcctccctcccatcctgcctggatgtagctccacctgttctggggagagggtcttggggagatccaggaagaccttgactctctttgtggagaaatccagagtcctaaagatttgggagcagcaaactgcaggctatgcctccctccctgcatgctcttcctctccagtgtgtccttcagggcccagattggggtctccctcctccagsaagccctccctgatgcctccagcccacgctggcctcttcctttccaaactctgtccccttgctctgtggggcagtaggggggtggggaggaga

SEQ ID NO: 832580 - DNA, 603 bp, Homo sapiens
atattccttcataagatgctaattggtggcttatggattttttggaaaaagtttatttcatcaaaactctaaatagatttttgatacagacaagcttatctttttccctgagtagtcagaaytgattttattgtatgaaactatatgctttgatttagaggctagaagtagaacatttattcctgaataatatcatgttagtaatagaggtgaggcagagataaataagaaaaagatgaaagcagattaaaagtcagattaacatctgcaataaactttatcttcaaagattagtaaatattctgaaatattctccttagaaaaatgaagctacaagttagctcatccagtaggtatctgtgatttatttgagaattcccaagcgtacaattactgagacttattaaaactaatgaactgtcaaaaaaaaaaaaaaaaaaaaaccttgttctgacagttctgacaagatggtaaggaagactttattacagaaccattgcaataggtataaaagctatcaaaatactggaaagaaatcaggctcaattctgaatacagcaaaaactagtgggagatttataacaaaagagcagtttggagagt

SEQ ID NO: 832581 - DNA, 651 bp, Homo sapiens
catcacttcacaccttggttattgccatggctcccagctcgctccctgactccagtccttcctcatgctactccatcctgcccacatatgccaaattaatacttccaatatattgttttcattatgtaatttttttgctcaaaataacctaaggccgctatctcctacgggtaaaatctgaactccacaccatgccattctggactctcaataatcttgcttcgacctgtctgaccacacttatctctgggtgcttctcaacttgaagccaactcatgcctcctcaacctcctgatatgctgctcagtacccttcatctattcttcatatctcaaattacacagattcctcctcaagctgaacacatgtaaaattacctgcatcatttatttgaaatttccacagatcctcatcattgttattttactgtttcatattaatgtatctggtctcctcaagttactcaaaggcaagttaatcaagggcaaggtctcctgtgtgccccttgatatggtttggatctatgtccccacccaaatcacaccctgaattgtaataatccccacatgtcatgggaagtacccagtgagaagtaattgaatcagggggtsggggggtgggttttccaatgctgttctcctgatagtgaat

SEQ ID NO: 832582 - DNA, 619 bp, Homo sapiens
ttatgcattttccatatccttcattatgcttaaaacttaagagctgctcgataattacttcctagttgatggactgattaatctttctactttgcttatgggggcaccctttatattcaacatggttggagtgcaacatcactgtggatttttgggaaatgacggcagcagctagatcaactggagtcctgaaatcagggttgggaatggccataaagcggaaagagaaggcttttaaccaagccctcaggcagctgtatttcctaagaagaaaatcacagacaaagcagacagaaatagatttaacttcaatcagaaaatttttaaattttatttttatttttctaaccatgagcaattaaggagaacttctggcagaattctaatcttccagccatactaaaacccacaggaaacagccattctagtgcaaaggcaagccatgacacaggctgacctagggaatgatcccaaagtaaatagataktggagctttgggacataagatttcattttctttgttagcagatttacttccccctccatgacatttatcttggattcctatttataaggtggagtctcagtgaatattgtccccaagtcttgtgcttaagag

SEQ ID NO: 832583 - DNA, 620 bp, Homo sapiens
agagaggcgcaggtgaaggggcaggtccacaaattcagagtggccaggcagggtcaggcagtttcagcatctgattctcttccctgaccattagagcaatcctcrgcctgtctttccacaactaaggaggacacatctcttatctcttcatgcagatgaattgtctgtgtttctttaacagagaagacattcagatgctatatccagcacagaagagaggttagcagagggcaactcggcttggggttttaaatctgaagtatattcactatggcttgtacagttatagtacccattatgtatgtatgttattataaggggctctaggaaatagtgtcaggagactcacttcataagtatgtttattattatctccgctgttcaagccacacaaaataaatgtctggcatttccagaaattgctatcgattcagcagcagattttacaaggccaatcaataacagtttcctcctttccccctcccacagtgtgtatttatttgtgatgaagctgtctgttcctcctgcgctttctagtgcttataattggtccagaataaacggatgatttcatctttttccaggaaaaaaagagagaataaaaaacctgctattaaaaa

SEQ ID NO: 832584 - DNA, 604 bp, Homo sapiens
aaactaagacagaaacagaaagtcacataccacatgttctcacttataagtaggggctaaataataaaaacacatgaacacatagagggaaacagcagacactgaggcctactggaragtggagggtgggaggagggagaggatcaggaaaaataatgggtactaggcttagtacctgggtgatgaaataatctgtccaacaaactcctattacatgaattgacctaaataacaaacctacacatgtacccctgaacttaaagtaaaagttagaaaaaaaaaaaacagaagaaaaaaagtgtaataaaaaaattgttttttttttttttttgagatggagtttcactttcgttgcctaggctggagagtaatggcgccatctcggctcactgcaacctccgcctcagcctcccaaagtgctggaattacaggcatgacccaccatgcccagctaaaaattttaaaaacataaaaatgaaaaaatctaataaacgagttataggaaaagtgctataggcattcagaggataaaagatatttctgtctggagaggtggggatctacaaaggcttcatagagaaagaaaaacctgacttgtacttgg

SEQ ID NO: 832585 - DNA, 625 bp, Homo sapiens
tagaaaatttttttctcctcctaacttccatttctcacaccttgttcatcactaacctcgaggaatttttaagcccatatatattaaacctagtggatctaaccatgctttcaccattgcagcatgttataaatatgtctttctctccttaccctaaacccattctttgaggatttggtacagatatttagaatacaccttaagagacaagttaattgcctctctagtcctcaatattcctatctttatttatttatatttatttatttgagacagagtctcactgtcccccaggctggagcgcagtgacaaaattttggctcactgcaacctctgcctctgggattcaagcaattctcctgcctcagtctcctgaatagctgagactacaggtgcatgccaccatgcctagctaatttttgtacttttagtagagacagggtttcgccatgttgtcaggctggtctcgaactcctgacctcaagcgatctacccgcctcagttccgaaagtgctgggattacaggtgtgagccaccacacctggctgatatttctgtctttaaaakgaagagtcagacagttgctctccatgatcgcttccagctttaatactccaggatccca

SEQ ID NO: 832586 - DNA, 603 bp, Homo sapiens
tttaaaagtaatgagtttgtctgtgactttaacaagaatagtttcagcagagtagcatggccagaagtcagatttcagaagtttgcrtactcaactagaggatacaagtagagaaagcgcttgtagatgactctttatgaaatttgattataaaatagaagagagaataaggggaacagctagaggaggatgtagatttggttatttgttttattacaaggaagaaaaatgtttaaatgttgttgtaggtggtggccatctaggacacaggctagaaagtgtgtatattagggagggtggtcccagagaaggctgtatgtgttaggcaaacagaaatatagaagcaaggtgggaaacttttacatggtgtattagttcattttcacactgctataatgaagtatacgagactgggtaatttatcaagaaaagagatttaattgactcacagttcaacatggttggggggtcctcaggaaacctacaatcatcatggaaggtgaagggaaagtaaggcatgtctttcatggtggcaagagagagaaagcatgcaagggaaactgacacttttaaaccatcagatcttgtgagaacttcctcact

SEQ ID NO: 832587 - DNA, 562 bp, Homo sapiens
gggatagtaccaaagcctacatatactacgcacaatttttttttccttcttcacaatttcgtggagattcgttcttattgtagatcttagcaacctgagcatatgatttttttttttattagagaacttttaccctttcacttaaaggaagcactttattatttctctttggcatatctgaattatcaacatcattactcttgaacattaggtccattattaagtaaaataaagggttacttcagtacaagcaatgctataccttgacagttgatctgataacctagagggctattaagtgactaacgggtggttagtgcgtatacagcatggatacaccggacgagagatgattcacgtcctgggtggactgtcttaagatttcatcacactactcaaaggggtgtgcaacgtaaaagttatgatttttaaatttctggtattttccatttaatatttttagaccaytgttgcctgcaagtaactgaaaccacgaaaagtgaaaccgtggataagggggggctattgcgctacatgccaaaagttatttatatggagggga

SEQ ID NO: 832588 - DNA, 534 bp, Homo sapiens
tgaaactggggatagtaccaaagcctacatatactacgcacaatttttttttccttcttcacaatttcgtggagattcgttcttattgtagatcttagcaacctgagcatatgatttttttttttattagagaacttttaccctttcacttaaaggaagcactttattatttctctttggcatatctgaattatcaacatcattactcttgaacattaggtccattattaagtaaaataaagggttacttcagtacaagcaatgctataccttgacagttgatctgataacctagagggctattaagtgactaacgggtggttagtgcgtatacagcatggatacaccggacgagagatgattcacgtcctgggtggactgtcttaagatttcatcacactactcaaaggggtgtgcaacgtaaaagttatgatttttaaatttctggtattttccatttaatatttttagaccattgttgcctgcaagtaactraaaccacgaaaagtgaaaccgtggataagggggggctat

SEQ ID NO: 832589 - DNA, 562 bp, Homo sapiens
gggatagtaccaaagcctacatatactacgcacaatttttttttccttcttcacaatttcgtggagattcgttcttattgtagatcttagcaacctgagcatatgatttttttttttattagagaacttttaccctttcacttaaaggaagcactttattatttctctttggcatatctgaattatcaacatcattactcttgaacattaggtccattattaagtaaaataaagggttacttcagtacaagcaatgctataccttgacagttgatctgataacctagagggctattaagtgactaacgggtggttagtgcgtatacagcatggatacaccggacgagagatgattcacgtcctgggtggactgtcttaagatttcatcacactactcaaaggggtgtgcaacgtaaaagttatgatttttaaatttctggtattttccatttaatatttttagaccattgttgcctgcaagtaactgaaaccacgaaaagtgaaaccgtggataarggggggctattgcgctacatgccaaaagttatttatatggagggga

SEQ ID NO: 832590 - DNA, 617 bp, Homo sapiens
tgcaagtaactgaaaccacgaaaagtgaaaccgtggataagggggggctattgcgctacatgccaaaagttatttatatggaggggatataggagagatccgaatagtaaatttcttgatgacatgatkttaggtactagttaaggtggaagaaagagaaactaaatacataggtatgtagtatgccagtgggcaacatgacacagaagaataaaataggctaagtggtcagaatgagagtgagccatggttcttccacagcacggttagagaaggcattctaagatggtaacacttgagcagagataaggatatgagggagaaggttatttaatatttggaaaaatagttatttaatatttgaaaaaagatggaattccagttgcaatggctctcagtcaggagcgtgcttggcttggagcagcaggggaggtcggtgtggctaggtcaggaaagcactgctgggctggtctgagtggcccagtagaagagtagtcaaagaccagatcgtaaagagacttatgggccatgataaggttttggcttttattctgtgagagctgggaagctacaggagaattttaaatagaaaatggcgtgatctgactcgcactttc

SEQ ID NO: 832591 - DNA, 595 bp, Homo sapiens
gtaattctgcttaagtatctagtctagagtcagaaatagagtctacaagtgtaaggtaaatctttttcaaaatatgtacaaacactcttgcttcagtgaagtactttcctgaagtacaatagcacttgaagcttagaagatcgaattgaagatttctaaagataaaatttctaattacacatctgatatgtcttagggtaattcttggctccctatcatatcaataaggaaacacccttcctttgggctgctagcattaaggattgacttgcacagcgtcctttctactcttatctagttcccattgtaaggatcacaatccaaatacctggcgttagacaaaaccacctattacgggacagacccttttaaaaagctcatgtatggaatgaagtgtatatgtaaatacctatcacatgctcgtgaagtggttgtttcccttcataaaatttcataatattacctgatgctccaagaagggggaggagaagagataattaatcagtttgcatctttattttgtagaaaagagtgatatatggtcgtttgtgytgtggatagaagttgaatacttacttgaacacataattttaca

SEQ ID NO: 832592 - DNA, 566 bp, Homo sapiens
tcttcagtctggaacatgtgtccttaactagattatcaaatgaattttcccctcagtattaatttccacagkggtgatttcaatattcaataaatgcatgacaagacttcccattagagaaatcaattctattctcgattgacagataaacactttagcatgagatcatttgatagcttctgtcttaaactatttggtctcccaaggcagaagtattttttagagccagcccttgcaccgtggcattgtaatgacatcgtaaaacagttctttttatactttccaataaaacagtgtgacatcttaaatctgagttgctttactttttaaaggatgaagaatgcatgattccttccgtccacctccctctagccaggcaatcatcaggtacaaagaagaaagctcaggggaaacacagtctcactctataaatgtattcaaggtaaccatatagataggggaggaattgttcacattctgagaagataagaagacaaggtgacaataacctagaattagtccaagatagagtttaggtttttcaatgggtaaagataacacattcc

SEQ ID NO: 832593 - DNA, 598 bp, Homo sapiens
tttgttgcatggattagcaaaagaaagatctgaaccatttgtaaatatattcccagtctcacaaactgggatgatgagagagagtcacacaaatcacaatacaccaccctttcataaacctgaccttgatgctgaagatggataacttcactctcaggctgatgttaagggtccagcattgccaggtttgcctaatatggtgagaacagcacaggaggaagcagataatctattacggcatctgtgaaccatagcaggtaatgagtcatcattatattcttttgtattctcacctattttttttttttttgagatggagttttgctcttgttgcccaggctgaagtgcgatggtgcgatctcggctcaccacaacctccgcctcctgggttcaaacgattctcctgcctcagcctctcaagtagctggaattacaggcatgagccaccacgcctgccgaattttttgtatttttagtagagacagggtttctccatgttggtcaggctggtctcgaactcccracctcaggtgatctacccaccttggcctcccaaagtgctaggattacaggagtgagccactgcccctggcctgta

SEQ ID NO: 832594 - DNA, 564 bp, Homo sapiens
ttcccatttacttcaagacttctggctatagctgtaaactgggaagactctacaatgagcaagagtctgagaatttaagcatggtttcctaagttagttgtgcttttctaaaaaaaaaaaaragagagagagaaggaagaaaggaaggaaggaaggtaggaaggaaggagagagagagaaaggaaagaaggaaggcaggcaggcaggcaggcaagcaggcaggcaggcaggcaggaagcaagcaagcaagcaagctggccaggcatggtggctcacgcctgtaatcctttgggagcactttgggaggctgaggccggcagattacctgaggtcaggtgttggagaccagcccagccaatatggaaaaaccccatctctactaaaaatacaaaaattagcaggtgtggtggtgtgcacctgtaatgtcagctactcgggaggccgaggcaggagaattgcttgaacccgggaggcagaggagccaagatcacaccactgctctccatcctgggtgacagagtgagactctgtatgtctgtaaataaataaataaataaataaaat

SEQ ID NO: 832595 - DNA, 640 bp, Homo sapiens
ttgttgtgaggtaaaatgagttaagatatgtaaagggtttataagagtgcttgatagtaagtgctatgtaaatgtctgttaaattaataaaagaggtttgtgaagagactggaaataaggaggacagaccagaggcaaagatgtatgttaaatttataatagtcaaacattgacgccttcttcaacactcttagcagaatgtagttttactctcccttgaattcacatcgagttctaatgactatgttgttatagtttacctcacactgtaggttattatgcaattgtcacataatctttgcatccgtccaccgtgatttatttatagcatatacccaataaatgtatcttaaagaatagagaaaaatagcatgccaaatagcagccttctctactaaaggtaggtttcaatttttcaagatgtatgggtgccccagctcattttaagtacagcaccagagggatgtaatgaggccctggattctaattgttcttttcttcactcctgmagcaagcagaactctaagatgccccaataaaacctctttctaagatgcccttataaaacctctttccctttcagtgtgagcagagcctataaatatgatgatgtattatgcctatgattatgttacattat

SEQ ID NO: 832596 - DNA, 468 bp, Homo sapiens
tcacaatcactcaatacccaccaacaaggaaagtgtgatggtgaggaagtcagagtgaaaaagacagtgatttcaactgattatagttaaaatgtcttacttttcacattttacaaagacatgtgaccctggaaagccaatgttagcacccatcctaaggctgtgaaggtggtgggggatactgaagcttatttagtttcattatctttctggagcatctctcttctctaatagccattcttaaaaacatgcaaataaaaaacatcttaataatgtaagaattttgaaaattgagtgaggaaagaattcaaattgtattaatgctcctacagtatttttggggtacacaaatgggacaaggtaaactccatccttctaaaatctacaatttcccacagaatgattcatgttycttttttttttaaagcttctctaatgaaacaatttattctaaatgcaaaggtctcc

SEQ ID NO: 832597 - DNA, 535 bp, Homo sapiens
tttggtgtccttgtcgtaattctaaaagtgaatgctagtttttggtgccttgtttacatttaggttcgtgcaatttgtcagtcattgtatattttcatgtgtaaatttgaacccaagcaaatcacaaagcctggatgtcagctatagaatggttcccaagcagaaagggaaaataaagaatggtgtatatttcacctctttctgaaaaccctgtacattgtcatcaaatgcaactcttcagtctagaatgttactcctgagaccatatagccctgataatgatagggacaaattggactggagaagcctagaaaaggaagggaagaagccaaagatactgagtctgttataacatgcctccttggcttcctctcctgccatggacttcaactggtatttcatcaattagcctaagtacacagagggaaaatataaatctgggcacagcaaaaaaaatgcagtcatggggataactgagtaattccmtgagtgtcaaatgactttaggcaacagaggaggctgttaaaagtaactc

SEQ ID NO: 832598 - DNA, 649 bp, Homo sapiens
ctaataaaagactaaactgattttttcacagcctcttttttaaaaaacattgccagtccttttaatgttttgttttcagagtcaaaaaacttttttgtttcagctattcgtagcttataacaaattgggtaaagtatacttttgtcagcaaaatttaaaacagatatctttctctttacctggtttatttggaatttagaaactatttgtgagtattcttaatttatgacaatatagttatttacataagttcagtaagaatctgttttcttttgtaacatgacacaattagagaaactggttatgttaccaaggctttgactggaatgacctattttcagatatgaccagactatgttgaggaattgacatcgactttacagtgctaataaaaagccccttgaagagactggcctaggctaggcatggcagctcacccccataatcccagcactttgaaaggccgaagccgtaggatcacttgaggccaggtgttcaagaccagcctgggcaacrtggcaagaccttgtctctaccaaaaaaaaataaataaaagccaggagtggtggcatacatgtttagtcctacctacttgagagattgaggcagaggaatgcttgagcctaggagttcaaggctgcagtgagct

SEQ ID NO: 832599 - DNA, 606 bp, Homo sapiens
tttgtccactgatgcgtcccaagggcagtgcctgagtcgtgggatccttcagtaaccattgaataaatgaatgcaccaagtagtcattccaagggactggtgttcccatcccttttattctctttctcaggccagtggtgatgctttctctattgtcttagctcttttgggacacagctagaggaggctgtggggagtcggcttctccctgggctttagtagaaacaggaaacaaacacaaaacaggaaaaaaaaaaagtgggagagaacttaaacttttaacaagtatttgcaatgtcacttttctttcttctttttttttttccagataatcagtctgtgctctgagaaagggtctttccatagtttgaggactgtgttaaatatttacagttgctaatctcacacttcctactataaggaagattttcactgtgcgtgagagggtcccaggctccacaagaggccgatrgattgttctcgagtgtctcccccaacagtgatgtgctgcttctgtagctatctatgggaaaaatgacagatttccatagccttagctcactggtttgtgtcataaacatctctttattgatgtgcatgggctgt

SEQ ID NO: 832600 - DNA, 606 bp, Homo sapiens
tttgtccactgatgcgtcccaagggcagtgcctgagtcgtgggatccttcagtaaccattgaataaatgaatgcaccaagtagtcattccaagggactggtgttcccatcccttttattctctttctcaggccagtggtgatgctttctctattgtcttagctcttttgggacacagctagaggaggctgtggggagtcggcttctccctgggctttagtagaaacaggaaacaaacacaaaacaggaaaaaaaaaaagtgggagagaacttaaacttttaacaagtatttgcaatgtcacttttctttcttctttttttttttccagataatcagtctgtgctctgagaaagggtctttccatagtttgaggactgtgttaaatatttacagttgctaatctcacacttcctactataaggaagattttcactgtgcgtgagagggtcccaggctccacaagaggccgatagattgttctcgagtgtctcccccaacagtgatgtgctgcttctrtagctatctatgggaaaaatgacagatttccatagccttagctcactggtttgtgtcataaacatctctttattgatgtgcatgggctgt

SEQ ID NO: 832601 - DNA, 579 bp, Homo sapiens
tctttgtggttttatctacctttggtctttgatgatggtgacctgcagatagggttttggtgtgtatgtccttttgttgctgttgatgctattcctttctgtttgttagttttccttctaacagtsaggtccctcagctgcgggtctgttggagtttgctggaggtccactccagacattgttttcctgggtatcaccagtggaggctgcagaacagcaaatattgcagaacagcaaatgttgccgcctgatccttcctctggaagcttcgtctctcaggggcacccagctttatgaggtgtcagttggcccctactgggagtcacggccaaattctaccagaggtacaaagaggagctggtaccattccttctgaaactattccaatcaatagaaaaagaaggagtcctccctaactcattttatgaggtcaacatcatcctgataccaaagcctggcagaaacacaacaacaaaaagagaattttagaccaatatccctgatgaacatcaatgcaaaaatcctcactaaaatactggcaaaccgaatccagcagcacatcaaaaaagcttatccacc

SEQ ID NO: 832602 - DNA, 506 bp, Homo sapiens
ttgtcagaaattaggcaaacaagaagaaagtggagtgagggatttaaagtgttaaaagaaagcaacttcaaaagaaatctaaatagatggagagactgatataccatctttatggattagaaggcccaacatagtaaagaagtcaattctcttcatatttatgtatagatttaacattattccagtaaaaatctcagagggattattgataatatatacaagctgattccttaaaaaaaaaaaaaaaggcgggggcgaagggaggctgaagcaagaggatcacttgagccctggagttcgagattgctgtgagctacgatcacacctctgcattccagcctaagcaacagagcaagacctcatctctaaaaaaataaaatgcataaaaaaattataacatcrttaaaataaaatgaaatatgggaaaggcaaaggaacatgaatacaaaataattttgaaaaagaataaaatagaaggaacaccaattttaagactactcaatttt

SEQ ID NO: 832603 - DNA, 653 bp, Homo sapiens
ccaaggtgaatatacagatagcgaataagcacatgaaaaagatgttcaacattagcaactattaaggaatgcaagttaaagccactgtgagattccactgcacacctattagaatggctaaaataactgacaaaggcaaatactggggaggctgcagggcaactagaatgctcagctactgctgctggaaatgcaaaaaggtcagccatgccagaaagcagtttgttggtttctcataaaattaagtatgtgccaaatggtcccgcacccaaatcctagatatttaccctggagaaatgaaatcttatgtttattaaaaaatcatttagtggccaggcgcagtggctcatgcctgtaatcccagcactttgggaggctgaagcgggtggatcatgaggtcaggagttcgagaccagcctgaccaacatggtgaaaccccatctctactaaaaatacaaaaattagctgggtgtggtgcgtgcctgtaatcccagctactcaggaggctgaggcaagagaatcgcttgaacctgggaggkggaggttgcagagagctaagattgtgcaactacactccagcctgggtgacagaacaagactctgtatcagaaaaaaaataaaaaataaaaaccattcagccaggcacggtgact

SEQ ID NO: 832604 - DNA, 583 bp, Homo sapiens
gtgaaggatacagatgaagaggctccaggaacctccatgtgttcagctattaggaagtttgtctgactttcatgtgatgctttgaggagtttgcatttcctgttcctttattttatttttttagtttttggggtaaggtctcactctgtcacccaggctgcagtgcagtggcatgatcacatctcactgcaactttgaagtcctgggctcaggtgatcctccagcttcagcctcccaagtagctgggtctacaggcatgtgctaccacgtctagctggttttaaaatttttttgtagagatgagatttggccatgttgtccaggttgttcttgaactcctggcctcaaactatccttccttcttggcctcccaaagtggtagaagtacaggcatgagccaatgcaaccagccctctggttcctttattaaatcattttgcaaattcttgttggaccttccccaccctaattggattgaactggcgaacrttgctgattttttaggagtttgttgttaactatttgcctgtttataaggcccatcatcatctttttagaaataccttaaggtatctcagaaaac

SEQ ID NO: 832605 - DNA, 608 bp, Homo sapiens
gtcccaacaaagaacccccaagtcaccacatcctatagggtttgaagtttcagcactacattctgccacttctttgttgtgttttttgttgttgctgtttcgttttgtttttttgagagagtctcactctgtcgccaaggctagagtacagtagcactgtgtcagctcactgcaacctccatctcctaggttcaagcaattctgcctcagcctcccaagtagctgagattacaggcgtccgtcaccatgcctggctagtttttatatttttagtagagacggggtttcaccatgttggccaggctggtcttgaactcctgacctcaggtgatctgcccgcctcggcctcccaaagtgctgggatcataggcgtgagccaccacgcccagctgtgaagtttcagcggtacattctgccatttctttaccctccactgtcacattcaaagaaagtgaaagcactttaacaggctggatgcttcctggatttcactggtacagatgccactagaatcccaaggatcaattcatgtgtttggacaaatgtagatgcrgttgggtcatcgcctcctccacaaagccctcgtggtcttctcctgtcctttcccc

SEQ ID NO: 832606 - DNA, 613 bp, Homo sapiens
ggggaaaaaattaaacaggaaagggagatggggaaaggtgaggcagatcactctgtattgggggggggtcacaaaaagcatcaaataaaatgtcacttggagaaggaagagggggtcataaggatatctggagttaaggcaatccaaagaccctgaggctggatgtgcctggtgagttcaaggttaagtgaggcggccagtgtacctggagcacggagggcacagaggaggcaggtcagcggggcaaagagggattcctgtcattcagccccttccttacaggtctctatagaaggggagctcactggaagtttggaggagagttaaaccatctgattgtattaaaagccaactctcatggttgagcggagaaagaattttagggaggcaagggtagcagtaagaggccccactggaaggccagtgcggtcatccaggtgtgagatgggggtggctgggacacagtaaatgctgggtagattctgaacatactctgaagatasagccaacagaattcttgacaaactggggtatgaatcgcagaaaggcagaatcacaaatgcctccaaggttcttggcctgagcaactagaataatgaaagcaccatttaca

SEQ ID NO: 832607 - DNA, 605 bp, Homo sapiens
catgtagaaaaataaaactggatcctcctctgtcaccttataaaaaaaatcaactcaagatggatcaaagacttmaatgtaagacctaaaaccataaaaattctagaagataacattgaaaaaactcttctagacattgggttaggcaaagacttcatgaccaagtacaccaaagcaattgcaacgcaaacataaatatatgggacttaattaaactaaaaatcttctgcacagctaaagaaataatcagtaaagtacacagacaacccccagagtggagaaaatctttgcaaactatgcatctgacaaaggatgaacatccagaatctataaggaattcaaacaaatcagcaagaaaaaaaattatttcatcaaaaagtgtgctaaggacataaatagacaattctcaaaagaggatatacaaatggccaacaaacatattcaaaaaatgctcaacatcactgattatcagggaaatgcaaatcaaaaccataatgccataccacctaattcctacaagaatgggcatattaaaaaaaaattagatgttgacatggatgtcatgtaaagggaacacttttacactgctggtgggaatgtaaact

SEQ ID NO: 832608 - DNA, 529 bp, Homo sapiens
aagtaaaagtgtagagtttttatatttaattgaatataatttgttatcagcttaaaatagattgttataactataagaaggtttctgtaagtcccattgtatgcacaaaaaatgatactgtggaagacacatgaataaaaaggagaaagaagtcaaagaatgtaattaaaagaaatttaaaaaaacacaaagcaaggtagcaagagaggaaaacagggataaaaatagctacaagatagacagaaaacaataacaaaatggcaatagaaatttcttccctctcaattattactttaaatataaatggattaaatttccaaatcaaaaaatagtggctgaatgaataaaaataagctcacattatatgctttctacaatagactcactttagatttctggacacaaatcagttgagagagaaaggataatacatatatatatatatattccatgcaaatrttaaccgaaagagagcaaaggaaagctatacttatatcatacacaatattctttcagttaaaaactgtag

SEQ ID NO: 832609 - DNA, 527 bp, Homo sapiens
aaagtgttaaagactattgggtctagcaattwtattcattgaaattgatttctaatcatgtaagtgtaggtaatagttggatctcaaggggaaagaaacatgtataaatttgaaaacacgtggaatacttgcttaattgatatggctcttctatcacgtgaattctacatgtatattgttaagaacataccagcacattcaatttgattatttgcagagaagaaagattctagaatgtctgaaatttttgtctccaggtcttttaagctttcagtgtatgaccaaattataataccattaatagctgttgctacattaatcaatacaacttttcagatattcctaagcatttatataccttatttatttaaaaatatatgacagccccgtgaagtattttgaatatcatttttaagatgtgcaaactggcataaagtatttaagtcacttttgcaaattcacatatttagaaaatagccaaggaggcatttttccaggtttagctgaatgcaaagcctacactgcag

SEQ ID NO: 832610 - DNA, 616 bp, Homo sapiens
tacatagatgacatatatacatatatacatagatgacatagatgtacatatacatgtatatttacatgtatacatatagataagtatatatataygcatacactatacatatttatctaaataatttcaacagtaaacatatgtgaacagaatggcattataacattattgcgggcaaatgtaacctggattaatccataatagatgtacatatttgatcaatgcaaatttgagattttaaattttcctttttttgtgatatgcagtacattatcatgtcagtcttgatctttaccaacttctatcaattatttaatggaattacttcttcaatttctttctctatagttacattacatgcctaatttatatagtcttcagaaccgacagttaaaatatgagataatgagttaatgtgtttatcacaatacaaagatgaaaatgaccatgagatgaaatgatacttggtttttgagttagctgtcaagtgaatgattttagaaattaagatgaataaaaatgtatttgtaaatggtattacacttttcacatgaaaagcacatcataactcactaagaaatttagcaataatacaaagacataaaattagcaataa

SEQ ID NO: 832611 - DNA, 616 bp, Homo sapiens
tacatagatgacatatatacatatatacatagatgacatagatgtacatatacatgtatatttacatgtatacatatagataagtatatatatacgcatacactrtacatatttatctaaataatttcaacagtaaacatatgtgaacagaatggcattataacattattgcgggcaaatgtaacctggattaatccataatagatgtacatatttgatcaatgcaaatttgagattttaaattttcctttttttgtgatatgcagtacattatcatgtcagtcttgatctttaccaacttctatcaattatttaatggaattacttcttcaatttctttctctatagttacattacatgcctaatttatatagtcttcagaaccgacagttaaaatatgagataatgagttaatgtgtttatcacaatacaaagatgaaaatgaccatgagatgaaatgatacttggtttttgagttagctgtcaagtgaatgattttagaaattaagatgaataaaaatgtatttgtaaatggtattacacttttcacatgaaaagcacatcataactcactaagaaatttagcaataatacaaagacataaaattagcaataa

SEQ ID NO: 832612 - DNA, 599 bp, Homo sapiens
gtttattgaacaagtacatgacaaccttttccacctacaattacgtctagaggaaagatttcttagaaatattggctcttaatttttggaacataattgttccaatatctgtttcattgggtaaagattctttttatttattttatatatctttaacttcgttgttgtaaattaaagaaaggcccaataaaccaacatagtttttaacttttattcaatgattgatgtgatttactagattgcattttactcttcaagtgattcctcagtctttccatttactttttttaaacttatattttaagttcaacggtatatgaacaggatgtgcatatacctatgtgacacataggtaaacatgtgtcatggggtttgttgtatagattatttcgtcattcaggtataaagcctagtaaccattagttatttttcctgatcctctccctcttcccaccctctgcccattggtaggccccagagtacatggttacyctcttaccacttactttttatgaatgtaggccagacttggaattccctaataaaactggtcaatttgcaagagaaaatacttaactagaagatacatatttttctgc

SEQ ID NO: 832613 - DNA, 556 bp, Homo sapiens
aatatttgagagcttccccacagtctcagaaggaaggcatcttgatctgatgcctgtctaggtttctcacagaatcatttggctcattcactctgaatttcagcaaactaaactgtataatctggctttaaaagtgccaacccatccacatctaatccccttcaaactagatagtttctatttatctgcccggattttagtggttttccatcctctgtgaagttgcttctgaacttctcattgtaataagctgccactccattctgatgccaaagaatgccttgtcattcaatacttccctattatactatcttttcttttaaaggtttcatctttccaacttcactctcattgaggggaggagccaaatttcattcattttcataactccagtaaccatgcacatctgatttttaataaatattattaaaaataaaatatgataattgaaaattttattattaatttcaataaggcatatcaaataagtaaacaaaaatttaaaaawcacaaaaatgtgtaaaaatattaaaataataccaggagaaaacttggc

SEQ ID NO: 832614 - DNA, 595 bp, Homo sapiens
catctgtttctttgtgcgtgtgtttaaatttatgcctgttggagagaaagttaccagaagcctttctgtaactgtaactcttctactgtatttttctcagtcttgtttccaaaggctgtagttggaactgtgctttgtagtgttcccccgcctcctccgctccgcgggagagggagcgggagctggcggagataggagagaagcaggagcggatgtgaagggctttggtgctgaacttggatccagcccttgcctagagggcgcaaacaatcgtcccatatccaaaagtcttacgaagggcgccaaaagttacttaagataatattgctaaccgcagaaagctggaaatcgcggggcacatccactgctgcaacaaaagaagtttttaaagtagaaatatcagcattaaattacttcccccattaaaaaaaaaaaacagggcgacatgccagtcctttttaaaaaaaatcttttttttycttgagactcaaaagtaagaatctttgccgttttgaaaataggcagatgtgaagtgtatcttttaatacaccaaaagaaagattttaatctgctctggaagagagcttcccgagta

SEQ ID NO: 832615 - DNA, 448 bp, Homo sapiens
aaatgcttgcaattttaaataggatggtaggaagcttttattgatactgttgcatttaaattaattctcaattgtcctkagacttcagctcaaatgagctttctcaggaacatcttaccttccaggatagttctatcagtgagtctgagagtgtgtgactaggtcattccctattatatgctctcagcattcccagtacttttcattcatagttcttagtaccatttgtaattgcatactcatgtgattatttattaaagaatgtcctgtctgctacagtaagctctatgaaggcaagggtgagatactttttgattactgctctctctccaaagctagttgaattgaagtgctcaatacatatttgaattgaatgaatgaaagaacctgtgcagtatggataaaatatatacatccagactactttaagagaatcagttgggatgat

SEQ ID NO: 832616 - DNA, 278 bp, Homo sapiens
tctgtttattgatgttgtatgctcctgaatctcctttatggaggcagtgtggtttagaggactgcctgggataactcagctctgtcacttacctcgtgacctcactrtttctccagctcctcctctataaaatgggatgataatagtaccaacctcacagagatgtcatgaggattagaagagttaacgtctctcaggtgcttagagtaaggactgaatagagtaagtactcagtacatattatcatgattacggttgttgttgttattatctgccaa

SEQ ID NO: 832617 - DNA, 438 bp, Homo sapiens
catgccatgatacctccttctcaaaatgccccagcgctgtctcatcatgcaccyttcttccatgtggtggcagaataatgccccttcctcagagatgtctatgccacaatccctggaacctgtgagtatgttaccttacgtggcaaagggggattaactttgcaaatggaattaaaggagaggatcttggattatgcagctgggtccaaagcaatcaaaagtgtccttaaaagggaaagaaggaggcagaaaggtcagagagggagatgtgacgagagaagaatggttagagagaagcaccgttgctggctttgaggatggggaagggatcatgaatcaagggctatgggtggtctccagacactggaaaaggctgggaatcagattctcttctagagactctagaaagggctacagccgtgccaacaccttggccgg

SEQ ID NO: 832618 - DNA, 474 bp, Homo sapiens
tcctaaagccttgttcaagtcagcactctgggggtccttaagagaaaragaaattcaggatggccttctttcagtttaaactaataatgacacaaagggagcatacctgagtcctgggattgtttatacttcttcataattcagtgacagactaggcctgaggtaacaagttgtgtaggaaagaaagcattgcaacaggaacatggcttggaaaacttctctccaaaggaaaccttggcttcctgccacctggatagtcacacattaataagtatgcacttaacatatacagccaacattacatattagcattgatctggtcaagtggagaattctccatagttgcttaactattccatgtatgggaacagatttggtagggaatgttctggcctattcttaataataataaagactgctgagctccttgcttcacactgacatcataaaagccagataaaataaactgcttag

SEQ ID NO: 832619 - DNA, 527 bp, Homo sapiens
ctgatggacatttgggtcgtttccactttttggttattatgaataatactgcaatgaacattcacacatttttttwaatatgagtatgtgttttttttttttttttttttttttttttttttttgagacacagtcccactctgtcacccaggctggagtgcagtggcgcgatctcaactcactgcaacctctgcctcctgggtccaagggcttctcgtgcctcagccccccgaatagctgggattacaggcacgcgccaccacaccgggctaatttttgtatttttagtagagacagggttttgccatgttggccaggctggcctcaaactcttgacctcaggtgatccacctgcctcagcctcccaaagtgctgggattacaggcatgagccaccgtgcctggctgagtatgtgttttaaattcttttgggtatatacctagaagtggaattgctgggcatatggtacctcaatgttaacttgttgaggaacagccaaactgttttccaaagtggctgaaccattt

SEQ ID NO: 832620 - DNA, 619 bp, Homo sapiens
aaaatgttgccattattctagaaaattgcttgttctttttgtagtcatcaccccctgcccagtcctgaggtagccactattccaatttctgtacccacagaacccacagacaagttttggttgttcttgaacttcatagtaattgaattttaaagtatatattcctttgtctcttaactccttcttttactctataatatttcagacattcattcatgtctattcctttttgttgctgagcagattccagcaccatttgttgaatagattgtccttttctcatcaatttgtcttggcacctttgtcagaaaacatttgattgtaattttttttctgtcctattgatctatttgtctattttaacaccaataagacactcttagaaactgataaattaatactaacatgtatatggaaatgtaaaagaccaaaatggtgtttaaaaatatgataaaactggccgggggcggtagctcctgcctctaatcccagcactttgggagtctgaggcgggtggatcacttgaggtcaggagttcgagatcagcytggtcaacatggtgaaaccctgtttctactaaaaacacacaaaaattagccgagcatggtggcatgcactt

SEQ ID NO: 832621 - DNA, 619 bp, Homo sapiens
aaaatgttgccattattctagaaaattgcttgttctttttgtagtcatcaccccctgcccagtcctgaggtagccactattccaatttctgtacccacagaacccacagacaagttttggttgttcttgaacttcatagtaattgaattttaaagtatatattcctttgtctcttaactccttcttttactctataatatttcagacattcattcatgtctattcctttttgttgctgagcagattccagcaccatttgttgaatagattgtccttttctcatcaatttgtcttggcacctttgtcagaaaacatttgattgtaattttttttctgtcctattgatctatttgtctattttaacaccaataagacactcttagaaactgataaattaatactaacatgtatatggaaatgtaaaagaccaaaatggtgtttaaaaatatgataaaactggccgggggcggtagctcctgcctctaatcccagcactttgggagtctgaggcgggtggatcacttgaggtcaggagttcgagatcagcctggycaacatggtgaaaccctgtttctactaaaaacacacaaaaattagccgagcatggtggcatgcactt

SEQ ID NO: 832622 - DNA, 627 bp, Homo sapiens
aacactggaaatataagcaaaaaaagacaacagtccccatttggtggagcttacattcttggttgacatcaagtggattaggacaagaacatctctgttctttggacctatccctagtgtaactctgctgtacatgtaagagggtgatgaataaatacccattaacttaacttgatgtgagaaaccaacagagcaggaatatataaaagcctcatgggggagacagggcttatccaagatttagacatggtattttgctactcagctcagtaaaaacctgttagatgtcagaagttgacaaaatactcattttcaccattgttcctacacctcaataataagccaatacactgtgactcaatggatttactctgaatttacgatttgattaatgctaccccccagagtgatgccaagagccttagtagagcttaacgaaattgacttcaataaaataaaaggagtgatgttgctgagctatgtccaataaatcacagagtctattagctgacattaatttataatttcaggcacagcaataaaactattcacaatgcatacctttaaattggatgagaagcycaggtagcaaattctgaatgcagcaaatccttctagaataaaaac

SEQ ID NO: 832623 - DNA, 605 bp, Homo sapiens
ttttaaggagtttcgttagaatttcatagaaattccataattgtatattatttctaaattacacattttcttttcattttcacataaacagagaattttaatgctgtaagtggtgttaaagtgtactaagttcaaattctttgtttttatagacgagaaaacccagagtaaatgtctatgagtgttattcaatttaacatttgaatactcattcaattaatatttattcaactggtaaatgtaaagaaaacatgagaaggaacaactctgtaaagtaaaggtcagatagatagattggtaggcatagatatagatacagatatatgttaggtttaaagatgttggcagaatatccatgtagatgtttccaatagtcagctaaagatcttagaataaaatgaatctgggtctatcaatagatacatagatagagaaatagatagacagatagatagacagataatttcttttaatttccccaaagatgagagtgggaagatctaataaagattacagataattcaccaagaagaacacctwaagctgaagaacagaatgagaaagtctgagaaaatgtcagaaatgtagtagaagcaagagaatgt

SEQ ID NO: 832624 - DNA, 623 bp, Homo sapiens
tgtgcctttagatctaaaatgcctctagtcagcatatagttgcatcatgtgttttcgtccatttttctaatctcttttattagataatttaatctatttacatttaaagtaattactgataagaaggggcttttgtaattttgctatttattttctatatgccttatcacttttttgttattttctattttactgtcttttgtgtttaattgatttattcatagtaaaaaaaaattttttttttttttttttgagacggagtttcgctcttgttgcccaggctggagtgcaatggcgtgatctcggcccactgcaacctctgcctcctgcgttcaagtgattctcctgcctcagcctcctgagtagctgggattacaggcatggccaccatgcctggctaattttgtatttttagtagagacaagatttctccattttggtcaggctggtctcgaactcctgacctcaggtgatgtgcctgcctcagctccccaaagtgctgggattasaggtgtgagtcactgcacccggcctgtagtaaaatgtttaaattcctttctcatttccttttgtgtatattctataactattttctttgtgtttaccatggggattaaatttaa

SEQ ID NO: 832625 - DNA, 522 bp, Homo sapiens
acttgaagtatgaggaagattctaccatcacaatagccttaattatgcttcatatattttgcttattaaagacagggagatggatagttttctttcctatttgtttctgtcctgtccccaggcctgtctttttcttcttttcttttcttttctttttttttttttttaatttgagacggagtgtcaatctgttgcccaggctggagtgcagtggtgtgatctcggctcactgcagcctccacctcccaggttcaagtgattctcctgtctcagcctctcaagtagctgggattgcaggcatgcacaaccatacctggctactttttgaatttttagtagaaatcgggttttcccatgttggccaggttgccctcgaactcctaacttcaagtgattcgtctgcrttggccttccaaagtgctgggattacaggcgtgacgtgccatgcctggccccccaagcctgtcttttcatcatcccagctcaagaaccatctgtcactttacatatttccaacactga

SEQ ID NO: 832626 - DNA, 629 bp, Homo sapiens
tgtttatggaggtctttttcttgcatgttctgagttacattcgaatcattcgaatgcctcttgatttttttctttttcttcttatttttctttttgagacagagtctcacgctgtcagctaggctggagtgcggtggcacaatcttggctcactgcaacctcgcctcccgggctcaggcaattctcctgccttagcttcccgagtagctgggattactggcatgtgccaccacgcctggctaactttttaatttttagtagagatggggtttcaccatgttggccaggctggtctcaaattcctgacctcaggtaatccatccgcctcggcctcccaaagtgctgggattacaggtgtgagccaccacaccctgctgatttttaaaatctgtacgtttgtttacggaggacaaaatgtttagaatgggtaattacggagtttcctcagcagccatgaacggtcttttcctcgaagggcgtgtccctatggagaagagcaaactccagggctggagatagatgaggtgaaggtgccamgggaagcctgcttttcctggggctggcaggggtgtaggcacaggagctggagctcagatgagcaccgattgccttcacttcatggcaggtca

SEQ ID NO: 832627 - DNA, 589 bp, Homo sapiens
gaaactaatgttggcaaatatgattggatccccttcgtaatagaaattttctcttttttttcccccactaagcaagwcacttctcaatgaaaaaagtaaaactaagcttctcatattcatagtatttagcttacaaaaattttgtcttctctccctttttacttctgccaaattgaaagataaaagatatagttaattcataaaattggataattaacaccaattaacttaatctgtggtcataccaaaacatggaacatttttactatttttggacccttaacaaaacacatacattgaaaagcggaatttttttcttgatgctttagtaagcatcccatgaagctgcaatgttttggtttttttttttgagacggggtctcactctgtcgcccaggctggagtgcaatggcatgatctcagctcactaaaacctgcacctcccaggttcaagtgattctcgtgcctcagcctccggaatagctgggattacaggcacacaccaccatgccctgctaatttttgcatttttagtaaagataggtttcaccatgttggccagattggtctcaaactcctggcctcaagt

SEQ ID NO: 832628 - DNA, 624 bp, Homo sapiens
aatgcaacccatattttaaagatttatcctgcatctagatgtcaaaggaataaaggagtgaacaaaaagggaactayattgattcagtgattaaggaataaatgttttgtagaaaacttaaaggttttctttttttttttttgagatggagtcttgctctgtcgcccaggctagagtgcagtggtacgatttcggctcactacaacctccgcctcctgggttcaagcaattttctgcgtcagcctcctgaatagctgggattccaggcacctgccaccacacccggctaagttttgtatttttagtagagatggggtttcaccatcttggccaggctggtcttgaacttctgaccacctgcctcggcctcccaacgtgctgggattataggcgtgagctactgcgcctggctgaaaacttgaagtatttttagaaaaagagaagaattaagttttcataaaagaaaatctaaaactagaatgggataaaagattcctagggcaggttgataatattccaagtgatgctaaatacctatttatggaaacaaatggtttttttcttctgtcgagttgcacctatgcaagacagatgagacaatgactatgcacatttacattttat

SEQ ID NO: 832629 - DNA, 609 bp, Homo sapiens
gttcctcatctgtaaaatgggrataatgacacaaagcttgccgggttgctgtcaggattagataacgtgtatgctttggcgcatgggaagtcacttgggacatgtgactaagtgactgagtctcagtaactaaggctaatggttctggagactaggttttagacttcagaattgtttttaatgatgaccctgaagttagctgcttagcacgataattctggttagatttttaggaggggcaccaccagcgagcgaccagcttctctgtgccagtcccagttcacctggattacagcacagtgcaccatgcagaaggtcaaggaatagcctgtgcatcagtcaggaaacagacagcacactccaattaggacagatcaagaatgtcatagaggaactatttatggcagtatggcagggtatagggaagccacaaagaatgttgtacaaccctggagctaataacagagaaacttctttacctttcctagccctgaaggaatggggaaggagtggtaactggaaccagaaaaagacaaggctgtatggaaagtcccccttacagcagcagagacctgcaggtgagggatccagccagcctgcagtaaccag

SEQ ID NO: 832630 - DNA, 581 bp, Homo sapiens
cacagactctgtgttctcaattatggaatcttggtttgagggtatgctctgcaccagctggctgcataatcttggagaatcacttctgctctctggctcttagtagcctcgtctgtgaacaaggagagggatggtactatgtaattcctaagggcccttctaacagcaaatagcctgaacagaaaacggctgataaacccatttatactaaagtgtgactgattgctgagcaggcttgctcggtcatctcatcaaagagaagttgcattaaacaggggatggctgaagagggtattatttagccaaaggaatgactctgtcattatagaatgaaagatacctggggctacctagctgcagtgttttggacaacttagggttgggagattcatgaaacgttttaggtctatcatataagcatgtttcaagcccccacagagatcatggcccatccatactcaaactccctgtaggttatagcataaaatcccttgcctgctccaaccccytcttccaaatctatccattactgcttgcccttgtgcttcccctcaagccaaaaggagcccccattattgctc

SEQ ID NO: 832631 - DNA, 635 bp, Homo sapiens
tctctttctcttgctttttttttgagatggagtctcastctgtcacccaggctggagtgcggtggcacaatctcggctcactgcaacctccgcctccctggttcaacccattctcctgcctcagcctcccgagtagctgggattacaggcactcaccactacacccagctaattttttgtatttttagtagagacggggtttcgccatgttagccaggcagatctcgaactcctgacttcgtgatttgcctgcctcagcctcccaaagtgctgggattaaaggcatgagccacttcgcttggccttctcttgcatttttaatattttgccctctgctaactctttcagtctgaggatgtgcttagaagtcttcctcaggcacctcaaaaccccagcttcaatctgctgccctcatctcttgccttcccctttctgctgtacttggctctgggagagtcaggaccatcaggtcccattgtgcatcgggccttccctgacactgcacacagggtgttcttgccattatatcctcaggcctgttctcaggtctcatcccaagtggttctgcagtaccttataccatggactgaattctttctgcagttcctgctttctgcttctgtgtgataaggtcg

SEQ ID NO: 832632 - DNA, 455 bp, Homo sapiens
accctcagcttctctcacagctacatcttgggcaatgtgtttaacctctctaagcttccattgtcttctatgcacatcaaaacctgccctagctacctgcagaatcaacataaggctgkaataaaaagtgtgaagagacctttttaagtgttgtaaagggttgagatattgtataatggacagaacctccgatctaacaaccttctcattttatagattcagatcagtcactgggagcccactatttactccatttgttcatccaataaacacttaaggagcatctactacaggccggatgctaggctaggcactgaggacctgctggtgggcaaaacagtcacggcccatgacctgatgggactgtactgcaccaggagagacagacatatccagcaattaccctagaaagcatattcttacacctcaccggccatgctaatgatgtggtcttt

SEQ ID NO: 832633 - DNA, 672 bp, Homo sapiens
ctgaagaaatagctcaggccataatggaaamggcgggtcacacataccctcatccctgtggagtttaggcacaagggaccagcattaacactaaactagagatcataaggctgacaaaacagattctttgtagcagtgagatacccaactccgacctgactctggtatgggatcacatgatagagagcaggccttgaaggaaatcaaagtattttgtcccaaaatatattctctttgacatattttgaaatgtccctgcaaagccctctcttgtaagaggaatttgtattctgtagggaatctccttcacttaccaggtctttcccagatttttttaagatctgataagatacatttaccatccattctctctgaagcctgttacttacaggcttcacggacataacaagaaccttggcttccactacccccctcatcttgactcaagcatttctttatgctgacttcaactcttctcaggcaaaacttaactttttcaacccattgccaatctttggaaatctttgaattcacccaggacctgaaaagccctctctcacaccctaccttctagatgtctcacctttcagggccgaaccagtgtacactttacatgtattgatttatgtctgcctgtaacttctgtctccctaaagtgtacagaagcaagct

SEQ ID NO: 832634 - DNA, 594 bp, Homo sapiens
cagcatcccaatctccctaagcgtttggatcctctacattcaaccaaaagagatcaggcttttccagcttgcacacagtgggctttcttttaatcygtattttagctaaccaagcaaataaactattagaacctttttcagctccccaagctgcaacattaaatgcagagtccctacttagtgggcccaaatcaataaattcagcctgattcaatcctatgttccttttatcattatcccaaacccttaatatccattcctttgtctgttctccagatttctgcttatataaatttaaaacttgaagcagttaatggagttttagctcaggtctgacttacagtgggtgcagtgcatccctgggctcatcctgtggtcattttctcagtgtcagtatgcataattggcatagatatacttagcacctggcagaacctccacattggctccctgactggtagggtgaaagctattatggtggtaagggccaaatggaagccattagagctgcttctacctaggaagatagtaaatcaaaaacaatatcacatccctggagggattgtggagattattgccaccatcaaggacttg

SEQ ID NO: 832635 - DNA, 603 bp, Homo sapiens
acaatcctttcttcttagaatgttagaaygtatctcaatgtactcattaataaaacaagaagatgaagttagtactggttgatctaagtccagctctaaaatactatctattagtgatatcttttactgaaatttcatttttttttctttttatgctgggttgactctattttattttaattttaattttttattttttgtagagacgggggcctcactatgttgcccaggctggttttgaactcctgggctcaagcaatcctcccaccttgacttcccaaagtgcagggattacgggtgtgagccactatgcctggctgatggctctcttttgaatagcattcttttccatataattatttatttccaatttaaatataattattcctttccagttttaatgatcatgatcatgtgtgaattcgtaaagaaacgatcatgaatttcataggaagatgccataagtaaactcttagcatctgaaatgattaagaggatttgagcctgctgaggaattacttactttagttgccagtcctagaggtaataactgattaagaagtgctgaaaaatgagtggttatactttagcttaaaagaatga

SEQ ID NO: 832636 - DNA, 650 bp, Homo sapiens
tttttcctgcagggttttgtgatgctttgtaagcgtgttattwgtggatcctttctcataaaggattgccatcaagaagaggtcatttgccactcttcgcacgtctttcttttttttttttgtgaggaccaaatgatttttattcatattcgtctggtttatctacccaaagtgttcaggacagtgttcagcacatattaagcttgatatagcagttatctatgatgatgatggtaacgatgactctgtatagtcactgtgtttctgaggtcttgtttggtaatcaagaatgtgtttagaactatctctttattagacaaggtaataaaccaaaagtttccaacttcctgtacatgttgaaagttttgaataaagatccttggatacaaaacatggcccacatggctcaaaattaattctgtgacataatattattctgaagtcatacttattttgaaagcctaaaggtttttcttttttatggctataaaaatatcaccaagctagacattttaattctgttgagatatacaaatagaattaccgcagcagcccacacattctatgatttctaaacatttaaacatcaatggttttgggaagttgctgttgtccttaacagttcattaaaagttcagatgccttttgtg

SEQ ID NO: 832637 - DNA, 622 bp, Homo sapiens
cctcagcagtaccccgggtgccttgcacctctttaaagcatggggctcgtgggcaagtcagcagatgcagaattctagtgtctttaattaactgttcagtagaccctgagccccagaacattttcctttgcgcacagacaacatctagggtaagataaaatcatcttagtctactagattgattggaaggagcaactgcccaagtgcctgtctaagtaaactttggcagaactcaggccggtcctctgaagacctgggggcttattctagggatatcactgaactggtagatggactgtggtggaatcatttttattctgtaggatgaaggttgcctaatgctggcctgtggaaagtgccattctgcgactaagttattgaggcttcacagggagttaggagacagactatggagagaacttctccattaaaatagacgggttcgcttagtctgagattatatccttcctctttattgtagagtttttaaaaatgctccttcgacctgaatgagcacatgggcaaatttrgaatgtagaacattctacaagacaacttctctttcttcaaagagtcgaggtcatgaaaaccttttttttttttttaaatgtgcagggaggat

SEQ ID NO: 832638 - DNA, 475 bp, Homo sapiens
ctgctgtgcagatgggcagccctgggcagggagaggtactgtcaacaggaaggatccaaagatggccctgggcctcctgaatcacggggttcagggcacatgtgtgtgtgttcatgtgtgcttgtgtgtgtgtgtgtgtgtgtgtgtgtgtgtgtgtgtgtatgtgaaggtgagatacgggtcagagcaggaggagatcagggcagaccccggagagaaccacaaggtccttcactggccacagtgatgcagagatggcctgcagaggtctggaggggccattaagagaaaaggctggacaatgaccttgaaaccacaccagcacacaaccataaaacaactagttctattaagtrtttctgtgagcctggctctattctagaactttataagtatcttactgagtccttacaacaatctcagaggggaattactataattaattcattctgcaggaagggaatccaaacacgtt

SEQ ID NO: 832639 - DNA, 632 bp, Homo sapiens
aggacgagtgcttatttcccggctccctccctctgagccacagcagcaatggctgcatttctctcccatggccccagctccatcacatggctcctttcccaaggctgcagttctctctggggtctggtgacagcttcctcctttggtcccttcagtactaagattaaaacagcctcccactgttgctggccccaggggtctcaccatccctgctggcttcctgtatgcctgccacaccttggagaaccctccctccattccactcctttcagttcttcccacgtgggccatctgctccctgccagtgccgtggttttcactccatgatgaggaattcagattttgttttaaaacactaggaatttaaaacaggagcagggcttagtttggatccaaagtttgctaagatgtccctgcctgccatggaggagggacaggaaatggggtgagaattaatggggaacatattggggctactgcagggttccatagagtttgatgggatttggtttaagatggaggcagtgcagaaggatggggcccaggtcaggcaggaccaacagccagaacaattgagcttgcgtaggatcctgtgrccccagaccagggaggctgtagggccaggatccaag

SEQ ID NO: 832640 - DNA, 629 bp, Homo sapiens
  misc_feature 313: n = A,T,C or G
ggactcctggagggggagggcgcagctacctgctgtggggcagcgactatacaggagagaggatttgaattagaaaagccccgatgccgcccatcctggcgagagatggggtttaacccragggagggaagcaaccagagacaccaaagcaggttccccagaagacaaatggtgatggagcccagaacatgcggaaggcagccagacagggggagcagagaacgcaggaatgcgattctcctccacagagttatggcgcctaatgagattggaatcgtaagtgcttttatttccttagctcttttctctgaanacttattctgcaaattgtgccttgtgtcatccatcctcccagatggctttttaagtgaggctgtttgttaagtgggagaagaacagggagattaatcaggaggagcgaacaggaagagctgctgcaaaccctggggaaggagacacaaccggaccagcaagtgcgatgagagtgtgcagagagagcccgtggtgggccggtggggttgggggggcggtccccagaagacatggagcacgtccttccaggatgagaccattgggcacagctgagtccacatgaccagggttccagtgacagtcactgacagatactg

SEQ ID NO: 832641 - DNA, 524 bp, Homo sapiens
tagaaattgtaaacagaggggagtgaatgcagggagctgattatgaaagtggtgaacaggctgaaagggcaaaaagaaaaagataggaaggcccggcgtggtggcgcacacctgtaatcccagcactttgggaggctggggcagacagatcacttcaggtcaggagttcgagaccagcctggccaacatggcgaaaccttatctctattaaaaatacaaaaattagctgggcgtggtggcaggcgcctgtaatcccagctactcaggaggctgaggcaggagaatcatttgagcccaggaggcagagattgcagtgagccgagatcacgccactgcactccagccttggcaacaagagcaaaactccatctcaaaaaaaaaaaaaaaaaaaaaaaaaaacagtaaagaaaagaaaagataggagccctagtcctggaggcacaaaccagaggaggtggtgctgcagagctcaagactgcrtgtcctgctgatgtaatccatcactaggcccactgctgccagag

SEQ ID NO: 832642 - DNA, 498 bp, Homo sapiens
tcaattccattatggtcaaagaacatacttgtattgcttggatccttatatattaattgggacatctttatggcctasaatgtgatctatcctggtaggagatcaatgtgcatttgaaaagaatgtgtattctgttattgtttgtagcattttataattgtcaatttggtcaagttgattgattgtgttgtttaaaacttcctaatccttactaattttggttgttctgaattctttgtgagtttatctgcttcttcttgttgctcgatcagtattttttttttcatgtattttagaattctgttatgaggtgcatacacatttgggattgtatgtcctcctaatgagttgacttcttcatcattaagaaattgccttctttatccctggtaatattattttccccaaaatatattttgtccgatattaatataatcattgatatggttaggctgtgtccccacccaaatctcatctcgaattataatccctacatgt

SEQ ID NO: 832643 - DNA, 598 bp, Homo sapiens
gtggactggttaagagaaggtcagcatttgaccgggagggaatactcaggcattttgcttgttaactttctggagggccaaagaaygataacatctgcttattatgagagcgtttgagaaagttagccaaagccttagcagaaaaacagccaggaaagctttatcagagagtccttcctcactatgacaatgctcccactcattcctttcatcaaacaggtaattttgcaagagtgctgatttggctcctttttacttctttttgtttcttcatgttaaaaaaatcagggcattaattttgtcttcagttagtaatgtaaaaaagaccgcattgacatgattaaattcccaggactcttaaaggatggactagatggttgatattatcacttcaaaactgtcttgactttgatggagcttatgttgagagatagagtttatgtttttatttttatcttttaattaaaatcttccatgaactttttgaagtcctcttgtatgaatagcaaattagcacgtaacagtttctcaatatcaggagtcttaggcaaatagaaattaaagtcacaaacccactaaaatggttaaaactaaaaag

SEQ ID NO: 832644 - DNA, 541 bp, Homo sapiens
aatctgccaaaaatggaggtccccatgggccattcatttaaaaaataaatgtgtcaaaacagaatcagaaaattgaagtgggaaagctcctcaaatcttctgcaagagaggtaatttcaaaacaattttggttttctcttttatttaatatatgctttctgtctctcttttctgcatgtatacataacttcagtgaccaatgtctttatagtccaccatgcttcttgtgctaggtgaattgtccactaggcttaatttcttgaccttcagtaattttcttgactttcttcaaaattcctggttttcctggctactttatgactgtggagtctgaaaaatagataaagtacaaataaaagctgaacaggtcaagttctaaatgcctggtttattttcaggatatctgcaygtttgatgcttttcatggtccggttgtccaccaagacccatactatttataatatgaatgacatttgagtaaacaacaaacatttagtaattattttgaattagaaaatattcaactaaaatgtattgttgg

SEQ ID NO: 832645 - DNA, 552 bp, Homo sapiens
gtcagccttctcttcttctcaggggattccaattacaattggtatattgcttgtcctttttcttttacttttttgagtccttttttctctgtgtgtttcattttagatagtttttattgctttgtcttcaagttcactatcttttcttctgcaataatctcttatctgccagtaatttcatcctttcttgaaatttcacatgttgtagttttcatgtatagaagtttgatttgggtcatttttatatctttcatgttgctaattaacatgctttatctttctactagctttttgaagatagggaacacaattaagataactgtcttagtgttcttttctgttaattctgtgtgtcacttatgggtaggtttcaattgattgagctgtctaattatagatcatattttcctgcttcttttcatgccaggacttttttactggatgccagatactgaaaattttaccatgttgattgctgkatgtttttgtataactacaaatattattaagttttgttatggggcatgtttaagttatttggaagtaatttta

SEQ ID NO: 832646 - DNA, 495 bp, Homo sapiens
ccttggaggaatcctgctctgttacaattctgaaagccargaagatctccattacctccaacctaaattgcctctgacttaattcaatgctattttattgcattcagttcaccatggaaagggaaaatatagtaagtttcaattccatagaaatccttcatacacttgaagatgatccttaagccactccaggttttctttctgtagcctaagcagccctgacaaaaatctttcagaaatgatttttaggttgtgttggaggagtgatatttctctcaataaaatgtgatctcgatgcttccagaattctttcatctctgttgcttttctggccatgtgatttttttttttctaactaggcatgtatttcaatcctactttataaacctcatttacaatgtttagcacttacatactcaaaacatatgggccttaaaaaatatacaactttactctaaattaaagcagacaccacagcaattcaaaagtgatcac

SEQ ID NO: 832647 - DNA, 553 bp, Homo sapiens
cctgtaaaatcaaaagcaagttagttacttcctaaatacgatggggttacatgcattgggtaaatacagccattccaaatgggagaaattggccaaaatgcaggggccaaggctccatgcaagttcaaaatccagcagggcagtcaaaacttgaagctccaaaatgatctcctttgactccatatctcacatccatgtcacactgatgcaagaggtggattcccatggtcttgggcaacaccacccctgtggctttgcagggtgcaaccaccttcttggctgctttcatgagttggtgttgagtgtgtgtggcttttctaggtgaacagtgcaaggtgttggtagatctgccattctggggtcggacagtggccctcttctcacagttccactagggactccactagtgccccagtagggactctgtgtggggcctckgaccccatgttttccttctgcactgccctagcagaggttttccttgagaaccctgcccctgcattaaacttctgcctggacatccaggtgtttccatatatcctctgaaatttag

SEQ ID NO: 832648 - DNA, 546 bp, Homo sapiens
ttaaaataagccaaggagagaagttcatgggacatactcccagaatatcaccggttcttgtcattgggattgcctcaacgaaagatttttaaacyttactaatacactgggctctcttcctcaggtgagagaaagtttgaagctggtacctgaatttcctacttaaagcatctatgagaaagagtaaagccagatgctttgtaataagtgtcatgagagtagatggaaatagcccaatacagtatgcagacaaaccaaagggcacgtgttaagacatttaacacttgtagttgtgacatttcaggatacagagagtatttatggaagataccatgacattcagatgaggaattaagagctgtatccttgagtgagaagatactgctgtgaggtcgtgagtcagtctcagctagacagtctcataacatccttactagctaataaggtgaagcacagatgttactgccacagctgttgatttaatttgtctcaatgtctttaatccatttgatgatcggtgagtaaggagggaattcactgactccc

SEQ ID NO: 832649 - DNA, 595 bp, Homo sapiens
aataatgaattaaccttagcccactataactttttttacagtataaacttttcactttgttttaactttctgactcttgtaattacactccactgaaaacacaaatccactgtatagctgaacaaaaatattgtctctttttatatccgtattctataagcgctcttatattgtttaattttttaatttttaaacttttttgttaaaaactaaaacacaaaccacacaatagcctacacctacacggggtcaggatcattatcactgtcttccacctacatttcttgccccattggaaggtcttcaggggcaacgtcacgcattaagctggcatctcctatgatgacaatgcctttttctggatagctcctgaaggaagtgcctgaagctgtttcacaactgaccttttaataatatattaacataaagagtacaatctaaaataacaataaaaactatagcatattaaactagtaacctaatcatttattatcattgtcaggyattatgtgctataccttattgtatgtgctgtatttttatatgactggcagtgcagtaagtctgtgtacacaagcatcaccacgaacacagg

SEQ ID NO: 832650 - DNA, 516 bp, Homo sapiens
taatgaaagtgtaaaaatggaacagaaggaaagtgtttaaaaatatcctgtatatcattcaaaaatgatgccattaacattggtacccactaaacactttcaaactatagttcagatcctggtacaaggctaatttttcccagatctcttaatgaaacatacacaacaacaggaagtctcttgctcagagtgcaaatacagatgtattcttgtgccgtggtttctaaggactggaggtttccctctagcctgctctttatttattttggaaacattaacagaaacacaagtggatatgtaagaaaggaggttccaattaatagtactcatggtttacagggtaaccgctttatagtttttactgaactgtctacaactttagcacttaagaaaaccaacaaattcaaatcaatttcatgccactgtgtacatacattctcttattcargaagtatgtatgagtgccactcggtgccaaacccaggtccagcctccagggagctcacagtctagtaa

SEQ ID NO: 832651 - DNA, 614 bp, Homo sapiens
ttcatgtattaacttgggattttcacaattcttttataatattaatttggactacaaatttgtgygaagatcgaagtagaatttaatttgttgtaaaaagcattttctcccccaactgagtcccattcagatggctacttcacttggagtatttttgtccctatatgggggcattttctcttattattaatagtagcttttcaatagtccccagattttgcaagtatctacttgaaattcaagtataagcttaagacagtaactagtctcttatctcctcttctcttatgggtatttaaacctcaaccatttcacattcttcttttcatgctgagaaaattatcttacacccagtaaatatgcagaatctttaaaggactgaaaaaaatagggaaatgtttaacgtagttatcaaggtaggtacctcacacaagaaactgcttgatgatgaacatttaagtttcaaagcaggaaagatagcccttgtgatgaaggcgattagaacgtgatacaaatgactcttagtttttcagtggaccagagcaacagttactggttagttcaacaggtgagactcagtcacaaagagtttacgcatctcgctgaaaataatg

SEQ ID NO: 832652 - DNA, 626 bp, Homo sapiens
tccagggtggctccgcactcagccctgtgatcacctgagtaatgggaagtcagtgagtgcagtgcctgcagagggagcatgcttgccaatcaccatcacccacttttgcacttgtsgcagaggatgtgcccaagccaacctgagaaagatgaaagacacatggctcagacactccattaccccatcccagggccattaacctgccaggcatgtgagtgagcctgtctaaaacagctcagctgagcctcgtctaaattgaagacttgcaaagtcatgggtgaaatgagaatttattatgttaagttttttgttaatgatggttttgaggtcatgtgttaatgcggcatcattttgctgtaggtaagtgatgtccttataattaaatttgtaagtgcttatcaatgtatttgtacttacaatctatctcaaaatctcacctcaaagaaattctcatttctttactttaaaaggttattagtattattgaggtattttggtgtatggggggtagtagttatttggaaagccttgtcattcatattatgggtttgattttttcccgttggtagcacagcagtccacttttctagtactaaagcttgtgttgctgctggatcccaaaaagt

SEQ ID NO: 832653 - DNA, 626 bp, Homo sapiens
tccagggtggctccgcactcagccctgtgatcacctgagtaatgggaagtcagtgagtgcagtgcctgcagagggagcatgcttgccaatcaccatcacccacttttgcacttgtcscagaggatgtgcccaagccaacctgagaaagatgaaagacacatggctcagacactccattaccccatcccagggccattaacctgccaggcatgtgagtgagcctgtctaaaacagctcagctgagcctcgtctaaattgaagacttgcaaagtcatgggtgaaatgagaatttattatgttaagttttttgttaatgatggttttgaggtcatgtgttaatgcggcatcattttgctgtaggtaagtgatgtccttataattaaatttgtaagtgcttatcaatgtatttgtacttacaatctatctcaaaatctcacctcaaagaaattctcatttctttactttaaaaggttattagtattattgaggtattttggtgtatggggggtagtagttatttggaaagccttgtcattcatattatgggtttgattttttcccgttggtagcacagcagtccacttttctagtactaaagcttgtgttgctgctggatcccaaaaagt

SEQ ID NO: 832654 - DNA, 613 bp, Homo sapiens
aaacaagtatagtcatttctcacttgatgtcaacaggctgttagaaactgattataagtgaaaccacctagagcagttccccgaatatcgctcaatattgctacarcgttgatgagaaaaatattggtttcattatatgttgctttgcttaaagtcatagaaaaacatgcctaaataccactcaacatccagatccaaataaggaaaaagatgggtatgtttgattgcatcaaaaacaaaaccttttgtgggagataacatagccaaaggaaaaagacaaactgagaaaaatatttgcaaattatatcacagaataagagttaatagcaccatcagagagaaaatagataaatggaggaattctctgcaaaaatgggctaggttatttaacaggtggttaaaacaaacaaacaaaaaaagccaaatggtttttagtcatgtgaaaaaaatactctcattcataagagaaattcaggtcaaaattacactgatgtcatttctcttaatcggcataaactcacatttgccaacatggtcattgggtaagactacagaaaaacagatattctcttacattgaatagaggaaatgcaaaatgatatgacactcctgt

SEQ ID NO: 832655 - DNA, 477 bp, Homo sapiens
ggatcacttgaacttggaaggtcaatgctgccgcggtgagccgtgagctgtgagccatgagccatggttgtgccactccagcctgggtgacagagcaagaccctgcctcaaaaaaaaaagaaaaatgactcatcctgttgcgttaacattaattttatccatgtaattatttttaaatattttatactattcaattaaattgatatacagatatttcttaggtggtattattattatttttaaagggacagagtgcagtggtgtgatgagagttcactgtagcttcaaactcctaggctcaagtggtcctctgacctaagcctctcaagtagcttgggctaaagacatgttccaccrtgcctggctaatttttttttctaaagagatggggttttgctatgttccccatgctgattttaaactcctggcctcaagcgatccttccaccttggactccaaaggtgctaggattacagg

SEQ ID NO: 832656 - DNA, 422 bp, Homo sapiens
acttacatattttttctctaggtcaaataaaatatgtcttaagcatcgtcctgggtcacatataaatgactaaaccccttattcattttgttaccacaatgcaatgtgaatgaattagaggtgargggaggattggcttatattagtcaatgactccagctcaccaaagtgcatgcttattgtcacaattaggcctcattaattctttttataggtttgccagtccttaagtggtatatccttctccaaactgtttttgagaaaatgaacaatggaataaatgagtggatgaaaaattaagtagataaataggattctctgagggcagtgtaacagttaaactagcaagttggtcctgtggtggtggacgggtctaaaatatattagataatactgatggtttacaattagggctgaccaca

SEQ ID NO: 832657 - DNA, 599 bp, Homo sapiens
taatttgggtcatgaagaattgtaataaacacattctgtgtttggygctttaaaaaataatgacttcttactgcagagattaaagcagtggtatagggtttcataaaattaatagaaatattgtcaccattacaagatgttaccattacaataatattcttataaatcctataaacagaaaattgggggcacattacaaatctttatgtagaaattttccaatatagtatttaaactaatgaccaaaagacttccaaagaagaagaatccatttctggaaaaattcccaacagtaacccagaaatttccaaaaaacttcccctagtctgatcactccacaaaccaaacaaaaattccccctgaaatccctttaagatactatggaaagcagaaacaatttacagttcaattcgaaaagctgaaaatttcttcactggtaatggttctaataaaattaccagcagaggagaaggcccctgaagaccagttgaatcatcctgcttattctggcccatgtatttagttggctttccccttccataattcccattaatggcttttgtaagcagtatttgcataggaaacataaaggtgtctct

SEQ ID NO: 832658 - DNA, 599 bp, Homo sapiens
taatttgggtcatgaagaattgtaataaacacattctgtgtttggcgctttaaaaaataatgacttcttactgcagagattaaagcagtggtatagggtttcataaaattaatagaaatattgtcaccattayaagatgttaccattacaataatattcttataaatcctataaacagaaaattgggggcacattacaaatctttatgtagaaattttccaatatagtatttaaactaatgaccaaaagacttccaaagaagaagaatccatttctggaaaaattcccaacagtaacccagaaatttccaaaaaacttcccctagtctgatcactccacaaaccaaacaaaaattccccctgaaatccctttaagatactatggaaagcagaaacaatttacagttcaattcgaaaagctgaaaatttcttcactggtaatggttctaataaaattaccagcagaggagaaggcccctgaagaccagttgaatcatcctgcttattctggcccatgtatttagttggctttccccttccataattcccattaatggcttttgtaagcagtatttgcataggaaacataaaggtgtctct

SEQ ID NO: 832659 - DNA, 557 bp, Homo sapiens
gattttgacaggaagtgccagaatatacaacatctatgttaactaatgcgtcaataattttgctatttttatgcttatgtctcctgtctttttcatggcagattatcttaaraaaaaaatagactagttatttctaaagttgtttttagctaagattatttagtgaatcacagaggattccattttattgaatctgacttaagtagttagggatcctacttttcattttttcataaaatggatattattgaattatgaaacttcagttattacttctgttatttctagaaagaagtggaaatacaggagtaccagggactatactcacctggggttcagggctctgctgcagaagccgtggcaacaatgaaatgtgttctccagggtagataaaggtgtgacccactcaaaggctctcctgagacaagtacagaataagtgttgacttctttgagggatggtctgtgttcttttcatttgatgaatgttaatatgccaggtattgtgctaggcttcaagttataatcataaacaaaagccacattctagaaaaggtt

SEQ ID NO: 832660 - DNA, 522 bp, Homo sapiens
cccaataagcagcagagtttatgagtctaacaaggggttttgagcttaaggtatataaataaatgacataatttaggaggtgacttttccttaggattctgttctgagggaaccaggcttcttacctaaagtttgatgggactgctgaagtcagagataatgatggtgattggtccaggaaaagtctttatgggataactgagcagcctagagtattggactgattgtgagttagagaaggcagtgtacatcaggagtcatgaaggtcaaatggtaaggttgaggacactgtatctcaaaagggtcacgccatttttgcccagcttaaatcctttagcttgacaaattattttaaatccatccagaattgccagtctctatgaaattaaaggtcttcatctttttctctgastcatagattaacagtgctgacctaatgtttaggaaatccttgggtggaagaaatggtaggagtatggagatcctcttcttttacattagggaattagttgtccagatgtt

SEQ ID NO: 832661 - DNA, 654 bp, Homo sapiens
gagtttttatttttattttgtccctcgagttttttataagcatatttaatatttttgttctgaatcttctctctacctagcaagtcactcttatttcatggatgcaaatagctttgcatatcattctgtgggtaacaaatagagataaaaataagccaagtccttttttctgcatatcgtctattttcttgaggaagtaaattttgagaatttagcatgttactattctttcatgatgtcgatttttcctcaagttaattctgtattttccatcaatatgattaaatgtaggattaaattaatccatattaatcattgatagttgttgctacttcctaaaaaatcacgtggattattttaacataaattccacataataaatatacactttaaagtttgggaagttctgaccccaaaaatatggttcctggtggcattatcacttaaaaatttgttagatatgcaaattgtggaacctcactacagacctgctgaatcaaactctgaggtggagcctaacaatctgtgttctaataagcccttctkgtgattctagtgcatgctcaagtttgagaaccactgatctaaatgatactctagaaggtgactatggattttctgatggtgtgttcaggtaggcaacaagtcaaagta

SEQ ID NO: 832662 - DNA, 518 bp, Homo sapiens
aactactgttataaaccataatgaaaacacagataattttgtagtttatgtaaaaatatttatatatacatattattttataaagtggctttgtgcctaacgtagaatttttgtaaacacatgtatgtatggatacagaagcttatatttccactactggtccattctgaatgtagcacatgacagctcataaaaaacctaaacgtacacgatttcatttttcttcatgattaaatccagcgaggtaggtattattaacctgttttatttactgagataatggagacttgtccaatatcatacactgggaagtgttgagccaaggctccaagtctcacattcttcttaatacattatattgcttttcttttacagacatataggccccacttgtagtgtgtacttactttcatgtaayttggtgaattatgagaacacaattaattctgcccgtgtattaccacattaacctaaacctaatattcaaacttccaacagcagggctcctttaagctaaa

SEQ ID NO: 832663 - DNA, 443 bp, Homo sapiens
ccttgtatcccatagcttagatgtatctcttaaactcaaaagcacctgtactcttagacttggctctctaggactgatatttgtcctgtgtactgtgtccagccaagtagaaaggaggaattgtcattctctgatagccactgtataggtaacagagttctacctctgtaatattatcacatgtgcctccaataaatctttcatgcaacgtagatgtgggaacacgtaaaaggacaggaactggagatttcatgaagcttatagacgttgtatgaattggtttgtgtcatatttttgtaactgtcagtatacgtggcaaagtatggactgtgatttacyttcattgtaatatagttaaggaggctgtgaagaagtaaataaccctcttcgaattcaaacatgtcagtgactcacatacattttttaccaatgtgaacatattg

SEQ ID NO: 832664 - DNA, 620 bp, Homo sapiens
caatgttttcataaatgctccaatcataaatggggttttaattagtcaaatgcttattcttcatcttaagtgatcatgtgtttttactctttatactatttagatagtatattttactaattgtttttgtatgtttatccaaacttgcaatgctggaataaatacccttggtcatagtgtatatcctttgtctacggtgcttttgtgttttgatagtttttccttgaggattctcgtatttataaggcatgttggtctctaattttcctttcttacaatgtctttttccagttgtagtatcaggttaactgacttcataaaatgcattgggaagtgctctctttttcctttttggttttcgttcctttgtttgttttcttcttctcttgggagaggagttagtgaaggattgttataaattctttaaagttttggtataatttactagtgaagtaatctcaccctgggcatgtaattgaatcctaacaacaatctgtgagcttggaagatgattcctcccyagctgaaccttcagctgagacttcagcctagacatcatctacaccaggattcatgccctaaagaaacagtgagtaatatgtgtgtgtgtggttttgagg

SEQ ID NO: 832665 - DNA, 623 bp, Homo sapiens
taagcaatcctcccacctcagactcccgagtagctggggctataggtgtgcaccacaggtatgcaccactacacctggctaatttttgtaatttctgtagcaacagggtttcaccatgttgcccaggcttgtctcaaactcctgagctcaagcgatctgcctgcctcggcctcgcaaagtgctgggattacaggtgtgagccactgtgtccacagttttcttttaagcttccctagatttggtcagatattttgtagaatgtccctcaatgtgggtttgtctgtttttttgtggttgttttttgttttaatgattagctggggttattgtttctttggaggaagaccacagaggtaaagttccattttcatcacatgatatcaagagtgtccatcctatcaacatgttttaccgctaatgatactaaccttgatcacctggctgagatagtttttttcagatttcttcttttttgaagcctcttacacattgtactctttgggaagaagtcactgcacagcccacaatttaggggagttatgcygtctacctccttgaggaggcagcatctatgtaaatttttcagaattctgtgtagacattaacaagcacacattttaatg

SEQ ID NO: 832666 - DNA, 591 bp, Homo sapiens
aggtctcgtggctcacacctgtaatcctagcactttgggaggtcaaggcaagaggatagcttgagtccaggagttcragaccagcctgggcaacatagcaagacatcatctctacaaaaaattttaatagttagctgaccatggtggcctgcacccatagtcctagcacctcaggaggctgagatgggaaagatcaactgagtccgggatgtcaaggctgcagtgagccatgatcgcaccactgcaccccagactgggtgacacagtgagactctgtttcaaaaaaataaaaataaaaaatcccagccgggcacagtggctcactcctgtaattctggcatctttgggaggctgaggtgggcagattgcttgagcccagcagttctagaccagcctgggcaacgtggtgaaaccttatctcttattcatttatttttaaaaactagaaaggtgtcttcctatgttgaccaggctggagttcagtggctattaacaggcatgatcagggtgcactgtggcctcaaacacctggccttaagtgatcctcccatttcagcctcccaagtagctgggactataggcaagtaccac

SEQ ID NO: 832667 - DNA, 537 bp, Homo sapiens
cctttatgggaaacagtatggagatttcttaaagacctaaaaatagaattaacctttgatctagcaatcccattactatgtatacatccaaarggaaagaaatcattatatcaaaaacaaaaacaaaaaaaaccactcgtatgtttactgcagcactagtcacaatagcaatgatatggaattaaccaaagtgtccatcaatggaggactggataacaaaaatgtgtatatatctacatctatatctcaccttgaatactacttagccataacaaagaatgaaataatgtcttttgcagcaagatggatagaactggaggccacgtgtataagtgaaataactcagaaacagaaattcaagtatcacatgttctcactttaagtgggagctaaacaatgtgtatgcatgagcatacagaatagaatgacactggtgactataaaaagtgtgagggtgggaggagatgagggttggaaaattacctattgggtacaatattcactatttgggtgatgatgggtacactaaaagcccag

SEQ ID NO: 832668 - DNA, 609 bp, Homo sapiens
gcaaatatgtacaaattcctttattaaacagtttgcttgaaattttaggtatctgaaataaaaaacatttattttcaaatattattttctgttctttaagatgaattctcatcattagctcaaaactaatamatctactgtatttcagtataacaaccacaccttagattgaaatatgtttgagtaaacaagaagtaaaaatccttaggtaaacaacagtttcagaatagagcgtgtgtgtgtgtgtgtgtgtgtgtgtgtgtgtgtgtgtgtgtgtgtgtgtatgtctgtgtgtgtatttatcttgttgaaaagatctcatttagagatgtgatgagttgctttcagaggtgtaaatagactctacaactattcttcccaagtcattcagtcattcaacaaataagttgctatggcttcagttacaggttcacattaatttttatttatttattcatttatttatttatttagagacagggtctcactgtgttacccaggctggtcttgaactcccgggctcaagcagttctcctgccttagcctctcaaagtgctgacattacaggtgtgagccactatgcccagcccacattaattgctttttttt

SEQ ID NO: 832669 - DNA, 630 bp, Homo sapiens
acgggtcaggaaacttcttagggaaccagtctttccatgggctttttattggctctctgcagtcaacttcaawtccccaagcagattgatcatgtctgaaaatagaccattccagtcaaagccttggtaaaataatgtgtctccaattgtgtcctattacaaaagaaaacattcatattgaacatatgtacataactatattgccataaaataacacaaatagttttcaaatttgggagaactcatatagagagaaggacaaattttgcttacaaaaatacacttaatcattataagttataaagagctcaaaacaaaaaagttttcttgactcttcttcaatcagagtaatgccttccaaacaggatgttgcctgatgaccttggaactgccatccacaagccaagcaactcttaggttagagctgtttgtcaggtactatggtatccagcaactcctcaccagttccaggatcagtcctaggagagaaagaggctcgcagctcatgagtatatcctctttgcactcctcaggtagcaagatccattcccattttattatgtactcttctgggcactgctatccccgttagagtgtttctctgacatcactccagacagcatgtgtatt

SEQ ID NO: 832670 - DNA, 334 bp, Homo sapiens
gttagcaacggatcagacttatttgtttaaattggttctcaaaggacctgtactaaataacaaccaaaatggctgagtgaactttgctagcccaatttgaccttggactttagggtaaatattatttctttactcatctttatacaatgttttatgattccattttttttgttgttgttttgtttactaattcacactctcttctgtwtttaaaattagaccaaattagtaaattcaggctattggagtaaagtttttatacagtacactgatacagtgagaatatatatatatatatgtatatatatttacccacttttggttttattatatt

SEQ ID NO: 832671 - DNA, 527 bp, Homo sapiens
ctattaggttatccaacagttatatgttggcatataactgtttatagcggtctcttctgkttttttgtatttctgtgctatcagttacaatgtttcctgtttcatttctaattttatttgttccttctctcttttttagttcagctaaaggtttgtcaatcttgtttatattttcaaaagccaacttctagttttgtggatcctctattatttttccagtctgttttatttacttctgttctgtaccttactatttttttctttccagtagctttgggttaatttttttcttcattttctagtttcctgagatacaaagttacttgctttattaggatcttcatggagtcattcatatctctaaacatccctttatactgcttttgttgcataccatatgttttttagtatgttgcttttccatttttgtttttctaaagatatttttaaatttccctttgaatttcttcattgccccattggttgttcaggatcatgttgtttaatttccatgtatttgtgaattt

SEQ ID NO: 832672 - DNA, 527 bp, Homo sapiens
ctattaggttatccaacagttatatgttggcatataactgtttatagcggtctcttctgtttttttgtatttctgtgctatcagttacaatgtttcctgtttcatttctaattttatttgttccttctctcttttttagttcagctaaaggtttgtcaatcttgtttatattttcaaaagccaacttctagttttgtggatcctctattatttttccagtctgttttatttacttctgttctgtaccttactatttttttctttccagtagctttgggttaatttttttcttcattttctagtttcctgagatacaaagttacttgctttattaggatcttcatggagtcattcatatctctaaacatccctttatactgcttttgttgcataccatatgttttttagtatgttgcttttccatttttgtttttctmaagatatttttaaatttccctttgaatttcttcattgccccattggttgttcaggatcatgttgtttaatttccatgtatttgtgaattt

SEQ ID NO: 832673 - DNA, 527 bp, Homo sapiens
ctattaggttatccaacagttatatgttggcatataactgtttatagcggtctcttctgtttttttgtatttctgtgctatcagttacaatgtttcctgtttcatttctaattttatttgttccttctctcttttttagttcagctaaaggtttgtcaatcttgtttatattttcaaaagccaacttctagttttgtggatcctctattatttttccagtctgttttatttacttctgttctgtaccttactatttttttctttccagtagctttgggttaatttttttcttcattttctagtttcctgagatacaaagttacttgctttattaggatcttcatggagtcattcatatctctaaacatccctttatactgcttttgttgcataccatatgttttttagtatgttgcttttccatttttgtttttctaaagatatttttaaatttccctttgaatttcttcattgccccattggttgttcmggatcatgttgtttaatttccatgtatttgtgaattt

SEQ ID NO: 832674 - DNA, 506 bp, Homo sapiens
taacaggcaggggttagaaccatttggaggggtcagaagaagacaggagaatgttaaaatgtttggaacttcctagggagttggacggctcagaagacaagatgtgggaaagtttggcacttcctaraggcttgttgaatggctttgaccaaaatactcacagtgatatggacaatgaagtccaggatgggttggtcacagatgaagatgaggtgaggaacttgttggaaactggagtaaaggtcattcctgctatgcaaagagactggtggcatattgccctgccttagagatctgtggaactttgaacttgagagagatgatttagggtatctggcagaataaacttctaagtggcaaagagctcaagaggaagcagagcataaaagtttggaaaatgtgcagcttgtaaatgcaatagaaaataaaacttcatttttctggggagaaattcaagcctgctgcagaaatttgcaaaaataataaggagccaaagttaatcacca

SEQ ID NO: 832675 - DNA, 622 bp, Homo sapiens
tagcttaagatccagatggaatactaccatgtggaataacgtatgcattatcaccatgttaaaaacagaaagaaacacaacgatacagaaaatatattcaaaaaaataatgacagaaaactttcaacaactgggaaagaaatagaaacccacacccagaaatctgaaaggaaatcaaataagtttaatgaaagatagtcactttaagacataacacaatcaaattatcaaaagttatagacgaagtattgaaaaaagccaatgaaaagtgaatggttacataaaatggaatttccacaagactatcagtggattactcaacagaaaccttgcaggccataaggaagtggaatgatatactcaaaattctgaaagaaaacaactgccaaggaataattctagattccactattctgtcttaaaaacaaaggagtgataaaggctttctgagattgaaaaaaagctgagagagcataaggacactttcctgccttacaagaaaygttaaagggagttcttgaaggtgaaagaagaggatgctaattagtaacatgaagatgttaaagtataaaacttactagtaaaagtaagcacaatatgaaattcaaacactctaatactgt

SEQ ID NO: 832676 - DNA, 609 bp, Homo sapiens
atcttaatcaaacaaaagcagcaatgataagttctaaaatgcagggatcctaaaatgacaactgatgtaatgaatcattgataatacacccctaattctcatacattaaacataaaacctcattttcacatcgattaccattttaagtttatttaaatcaatatgatgtttttacatagtcggtttggacagtgttttgagaaataattcctgaaccatcatataacattctacttgaaaacctgaaagtctatgaagatttgcatactacttaatgttttatgtttactgttttttattttcagatccgtgtgtaatatcccgagaaattatggaaaattataacatagcattaaggtggacagccaaacagaagctttatttgagaacaggtgaatcagctgaatttgtgtgtaaacgtggatatcgtctttcatcacgttctcacacattgcgtacaacatgttgggatgggaaactggagtatccaacttgtgcaaaaagatagaatcaatcataaaatgcacacctttattcagaactttagtattaaatcagttcttaatttmatttttaagtattgttttactcctttttattcatacgtaa

SEQ ID NO: 832677 - DNA, 571 bp, Homo sapiens
atacagaaatcaataaaaacattggacttgaactctatattagaccaaatggacctatcagacctatatagaacattccatttgacaacagyagaataaacattcttctcaagcacacaaggtataatctccaatatagatcatatgtggggccacaaaacaagtcttaaaaaattttaaaaagattgaaattacataaatttttttaacattgtcatatgaaactagaaaacaatagcagaagaaatgttaggaaattcacaaatacatggaaattaaacaacatgatcctgaacaaccaatggggcaatgaagaaattcaaagggaaatttaaaaatatcttgagaaaaacaaaaatggaaaagcaacattctaaaaaacatatggtatgcaacaaaagcagtataaagggatgtttagagatatgaatgactccatgaagatcctaataaagcaagtaactttgtatctcaggaaactagaaaatgaagaaaaaaattaacccaaagctactggaaagaaaaaaatagtaaggtacagaacagaaataaataaaacagactggaaaaa

SEQ ID NO: 832678 - DNA, 345 bp, Homo sapiens
caaagagttatctgcattcccatcttcattacagcattatttataatagccaaaatatggaatcaacttaagtatccattacagatgaatagataaagaaaatgtggtctatatacacaatgtaatactattcagctttgaaaaaaggaaatcctgcatttttaagaacatagaataaacagggaggacattaagttaggtggaataagacagacaaaaccacatgattgcacttatacrtgcaatccgttgtaaaatatggtgactttagttaacaataatatgttttattcttgaaaactacttagtgtagattttaagcagtctcaccacacaaaaaaatga

SEQ ID NO: 832679 - DNA, 345 bp, Homo sapiens
caaagagttatctgcattcccatcttcattacagcattatttataatagccaaaatatggaatcaacttaagtatccattacagatgaatagataaagaaaatgtggtctatatacacaatgtaatactattcagctttgaaaaaaggaaatcctgcatttttaagaacatagaataaacagggaggacattaagttaggtggaataagacagacaaaaccacatgattgcacttatacgtgcaatccgttgtaaaatatggtgactttagttaacaataatatgttktattcttgaaaactacttagtgtagattttaagcagtctcaccacacaaaaaaatga

SEQ ID NO: 832680 - DNA, 446 bp, Homo sapiens
caaaaactggaagcattccctttgaaaactgacacatgacagggatgtcctctctcaccactcctattcaacatagttttggaagttctggccggggatttccgtcaagagagagaaayaaagggtattcaattaggaaaagaggaagtcaaattgtctctgtttgcagatgacatgattgtgtatttagaaaaccccatcgtctcagcccaaaatctccttaggctggtaagcaacttcagcaaagtctcaggatacaaagtcaatgtgcaaaaatcacaagctttcctacacaccaataacagacaagcagaaagccaaatcatgagtgaactctcactcacaattgctacaaggagaataaaatacctaggaatccaacttacaagggatgtgaaggacctcttcatggagaactatgatccactgctcaacgaaataaaaaa

SEQ ID NO: 832681 - DNA, 557 bp, Homo sapiens
aatgtatatgttcttttctaattagtaattcraaaacaaatgtaaatggaccaattttactatctgaaagaaaaagaaatcatgttaaagatgatgcatatttataatatagcatttgtcataatcatgagttttctgatctattcttgcctactttcctattaatctcctccagcctctaaactacaatgttcagtttctattgtaaacagctttattttcaatacctacaaagtgcttgacacacaacaatatttattaggtggattaatgatagagttggtgcttatggcaggagaaaaagggacttttctttcaggggcttaggctattgttgaggacagttactcctataatggtgtaggaagattcccattatctttcgtctcaattattccataattatcatgcggtttctataatggaatgttttgtaaattgcaaacaatacacacaaacaattttcagagtcccctttacttaaaaagtaaaagtcagctgtaactgaagatgagccttaatttaaagcaacagagcactaactaaaaaatagatat

SEQ ID NO: 832682 - DNA, 608 bp, Homo sapiens
agtgtaaaaacagccatggggaatacgtacactagtgaacatggttgtgttccaataaaactttatggacacaaatatgtaaatttcatataaattttatgaatattttaattatcaaatgatttttcttactttaattttaaaaagatgtcaaaatgtaaaaaccattgtagtcagagccctacaaaaataggcagcaggccacagttccccatgactgtcatttgccagtccttcatctggcccaccaatcccttctgaattcatttaaattaaaaactatagacagtaactcctgtttaaatatgagtgatgcgtcaagaactgttcattttaaactggactcagaaattatggggtaaggcagaaaagaagaaaattgtgctgtgtttgaaaagacttgtagataagtgccggtttcatccccaaatcgttcttaattctaccactctatctaggaaatttgtctaatagtaaatcatctttggtttctcccatgtttaactttttattttaattttatgttttacttttattttagattcrggagcacatgtgcaggtttgctacataggtaaatggcatgtcagaggggtttggtgtgcaaa

SEQ ID NO: 832683 - DNA, 605 bp, Homo sapiens
cttctttgggatgctgaaatttgtttcacatctcactaagaagatggcttctgtgtatatttcatgtgcccccattaagctttggcataacataagagcccatactttccttgacttttcctactacagactaagtttcaataatttctctatgaaattccagtgccttttagtgggaagaacgatttttagaaacaaacctaaaccatgaaaaactcacttcaggttcgaaattatcgttgactaagaaaaataatttttggccgagcaggatggctcacacattaatcccagcactttcgagggccaaggcgcgcagatcacttgaggccaggagttggccaacatgatgaaatgctgtctctactaaaagtttaaaaaaatagctggatgtggcggcacacacctgtaattccagcttcacaggagactgaggcaggagaatcacttgaacccgggagacagaggttgacgtgagccaatatagtgccactgcactctagctttggagacagagcaagactattaaaaataaaaataaaaatraagaaaaaaagaaagatttaaatgatttcctttagtttatgtccctttctacctcggac

SEQ ID NO: 832684 - DNA, 623 bp, Homo sapiens
tctttgggacgctcaaatttattycaagtttaactaagaagctggcttctgtgtatatttcacgtgtccccattacactttggcataacaaaaggtcccaggatttccttgacttttcctactacagaccaagttccaataatttccgtatgaaattccagtgccttttagtgggagaaacgattttcagaaacaaacctaaactatgaaaaactcactacagtttcgaaattatcactgactaagaaaagtaatttttggtcgagccggggggctcctgccttaatcccagcactttcgggggccaaggcgcgcggatcacttgaggtcaggagttggagaccagcccggccaacatgatggaacgctgtctctactaacaattcaaaaaattagccggagtggcggcacacacctgcaatcccagctactcaggagactgaggcaggagaataacttgaacctgggaggcagaggttgcagtgagccgagatggtgccactgtactctagccttggtgacagaacaagactgtttaaaaaaaaaaaaaaaagaaaagaaagaaaaattaaaatgatttcctttaatatatgtccctttcttcctcagactaaatagcctgc

SEQ ID NO: 832685 - DNA, 561 bp, Homo sapiens
aatatatgtccctttcttcctcagactaaatagcctgcaatcataagaaaatgtaagagtatctcaggaggttacacagtgcagggagatttagattctccaatatggaggagacactcagcagaaaactgtgcatccatgcttgagggactgggtcagagaagctgtcatgcgtcacccaacaagcctctggagccagttctgtaactagcaaacacttcccacaaagtaaagatgtcacttctctgaacttagtcttctcatctgcacactaaagctgttgtgccgctagcctccttcccgttctctctgatttatgatgattcaaacttaaagatttttccttagtgatattcttaagttttcccaataaataggctgtaaatattattttctatcacttgttccagaattatagaagaaacataaattatatgctatttaaattatggtattggtcaacattctatatgtctacatacatatagaatgtaagaatatatayatatttgaacattcgtgtatgcacctatttttttatgtcaataatatatctcatcc

SEQ ID NO: 832686 - DNA, 474 bp, Homo sapiens
agctggtcatttgcagaactttgcccctctatctagaatggaaacttttcacttctgcactcagaggtaggcatcttcccttgatcacagcacactttctctcagagcctggatgagacytcacaacaaaactcacaagtagctgttacagagatgaaagctggtaaaggagatgaaacctccttgctgacctatgtgcaaatggaagtgagcttttttcacatgataggaaacatacaaagtaccttctccttcatgtcacattctttcaataaactgaagagaatgctgtgaggggaacttcaggattgagaaatagaccctccccccgacaaaaaaagataaaaagaccaaaagaaaaagaagaaaagattgcacatttgcaccctgtgcatattatctgtattggcaaatcaacgcagaacagcaagatggtcaaaacagaagttctaagtgctcagtgaaatcaggatt

SEQ ID NO: 832687 - DNA, 618 bp, Homo sapiens
agaaacatagcaaggactgtctgtccagattcgtcttagcctctctgagaggtgtgacacttcttctcttcacaktcagggcagaacacctgtcacattagggtcttcaggggagaagggagggaggtcagagactcctgcttctgtgatttttttcaagttccttcaacttaaaatagtacactaaggtgccatcttttgggttattatgttctgagccccaacattaagattgtgaaatctgtgtgccattattattgttgttaatggtattactattaacaggtggaaaacttatattctatagttcagattcaacttatatttatcatctatgtgttccacatgatgggctttttgttttcatttaaaccactgtaactttgagtgaggaattttgtccctctctgtccagatgaataaatgaagttcaaaagattaagtgtgcttggatcacaaaactgcccagaggtagagttgggacgcaagctaaggtttcctaagtccaagactgaggcaaataatttacgaaatgccttcacctgattcatatataattagccaaacaacctgtactgcttaataatcgtaatatgaaaatgttcacattaacccata

SEQ ID NO: 832688 - DNA, 643 bp, Homo sapiens
catctattcatttattctttcgttgatcccttatgacttgtgaaggactttgttgaaggctgaaaggaattttaaaagtagaaaacagtatgctatagtagaaaggtcagagactttaacataacaatgtttagctcaatcccggcttttccacttaataagggtatgatcttgaacaaatcacttatcctccctacatttcagttccatcatgtttaaaactgtaataagggcactttcctactttactctgttctttgaggtttaagagagataatacgaaataggtagcaatcctttgtaaactataaacatgtcaacaacataggtattacaaggaaaggatgtttttcctgctacaaaggagtttccatcaatttctggaggcaaggcatctttacataaaatggttttggtattagttaaaggaaatttttgattagtcacagtaaatattaaaaaaataaaataaaaaaacacagaggcatcaagatttgagatgaccccaaaggatgggtttgactacactaggttaagaaaaagagaaaacatgtatagttagagagttctgtgaactacaatatgaaagtagaaatataaaataaaatattttcagtcrattatttatgcacacaaaaacatt

SEQ ID NO: 832689 - DNA, 399 bp, Homo sapiens
caaactctgtgcactctcagctaatgatggtgggtgaggtcctgcaagcaagaaatgcaagtccatacttagaatgcatgtmtaagatgagttgctgcccctttcgaggaagaaggggtccaatattgtcaacttgccactaaaatggatgtccttgagatacaatactataaagagcacacaagttggactctattcctcacaagctggacatttgacagtggaaatagctagataagcttcagtgagggagagctcaggcttttggtcccatgcagattgtccattccttcatcaggctacaccattcatgcatctattgtgcaagtactggggctgctgatgagcagtctggctaacatcagctgactaggtcattcattcttttttcttcttcta

SEQ ID NO: 832690 - DNA, 584 bp, Homo sapiens
ctagagtgttccttggtccaatgtgatgttatgtgggatcctgtgttggtaatcaaactctgtgcactctcagctaatgatggtgggtgaggtcctgcaagcaagaaatgcaagtccatacttagaatgcatgtataagatgagttgctgcccctttcgaggaagaaggggtccaatattgtcaacttgccactaaaatggatgtccttgagatacaatactataaagagcacacaagttggactctattcctcacaagctggacatttgacagtggaaatagctagataagcttcagtgagggagagctcaggcttttggtcccatgcagattgtccattccttcatcaggctacaccattcatgcatctattgtgcaagtactggggctgctgatgagcagtctggctaacatcagctgactaggtcattcattcttttttcttcttctactcttccagctttatcaagstacaactaacaagtaaaattgtatatatatgaagtacacaatgtgatgatttgatatgtgtgtatattatgaaatgattaccacaatcaagttaattaacacatccagcatc

SEQ ID NO: 832691 - DNA, 472 bp, Homo sapiens
ggcctatcttcagcctcttcaaacaaaacaattatcagtcaagaattttgtatccatcgaagctaagcytcatatatgaaggaaagatatagtctttttcagacaaacaagtgctgagaaaatgtgccattacaaagccaccactacaagaattgttaaaaggagtactaaatcttgaaacaaatcctggaaacacaccaaaacagaacctctttaaagcacacatctcataggacctataaaacaaaaatacaattaaaaaaaaaacaaagtacacaggcaacaaatagcatgatgaatagaatggtacctcacatctcaacactaacattgaatgtaaatggcctaaatgctccacttaaaagatacggaattacagaatggatgagaactcaccagccaactatctgctgccttcaagagattcacctaaaggattcacataaggatccacacaaacttaaggtaaagg

SEQ ID NO: 832692 - DNA, 472 bp, Homo sapiens
ggcctatcttcagcctcttcaaacaaaacaattatcagtcaagaattttgtatccatcgaagctaagcctcmtatatgaaggaaagatatagtctttttcagacaaacaagtgctgagaaaatgtgccattacaaagccaccactacaagaattgttaaaaggagtactaaatcttgaaacaaatcctggaaacacaccaaaacagaacctctttaaagcacacatctcataggacctataaaacaaaaatacaattaaaaaaaaaacaaagtacacaggcaacaaatagcatgatgaatagaatggtacctcacatctcaacactaacattgaatgtaaatggcctaaatgctccacttaaaagatacggaattacagaatggatgagaactcaccagccaactatctgctgccttcaagagattcacctaaaggattcacataaggatccacacaaacttaaggtaaagg

SEQ ID NO: 832693 - DNA, 624 bp, Homo sapiens
gaaataagccagacacaaaagaaaaaaacatattgtatgattctgcttatatgaggtaccaagaatagtctaattaatagagacaaaargtaaaatagtggttactagagcctggcgagaggaggtacttgagaggtactgtttattggatttgcagtttcagtttaggttgatgaaaaagtccagaagatggatgatgatggttgcacaacaatatgaatgcacttactgccattgaattgaatactttaaaaaggctaaaatattaaattctatgttatgtgcactttatcacaattaaaaaagacagttcaggtgatttctatctacagtagaactcattaagatgataattaaatgttgagaaatattgattgggaataagcatgagttttgggatccagcagaccttggatttgaaaaagacacttccccatgcttgctgagaacctctggcatttgttgacctttctcggcctcactttcattgtctagaaaatagggtcattgtaaagggtccaggtaacatgcaaaacacttagaagaaaatggacacattgaagaaacccaaataatggttgcagttgtgctgccattgtttttgttattattaatatgtttcaa

SEQ ID NO: 832694 - DNA, 636 bp, Homo sapiens
tcagttagtggttgaaccccttggatcctcagttacctmgtatgtaaaataagatctatgctatctgtcccaaagggtcgttgtgctggttacataagacaagatacttaagtgcctccaaaacccccggcacttaagaagctgtaccacatgtttgttcaagaaatattaatcatattggccacatatccctgttgcatgttcttatcctgcatgcttttttatggcagtcatcataattgtaatcaagtattcatgcacccgtttatgtgattctgtctctccactagattattagctcttcaacaacaggaaccacacctgttcgattctcagctatatccttaatactggaagagtgtgtcatacacaaaataaatatatgccaaatggatggctgagggaagaatgagtgaatgagtgttcccacttatgcagagatgctcaatgtgagggctgaaagtttcttaaagagtgcagaattggaaaatgagctttgagccttttaagctacatatcagcaaaataattccttccacagacttggaagcttgttaggatgaagctttgaaaaaagaagcctagctctatagagatgggatgaaaaagagaaaaagtgtaagcaacattggctgg

SEQ ID NO: 832695 - DNA, 584 bp, Homo sapiens
gaaatgaagtgctgcttaataactatctatggtatagatgatttttctcactttggctgctgcactttgtttcacactcaaggatttggggtccccagttgacctaagtcttccaaactggtgtgtcaactccaccatgatcctggcatatccctttaactttctgcctttcggttatagttttttccttggctatatattttttgcattaatttactttcttttcattgaaataagatgatgaaggctttttattctaatatccataaactctgactcatgctataattttacaataaatgtgttttgtgtgtcttaaaattgtttttccagattattatattcttttcctgaaattagtcaatttcaattagtcaatatttattaagttagacagtgtggaaagaaggattgatgggggttaaaaatggaagacttcgagggcttgttaacctaagaatacaaactggcaaatgataattgctgaataaggaaggcaataataagtgctataggtttccagatargttgcaatgaactggacaggtgtttttgttttttgttttttgttttattattatact

SEQ ID NO: 832696 - DNA, 623 bp, Homo sapiens
atgaaacgaatgaaaggagggaggatagtggaagacagagctggaagggaagttggaactgagaggtgacagcgtgctggcagtcctcacagccctcgctctctctccgcgcctcctyggcctgggctcccactttggcggcacttgaggagcccttcagcccaccgctgcactgtgggagcccctttctgggctggccaaggccagagccagctccctcagcttgccaggaggtgtgaagggagaggccgagcgggaaccgaggctgtgcacggtgctgcaggccagctggagttccgggtgggcgtgggcttggcgggcccgcactgggagcagccggccagccctgccagccccggcagtgagggacttagcacccgggccagcggggtactggtcccccagcagtgccagcccaccggtgctgagctagatttctcaccaggccttagctgccttcccgcggggcagggctcgggaccagcagcccgccatgcctgagcctcccaccccctccatgggctcctgtgcggccccagcctccccgacgagtgccaccccctgctccacggcacccagtcccatcgaccacccaagggctgaggagtgcaagtgcacggcgc

SEQ ID NO: 832697 - DNA, 640 bp, Homo sapiens
attgatgattttccattgcccaycctggaggactaggagaaaatgagaggagatcaggtgggaagagctgagagtaatgatccaaatctatagctatgtgtgaagctgattcatagataaattgattgttaagtgtgaaaggtaagttagaataatctggtctgacatatatcccaattcaggaatccctcccaaagatctctgttagatgcaattgacctgtttttacactctgcctttttatttgctgaacattcttatttatcaccaccgagtcacgtgttctaggagggcaagggcttagtctaattaatctttacattcctcatagggtgtagtactgtttagcttactacagatgcttactaagcttgtcccaactgatcacaattaaatacagatacttaatatctttccagctgtaaagggggtgggggtggggctcttagaatgtcttccacttcaccttagtgcctaatcacagacagaagacagaaatgagataaacacttcaagctacccctgctatccatcaacctctgcctctggactcacttgccctttcttaccagtgatgtcaggagttgataacacgcttctgaaggccagctatgccacatgtgggttttatcccccttcc

SEQ ID NO: 832698 - DNA, 635 bp, Homo sapiens
tttatctcttcctctaaatcctcatgcccaatcagtcaacaaattctaatcttgttaaaactataagtcaaatcactttacttctctaatcaaaaccctcctatggttcctatggttccccatcatggttagaataaaagccaaagggctctcaagggccaacagggaacatgactttccctgccttttccatcttttctcccacttacccgcagccacagtagcctccttgctggtcctcaaaatgtccggatacgctgacattggccattctctctgcttaaaatattaccttagacacattagacactgctgtatagtcaggggtcttcagaaaaacggagccaataaaatagagagagatgaggaattggctcacacaattatggaggctatcacactctgccatccacaagctagagactaaggaaagtcagtgttatagtttcagtaccaatccaaaagtctgaagagcaagaacaagtcttagtccaaggctaggaaaataataatttcccagctccmgcttcagcaatcaggtagaaagagaaaaaaatttacccttcctcctcctttttgttctatttggttcttccatgaattgcatgatgcccacctcataggggagggcttta

SEQ ID NO: 832699 - DNA, 652 bp, Homo sapiens
ctggttattttgcccatttgttgatgcagtttcttcatagtgtcaatggactttacaatttggtatgtttttgcagtggctggtactggtttttcctttccatatttagtgcttccttcaggagctcttgtaaggcaggcctggtggtgacaaaatctctcagcatttgcttgactgtaaaggattttatttctctttcacgtatgaagcttagtttggccgatttgaaaattcttttctttaagaatgaagaaaagaattttcttcgggcttgcagggtttctgtggagacatccgctcttagtctgatggccttcccttttgtgggtaatccgacctctatctctggctgcccttaacattttttccttcatttcaaccttggtgaatctgacaattatgtgtcttggggtcgctcttctcaaggggtatctttgtggtgttctctgtagttcctgaatttgaatgttggcctgtcatgctaggttggagctaaagcagtgtttagagagaaatttataacactaaatgcccacaggagaaagyggggaagatctaaaatcgacaccctagcatcataataaaaagaactagagaagcaagaacaaacaaattcaaaagttagcagaagacaagaaataactaagatcag

SEQ ID NO: 832700 - DNA, 590 bp, Homo sapiens
gcagctgtagggtatattgagttttaggcctgtgagatgaggaacaagtgggctctatggcacacaaccacatagcaaagggaagttttaacyaggctaaaggtgatgggggtacaacacagtttcaaacaacttatgtcagacctaacagtgaatgccaaggcagcaactatgttaaacaaatttccaacaagtgtcccacaccagaacccaaccattctggcactctgatctcgaacttctagcctctaaaccatgaaaaataaatttctgttatttataaacccccaggcctagggtactttgttgcagcagcccaaactgactaagacaaggatgtccctcaacttgataaaaatcatctacaaaaaaactactggtaacattatacctcatgcagaaagactgaattgtttcttacaatcaagaacaaaggcaagaatgtctgctgtcaccactcttactcaatatagtgatagaagttctagcagagcaataaagccaaaaaaaggaaataaaaggcatgtagatcagatagaaaaaaaatgatactgtccctaaatgcagttgacatgattgtgtatgttgaa

SEQ ID NO: 832701 - DNA, 598 bp, Homo sapiens
ctggcatatcaaaacacagagaggaaagagagagaaaatccatgtcaatacactgaatcaaaactgctgtgaaaaacaatttatgaggcaatgttaaatagcagaagagataaaaggcaggctcttacaattccattaaaaaatactttaacttctattttaggttcaggggtacatgtgcaggtttgttatataggtaaacatgtgacttgggggtttggtgtacagattattttgtcacctgggtactaagcatagtatttgacagttttttttttctgaacttttctcttctcccatcctcctccctcaagcaggccctagtttcttttgttcctctctttctgtcaacatgttctcattattcagctcccacttataagtgagaacatgtggtgtttgtttttctgttcctgtgttggtttgggaaggataatggcctccagttccatccatgttcctgcaaaggacatgatctcattctttttttatggctgcatagtattccatggtgtatatgtaacacattttctttatctagtctatcattgatggccgtttaggttgaytctgtatcttagctattgtgaagagtact

SEQ ID NO: 832702 - DNA, 656 bp, Homo sapiens
aattatgctgattggtttgacttggatccaagcaaagtatccattatatctccctgaaaaaaaaaagtcacacaattacaatgcaataaaatgcaaattaaaaggtaaagtagtctttaaaatgccatttaaaatttataagttagtgatacacatatccaataagattgtaaaagggaaacaagcaaaggtaagtttaaacagtaatggttatttcctagtataaacctactctttccatgaaaggctcttttttttttgagacagagtcttgctctgtcgccaggctggagtgcagttgtgcaatctcggctcactgtaacctccgcctcctgggttcaagcaattctcctgcctcagcctcctgagtggctgggactacaggcacgtgccaccacgcccagctaattttttgtatttttagtagagatacggtttcactgtgttagctaggatggtctcgatctcctgacctcatgattcgcccaccttggcctcccaaagtgctgggattacatgcgtgagccaccgcgcctggccraaagactcttttaatgaattccgataaacgattttataaagattcagtaagaagaaaattttggcagctcctatttaaccttaatgcttaagcctaaactttcttatttataaaa

SEQ ID NO: 832703 - DNA, 656 bp, Homo sapiens
aattatgctgattggtttgacttggatccaagcaaagtatccattatatctccctgaaaaaaaaaagtcacacaattacaatgcaataaaatgcaaattaaaaggtaaagtagtctttaaaatgccatttaaaatttataagttagtgatacacatatccaataagattgtaaaagggaaacaagcaaaggtaagtttaaacagtaatggttatttcctagtataaacctactctttccatgaaaggctcttttttttttgagacagagtcttgctctgtcgccaggctggagtgcagttgtgcaatctcggctcactgtaacctccgcctcctgggttcaagcaattctcctgcctcagcctcctgagtggctgggactacaggcacgtgccaccacgcccagctaattttttgtatttttagtagagatacggtttcactgtgttagctaggatggtctcgatctcctgacctcatgattcgcccaccttggcctcccaaagtgctgggattacatgcgtgagccaccgcgcctggccaaaagactcttttaatgaattccgataaaygattttataaagattcagtaagaagaaaattttggcagctcctatttaaccttaatgcttaagcctaaactttcttatttataaaa

SEQ ID NO: 832704 - DNA, 472 bp, Homo sapiens
aaattttaaaaataagtaaaagattttatttatataagtaaatttgactaagacagacaaaatgagtaaagaagtaaatgagttatccacaagaacaaaatttgaggtayatgtagtccaaactttttgtcaatgaagaaaataaaaaacagaggttaagtgaaaagtccacacaggaatactaacaattttaagactagcgatttaggctcttgattctctgaggtttcttactgttagaccaccagatcttcctttgcaatttagttatataaacttcaaagtaacattgtggcacagacatgctaattataaaaataaatgatcttatattagataaattacatatatagaacctaatatggtaacatctcagttattacggttgggaaaagtaatagtctagtcaaccttcttgatggcagaggacttaccattcatagacaaagccctaggatggcaaataggattt

SEQ ID NO: 832705 - DNA, 594 bp, Homo sapiens
ttgagggaaaattaatcaatctaatcctaccaggaattgacagagatgttagaatgatcaggtaagggctttaagtgttgttgtaactttgtttattatcttgaaaaagttaagtggagacatgkaagaattacaaaagaccaaactgaacttctataggtagcatccacagtgtcagaaatgaatgcaaaggttgtgatctgtggcagattagattttccagaaggaaagattaatgaacttgaggacatagtaatagaaactatccaaaatgaaacagtgagataaaagtatttttaaaaattaaaaaaaaggacttcactgaactatagaactatttctgtatatggaactgggacgtgtgaaaatggagagggggaaacaaaatatttgaagaaataatgcctgaaagctttccacatttaataaaaacaatttgcaagtccaaaaagtccgataaaccccaagcaaagaaacatgaatactacaccaaggcacatgataatcaaattgctcaaaaccagtgataaagggaaaaccttgagattaacagcaggcagaagaaaaaagacaattcatgtatgaacaaagata

SEQ ID NO: 832706 - DNA, 571 bp, Homo sapiens
tcatttttgaaggatagttttgggaacagtattctyagttagcagtatttttattttcagcacttcaaatatatcattccactccttctgtctgcaaggtttctgctgaaaaatatggggattgtcctatgaaagttcttttgtatttgacaagttacttcttgcttgcagctttcaatattttctttgcctttaaattttgacaatttgattatatggctcaatatggacttttttgggttcaaattatttggtgccttttggacttcttaaacctagatgtcctctttcttccccaaatttgggaagtttttagccattatttatttggataagccttctattcctttcatctattttcttcttctgagactcccataatgtttatatgtctgcttgatggtgtctcacagtttctttatattttcttcactttttacattctttttttctttctgctgttttgactgaattatttccagtgacctgtttttgcatttgctgatcctttcttctgctgttgaatctctctagcaaatttttcagttcaactattgtattcttcagctcc

SEQ ID NO: 832707 - DNA, 626 bp, Homo sapiens
ttttctccccagaaagaggtcggaagttgtggttttgtccatgttctctgttatgacccagaagggaaagctatgccatctaccaacccaagctgctatctccattgtaccccaygtggctagaatgtgccagatctattggtgctccagggttgatgagaaagatgctatttctttgggcagccccaaagaagttggaatgtgggatccatgaatcaactcttctgtccatggggaaagggagaagctgagagctgggatttttcatccactcactctgtattgagcagtggggagagtcgatggcatttaccaggccaagccactgcctctgttctcttccaggtggctatactgtgccagacccatcagagctccaagaccgacacggcacagccactcctctagggagtggctcataaaagtcagagtgctggatgtgtaaaacaacccctgcctccactgagtaaagttaacagtgagggattctcttcttgatcatatgatgctgcaatggggtcagggtctctggtaagaacatatcccaaatctccctactggcttcagtgagttgctattagttcctcccaggatgcaagagcctttcaattagtttctggtttctc

SEQ ID NO: 832708 - DNA, 615 bp, Homo sapiens
tgaccatctataaaataacatggacatttttggacataaaagcaatgctgcagctgagtcaaaacaagaggaaatacagtctgagtgatctctattatatagttagtcattcaaaagaaaaacaggctgtgtgctatgcaatttaaatgaggtacaaagcagctcttgtgttcattcaaggaatgttagaaattcagttagttatttcaggaagtagataagaaacctaaaagacatttccattgagatgcattgtgagcattttaatttaaaattacaagtctattgaaaaaccacatactgtatttaagctccatttacatgacaaaggcacaaaaaatggagtggtgatctcataattcttttcttaccacgtccttgtagtatttttattaaaagtatttttaggtaataatttattgtgatacaaaagaacagaattactaattttaaaaaagtccaccaaagaaaactatagctgtatcccayaaatatacacaaatgtaatatatgaaaaaaatgaaaacaaaaacaaaacaagacaaaacaacaaaaaattcctctcccacggggttaggaaggtgaggatgctcctcctgctgcccggccagcaga

SEQ ID NO: 832709 - DNA, 601 bp, Homo sapiens
gtttacattgttaataagacatattggcccatataaytgaaaacacaagcctctggatggggggatagcattataccaagacaaatgagaatcaaccctaagccaggggtgaggaattcagcttacttgcaacatttagcagtcatattgagtgcctactatgtgccaggcattgttctagtcaatgaacaaaacaggcaaaaagtcccttgtctgtggacagaacacacaaatgcctcttggtatctccccacactctcttttcattgaaaggcaatgcttcaaaaaattggaaaaattatctatgtggaggaagatgaagagagaaaactttagaatgtaatgcaaattccaaaacatttgctgggaattttaacacgattttgtaggaatatgtgaaacttctgtactattatgaaatggaggggtgacatagggaagcagtacagtatggataaaaattctaaaattccaaaataccacccatgttttaaagtccagttatgaattcagattagtcagtttttgacttaatcaaattgagttgctgcatttattcggattatatagacctgtaaaaatacttagaggtttcaaatgt

SEQ ID NO: 832710 - DNA, 605 bp, Homo sapiens
aatctctatgattaacccctttctgttttcatcctcctccatatcttagtcctactatttatcacttcttatgtggtaagcagtatttccttattatccttatgtgataagtggtatttccttggtctctgggcatgtagtttcactaatttcgattcccttccctcttctttcaagatactctgaaatgctctcttcatcatgataatcttgtgaggcctttgtagagtctcctcttctagaatgctctctattcttcaagactcattggatcgctgtcccaaaccctcattcttacaccttaaacttaatatatcagctgcatgttcagcctgaatcatttggctattcatctcttgctttctaattgtgctaagttttttcatgtgtattttattagtccagatatcttcccgtttagactaatcaatgtttgatgtaatattcctctatttcttttgttagtcttgtcatattttstggtgtaatagttctttttcaaaacttactcattgattaggttagttttaaagtcagtatttacttttcttcttatacatggttaggtaaaactcaagcaaatatctgatgattaaagctgttgg

SEQ ID NO: 832711 - DNA, 532 bp, Homo sapiens
aaaatttagccgggcgtggtggcgagtgcctgtaatcccagctacttgggaggctgaggygggagaatcacttgaacctatgaggcagaggttgcagtgagccaaaatcacaccactacactccagcctgggcatgacagaccaagacttggtctcaagaaaataaaaataaattaaaaaaaaccaagggcacactctaaatctagagtagagcatatgtccccacattattcataatagcccaaaagcataagaaaaatgctaaccaactgacaaatggaaaaataaagtgttacatttatacaatgaaatatctgaaatagaaatgaagtgataatacatgatcatagaaaatccttgaaaacatgccaactaaaagaatctactcataaaaaccacacattttatggttctatttgtacaaaatgttcagaatacaaaaagccagagatagagaaaagactgacagttgcataggcctggaggagggattggaagaaaacagtgattgctaatgggtactaggcttctt

SEQ ID NO: 832712 - DNA, 602 bp, Homo sapiens
tcaagaaaagcaacatttatcatagtctaatttctaatatatcctaatgctttttataaacatgacagaaagttatctcctaatatagggtgagtttattccttttctctgacttttgtggaagtagaawaataaagagtatgtacggctgccatcaccattgttaatcaagcatgaatcaactatgagactggctaattatttgtagccaggtttcttccacaatgagttctaggcagctcttaaatgaatttattaggcacctccccctcaagattttaatgcctcataaacacaatgatgaagatgtctcagtcatactgaaatgaaatgaaaagcctactttagatgaggatctattttcatatataaaagcaaagttataagtgaatttaaacttttggtatttatccagattatcctctctgtagtcctgtcttcttgcccagctgcaattaagagcttccctatttaggtttcctattttgttaaaaccaggaaactgatctacagaaggaaaacaaactccatcaaaacacattataagttcaactcaaaacagcactgcctatgaatcctcagggttgctgaacacaactatt

SEQ ID NO: 832713 - DNA, 602 bp, Homo sapiens
ttactaggttgcttgggttacaagatctggcaaaaccgagctggcagaaccaattgccattcgtcctactagtgaaacaggtgagaataggcattggagtgcaggagaatgctcactgaacgttagagacagcctctaaagttgagtctcagcttttgctttgtgatagctataatctctgttgacgatataacatttcatgaatgttgatgaagattgaatgcaaacttaagttgtctagagttttattctctaatattcattgtagagctccttatcattaaattataggatttttaatttaaatactcatttttatgctgtaaatttttaggacttttcaaggagttttattcttagaataatttttattgttggaattgattatagtattgcaaatgcaatttttatgccataattatttttaaattttaataatacatttaggtttgcattcatgtagggtgttcataggttgctaagtacttttacgtcatctcgtgttattctkacaacagtgttgtgaggaaggcagggaaagttactgtgatttccattttgcaggtaaagaaaagtctctgaaagattaaatgatttttctg

SEQ ID NO: 832714 - DNA, 636 bp, Homo sapiens
ttacttaagttcacatgtggactataaactccttgaagacaagaatcacttgcacacactttgcaataagtgtatgctgataaatcaattaattgataaaagcaattgaaaaaactggaagattgttcctctaatccaacatttataaagattacagtcaacccattggagatatttcaaatccagagaccctctccaaaataagccaggcctctctatcttccctgaatccaaacagctttcccttctacacgaagcctactgagccaaatcggtcagagcccagggccaaaacggtctttctagaaaaccaaatcagggcggggcatggtggctcatgcctgtaatgccagcactttgggagtctgaggagggtggatcacttgaggtcaggagttcaagaccagcctagccaacatggtgaaaccccgtctctactaaaaataaaaaattagccgggcatggtggcgggcgccgttaatctcagctactcaggaggcttaggcaggagaatcgcttgaatctgggaggcggaggtggcagtgagcccagatggtgccactgcactccagcctgggtgacagaagaaggrgtgtgaaggagactagcaaaacagaaaaacagaaataggcccaa

SEQ ID NO: 832715 - DNA, 612 bp, Homo sapiens
tgattttttcttactaggttgcttgggttacaagatctggcaaaaccgagctggcagaaccaattgccattcgtcctactagtgaaacaggtgagaataggcattggagtgcaggagaatgctcactgaacgttagagacagcctctaaagttgagtctcagcttttgctttgtgatagctataatctctgttgacgatataacatttcatgaatgttgatgaagattgaatgcaaacttaagttgtctagagttttattctctaatattcattgtagagctccttatcattaaattataggatttttaatttaaatactcatttttatgctgtaaatttttaggacttttcaaggagttttattcttagaataatttttattgttggaattgattatagtattgcaaatgcaatttttatgccataattatttttaaattttaataatacatttaggtttgcattcatgtagggtgttcataggttgctaagtacttttacgtcatctcgtgttattctkacaacagtgttgtgaggaaggcagggaaagttactgtgatttccattttgcaggtaaagaaaagtctctgaaagattaaatgatttttctg

SEQ ID NO: 832716 - DNA, 643 bp, Homo sapiens
ctgtataaattcacagatgtataatactcgagaaaccacttaaggtaactaacttacattttcaaactgggaagagctaattatgaatggatctttgtatgtgactaccaactgacatgttcaattgatatcaatttttaattttccagattaacccatttcttccttattttcatttcattaaatgttactacctaccacactgtttaaactaaaaattttacaatctatttcacttctctatttctttaatattatttatcaatatatttttctcaaaccctgttaactcttccttcaaaatatcccaattggatccttctcactaccatcttgttaccccctggcctactctaatagccccctgcaaaatctctccactcatcttctggcctctaataatgttctttcatgaagtagcccaaatgatcttttgaaaatcttattaatatcataccactcctctactcaaaaaccccatggtggatttatattctgcactcaatgaaatggaatctttctaccttggcctacaagaccctagatgacctggatccaggctacctccccaaatccatcccttacaattgtccacwtttatactgctccagacagtttcgatattcaccaaatatacaatgtg

SEQ ID NO: 832717 - DNA, 592 bp, Homo sapiens
tggtggatttatattctgcactcaatgaaatggaatctttctaccttggcctacaagaccctagatgacctggatccaggctacctccccaaatccatcccttacaattgtccacatttatactgctccagacagtttcgatattcaccaaatatacaatgtgcttttccatatccttaatttaatctattttttgtagacacttatttcagagattagaagccacttacttctaaaataatggtcaatattgtggaaatgtgtattgtaagtgtaatcttttatttattcattcaattgaaaaatgtttatatgacacctacattgtgttatgcctctcaaataaagtagactcccagccatcacagaatgttcacaaactcattcagggttagggtttagaccaaaagtgattatcagaggagaaatattagtgctaaccaaggaatcatcttttcaccattagtcacctacttttccaaacagaattatasctcctgaggtgaaaagatacataataactctattttaatctattaatgataaatagtatataaatactggccaacagctttctaaattttcttctcaa

SEQ ID NO: 832718 - DNA, 502 bp, Homo sapiens
aaagaagctttctgagaaaatgctttgtggtgtgtgcatttatctcacagtgctaaaactttgtttggtttcagccgtttggagaaactgtttttgtccattctgtgaatggacatttgggagctctttgaggccaatggtgaaaaagcaaatatcccaggataaaaactagaaggaaactatctgagaaacagcattgtgatgtgctcattcatctcacagtgttaaaactttcttttcattcagtagtttggaaacactgttttgatagaatctgtgaagggatatttgaaagctcattgaggccataggtgaaaaagcctatatcccaggataaaaattagaaggaagttatcttacaaaccgctttgagatgtgtccattcatctcacagagttaaaccttttattcagcagtttggagamcatgtttttgtataatctgtgaagggatatctgtgattgcatggaatcctatgctgaaaaaggaaatatctttggat

SEQ ID NO: 832719 - DNA, 669 bp, Homo sapiens
ggactgagtaataatgttacagaatttgtcctcttgggcaacactcagtgtcctgatgtgcaaaatgcattatttgtcatggttttactcacatacgytgtgagtatggcgggaaacttgcttgctgtggtggctattatttccagcccttcctttggctccccaatgtacttcttcctcacagcctgttatttatatatgctgcatattccaataccatttctcccaaattgattataggcttactccatgataaaaagactattttcttcacagcatgcatggggcagctatttatagaccacttatttggtggtgctgaggtcttcctacttgtggggatgtcctacgatttctatgtggccatctctaagccactgcactatttgaccatcatgaatcaacaggtttgtatccttctgttggtggtggctgtgactggaggttttgtgagttgtgtgtttcaaattgttgttgtgtacactctctcgttctgtggccaaatgtcactgaccactttgtctgtgacatgtacccattattggaactggtttgcactgatacctactttataggtctcactgttgttgccaatggtctagcaatctgtatggtcgtcttcacccttctactaatctcctatggagtcatcctaaacaactttaaaac

SEQ ID NO: 832720 - DNA, 669 bp, Homo sapiens
ggactgagtaataatgttacagaatttgtcctcttgggcaacactcagtgtcctgatgtgcaaaatgcattatttgtcatggttttactcacatacgttgtgagtatggcgggaaacttgcttgctgtggtggctattatttccagcccttcctttggctccccaatgtacttcttcctcacagcctgttatttatatatgctgcatattccaataccatttctcccaaattgattataggcttactccatgataaaaagactattttcttcacagcatgcatggggcagctatttatagaccacttatttggtggtgctgaggtcttcctacttgtggggatgtcctacgatttctatgtggccatctctaagccactgcactatttgaccatcatgaatcaacaggtttgtatccttctgttggtggtggctgtgactggaggttttgtgagttgtgtgtttcaaattgttgttgtgtacactctctcgttctgtggccaaatgtcactgaccactttgtctgtgacatgtacccattattggaactggtktgcactgatacctactttataggtctcactgttgttgccaatggtctagcaatctgtatggtcgtcttcacccttctactaatctcctatggagtcatcctaaacaactttaaaac

SEQ ID NO: 832721 - DNA, 660 bp, Homo sapiens
gcatctgtttgatattcaagatctcaacctctatatccagaccgaatgtggatgggatccttgggtgcagtgtctattgtgcactttttaaattatggtttttctctatttacaaatccattgagacagtgtatttcttccacatgcccagcacataatggagaaagagaggaccaggcaattaaaatagatcctcctgttcacaagtgaagcctatggtgcttgctttagtacactcacaagcagcatactcacaaatatctttgaaactggcccttctcagacttgggctgaaagtctatgtgcagtgagctaatactcttaagaatgttagaattatgtttgtctagtttaaagtatatacgagagggtcttaacatccacaactttgaaatgacatttattttgatgacctttcttacctttagagtacttagctctttgcagagactggaaagggaaactagttctgtttctgaaaccggcaaattctggctctttcatgtttcttgtaaattctgtttgaaagtgtaacagttaatcttttgttattttttataacaaaatctaatgcctyatggtaagatacattgctataagaaacagtggtaacttatcatattctacttggaaattttagccaaaaccccctattctctt

SEQ ID NO: 832722 - DNA, 594 bp, Homo sapiens
actatattcgacaaaaacagtgtttccaaaatgttgaatgaaaagaaaggtttaactctgtgacattaattcacacatcacaaagcagtttctcagaaagcttctttctagtttttatctgaaaatatttcctttttcaccataggcctctaggtgctcccaaatataatatcgcagattctacaaaaacagtgtttccaaactgctgaataaaaagagcattttatgtcagagggatgaatgcacacaccacaaagcagtttctcagatagatcgcttcaggtttttttcctgagatactcggtttttccactttggcctatttaagctcccgtactgctgaatgaaaaggaaggtttaattctgtgagatgaatacacacatcacaatgtgatttgtgatgtgtgaattcacatcaaaatgcgatttctcaaatagcttccttctagtttttatattgggatatttrcttatttgccattggcctcaaagaactccctaatatcccttcacagattctgcaacaacagtgtttccaaactgctgatctaaggaaagttttaactgtgtgagatcaattcacacatcacaaag

SEQ ID NO: 832723 - DNA, 633 bp, Homo sapiens
gtgtccatgtccataaatggatagtcaggctgtattgaaccttgcaatcccaatcagaccctttgcaaaagaggaaaaagagtaggccatgtctcttgaactrgaaagaccaaagagcagcccagctgctgctcttccactcctgcccttgctctttctcctcacctctgtaaacattgtgagccaggggcttccttcttctggtatagtggcctgattttgcccttgtccttggctctttagtgttattgcatgtcaggctctctggtcaccagctgtacttaatgtgtgccacattcagacagttctattaatttatcttaggctgctttcctagtctgcctagatgctggggagcctactttctaatggttgtggtagatggaaggatgaatggatttctagaagttgaattactaagtcaaagaccataaatattttaagctcttatattatctgttagatacattaatagacctttttttttttttaaatggagtctcaccctgttgcccaggctggagtgcagtagtgccatcttgactcactgcaatctctgcctcctgggttcaagcagttctcctgcctcagcctcctgagtagctgggattacaggtgcctgtcaccatgcgc

SEQ ID NO: 832724 - DNA, 471 bp, Homo sapiens
gtactgatttacatttccaccaacagtgtacaagagttccttttctccacattctcatcaacacttacatatcttttttatagccattctagcagctatgaggtgatatctcattttggttttaacttgcatttccaaaatagagatgttgagcattttttcatgaatctgttggccattcgtatgtcctcttttgataaatgtaaattcagatcctttgcccattattaatagtttttttttttcaattgagttgagttctttatgcattttggatattagctccttatcagatatgtggtctgaaaatattttcttccaatccattggttgtctcttcactctgttgtttactccgctatgcagaaacactttagtttgatacaatcacwtttgtctatttttgctttagttgcttgtatttttatgttgtatctatgaaatcagtgccaaaaccaatgtcatgaagat

SEQ ID NO: 832725 - DNA, 593 bp, Homo sapiens
ttaagtttgaaatgctatgtcaccaggaacgactttcttcaagatatgtggaatttaaaggacaggagttgtacacaaaaaaggaacacccatgttcaatgccctgagttagtagattgcagcagtcatacttgaagcaagaattctccttcgaaatgtaatgaaagtgttagcaatacccatttagaacccaaacagactaggtaatgagcaatatgttaattagacaagaaggggccaggaagaggaggtgcttacttagtaggaaagaagcccttgaatccaaaatacctgagtgtttgtgattcagctcaagaatcttaatactcccttaaatgtatatgcaagaatacatttagaatacttacagaatatgggaggtaaaagcagcataattaatagtaactatctcctcttttcagagctgctaccagagagaggcacttgcttttttgctatggtcctggaatgttaattttgagtatccatataaaataaatctttaatraaaagatttctttatatcatcatgaaggtcaagtgaaagtcaacaaatgataatccaatatactaatgaaatttctttattagtg

SEQ ID NO: 832726 - DNA, 470 bp, Homo sapiens
tattagtccttcaactttgttatctttcaacattgtgttggtaagtctgttgttgtctctccaaataaactttagacatagtttacaaatattcacagaatgatttgctggaattttgactgggattgcactgaatgtagatcaaggtgggaagaactcacatcttgacaatattatatttttctcagtgaatatgaaatatccatttatttaattcattgatttctttcagcagtgtgttttatgtttcatcatatagatcttgtacataattttgttagatttattcctaagtgcatacctaagatatgcttaaggcataactcattttattgtgtttcactttattgcamttcacagatactgtgttttttacaattaagtgttcatgacaatcttccatcaagcaagtctattggtgccatttttgcaacagcatgtgctcacttcatgtctctctgtcatgtttt

SEQ ID NO: 832727 - DNA, 619 bp, Homo sapiens
aagaaacatagcaaggactgtctgtccagattcgtcttagcctctctgagaggtgtgacacttcttctcttcacaktcagggcagaacacctgtcacattagggtcttcaggggagaagggagggaggtcagagactcctgcttctgtgatttttttcaagttccttcaacttaaaatagtacactaaggtgccatcttttgggttattatgttctgagccccaacattaagattgtgaaatctgtgtgccattattattgttgttaatggtattactattaacaggtggaaaacttatattctatagttcagattcaacttatatttatcatctatgtgttccacatgatgggctttttgttttcatttaaaccactgtaactttgagtgaggaattttgtccctctctgtccagatgaataaatgaagttcaaaagattaagtgtgcttggatcacaaaactgcccagaggtagagttgggacgcaagctaaggtttcctaagtccaagactgaggcaaataatttacgaaatgccttcacctgattcatatataattagccaaacaacctgtactgcttaataatcgtaatatgaaaatgttcacattaacccata

SEQ ID NO: 832728 - DNA, 594 bp, Homo sapiens
tgctgctataaatgtgggagagtagatttctcttcaggatccttatttcagtaattttgggtgtatactaagagaggtgattgctagattatatgctagttctatttttaactttttaagaaacctctgtactattttacatagtggctgtaccattttacattcccattaacattgtgaaaggcatccaatttctccacacttccaggtttctcaacaccattcgttgaagaaactattttctccattttgttttcttggcactcttgcgcaggagcatttaaccaactgtgtgtggatttatttctgtgctctccattctgttcaatttttctatatatctgttcttctgccatatgattgctttcattacggtagatttggaaatcaagaactatgatcccttcagctttgctcttggctattcaatgtattttgtgggtccatataaatgttaggkttttttttctctttttctgtaaaaatgccaatgagattttgataaggatagcattaaatctgtgggttgctttgggtaatatggatattttaataatattgtttcccagtttatgaatatggaatttctttctg

SEQ ID NO: 832729 - DNA, 506 bp, Homo sapiens
gaaactggttatcagtgatagccaataaaatctcaggagttgggcttacagggagaaaaagcaaaacctcagaggtatgccaacatttaaaaccccaagtcaaagcgtcaagytgcatactagatttctcaagtcgcctgcttggccgtctttcaagtttagtttatttcctttcattcctgctctaaagctttttaataaactttcattcctgctctaaaacttgctcctctctctgcttctgcattatgcccctcagttggattcttctttcagaggggaaaaaatggcggttgctgctgactcatacggatgtggactcagtgcaggtaacatttccatatatttttgtcgtctctaatttctttcatcaatgctttatagttttcattgtgcatgcttttcatccccttggttaatcttactcttaattattttataattttgtatgtgagtttcatatgccgctactttactgaatttgcttactttagttttaacggtgt

SEQ ID NO: 832730 - DNA, 433 bp, Homo sapiens
tatgcttttaacaatactacattatttttttaatcagcagaagagatcatgaattagcttagagttttattatttaggattcgagcttcttagtctttcatatgtttcaactaattattacccctttttcttggacgtgtcaccataatcacatttctcagtttaaaattggggaagctttttgtagtgtctacaatttattttgaaatatatgacttactacttattcaagttttgtgtgggcaatttaggttaagcgataatccagagcagctaatatgctataaagaaagcagtatccacragcaatctgtcatccatttatcaatgaaaatccaatgttttgctaattactataatgaatgctcaaaaatggattttaaacagtaaaaataatagttttttgttatgatgagagtattagaaatggaat

SEQ ID NO: 832731 - DNA, 600 bp, Homo sapiens
aatacatgggcatatatataatgcatttattcagagcaaagtttctcctttacctctgctgatttcatttgagtttatagttgctgctcattatgttcagcakctgctttattaaatgaatcaataaatcagttatgaccatagagcatgagctagcaaaagagcaaaaattctaaagcttagggttgtgcatataaatcctactggtaaattctaatataacttagtagaaagagcactgcactaaactgagagtcaagggacttgaattttttagattaacacctgtcatggacttatttggcaagtcactttcaagtaaaataggaataaaagcagttatatataaatagtttccattcatttttctttgcaacagcatctcttcattttttctctaaggaaatgaaacaaatctctgttatatgaatcaggatcttcggaagaagatccagggatgagtaacctgctagttttcctttgacctatcttctactcctccataagacttcacaactcatcttaaagtatcacctgaggcaaatccatgggttcctatacattaaaattattttgtgaaaaccactgtcaacatgtaaa

SEQ ID NO: 832732 - DNA, 538 bp, Homo sapiens
gccaaatgtggtgcctcatgcctttgagaggacaaggtgggcagattgcttgaacccaggagttccagaccagcctggacaacatggtgaaaccctgtctctacaataaatataacaacaacaacaaatatcagcttggtgtggtggtgtacccccgcgaccccagctacttgggaagctgagctgggaggaccacttaaggccaggaagttgaggctgcagtgagctgtaattgtgccactgcactccagcctggacaaaagagtgagaccctacctcaaaaaaagggccatcaatatgtaaagccttattctaatgtaaaatatgataattataatttgattatacctaaccctcatatattctttaaacaagtcccatgcaagggaaaactgcccaataattaaaggcaccatatttttaagattgttttaaaaagaatatgtacattaaattcattggatccmgcttgtagtcattcatatttattcttgattatttatcaggcatgagtttcctaccaacttccaagatggtt

SEQ ID NO: 832733 - DNA, 551 bp, Homo sapiens
tgcgtgacctgcaagatcatacatgacgtagcatttagctgctacttcaagtgsatttgccaccattccccaccttgcttcctccattgaatatacattggccttcttttgtcttttaaacttgtcaagctgctctctgcttcaggaactttcacttgttcttcctccttccttgaataggctatccctaagatagccacacacttgccctctgattttgatttcttctctaaaattacctactcagagaggtcttctctgactaccctatataaaatgcatcactcttaccttcctcctttgctccatacttctttattgcattacattaccttgcattgcagtatgtatgtatgtgtttatttttgtctctgttctgtttctgttcattgtattttcagtacctaggtgtaaaagtaattgcagttcttgccattgaaagtaatggtaaaaaccacaattacttttgcaccaacctaatagaattatgtctgccatgtaatacaatttcaatatgtatttattgaatcaattaatgaataattattgaa

SEQ ID NO: 832734 - DNA, 625 bp, Homo sapiens
agcttaaaaagtggcttctggaaatggatcatgaaacaggagctttgagcatctgtcagtgaatggagtagaaaatagccattctattaatatgtttccttcctcctggcttacatatttcctagggtggagggaacacagaggctgtactgtagttggaaggatttggtgtagagaacacgaattacttcctctggcacaagtgattagtaaaaacataccccaatgtctccttgtgcctgggctgatgaagggacattatatccagaggagagggctgttagaagagtatggcctttagtcagatgaatttagattcaaatcctagctcttttgtttaccagctgtgtgacctagagtaagtttattaacctctcaggaacaaaattctttgatctgtcatatggcaatgttagcaaacaaactagactgttagggaattcatagttcactatatgctgaatcctcagaaaagtgcctcccacagagagggcatttggcaaatgctctagcatcctaagccctagcatcaccctcactcatctaaaatctctgtacaattgctggttgcctctcacaggccccatttrtatcctgcagggacacagccagatggaggcaggag

SEQ ID NO: 832735 - DNA, 571 bp, Homo sapiens
acttgcctagttaacttatcatggtgatactcaactcttcacctagtctctgtttaggcaaaaaacggcatacagctgtgctgactagtttcatttaaacttattaccaaaagatttaattaccgtcttagtaattctaactgcattttcccagtccagtgattctcaccagaatctgcaccaggatcacctggagggcgtgttaaaacacagatttctgcccgacattccaagggtgttagattcagtaggtctaccgttgggttaaaatctctaatttctaataagtttccaggtgatgctaatgctgtcagtttggagatcatacctggaaatccactatcctagttaattcactaccttattgttagtccaaactgcaccattttgtaaacttcccactattttgcagaccttggtcaaagtgaaacatttcacgggggttcaggctgtgagaaacatcctgcctaaccacctgaccacaaggcagacaaaggtccaactaaagcaacatccctatcatatyttgctgcgcaaaggtccattgaacaccacgatgacatcctacaga

SEQ ID NO: 832736 - DNA, 625 bp, Homo sapiens
aaaaacttgatgaatagcactaatgtctacaacattgatttacaactgtatatattggagagtgggtgaatgaaacttacaaaaaaaatcatatggataggtgatttctcagtattatcgtccttgatcttagaaaaatccagtatgaaaatacaaattattaaatcagatcaagtatgggttacttactcacagtgcatgaattatttaatttataaaaggattcagcttaggatctttttaaaactttgaatttcttaacacatctaaatatttatttacagatcatttaccaaagaattctgcaaactttgtgttgaaccttaggctaactcttaatacatacgactttgagtttttactgtaccttgcctatctgtgtgtctaggcaaaacatatacattaatccacggtttctctaggccaagctgtaaagggcccatggttagtcaaacccaagaaaaagaagactgaaatgcactgtataatcagaactgtgacattmattctgcagaataagaaattcagcctccagaacaggacaagagtggtctcttctgtgagatgtaaagccccagtttttctttcagcagtggctggtggggttttccaacaaaactcaatt

SEQ ID NO: 832737 - DNA, 569 bp, Homo sapiens
aacaagttctataggatcctaaaaaaatcctrtaaaaaatgtttctggaccaaacaagtagtgaatttacccaatttacttctcctctctgagcctcagtttatcatctgtgaaaattaagtattgaaatatttgacctcctcctaagctcctaccaggtctgacattctttgactctgtgacttcataaattaaatttgtttttccaccaatttatatgatttctttctatctgttttcattgtttgtatatgtatgtatgctaaatgtatcttcaatggcctggggcattcagtgtatattccacatcctcaaacagagtcaacctcaaatatagttataacaagtaatttgcaatctgatataatcatttaataatttaaacaggtatcctcacagtccccacagcaccttcccccagtaaataaatacgtaaaatcttcacggccctgaggcctgaaattatgctattccttggccaaagagtaggagaaagaaagaaaaaaaattttgattatctactatgtgctagatacttttacacagattaactcatttattcttcccaa

SEQ ID NO: 832738 - DNA, 582 bp, Homo sapiens
gagccctgttgattccactatgaaacaccatcgccaatctgtcccttactctctaccttcattgcctctsctctggttcaagccacctttatctctttgcctgagttattgccataacctcctgcctgcttccactctggtacacatcaaatccctttgctgcacaagcagttcccctgcttaaactcttccctggtctgccattgccctgagaatatgatgcaggatcctcatccagtggccctaccatctgttcattgcttgcagctcacctccattcatggttctcttcccaccagccccagccacaatggctttctctctgcctttctatatgcccaccatgttcttgctctagtactgttcttactccagtactgttaccactgcctggaacagcctccatccccaggctggctctttgttacactttatcctataagttcaagcttcagaaaggctttctctgaccattcaagacaagaaaattcctcacggtgttctcctctttcccctgtggcacttaccagacattaagttgtgcatctaaccagactttcacttgttcaatatctatcttga

SEQ ID NO: 832739 - DNA, 582 bp, Homo sapiens
gagccctgttgattccactatgaaacaccatcgccaatctgtcccttactctctaccttcattgcctctcctctggttcaagccacctttatctctttgcctgagttattgccataacctcctgcctgcttccactctggtacacatcaaatccctttgctgcacaagcagttcccctgcttaaactcttccctggtctgccattgccctgagaatatgatgcaggatcctcatccagtggccctaccatctgttcattgcttgcagctcacctccattcatggttctcttcccaccagccccagccacaatggctttctctctgcctttctatatgcccaccatgttcttgctctagtactgttcttactccagtactgttaccactgcctggaacagcctccatccccaggctggctctttgttacactttatcctataagttcaagcttcagaaaggctttctctgaccattcaagacaagaaaattcctcacggtrttctcctctttcccctgtggcacttaccagacattaagttgtgcatctaaccagactttcacttgttcaatatctatcttga

SEQ ID NO: 832740 - DNA, 564 bp, Homo sapiens
cactttgggaggccaaggcaagtggataacctgaggtcaggagctcgagaccaacctggccaacatcgtgaaaycccatctctactaaaaatacaaaaattagctgggcgtggtggtgcatgcctgtaattccagctactcaggaggcagagacaggagaattgcttgaacctgggaggcggaggctgcagtgagccgagatggtgccactgcactccagcctgagtgacagagcaagactccgtctaaaaaaaaaaaaaaaaactttagcaaaaattgaacagaaatctgagaaaagtgagcagccagccacgtcccttcatcatgggcaagagttccagagaggggtaacagccaacgaagaccccacaccagtagtgggctcaaaaagtggtaaaaaggctggagtgatgaagaggagaattataggagatgagatcaggcaggaaggggccagagcacatgaaacctcacagactgctgtaaggatttgggtcatacaaggtatcttacccagccacatggagttaaattagatattaatagcagaaaaatccctggaca

SEQ ID NO: 832741 - DNA, 564 bp, Homo sapiens
cactttgggaggccaaggcaagtggataacctgaggtcaggagctcgagaccaacctggccaacatcgtgaaatcccatctytactaaaaatacaaaaattagctgggcgtggtggtgcatgcctgtaattccagctactcaggaggcagagacaggagaattgcttgaacctgggaggcggaggctgcagtgagccgagatggtgccactgcactccagcctgagtgacagagcaagactccgtctaaaaaaaaaaaaaaaaactttagcaaaaattgaacagaaatctgagaaaagtgagcagccagccacgtcccttcatcatgggcaagagttccagagaggggtaacagccaacgaagaccccacaccagtagtgggctcaaaaagtggtaaaaaggctggagtgatgaagaggagaattataggagatgagatcaggcaggaaggggccagagcacatgaaacctcacagactgctgtaaggatttgggtcatacaaggtatcttacccagccacatggagttaaattagatattaatagcagaaaaatccctggaca

SEQ ID NO: 832742 - DNA, 440 bp, Homo sapiens
agtcagtacatgcaaggtgtatatcgatttggtctgaaaaggccggaaaaccggaagtggaggattccaggtcataggtagattcaaagattttctgattggcagttggttgaaacagttaaattattgtctaaagacttagaatcaatagaaaggaatgtctgggtcaagataaggggttgtggagaccaagggtttatcacgcagatgaagcctccaggtagcagactacagagagagtagattgtgaatgtttcttatcagacttaaagagtctgtcctatcagtagttcaaaaaaggaggagggtataatgaggcatgtctggcttccccttccccttatgacctgaactagtttttcaggttaactttggaatgcccttggctgagaagaggggtctgttcctatcgggkggcttagaattttatttttggttta

SEQ ID NO: 832743 - DNA, 632 bp, Homo sapiens
cttcttcctctaattctttcagggagattcttcctcggcttcagataccttcctcttatttgtgggctttttaatatttcactgtatactgaaggagaccctgcacattttctaagtttttttccataggtagcattttgctctctggtattctgtcttgtaaggactctagccactttggcttcttgaagtgtcaacttattctcctcaatttggcaaatccctgggcttcacttgagttccacctcccttatctctggcctagaaattcattcaatgaagtaatatggggcatttgtttccatgttttcagatatcactcacctttgttgtctaatatccagtgtcttgaaagccattgcttgctatattttttcttgtttcttggttgtttgaaatggaagaataaatcctgtcttttttactatcttagtcttatatttaacaattttcatttttctctatccatatcagatttcatatgttgcctttaattttcatctcaaaatagctcatgttctgtttgttgttgtgtaggctttggatataatctttctcttggattactatgtaaaagtagcagtccagtttctgttytatgtaattatttggaattttattataggcaaaat

SEQ ID NO: 832744 - DNA, 632 bp, Homo sapiens
tagtcaattgattttcaacaaaatawcaaaactaatttaatagagataatatattttcaaaatgtttatggaacaattgaatatgctgatcctgaatctttttgtcataaaatatacaaaagttaaatagaaattaaatagaagtggtttatagaacaatatatgagcataaaatataaaatatctattcatagaaaaataaaacataaattattggtaactttgtttagtgaaaaaggttttatacaataattttttttatgaaaagaacaaaccacaaatgaaaaaagaatggtgctatggacctcatcaaagcaaacaaaaaaaaaacttcttcaaaagatcattttcaaaatacttagtgaatgacttatatccagaatatataggaatcacttataaaatataatgcaaaaagaaaccctatgttatataaatagaaaaaaaagattgactagatgtttcccaaaggagatatgcaaatggctattgatctcattaaatgttgattaacatcagtggtttcagagaaaacaaaagtgaaatacagactctcaaatagtgtttcattgaatgtccttttattataatattgataatgaataaaaaattgctcataagaaggggccacc

SEQ ID NO: 832745 - DNA, 634 bp, Homo sapiens
actgccaggagtggctctacccacctgtgaccccaaactcgtctcagcaggtaaataattaccttacttgtttttattaatctgtcttamatgtatgcatcactcacatttatttcaaagtttaatattagaagagtttttgtcttcatttagaagtttggtggtggtgttttcatgaccagaaatatactatagaaacttaactctggtttatattaattagcttatggtaaaattgatttcctataggtcatttcacttaaagttacagttttcaaggatctattgagggtattaagagatgacttactgtttactgcacaaacacagtaattgctaaaatttaataagactaataaaaccaagtgtggggacgttatgcagagaaactgaaagcattgtactatacaggtgggcatgtaaaatggttatactttggaatactatttatctttccacataaatttaatcatacacataccttatgatttaataactccacttttaggattatgctcaacaaataagaaaacatgttcataacgatttgtacaataatatttttgtataattatttatcatatccaaacttaagaaccatccgaatggccataaatagagagtaaacaattgc

SEQ ID NO: 832746 - DNA, 627 bp, Homo sapiens
cggtaagcaagctgtagacgaagggatccaaaggcttagggakattgggatggtggagttgatttgtcattttagacctacttatcccatctgggaggcttcagaagatatacccttgaccaatgccttgcaaaatagatctgtgaggacagcacctgaatctttgaagagctctgtaattgctcttctctgtatatcaaatctaacagtggaaactgcagtcactcaactacaaaattgaaatacaataggaataattggatcttgaggtgggaggggccaagtggtggcactcaactatcaaaggcaagttgggtgtagctaccgtaatggatagcagaggcaaagcagcaatcagaatagtctgacttgggtagagctctggcagtagctaattaatcatggtgtttctataagtgaaattgataggaagtttactgcattcctacttaatttatataagcaaaaaacttctacgtcgaattgacaaagggctaatttgaattataaaaacagtgaatcacagcccctcaatcaatttccagacttgagccagttcacatacccagaaccccttgaatgaaggggagtctgtgtccccttgagtaaggaccccactacactacc

SEQ ID NO: 832747 - DNA, 567 bp, Homo sapiens
gttgaataggagtggtgaacatgggcatctttggcttgttccagttgctgggagaaatgatttcaacttttgcccattcaatatgatgttgactgttggtttgatgtatatggcttttactattttttaagtatgttccctcagtgcctagtttgttaacagtttttatcatgaagagatgatgagttttgtcaaaagctttttccacatgtattaaaatgattatatgttttttgtttgtttgtttgtttttgagatggagtctcactctgttgtgcaggctggagtgcagtggcacaatcttggctcactgcaacttctgcctcccaggttcaagagatcctccaatcctcctctctcagctcccctagtagctgggattacaggcatgcgccaccatgcccagctaatttttgtatttttagtagagacagggtttcgccatggtggccaggctggtctcgaactcctgacctcaggtaattcacccgcctcagcctcccaragtgctgggattacaggcgtgagccaccacacccagccttttgtttttaattgtgttatgcc

SEQ ID NO: 832748 - DNA, 567 bp, Homo sapiens
gttgaataggagtggtgaacatgggcatctttggcttgttccagttgctgggagaaatgatttcaacttttgcccattcaatatgatgttgactgttggtttgatgtatatggcttttactattttttaagtatgttccctcagtgcctagtttgttaacagtttttatcatgaagagatgatgagttttgtcaaaagctttttccacatgtattaaaatgattatatgttttttgtttgtttgtttgtttttgagatggagtctcactctgttgtgcaggctggagtgcagtggcacaatcttggctcactgcaacttctgcctcccaggttcaagagatcctccaatcctcctctctcagctcccctagtagctgggattacaggcatgcgccaccatgcccagctaatttttgtatttttagtagagacagggtttcgccatggtggccaggctggtctcgaactcctgacctcaggtaattcacccgcctcagcctcccagagtgctgggattacaggcgtgagccaccacrcccagccttttgtttttaattgtgttatgcc

SEQ ID NO: 832749 - DNA, 646 bp, Homo sapiens
acctgccctcctcttgttccttagaataagaatctaattaactggctttattcctagacagacatagttgtgactgtgtttcattgattttggacagcaaacatacttggatgaacctacagtcattttgagaaaagagcatggtctgtaaagactgagcatggtcaagtgaggaaacaaagttactatttacagagtttggggtgaaaatgcacaaccgatgatatcaaaatcatactttataaatggtggtatttgtttttaatgttatcacttaatagacctactcactcacagcataatacaaatctattattcttgcagaattataaagtaatatagtattaaaagcattttagaagcttatatttcttgatgagactcatcactttttaaaaaaagttgtggccctcagcttcaaatcctgataatcgggaactcagcgtattggggactagaaggtattataatttccctttttcataaaatataaagctgaattatctttctttcatcaccagcaattakatagatttgtgtaaatttacattgccacagcagtcacattgcccagctgagtttccagcaagtataaatatcattctcagaggcaatttatagtacagttcaaacagacatctttctc

SEQ ID NO: 832750 - DNA, 608 bp, Homo sapiens
gtttgaaaaacatttatttttagttgctagtatttaagcataaggggaatttacataaaacttgatttcttgttsttaaaaaaatcagaagaacccaacagcattgggctctgatttccccatggcagcagccagtgagagctgccccctttaggaggcagggcgctccagctgacccatttcctgggtacccccttctgaggccccaccatatcagttgccattactcaccatgcagagctgtgacttcccttgcacgcagcctgcttctctcgggtcagtaattgctgcctgctgtctgggcaactgagggggtccccttgtcccccacccccaggctgtgcagaataagatccctgggcaactgagggtgctccctgttccccccaccctctgtccctctgccccaggttgtgcagagggaggtccttggggtggaaccccagaaacttcccccagggtgaaatcacagtgtcatgatcttcacaacccaccctgctaccctgagaaccaacagaaggcaacagacgtgagcctggcccctgattcacagccccagtatctgcgggactggtccgggcaggaggacgaggctggacaagcatagg

SEQ ID NO: 832751 - DNA, 608 bp, Homo sapiens
gtttgaaaaacatttatttttagttgctagtatttaagcataaggggaatttacataaaacttgatttcttgttcttaaaaaaatcagaagaacccaacagcattgggctctgatttccccatggcagcagccagtgagagctgccccctttaggaggcagggcgctccagctgacccatttcctgggtacccccttctgaggccccaccatatcagttgccattactcaccatgcagagctgtgacttcccttgcacgcagcctgcttctctcgggtcagtaattgctgcctgctgtctgggcaactgagggggtccccttgtcccccacccccaggctgtgcagaataagatccctgggcaactgagggtgctccctgttccccccaccctctgtccctctgccccaggttgtgcagagggaggtccttggggtggaaccccagaaacttcccccagggtgaaatcacagtgtcaygatcttcacaacccaccctgctaccctgagaaccaacagaaggcaacagacgtgagcctggcccctgattcacagccccagtatctgcgggactggtccgggcaggaggacgaggctggacaagcatagg

SEQ ID NO: 832752 - DNA, 499 bp, Homo sapiens
ctgagctcatttcctctgcttatgctcaatgtcacaatgatgttgccgcctcwcccagcacctgccacttctctgcaactgtgcctgctattcccatattcccaaggggggcgggggtatccctgcctctggaggacagctgggtaggctccaccattcatactgcccactctcctgccctcagctttaaccctgaaacccagtggtgcctgaaagaccacagtggaggggtcgaggaaagggttagctctcaggacattccagaatcactaccggaagctcctgggggcctgcccaggggtgacccacagaatgtgagcccagcattcaggcaactctcatccatccacacatggttcactgctctgtggctttttcctggcaccctttaaatgacagacagctctcctgggccaccctggtccctctgccagccctctctgctgtgctagcaggaaatgcaagctcatctaatcctaacctgagcagagaatcctgt

SEQ ID NO: 832753 - DNA, 514 bp, Homo sapiens
acccagtggtcttgattaggctgttgggaccaggagaggtgacttgccaaagsgcacagaactcacaagggagccgggcggtgctggagcccaagtctcttgactcccaccccaaagatcttccccagataacacctcaatgggctcaccgccaggcactaggacaaccttctgatgtttgctaccatcttgcccaaattaagagctgggaaagagaagagggaaggaccttcctcccactgagcaattggtactaggtgccaccaggcagggggaacattacaaaactctgatccaagagctgctcagagtcaaaatggtcccagggtggggtggtcttgcggtacatgaaactccagcaaaatttcttcaaataatggctttaaaataaatgatggttttggccaggtgtggtggctcatgcctgtaatcccagcactttgggaggctgaggtaggtggatcacctgaggtcaggagtttgagaccagcctggccaacatggtgaaacccca

SEQ ID NO: 832754 - DNA, 514 bp, Homo sapiens
acccagtggtcttgattaggctgttgggaccaggagaggtgacttgccaaagcscacagaactcacaagggagccgggcggtgctggagcccaagtctcttgactcccaccccaaagatcttccccagataacacctcaatgggctcaccgccaggcactaggacaaccttctgatgtttgctaccatcttgcccaaattaagagctgggaaagagaagagggaaggaccttcctcccactgagcaattggtactaggtgccaccaggcagggggaacattacaaaactctgatccaagagctgctcagagtcaaaatggtcccagggtggggtggtcttgcggtacatgaaactccagcaaaatttcttcaaataatggctttaaaataaatgatggttttggccaggtgtggtggctcatgcctgtaatcccagcactttgggaggctgaggtaggtggatcacctgaggtcaggagtttgagaccagcctggccaacatggtgaaacccca

SEQ ID NO: 832755 - DNA, 426 bp, Homo sapiens
ggccaacattccacagcctggcaccccaactggccaacttgggtggaataaacaggtgcaggccctggttgggagaagcacgyagtggtctcctggccaactcagcagccggcaccagagggccagggagggaccatctggagtggggagagagccagccccgcatgcatcctccggccacacagcagatctgagcagctagatgtattcgctatatgcaactgcgattattagcatgtgattaaggcaggagcggtggtaatgtcttccaggagctactagaattattaactctctgctattgggatgattagtgcccagctacctcgaagtattaacaattcatcactgggatgtttccatattccccattagaagtactagctaccgagatgcctggtggcgtcccattatgattgttatttg

SEQ ID NO: 832756 - DNA, 659 bp, Homo sapiens
ccagcacttttggaggttgaggtgggtggattgcttgagctcaggagtttgagaccagcctgggcaacatgacagaaccctgtctctacaaaagaaaaagtacaaaatatgtagctgggcatggtggcgcacacctgtagtctcagctactcaggagggtgaggtgggaggatcgcttgagcccaggaggccaaggctatagtgagctacgattgcagcactgcactccagcctgggcaacagagcaagaccctgtctccaaaaaaaaaaaaggggcggggctgggggggacgttaagcttggaaaccacagaagctgctttccttttgttcccagatagctgcagtttcacaaccctgttgacacagggtttcctttgctccccttagacgtactgagtaggagacaatgcatcattgactttttcttctattccctttcacatgtaaaatgtagacttacagacactaaatcagagcctcacacgcttgtgacctcaatgcctttcctccctctctccctcttcttttcctttcctgcttgctttttctcttttaaatacrgaagttcccaaaacctttttggaaaaaaggtgatttttccccggtggatcctcaaccttggctaactaaacctctatttgattgagatctgcctta

SEQ ID NO: 832757 - DNA, 603 bp, Homo sapiens
tgtctatgaactgactataattaattttgtgtgtaatgtcaggtcataggtcagattttagtttctccctgtggatattcaataccctggaatattttaataaaaatccaattttcccccattcagcaacttaaatatatgcttatatatgcatacgtctgttttttaagttattggctatttattctatctctgtgcaaataccacactcttattattaagagagtctattcaagaattttctctctagagattgttctttctcttcttttttaagagataattttgttctgtcacaccaactggggtacagtggcacaaacacagaacacattctgtgtgtgagctgctggactcaagtgatcctccccacgcagtctcctgagtagctggcactacaggtgcaagccaccatgcccggctaatttttaacttttttagtggagaggaggtctctctttgttgcccaggctgatctagaactcctggccttaagcaatccaccctccttagtctcccaaagtrtaggaattgcaagcgtgatccattgtgcctggcccagggcctgttctttttaaccactgagctgctctataatgaggt

SEQ ID NO: 832758 - DNA, 547 bp, Homo sapiens
cccccttgctactctggcaaactctacttttggacacttggatattgaaattagttttcctgtatccttgggaaaatactaagtgaagaagaaactcatacaattcataatttaggactttgaaatttcaccaatagttttacactccaggaaggttgaattacatgaatatgaagtaatgatgttaaatatatgagccattcatccattgaactacaactcctaatcaggctacagtgtggagacagcatgttggaatgtttgtctcatattgtggtctaagacttgggtttgtttgcaatgacatctttttttagaattgtggtggcctttgtgaatttagttgcttagtatattgtgggaaatcatgccttccatgctgttaaagcacttgtttgggcactcagtgctcagcactmtgtcctttccatgccaatatggcagtagagttttgtgtatattgcctgttttcctttaaacttgagaactcagaaccaccataaaggcaatagtcttggctttgtctatgtctgtgtgagtgcagcat

SEQ ID NO: 832759 - DNA, 614 bp, Homo sapiens
aaaagtggaagaggaaagaactcaagcaaattccttcttccagacctattcatcctcctctctccctctgtagcttgggcttctgaacactctcttcagtgtgttatggcagggagagcraggcaaggagaaagacagcacaaaccccctgagctaaacccagggcctccacctctgccttcccgagtcccaacagtttccatctctgttattgatatcttcctgctgttttgtcccggccaaattgctctgtactgcctcttggtggcctttctaccaagtctgttgccatggctactacttttcctgactgacacctccaccatcagcttcatcatctatttggctacctgcttgcaggagttccttccaggcagtagagctttcattcaactccaatggactcctttaactcctctccattcctctgagcaatgtgaggaaagcttgtatggcttgagccacagtttatctttgcatttttattccctgtggcctcatccctgaaccaaatcctcatcatctcttttatgggccatgcagccatctgctaagtggattgcattaacttgtagaaacaaatagacctcaaaattctagtggcttaacataat

SEQ ID NO: 832760 - DNA, 602 bp, Homo sapiens
  misc_feature 53: n = A,T,C or G
tgaaatgaccaagtctggggtataattatcgggtaagtgactgaggcgacgangaggataagatcattaatcatcattacctgggtcttatgtccccagtaagtacttagaggagaagaaccatatcttaaaagtctgtacctttctcctcaagcatctagcacagtgcaatgggtttcacaagggctttgttaatttttgagacagagtctccctctgttgcccaggctggagtgccctggtgcaatcttggctcacttcaagctccgcctcctgggttcatgccattctcctgcctcagcctcccaagtagctgggactacagccacccaccactacacccggctaatttttttgtatgtatttatttatttttaatagagacagggtttcactgtgttaaccaggatgatctcgatctcctgacctcgtgatcagcccacctcagcctcccaaagtgctgggattacaggcrtgagccaccgcgcctggcctgggctttgttcatttttataagttgatattgaatgaaaagtttaacatcaacttataaacattgaggaattttaaaaattgggacaatgagactcaaattttctact

SEQ ID NO: 832761 - DNA, 563 bp, Homo sapiens
gattgcatccccaaccaatcagcagcacccattcctttgcccaccaaattactcttgaaaaactctagcctccaaattttcagggaggctgatttgggtaataataaaactctggtctcctgtttagctggctctatttgtattaaactctttctctactgcaattgccctatcttgataaatcagctttatctgagcagcaggcaagaagaacccattagacagttacagttctgtaaattttaacacaaacattgttcatgtaaccaccagtaggatcaccatctggatcagtttcaccacctaaaaagcttcctcataataccctactccatgacactaggaacagctactagttctccatcccaattgtttcatcttttgagaagtttatataaatggaattgtatagtataatcatcaattttaaaataaaatttcagatgtattcacattccataagtgtactctatgatgctgatatttatctttagcctcagcttatgccaaactaygcctttccatatatggccaaaatgtgtattcaatatacctctaactgg

SEQ ID NO: 832762 - DNA, 632 bp, Homo sapiens
tgatctcctttccctgatatttgttgagaacctgtctatttatcctaagcaaattaatgcaggaaaagaaaaccaaatattgcatgttctggcttagaagtgtgagctaaatgtgggggtatgcatgatcatgaaaatagaaacaataggcaatgagaactacttgagtctagagagaaggatgggagaaaggactgaaaaaaacagcctgttggatattttgctcaatacctgggtgatgggatcattagtaccccaaatctcagtatcatgcaatatagctatgcaacaaacccacatatgtacccccagaaactaaaataaaggctgatgtttttaacgaaaataaatgagtgaaagaaaaagaataaccctctacaggtctaacatgtctttccctatcatacaaaggagccacttgaatcttgagtttttaactgagtcttgtgggagtaggagagtgagattagaattatgttctcacactagttttctcattctggagtcatycctgaagggatttggaacctttgaatcactttgcaatgaatgtggagtcacaacaactggattctaatccttactcttttgcttattcttgctctgtctcctcagaataatcatttaacctc

SEQ ID NO: 832763 - DNA, 547 bp, Homo sapiens
tgaattgacttttaaacttytgaataattttttttctactatcagccatttcttgctgcataatagtttttatactataaaggtataacaaccagcttccctgtacttgtactttcaactggtgcattatgaccataggttacactcaacaaatgaccttagaattatttaatggttactcatgttattattaataaaaaacattgtataatgtcagcatctgtttcaatagtatccttggattatgtaatctgacctattgtctttagacacagatcctcactgaaagtgtaggcaccaagctttggaataacagggaaaggaagagactattcagagagaaatacaatgtaagagaatttggtattatagcaccaggtgatatagtgctattgtactgtattccatactcacaaaaaaatcaatgactcctcaagtgcatttatgaaagagaaaacaggatgaaaaagagaaaggaaagggatggaaataatcagctctattctccttctggcaggcaggagtccaactaagcaggtttcttagg

SEQ ID NO: 832764 - DNA, 539 bp, Homo sapiens
ttattccaaagggaaaaaatgagaaattggactacattaaaattagaaacatttgtttacagaaagccacaattaaatgagtgaaaaggcaaagcgatctgagatgatattgcaatgttcatgtctcaaaaatatacagaatatataaacaatgctaacgaagcaatagcataaaaacagcataactcattagaaaagtagtcaaaagatcaacatgtaagtcaacaaggaagatatggacctcttcgttattcattagggaaatgcaaattaaaatataaattcaacatgcattggaatgaaaggtagatgataaaatgagaagtagatgcaatgcaagtgttggagaacatgtagaacaattgcaagcttcataaattaccggcgaagtacaaatttctgcaactactttgacaaagtatattacttattaaagctaawtaggccacattttgtgacattgaagttctaagtgtatgcctagcaaaactgattaaatttgttcacccaagtgcatgaaaacaaatacctatgacagt

SEQ ID NO: 832765 - DNA, 361 bp, Homo sapiens
ccagaggagccagcatctccagttttagggagtccggtcacrctaaagaatgtcaggcttttgcaccctaggggttaacgacagcctggtgttctaagtcccagagctcgctgcaggatctccgaacccccagcctctgaagctttcacctgtcagcgttctgattaacaactggaaggccgacccctgttttctgatgggttccgtgtacacgctgtgcaaggctgtgaaggtggaaatgctattttcttttgccactgggaggtcaggagcacttaataagacccctggccccacctggctgggctttggatatgatttttaaatcaagtgaactatttttagggccctactcaaagct

SEQ ID NO: 832766 - DNA, 538 bp, Homo sapiens
tgcccaaaggccttctgttttcctgggtgaagaaggaggggtgctgagtgcaccaggatgggcaggtaggtcggaggcctgaggagcctggagtgggatgggcaagagcaggaatgatttcaggcactcgagggccagtgagcgtttgtggacctgacatgtccctactctggctggttagtggcttccaccccgtagaaacctctgcagtgattctgttctggtgctgccccctggcggaccctacccagcacaaggacagctcacacccaacactcaccgcttcctggggaaggcagactgcagaaggaaactgcctgggcatggaggctgcagggagggaggctggaggctgctgcagatggggcagtgcagaggagcagaggaggccctgggcagggtggcttccagagggaaagtcctctgtagcagatgtccccaggagggctgggtgggatctgagcctggcacagtgccctcctccccatctsgagctcagctgcctcccagaagcatgcacagcacatggctcttgggt

SEQ ID NO: 832767 - DNA, 538 bp, Homo sapiens
tgcccaaaggccttctgttttcctgggtgaagaaggaggggtgctgagtgcaccaggatgggcaggtaggtcggaggcctgaggagcctggagtgggatgggcaagagcaggaatgatttcaggcactcgagggccagtgagcgtttgtggacctgacatgtccctactctggctggttagtggcttccaccccgtagaaacctctgcagtgattctgttctggtgctgccccctggcggaccctacccagcacaaggacagctcacacccaacactcaccgcttcctggggaaggcagactgcagaaggaaactgcctgggcatggaggctgcagggagggaggctggaggctgctgcagatggggcagtgcagaggagcagaggaggccctgggcagggtggcttccagagggaaagtcctctgtagcagatgtccccaggagggctgggtgggatctgagcctggcacagtgccctcctccccatctcsagctcagctgcctcccagaagcatgcacagcacatggctcttgggt

SEQ ID NO: 832768 - DNA, 588 bp, Homo sapiens
ggggccaggtccaagtcccagttgacacctcagtgcctgagwgttctgcacaggacgctctcagaatctagaggctccaggctggggccaggtccaagtcccagttgacacctcagtgcctgagtgttctgcacaggacgctctcagaatctagaggctccaggctggggccaggtccaagtcccagttgacacactatctccagcccaggccagggcttccctggtaaatcaatctctgaaggcagtcatggtaccagcctcagttttatttatttatttatttatttatttatttatttagagaaggagtttcgctcttgttgcccaggctggagtacagtggtgtgatcgcagctcactgcaacctctgcctcttgggttcaagcgattctcctgcctcagcctcctgagtagctgagattacaggcgtgcaaccaccatgctcagctaatttttgtatcagcctcagtattattttaaaggaacttaaaatggttaaactttaaaatggggtgaaatgaggcagtccccaggatggccagacatttatggggctgtaaggttcccaatgtgatgcctgtccggg

SEQ ID NO: 832769 - DNA, 620 bp, Homo sapiens
cctgctgtcacgaattcattcttatttcatgttttacctgayacatgtctactcctctgaggaatggagcagctcagaaattcactgcttgatgcctactgtgtactgaataaatggagacattctgctcctggtatttgacaaatagaccaggaccaggagagagaagtgtgtttcctgcacgcatgttgaggccatctataaatagatttacatcaacccaaggttcagactctcagaaaacgggtttttctattgcatggctccatttggcctgacagtaggtatgaaccagctgatgctaagagatgtaattcaacagattatgaaggttgaagtcactaaaaatggaacttcctgttcttagctgggtgaaggccactatcaactaactgtggcaaattaggacccattaatctcatggtaacatttcattgttctcatttacactgaccccactcatgtcatgtagtgagtatcctttcatgataagggtatactccatgactatcatttcaaaaatgacaaaccaaacttcagcattctagtattttctttttaatatttttaaaaatgcttatgaatccaaaacaaaataaaaactaaaaaaaatccccaaa

SEQ ID NO: 832770 - DNA, 537 bp, Homo sapiens
gatgttagggtattgtttgatatttgtttaatgacactgttatgtatctaaaatrtatgttccctaaaagttgatgtttctgattctaaccatacctgtaacacagtcagatcatccattgccagggatgttcatctctgctgcctaaagcataggtatactgactctgtcaactcaaagtttagaagcaaagtaggtatcatttgtctgtatttccttaactaatttaaaagtgttaggaatcagcttggggataagtggcctttaataagtagcaacctatttgaaatctatgggaggcacagtgacaagtaaatttagagaacagatgtatgtgcagatatggagcaaattatcagcagggagccaagctctcatcaaaaggaggagacaaggaagataggcaacatcggggagaatcaacagcaagcctccatatggacaagaaccacactgggagaaatgagaagtaccaggccatcaatgagctgaatctgggacataggcatgagataaaaaaaaggacactttcatttg

SEQ ID NO: 832771 - DNA, 541 bp, Homo sapiens
caacggggaataaccctcaggcccccgtactattaaacagttactgctaatggttttttttttttttttttttttttttttggtgagacggagtctctgttgyccaggctggagtgcagtggcgcgatctctgctcactgcaagctccgcctcctgggttcacaccattctcctgcctcagcctcctgagtagctgggactacaggcgcccgttaccacgcccagctaattttttgtattttttagtagagacggggtttcaccatgttagccaggatggtctcgagttcctgacctcgtgatctgcctgcctcggccttccaaagtgctgggattacaggtgtgagccaccgcgcctggccactgctaattgttttctacaaatgcttgcacagagtgagctctgagtcaggtcaaaaaaaaagataaacgctaagaataaggcttttcagggaggtagcagacaggtcaaatagagacagttctctggggatgaggcttttggagagcttcaaccccattctgccctatccaggggctg

SEQ ID NO: 832772 - DNA, 274 bp, Homo sapiens
ctgcagaaatttgcataagtaacaagaagccaaatgttaatccccaggacaatggttaaaatgcctccagggcatgtctaaggtcttcacagcagcccctcccatcacaggcttggaggcctaggaggaaaatayggttttgtgggccaggctcagggtccctgtgctgtgtgcaatctacagacttggttctctgtgtcccagctgctccagccgtgactaaaaggggccaaggtacagctcagcctatggcttcagagggtgcaagccccaa

SEQ ID NO: 832773 - DNA, 631 bp, Homo sapiens
tttgtctagaaaattctaatttatctggaaaagcaaatgtgtaaaaaaaaaaagccaacataatttttttttwaaaaaaaaaggaagttcatgttccatgccagatattgcaatttatcagaaagttactttaacaattgaaaccatgtttaacgtcatcaaggttcactgtgggtatattcactaaaattggagcgtctgtttatagacatggggaaggaaaaatagcaaagctgattaagagcacagactttggaaaaggcagttttggtggctttgcttctgagactttggtcaaataacttaaaatgtctaaaccttggtttcctcacttgtgaaataaagttaataatgtgcacttacaaagttgttgcaagaatcaaatgagaagatgaatgtcaagccctcacccctgtacttgatagataggtaaggaatcattaaatggtggtgactttaattatttcactctgtctcccaggctggagtgcagtggtgcaatctcagctcactgcaacctcggcttactcggttcaagcaattcccctgcctcagcctcctgagtagctaggaccacaggtgtgagccaccacccaaggctaatttttgtacttttagtagagatagcatt

SEQ ID NO: 832774 - DNA, 623 bp, Homo sapiens
tatggcattagtacctctctctaatctctttagaacactttcttgcttgattccaacaacagtcctttgaggtaggaattattatccccattttctagttggaataataaggctctgagagaagaataaggctccatctggaaaatggggataatgattcctacctgtgacaataaaagcacatcaagtgtcagaaccaggatttggacccaaatctactatgctttaaaatctgtgttcttaagcaaccacactctactttccatcagcctaagatcagcacttagagagtaccacctatttcaggcactgagctgaatatagcctagtggatctaaatgctgaggctctgatgttctgacctgacacttatttaacccttacttaagtgttaaataaatggtagccaataaaatattaacctaattggtcttctctcaccctcttcacatgcacacatgcacacatgcacacacaccattctcatcccaccactcatgagttctgttggttcaaatcctggctctgccatttgtaagcagtgcagcttrgtgagtcacttcatttcttggcaccttaggtttctcactggtgaagcagtgatcacattgcttacatctcat

SEQ ID NO: 832775 - DNA, 580 bp, Homo sapiens
tgcaatgctattcttgaaaggaggtcatcaatcaggataaatcaggcaatgtagacaacctttagaagctggaaaatgcaacatcctaaagccttctgagggaacacggctcagctgataccttgactttagtctataatacctgttttggactcctgacattcctgaactatgaaataatatatttatgttgttttaagtcaataagtttgggtaatttgttatagcagcaatagaaaactacatacttagtttaaagtactcgcttagtctaataaaaccatattcaactatagtcactaataagactcctggatgtaaaaaactaatttaatgattgtcatttgctacagaaatacaagtaggcacttaatttatgtatgactaacaggtaagctcatagaaaacacctggatcccttctttactaaaggtctgtatttactttggctatgtaatgaggctttgatttgcttctctcttcccaaaatctgactaattgctgcyctccttaagaaattggaggagccagtattgctcttcttgtgtcacgttctaaggtcaaacagcctttgatcata

SEQ ID NO: 832776 - DNA, 562 bp, Homo sapiens
aagcagggttttttgtagtgagagaaaccataatgagattatggagtagactggacataagcaacacatttcrggtgtcactgtcttccatcacccccagatgggaccatctagttgcaggaaaacaagctcagggctcccacatattctgcattatgtgaattgtgtaattatttcatcatatattacaatgtaataatagtagtaacaaagtgcacaataaatgtagtgtgctcgaatcatcccctccccatccccgcagtctgtggaaaaatggtctttcatggaactggtccctgacaccaaaaaggttggggactgctgatgtagagattaaatttttttcatgtccactctaatgacgaaaacaagcaaattgatggagaaagtcatttcacaattttgttaccattttctaactttgcaaaccttcagcacactgattaatatctctaagcctcaatttttctcatctgtaaaataggtagattagtaactacctcataaagttttagaaggattgaatgagataatgccagtaaagcctttagcacaacacctg

SEQ ID NO: 832777 - DNA, 531 bp, Homo sapiens
acaaatgtataattctgaaacataaataaatcatatccaactcttactttaaaagcttcaattacagaattaaatacctacttatatgggatctgccttaggataagccagaattccaaatggtaatatgctctttgaaaagaaaatataagagaaagtttcctttcacagaaaaacatagaaaatgcataaagagaagcatccttattaatttttagtgcagtgttgaattttatggcttttagaatcatacactggttatatttaaccctcaaggatacaatacaaattaattatagctattgttcactaatgattttctctttaaataaaattattcgatggtctctctctcttcctctctctctctccctctcacacacacacatgcacacacacctttataatttatacattatgtaaatgtatacacatgtgtayatactgcttaagcaacaatctcagaaacaatatttatgaattcataaaaatttatgaattcattaaaaatgagtctaaactaattagaaa

SEQ ID NO: 832778 - DNA, 631 bp, Homo sapiens
aggttttcaatttactttgcccatatctatcaagagaatcactatctatggcagacatagccttacaacatatatttcttaaataatagacttaaaagtagagatttctcccagatccatgggctgcagaatggacgttgtgttagcaggcataaaaaggacattaatctccttctgcgtctccttcagagttcttaagtgactaggtcattgtcaatgagcagtaatatttcaaaagaaatatttctttctgagcaataattctcaagggcgggcttaaaatatttagtaagccatgcagtaagcagatgtgctatcttccaggctttgttgttgtatttgtagagcacaggcagagtacatttggcataatttttaaggacattagtatttttgaaatgccaaatgaccatttgctttaacttaaagtcaacagcttcattagctgctaataagagagacaccttttcctttgaagctttgaagccagatgttgatttctcctctctagctatgaaagtkgtagatggcatcttcttcaaatagaaggctgtttcatttacattgaaaatttgttgtttagtgtagcaaccttcattaataatcttagctacatctggtagataacttg

SEQ ID NO: 832779 - DNA, 484 bp, Homo sapiens
gtctttatgagcagcatgaaaatggactaatacaacacacataatagcactaccagaaagagaagaaaatgaagagaaaaaaatttgaaaaagtaatggctgaaaatttcccaaatcaaagagaaattagacaatactttgatataaataaaactgaagacacatcatatcaaaatgtatcaaatgcaattacagcaatacttagagggaaattgatagttacaactaactatatgcagaaaaaagaaagatctcaaatcaataatctaaacttctatcttaatacacaagaaaaagaagagaaaactaaattgaaagcaaagaaaacaataaatattagagcagaagttaatgaaatagataatagaaaaacaaacaaaaaaatcaatgaaaccaaagttgtttcttttaaatggtcaattaaaataacaaacttcycgcaggattgactaaaacaaacaaacaaacaaaatgagagaaagca

SEQ ID NO: 832780 - DNA, 612 bp, Homo sapiens
gaaatccaatataaaacgaagagaaattaatgccttacaagcaagtaattcattagtaattaatgtattatataaaagatagtttatattttgttctgccttgaacatattggtcctctttctttatactatcacagaataagatggcaacctcctcctcctctctcagtagtaccaaagataggtttttttttaaggtagttatcacagaagagactacagttagcttatattttatgactgtttctaccacagttgaaagtattgaaatttattctgactgtgatgattatgctcttttacacttttgggagccaagtaaactgtctacggttttaattatgctaaaaatattgaaatgaaaatgggaaaacaaatgtcacttttatcactatggataaatttcctgtgatttcacatggttcaccagaacatttatatttctcttttaaaatgctaaatttaggggaaatatctaattttttwaaaatatacagtcattcccagaactgaaaatctaaaaattcatgctaaattgactctcatagcaaattgacccttgtagtaaattgacctagaaaaacagatttcatggcctggtgaaaatgtaca

SEQ ID NO: 832781 - DNA, 612 bp, Homo sapiens
gaaatccaatataaaacgaagagaaattaatgccttacaagcaagtaattcattagtaattaatgtattatataaaagatagtttatattttgttctgccttgaacatattggtcctctttctttatactatcacagaataagatggcaacctcctcctcctctctcagtagtaccaaagataggtttttttttaaggtagttatcacagaagagactacagttagcttatattttatgactgtttctaccacagttgaaagtattgaaatttattctgactgtgatgattatgctcttttacacttttgggagccaagtaaactgtctacggttttaattatgctaaaaatattgaaatgaaaatgggaaaacaaatgtcacttttatcactatggataaatttcctgtgatttcacatggttcaccagaacatttatatttctcttttaaaatgctaaatttaggggaaatatctaatttttttaaaatatacagtcattcccagaactgaaaatctaaaaattcatgctaaattgactctcatagcaaattgacccttgtagtaaattgacctagaaaaacagawttcatggcctggtgaaaatgtaca

SEQ ID NO: 832782 - DNA, 601 bp, Homo sapiens
atagcaagatcctgtctctaaaaaaatttaaaaaatatatatataaaaatataatgtaaagttrcatttatcaagaacgtctagtgttggcaaatgaacaaataccagtagaccaacggaacagaagacagagcccagaaatagacccacataaatacagtcaactgatctttgacaaaggagcaagagcaatacaatggagcacagataatcttttcaacaaaccgtgctggaacaactagaaatccacatgcaaaaaaatgactctagacacagattttacacatttcacaaaaattaatttgaaatgaatcgcaaacctaaatttaaaacacaaaactataaaacttctagaaaataacgtagtagaaaatctacgtggccttgagtttggcaatgagttttaaaatacaatgtcaaaggtacgatctctgaaagaaaaaattgataagctagactttattaaaattaagatttctgctctgcaatagacactgtcaagaaaatggagagacaaaccacagactggcagaaaatatttgccaaagacatatctggtaaaggattattattgaaaacatactaagaactcttaaaactc

SEQ ID NO: 832783 - DNA, 544 bp, Homo sapiens
caatctgtcttttgtttacaggggtctcagccatgaacctagcaaggggtgaggaaaaaaattctcttctcccctccactacagtaaatcccctataggggagaaaacatgtcttttttcatccatcattatattcgtaactgagatctctataacacaagacatcaaaaagagaaaagcataaaagtttactttaaattttaaataacatggaagccttcataaggaaataaagacaagaagaaatgggtgaacctgtgtactttttaggctaggtttgatgaagaagcggatattcatggagagctatgaggggataaaaaagtatgatctaatggtaagaatctggaagaaacatagcaagtcatttgttcagattcttctctgtgtccctgtgtctccagagataaggatgtcctttttctccaggtrtagagtgggtacctctagaaagagggtcttatgacctgcttccagggaaggtcagagaatccttcctaagttttatgacctgtttctgggaagaagtgcaggaggaaagtga

SEQ ID NO: 832784 - DNA, 476 bp, Homo sapiens
cccggcgctagtgatcctttttttaaaaaaagtcagcagttcctgcgttctgctcaaaatcctgcactggctttccatttcactgtgagtaaaagccaaagtccttataatggtcaaaggccctataggatcccctccccgcgcccccacacccagccacactgacctttttactgttcctcgaagtcaacaagcattcttgactcagggcctttatgttgattgcttctgctggtcaacctgttcgtactccaggtattcccacagtttacttgctcaaggactttatctctttgctcaaatatcaccttctcagtgaggtccacactgtccaaattaaggtttcagcccctctctccycatatacacataatcttcctactttcctggtctcttttttcataacatttatcaccttcctacatgcaatgtaatttatttatttattatgtttattgtttactgtcttttcacac

SEQ ID NO: 832785 - DNA, 637 bp, Homo sapiens
aaaaagagggattcctctctaactaattttatgaggccagcatcatcctgataccaaagccgggcagagacacaaccaaaaaagagaattttagaccaatatccttcatgaacattgatgcaaaaatcgtcaataaaatcctgcaaaccgaatccagcagcacatcaaaaagcttatccaccatgatcaagtgggcttcatccctgggatgcaaggctggttccacatatgcaaatcaataaacgtaatccagcatataaacctaaccaaagacaaaaaccacatgattatctcaatagaagaagaaaaggcctttgacaaaattcaacagcccttcatgctaagaattctcaataaattaggtattgatgggaagtatctcaaaataataagagctatctatgacacacccacagccaatatcatactgaatgggcaaaaactggaagcattccttttgaaaactggcacacgacagggatatcctctgtcaccgctcctattcaacatagtgttgaagttctggccagggcaatcaggyaggagaaggaaacaaagggtattcaattaggagaagaggaagtaaaattgtccctgtttgcagatgacatgattgtatatctagaataccccattg

SEQ ID NO: 832786 - DNA, 692 bp, Homo sapiens
ttgaccaaaggtgtttcagtgcaattttattccttccagaggagttaaaaatgaggaaatataagagaaagagtgagctaatttgaactggtgatatctagcattttataaacactgtctttctttacagatagtgaatttagcagtccaaagaagaaaacagctgcttaccatgaaatgaaacaaaggcaattaagactataatggggtgttaacattgaagttataagcaggctccaaaatacaattgattgaaaattcaaaaaaggagtccctgattgccagttgcatatttataaaggaaatgagcctgaggaactgcttgataaatgtttgaccccctcaggcaggtaagactataaaaagggagaggtgcgaggtgattttctatttcttcacttcttgtgtagtgagaggagattttgaggaagccactatgtggttgggtacagggtctgaccgctgtctggggaatctacaaaaaaagaggagggctgcccaatgttttggtgctgttatcagaagaaaatttctctactggggttggactgtgttcccaaggcatgttggagcaaggaatacaaaatgacttcctaaggaccatacatgtgctaccaggagacagagtyagagatggatcatttttgattttgggagtgcaaagggatcccagcagcaagaatctgtaggtg

SEQ ID NO: 832787 - DNA, 545 bp, Homo sapiens
tgatgtgctttcctctcaacctagatttagggcatttttatgtgagataggattaaaaattccatttttgtacaaccactatggagaacagtttggcagttccycaaaaaactaaaaatagagctactatatgatctagtgatcccactgctgggtatatacctataagaaaggaaatcagtatatcaaagagatgtctgttcttttatgtttgttgcagcactgttcacaatagccaagatctggaagcaacccaagtctccatcaacatgggttttaaaaaaatgtggtactttaatacacaatggagtactattcagcaataaaaaagaatgagatcctgttatttgcaataacatggacagaactggaggtcattatgtcaaatgaaataagccaggcacagaaagccaaacatcacatattctcactcatatgtggggtctaaaaatcaaaacaatctgattcatggagctagagagtagagagctaattaccagaggtggggaagggtagtaggggcctggaggggaggtggagatggt

SEQ ID NO: 832788 - DNA, 545 bp, Homo sapiens
tgatgtgctttcctctcaacctagatttagggcatttttatgtgagataggattaaaaattccatttttgtacaaccactatggagaacagtttggcagttccccaaaaaactaaaaatagagctactatatgatctagtgatcccactgctgggtatatacctataagaaaggaaatcagtatatcaaagagatgtctgttcttttatgtttgttgcagcactgttcacaatagccaagatctggaagcaacccaagtctccatcaacatgggttttaaaaaaatgtggtactttaatacacaatggagtactattcagcaataaaaaagaatgagatcctgttatttgcaataacatggacagaactggaggtcattatgtcaaatgaaataagccaggcacagaaagccaaacatcacatattctcactcatatgtggggtctaaaaatcaaaacaatytgattcatggagctagagagtagagagctaattaccagaggtggggaagggtagtaggggcctggaggggaggtggagatggt

SEQ ID NO: 832789 - DNA, 515 bp, Homo sapiens
gacccagctgtgaaggacaattttaggatggttttttttttttcctgtctgsggttctgtgttcctcccctaccctattttagccaaaagaaaatgcaaatataaaacatgtttgagaagacaacagctttgctcctttgagtcttaaggaactacagaaatgccaccatgggaaacttagtgttttgacaagtgctgttactgagttaagggattaagaaaagacatgcacaagaagaaacttaaaatttgtccagaatgctcatggcatagtactttgacagctttgatagaatctcagggagatggagaagatgatgggcctttctatactgaatacaaagttactttcaacatggaaaaacctccggaaaaagagagagaaagcttttctgaatgacttttggtagtggaagaattcaaaaatgtgctgtctttagtcagatctaagcccatctgggccttggatcctgctgagcaggattcacagaagatggtgacctccctttcctgac

SEQ ID NO: 832790 - DNA, 496 bp, Homo sapiens
tatatatcttgtgcctcccatraggttataagtcatgaagaagtaaacttattgtgatctgatactctgtacccaaagtataaacacaatgtgattgttgccatctctgagatagtaacagtgtgagaaacttaagtcttggaagagacaggaggaaggctttagggaggcaacatatatgatttagaccttagatgaatagaggtttccaagtggggaaataacaggtgggttggcaagaaaaaacatgtcaggtaaagggaacaacatggacagaaaggggagtaaattttggaaatggaaattaaatagaaccagttggattctgcctgccaagtttgcagttactattccagctccctcctgcactgctttgagaacagtcaacaccccttctctctctactgtacaaccacaggcccctggagggcagggatcatgtcatctgtcacttcaacctcctttcttttatatggcctgagacatagttcacaca

SEQ ID NO: 832791 - DNA, 610 bp, Homo sapiens
tctggaaagtatggtagctatattttaattgtttgagaaactttcatgctgttttccataatggctgtgccaactgacatccccaccagcagagtacaagggttctctcttctccgcatccttgccaactcttayctcttgtccttttgatgttaaagacaacatgctatttactatgaaatcctctgcctctagaccccagagggaagaccctggtgacttgaaattgccttggcatggctcaatgaaatctgggatactcaggatctggccctagtccagagttggtttcctatttgtgtcatgaatagtcagtccagcaatggttaagagtcttaaaacagccagacagcccaggtttgaatcttatctctgcatttactatctatgagcccaggaaaagttattacatctctttgtgcctcactcttcctatctttgaaatggtgataatagtagtactagaaagtattgctttataagaacaacatgatgttaaatgagttaatatgcgtgatttatggaaaacaatactggcacatagtagacagtattactgctcagctgtgagttacatatgtgtgtatgtatatatacacatacacgtata

SEQ ID NO: 832792 - DNA, 521 bp, Homo sapiens
ataaatttttaattcaggacaagtcaactttaaaagaagcagaaataacagattccataaggcttaatttgtcacatgtattaggaacaaaataatatactaccttggcattatttttatattttaaagaattatacccatctgaaagagtttaataaggcatttcctagtatatctgactttttgtttctctatacattgaactaagacatactgattgctaagaaccttaagtatttaaaatatattttccccaaaaggtaaatttcctgccaaggtaacttacatcttgcactgtggaaaagttatttaagtgtattaaatgtgaaatagtcatctcaaatgcagtaaacaatttccactctgctttcagatacagaaaagaatacagcccatactcaattaattattaatggcatctatataaaacatgagtaaatgagttataagtaatttggatyactaaaaactcctttaatgttaacagaatcaccaattagaaaagctgagtagtaataaga

SEQ ID NO: 832793 - DNA, 617 bp, Homo sapiens
  misc_feature 31, 71, 102: n = A,T,C or G
aaaatgcaaataaaagggattatagtctgtngggtgatttttgctaataagattaacccagaaagaagaantcaattattgctaaatgttagttttggcaanaattatttrgaaatgattagtaagtgagatatatactgttcctcatgtccacttctatctttgactcctttatcccagtcctagataaactcaattcttcagataaagcaagttacatgaaggcagcttcacaattacatattttcactggcttctctctgctcaagaatcacaagaaatgcatcctaatagtccttatggtaatataggtagtatagcacatcttaaagtaaaccttgtccttaattaaaatggcttactaaccaataaccccctcccacatggcagaggttttttcctgtatttatttcctcaacctacaaaatgccaaaagcaacatcaaaaattagtcgtaaatagtataacagtcttatttttttttagtggtacatttattcaaatagggccaagtttttttgagtaaaagtgaaccataactgtgatataattttatgttactacattactctgtaattttggtccaatccagtgttttcaaattgtgctctgcaggg

SEQ ID NO: 832794 - DNA, 590 bp, Homo sapiens
tccctatctgctgtattcatacccttgtgtgtccacctcctacatgctaccaggatctgtgtgaccaatgacatatggtagaaatgatgggatgttayttccaagattgagctataaaagactgcagtttccatcttgggtgctttctcattcgttctctctcttggattactctctctgggggaagccagctgtcatgttttgaggtcactctaacagcctgtggagatgctcacatggtgaggaatagggacctgcctccaacagccagcaagaaattgaggcttgccaataatcaggtgaggaagctcggaaaaaaattctccagcctagttgatcctgtagctccagtaaatagtttgagtaccactttgtgagaaacattgagctagaattacctagttaaactgctcctggattcttgacccccagaaactgtgtgagataaatgtttgttgttttaagtagctaagttttagggtaatttgttacacagcaataaatagtacataactatgaacaggactgtaaggttcaaagggtgaagactttggtttattcttgaaatttcaccgcctaatgaagtgcct

SEQ ID NO: 832795 - DNA, 569 bp, Homo sapiens
acagattagaaagagcagctgatcttcagcctgggtgacagagcaagaccccatctctataatatatatatatatatataatatatatattttatatatwatatatatatataatatatatattttatatataaaatatatatattatatatataatatataaaatatatatatttatatatatattttatatatataatatatatatatatatatatcagattaggaaggcatggtggtgtgcacctgtagtcccagctactcaggaggctgaggaggtccaggagttcgaggctgcagcaagctacgactgtgccattgcactccagtctgggtgacagggagagatcctgtctctgaaaaaaaaggaggagaagaaagagcagccgatcctatcttcacatggcaggaaacaaggtcatgagcagtggccacacaggactgttttattttgatataatggaagtggcatgggaaaatgcgaaaagaaaggtcaccctgaatagctctagggaagaaaaagaatgttgggcatttcaacaaacagcattacagaaaagaagaagcag

SEQ ID NO: 832796 - DNA, 510 bp, Homo sapiens
ctagtacctccaaaaatatttcattttcctcctggggattttttttttttattawacagcatacttttcccatctctaacccaacacacagattttaacatttttgaaattagattgtttcacaattagaacacaaattaaatttaatcattttttctcttttttcccttcttctcctcctcttcccctttctcttcctccccttctttctcctcctccttttttatcctgcaaagttgtcattaaattgataatgtatctcagaattaaagaaaaacacaaaactcaaacataaacaacacaaccactaccaccacaaacaataactaacctgtcccaaaggcttggttgatgtgtaaatagatttgcatactgaaattggagaaagagaattttcaagtgttattactacttaatttcttttgagttcaggccctcttccaaggaataaatcataatttatctgtagcagctatgatccctgggtttccctggccaagggtgacagca

SEQ ID NO: 832797 - DNA, 638 bp, Homo sapiens; identical to SEQ ID NO: 820411

SEQ ID NO: 832798 - DNA, 494 bp, Homo sapiens
tgccctcccttcatctgtgcccatcagaatatcaaaggcccattttttagtctccaaaattttaaactcttagaagatggaaaccaagtatttcttttcacacccatcagtgggttatgggtggtaagcaccaagcacatgttgaatacataaatatctttcatcctctcttttcctctattcctacatataactaagagtgactgtatcccttagataaagaggccttccaattgtatgatactttagactttccaaaggttatggcgtagcagtcccaaacacctcatctgaagccaggctgtctgggttcccaccattgctgtgccagctgtgtgaccttggacaagttacataacctctctttgcctcagttttttcatcaacataaagggaagaataaaggtacttatttcataagagtttctagaaggattaaatatgttattcgtaaaatgctgaaaastatgtctagcacatagtgagcattatat
